United States Patent Application Publication US 2014/0057251 A1 - sequence listing, part 81

SEQ ID NO: 129147 - DNA, 1127 bp, Cannabis sativa
attcacctgtccttttaagttcatcgccattgatgaaaaatcattattaatcaaacagtgttcaattggccccttataaggaagttttatttttcattttatttacttcatccactttcttaatcagagccctcaccgaaaaaaaaaattggtggccttactgagttttcttttggttcgttgtatgctcttattatctttgttatattttcttcgagtcaccgccaccattttttcaaaactgagatcgtgttacataccatgactgaggcattagttcaacatcttcatcaaagggatatttggaatggaggaccatatgcaagtatgcggttagcttgcgagctataccttgagaggtattcctctaagagataaattcttcccaagttgaagtgggggagccgactaattcatatatttgaagaatcagcaaagtacaagtctcaagtgtaacaacttggacaaatgttgagtcttaagttgagcatttgactataatagactcaccattgagtttcatacagagtttctaaggaaactacatatgagactgaggttgtatatgcctacatggccatgacaagattcttgtcgaggtcagaagtggacagaaaactagccacccgcttaaaaccaagacctatgctagccagggcccccaagccttgagagggtcagccagggtcccacaactcagccaagaaccgaccagggctaccaaacctaagcatgaacatgctagcttcctagggtgaaaccctagagctggccaactcccatgattgaatcctagggtcagccatgtttcaaacaagacccctagggccagtcaaggttagttttgaatcgaaatgtgtggtttttttttttcaaaactcgaatgtgttcttcataactcaaagagttaggaataacaacaaaggccaaaatcgaatattttccatcaggaaatcacacattatgtattctaaaattgttatgcggatcaaagtaccaaaaagattacaatctaacgtgagaattaaaaagtttttaaacacttaaaaagcttaaaacttatcaatggcaggttcaaagaaagatgtcaaagaaaagaagatgaggcatatatggagagagaagat

SEQ ID NO: 129148 - DNA, 785 bp, Cannabis sativa
aaaaaaaaaaattggatccttcttgaaattgtggggtttctcttttctcttctatccaggatttttctattttaaaaatatatacaaattcctaacaaacaagattaaaaaaaaaaaaaaaaaaccttaaagtttctactataatcctacacatacttggtaattaaatattaaaaattatgttcatttaagaatcctaaagaaaattgggcagaactgaccctctttctacaatattttccaatttgataactatttaacaatgcaaaaaataatgaacataaattaggtaacaagataaaatagtcagaaaagcatttaacaatataataattgtcgctcatccgagaacctacttcactatggatgaatatctaagatatttagcatcctctaataattttataattagtaaaaatttagtggtcaataatgtacctctagctagcaatcaatgatcactgatattatttattttgttttccaaacacaattcacaacctaatatattaaatacaatttaaaaaagttaaaataaaaattaagtgagaatagtaacaagtaactaatacatatataactagtaactacatacttatattacgtgctaagtataatggtcttgaagcctcttggaaattaaaactaaatttaccacaaactcaccaaatagatctacaattaagtataaacaagcacaaataaaattatttacataatttatagactatagttactaacactttctcaatattaatatattagaacatttttaaaaactaatt

SEQ ID NO: 129149 - DNA, 1629 bp, Cannabis sativa
tagttgaagcgcttgaacccaaaacttatacttggcacgctatttctataagttaaatccagtaccagtaccaaggtatgggaacatggtgcatctatgacagtactactaataaaagtagctatcttcaaaatagctcgcttcatagtaagattcgctttgcctcatgcaaatgaattgatcacttcttaaactgacaggatgcgacgaagttgtccctaagttaagaggtccatcgctaaggtatgaatcctatactaaaaagtctagcaggtcattagaatagtaaggatcacttcagctaaggttggatgaagaaggaaatctacaattactatctcaaagtgtacttttttctttcaacttatctcatagtaatgtaattgtatttaatttgatgagaaaatgtgttgaacaaattttttttggtacttcatctaaattaatcagtcacaactcacagacctgacgacactcaaagtcctgagtaaagcttgtgatttggtcttgagataactctgattgtttcttaagtgagttcaacactgccacccacgaatcctcgaataagtggagagtgctcacacgtgtaacaccactcaagagtcatgattaagaaggcgtaggaagattcggtatggcaagtgaccagtgaaggaacttccttgatcacttggggggcacatatgttatgttatggtatacaagagccatatgttacacgagcattcaaattttttttgttgcacatctatgtaagtactctcatggtaaagataactttaagaagtagtgacattactctcaataattgagttttttaagacatggtgtactgtgcaagtgttaaatagtcaagcggtaacgaataaaataaaataaaaaaaaaataagttttggaataaaagttttattaagttagaaatcatttctaatttaattgaaacaaaattttaataatattttactaaggcttatccacatcgaaatgccacttaggaacaaccaactaacacagtaaagctaaatgctaaaaaaaaaagaatggactcaaagaaggtccttgaagtctattatgtcaacaacaacttcctacctgtcctcactctctgcaagaggcacatcaccagtaggaggagggaagtcaggatgctcaaggttgtagccttcaactcctgaagtctccccgaccaccagttcaccaccatttatagtgaagtcaattttcttgagagtgttttcaccaaaatacttctcacactccttgatgaagtcagacaccttttttgtcagggaagcccttccagttgaaagactagtattgtatatcaaactagctaagttccatatcccacttcagtagtctccttaaagatttcgacttttggaggacttgccaaaggggggtgattcgtatgtacctttattgcatgggcctaaaattgcaatcttaacttcttgaaagtaattaacaagaaataggaaatattttcaatcatcgagtatctggattgcatgcccaacaatcttttgctcacataatataccaaaagttgggcccatgggcctatgtaaccaagatcccaataagtagatcctacacaatgtggagaccatgggcctatgtaa

SEQ ID NO: 129150 - DNA, 680 bp, Cannabis sativa
  modified_base (621)..(629): a, c, t, g, unknown or other
attctgccctcttccatgccagcatcaagcagagaacaagacagaatcaaatcctttcaattgaaagggaagatggaataagagtgattgaacctgcacaggaagcaaatgctttcatttcatattataaatctcagtttggatccaagatggcagataggaggagggtttccagcaaggtgattatgaggggaactgttctgaatgattgacaggctacattattgacaaaggaatttagcaaggaagatgtgaagaaggctttacttgaggtccctgggaacaaaaccctaggtccagatgggtattctagtttcttttttcaagccaacagggatctagtaggggaagatttattcagagcggtaacttcttttctggaatcagggaagatactcagggaaatcaacacaactgtgctgacaatggtgcccaagatcaaataccttaacattgtcaaggattttagaccaatagcatgttgtaatgttgtgtacaagatcgcaactaagcttttgtgttataggatcaagctcatattacctgatgtggtctctacaaaccaaggagatttcattcaacgaaggtttatgttgggatacattttaccaggatctagannnnnnnnnaagtatgtttttaacatcctaatatgaatttctaaaacgatgaaaataaac

SEQ ID NO: 129151 - DNA, 786 bp, Cannabis sativa
tttatgattttgaaaagaaaaaatcaaaattgggtgaaaaaattacacaaaaatcgatttttgggctgaaaattggtggctgcaaaggaaggctgggtgcagcctatggcacgcgcgcaaggagtgactggcaacatccttcaccgagaaacctctgtcacatgcagggtccatgggcaagcatctggctgtgcatcgtgtctgaaccaagtggttgttcgtgcttcaaacagaattttctgcacaacatgtatgtgtggaactcatattgtccgaggatcctggtgcgacaagcaccatcctcgacaccacatgcacttgatttttcaaaccttcataactttctcgattttcatcgaaattgagttctgtaaaaacaaaagttgcttaatttttcacaaggattccaaataaattattacgaaatcagatacattcgtcaaataacaaataaactaacatgaacacatccaaatcaataaaataaacatattcatcgtttttaatccatatttcatgacagtaaattattaccattgctctgagacaagttgttgggaatattttaccaagatctagattaactaacaagtatgtttaattaacatcctaaatatgaatatctctaaaataatgaatttaaacacataagagtttagaaaaccttacattgactgaagcagaataatatgactcattctgcttagatatctaacccttgttcctttctgtcacgtattattatcatgatctgagcttggatctctttctctccttcgggtttgg

SEQ ID NO: 129152 - DNA, 915 bp, Cannabis sativa
gccgaaagtggatctcattgcttagttgcttcgaatagcttgtactgaaacaagactgttcgtctcaatttgaacatgttgccaattattagtctttacccaattgaaagtttttttaatccctatggcttcaatgacagtaagatgaactattgaatataaaggagtaagcaatatgagttttgtactaagttttttgtttgtagttttacttaatattttatttcttgagtaaatgactaattgattgacttggtcaagaaaattaaacatttcaatgcaattttgctctaatttaaactaagaaatattcactaacacaaattagaattgaaaacttcatattggtatgtaaatatgtttttgtagtttgaatttcacataggtttcaatgataaacgatctataatagaagaatatttttctattattaattccttatttttctccattatatatcatattacaaaacaaaagttgtgctactatattttattatgcatattttgaacaaaatgatcaaacttttaactatgacttggcataaataaagaagaacaccatcatcatcatcataccattataattagttagttaattaattaattaaggagatatgaatattatctaagatcatttttaatagagagctaaaaatgtagcaatatattttattatgtagttagtcaaatattgcacaaacttattttatgattcaaatttagtacaaattttaaatctttcgacgttagagttactttaattaataattaccatgtggtaaaatactatatacttaaaacatttacaatatataaataagtaattaaatctaaagtcaagagcaccagtggtctagtggtagaatagtaccctgccacggtacagacccgggttcgattcccggctggtgca

SEQ ID NO: 129153 - DNA, 1018 bp, Cannabis sativa
gcgatcatacctgtatggaagccagatttttcgaccctcacatggaaatagaaagcccggacaaagaggagtagcaatgtcatgccatactttgaaggtaaaatagccctttgacgcaatcttagggatatctgcattttggacagtaataatttgtcctgcaaaacaggccagtagttccatgttgccctgtgtaatcgatcggatgggtaggttcaagatacgtccactaagtggaaatttggtgagaaccttgtcccaatcttgcagcattccttcgaatttctccattattaagacaccattattaagataccataattcaggaaccatggattcttggcaagaattctattcaaatcttgagccgatttgaatgaaaacaccaagaagcttgcagattttgtcgtgcctttgatttcaacaccccagtttctttcggcaatcccccagactcgtcccaagatagtcttcaagagcgatcgactgatcggttgattggagcaccatcttcccatcgcacacatcgacgccacttccgatcctccagacccatttacttcccatccttcatcttccagtaccgtcagatttgttgttcgggcaagcagatcgtccatggtggtgtccgatggttccatgttcaaaggcttttccagcatttcaaagaggctcttctcgagagagagagcatttttttttaacattcttttagaaatgggatttttttacatcaacttttatggggttttttttatttcttaatgatcttaattttcattttttttatgaatattttttttctgtataattttttatacaatatgattctttcggtgaattattttgtgtattattatagaataataaatattgtggtataaaatttggcataggttatattttgtggtaaatttagcacaacttttagcatgcgctaaatttggaccactttatgtagtgaaaattacataaaatatgggattttgtaaaaaagttataaaaatatggcatttat

SEQ ID NO: 129154 - DNA, 707 bp, Cannabis sativa
  modified_base (26)..(42): a, c, t, g, unknown or other
ctttcttacagctctttattataatnnnnnnnnnnnnnnnnncgaaaacctcggtcaacaggtatcaagtgccttctagtggtttttgttctttacgcagagttgggcttgccttagcccttaccgtatgaggttggatacttctttaagctataattcgtttcaaagcaacactggtctgaatacttctattttagccagctgggctaccaatggttaggcaaccacaatagtaaggctatgtcgaaggttggaaggtacccttggaactacttcattgcctggggcatcaggtatgctagtcaacacttttagagggtgcccacatatactagctccatccctaacctccaattgagggatagggtaaaccacatcttgtctcttcctgtagaaaggcaggacatactcatgctagccaccaaggcaaatttcagaggtatgatctataccctcctgtgcctggtactgagagcattggaggcccttctaaaggtcctggtgacactcccatggtagagggatccagtcgagaggaaagggctacacttgagaaggagaagggtgagtctaatgacaacattcccatggcaaagatgttgggttttgtgccctaaataaaactcattttaatataatcagatgttgcatggttcacatgatttatttcatgattatgatcgtttattgtataaattttattaagt

SEQ ID NO: 129155 - DNA, 1640 bp, Cannabis sativa
tttggtgtaaaaatttcttattaaatagatagaattaatatttaaataactagagcagaaaaatagtattactaaagaaagataagtttgcttcattaagaaagcaaaaaaatattaaaaatgaactcatgggctttcataaaggggttcggacatgaagatgactttaagtcattggatctttcaaatcaacccatttagctctaatcctaatctaatgaatccctataaatataaaggattttgattgagatgatgaccttagactctctcttgtctgacaaaattgtatcaaagaaaacctagaattttctattcatttattcgaaattctctttttcttcactaaaattcgtggtcttttagtttgagaatatgctcacacatgctaaagcaatactccgcatagtgagaaagagtgtgcagttcataaatgagaatttaagtttagatcttgatcatactctgcaacaggaaaaattaaagtctagaaatctgaacggaatgaatcatattattgatttgtctgttaaggatttttgtttttctaaaaaaaagaaaaaaaaaaaagcaagaaaaaatagagctatggatttattctggaatacccgccaccacaccatagctatttagtccatataattagatcatagatattcagtgatttgcgttaattgttgtattaaacacaaacaaagactttaaggtcaatttcttattcctatgaaacatcaacttgttgaattagctgcaattctattataaatatgtcaacatagtctttgtcataaaaaaaaaaaaggaaaaaaaactaaaagatatgttaaaatagtatttggaaaataatgctaaagataatgttgaattgattttgaaaagaaatatgtgcagctagataaaagtggttcatttcaaggcccacttgacagtgacactccttaatgatgtgcatgaactttattataatccaagttcataaaagctgatttcaaaaaaaaaaaaaaaaagttcataaaagctaaagatggagtataattagactacttggcttagttaaataattttggacagaatataaggtgtaaataaagtcacttatcccctattaatttggagttctttatctatgtcccaaagctttttctcagctcttaagtggtcatgtatattcttttctgttatcattaagaataaatttctgaaaaggaacaatttcagcaacacgtatgtatgtatagttgaacaattgggttgtacataaattcataatgagaaaaatgttaaatgtattgagttttaacttgattgatgtggcaattttagctgtgcaaactaaaaaaaatggaaatctagtgaaactattatcaaataaataatctgatatcaaatttaaaaggacaactttaattaaaagaaaaaataatcatgtgacttgttgaattttttcaagatgtgtattactcaagtttcaaaaatcaaacaagtattctattataagagaaaggcccaattcagagatatatacatattcttggaatgggcccaaatcatataactatgttagtttatgtcttcatttcaaaaaaaatatagtaaatggccctaaatcataagactatgttaataaatgtcttcatttc

SEQ ID NO: 129156 - DNA, 1459 bp, Cannabis sativa
gcaattttagtaagtattgtatttaggaaaaaaaataatgggattttgtaagtatgaaaattcaaatttcccattccatatatacaatttgttatccttttcatgtatactttattaatttggacttacatcaattatttgtggttggccactcatcagaggtggtacttaggaagaaattacactttatactatttttatattgttttcttttatttttatcttattttttaatgtttatcatttttgttttttttttaaaaaatattgtaccaattttgcccttctcacttcaagatactctccatgtaattctcattatgtcagactacaatacatataaaaaaaggtatgtttcaaataaatataaaattaaaggtaaatttgattaactgattaataaaagggacatttttcactttacccacatatttaaataaaaatcataattcttgtttctataatatattacacatgtttcaaaaataacattttggaatggttcgccgcgtaaccaaacaattttcccattaatgaaattgaaagatatttagttggcatctttaatattattttatattattaagaatatttatagtataagtattttatgttatgagttttatacatttaaatattatatttatttttttgacgaattaaatactaaagtgacgtttagttaaaagaaattataaaaaatgaaaatatttagttggtatctttaatattaaggttattattattaagaatatttgtaggataaatattttatgttcaattttatatatttaaatattatatatatttttttttgatgaattaaatattaagtagacgtttgtttaggagaaataaaaatataagaataaaaattaaaataggaatggaatacaataaaatttaaaatgtataaaaattgattaaaaaaaaacgaataattagtatttttgtttcctaaactttcgacactacctgattttactttttaaaatatacggtttgttaaaaatttcctttaaaatataacagttacataattatatcatttctgttagatattgtttcttttactcgtaaaaattagtattttaacctcctaaactttgaccaatataaaatttttacaatttttttattaaaaaaattaattttaaaaatcataatattttatttttttaaaaagcaatcataatattctattaattttgaaaaaataagaaaaattattaaaatatttgataaaaatattaattttacttaaaaagaaacttaaattattcttgaaaaaatattttcaaattttattttatttataaacacgtatcataaaaatcaaacctaaattatcgagaatctaataaataatttaaataaactaaaattttttgaagaaaaaattaaacttatttatatttataaactcatatcttagcaaataaagaaaaataattaaaaa

SEQ ID NO: 129157 - DNA, 1255 bp, Cannabis sativa
ttaaatttagggtaccaaataggtttgattttaaaatacaggataccaaaataagcattattaaaaatacaagatactaaatttgtatttagataaaatacaggataccaaatgtgtaaacacccttaaatctaactaaaaactcaagatacaacccaaaaaaaacaagaacaaataagagtaaaagaatgcataaaataagcattcatcagctacaaattcacaatcgtgcaatctagttaatctaggtcatattctctatgataattaaaagtgaccttgacatgacttttaattataaaaattctaagatgacaatcaattaaagcatgaacatatttaaaagctcaaacaattattaacaattaaaaaaaaaatgaaatcgactttgaaattgcccttaacttaaattgcatatgcataaagttgagcagcttcagcaatattggcacttcatgcaaaagattgcagagtttctggtccttggaatgatttgtcaaatctatagaagcatttggcaactgtgtgtccgagtctatggcttagctgacactgaaccttttggccccaaggtgagtattgattcttgcaatgagaaaaagcacctctcttggattgttgagtgccacgagattgacctcctcgagtcgcagtagcaggagcttgtggaccaaatccagggagaaggtaatgagcagagtattgcatactgctattctgcatctggtttcctcgagacatagaattgaagccagtcttagtcgaatttgaaagataaggtgaagaaaaggtacatctaccaccagtgaatggtttagtatgtgcaagatttgcctcaggtttagagatatccagtttttgagctgatttttccaggcgaacctcttgtgtcataagtaaggcttcaatttcaacaacactgtagttatcagttcttgtgttgagtgatgtaatgaacacattgtagtcactagtaagaccattaaagatcgcctcaatgtgttcagagggagagatcatgtggccaatggatgctaaaagattgactaatcttttgattttgagaagataatcacccagggaaccttgcattttggcatttcgaagcagagtacggtactgtccaatattagctctgtttagagctgtgtaatactcttttaaggtgatacagatctgagatgtcgtgtcgcaccctaccattcgagtgagaattttcttagacatggacgataatagccaggagacgagtata

SEQ ID NO: 129158 - DNA, 961 bp, Cannabis sativa
agataatttgttaaaaaagaagaagttagaaatacaaggtggctttgtgtgtcatgtgactttcaggtttgaagattttgataactttttgcttcatctgtgagttctcggacattccctgaggttctatgaagactattcaatacgccaaaagattaaagtaccaaaagctataatttaaagtaaaaggcagcacaaagaagatgccactatgccaattgatcaaaatggctaaaattggagttggctacaaagtctagattcaccatggataaaggttccagcagtaacaatggtggccaagatgtttctctaatgccagtgggaaaaaaagctcaacgatctttgatttctacaaattagggatccccattactaccgggtaatcaaggtgttaacaatgtgtgaatgaataaggaaaatttagtgccagaccatggggagattgttaataaaggaaaatcccttgatataggggtattaaatgaggatgagctatttgtggtgccagttaaggaggtcttaaatgatgggattacttttcttgatcataaaagaagaagaatgtcccttgagaaggaacgtgggcgtatgggtgagaaagaggtggaagtggactttacaattcataataatcaaacatattcagatttgaaaatatctcatgttgttgtgaacgggttggtgggccaagaagattttttaaaatatctcatagtagagtcaggagaaataaataagttaggaaatttacttggtaaattttggatctacttattaggagcttggttacataagtccatggtccccacattatttgggacaacattatcttgtagactcaattacatggttttaattaatcaattagaaatctaaataagactatgtcttgtttgtgaattttcactaagcaagaacttatttgagaagaaagagaggatttagagtttatttatta

SEQ ID NO: 129159 - DNA, 1784 bp, Cannabis sativa
  modified_base (27)..(32): a, c, t, g, unknown or other
ttaacataaacaactgctaatttccannnnnnctaagcgggctttacaccacctcttcctctatgtcatccaatgtgatcttcactttcccctccttcttcgaactgttaaaatccgattccaagttacgcatcaccggttctgctcgaagaatcagaggcgtagctttaagtcccttcgagatagaattttggcattccctattcgcagctaggaaatagccaaaatcagcaactatctcatcttgtcgcttcaataatctcaaagtagaatccggagataccggaggctgatcatgaagcaacaaatctacccctgctctgtcatcttcctcatccaagaattccactggttcaacaccaagtatttcctccatggatttggtcttccttacatcagcagatgaattcgaacctttctttttggatttcttgttcgaaattttcgactttcccatagtcttggacctcattttcgccatggcaccaactcaggggagagttgcaaggaacgaagagagagagaagtggtactcgttattaaaagtgtgtaaattcttccatgatcattaactttatagaaaatgattgattagtatgctgttttgtttattgaaattagtgaaattgtaagtcgggctgcttaatatattatcactttctgcaatattttagttgtaattttagaggacatgggaaatatttcaagatggagaaagtctataatagaaagaattaacttgagacaaactactagccttatggaacttgtatatgggaagactacatcaaataatgaagaagagagtggtaaggaaagtgatggagatgagttctttaagtcgaaaggtatatggagcaagatttgtactgaacacaattttttttttgtgaagtcttctctacagttctttccctggcactttaacgtacaattcttgcatatgttttcctttataacaccaaacaacatgcattttactttttttctttgctttcgtgtttctctttatataatgatgtttccattttactttgtaatgcacattgtctaaaacattatttattgcattttgatttctaaggatttggtcactgtcgtggacaagatcaaattcaagcctaaattagagaacaaatggaagtaatttctttggccaagatgaaatttcatcactggggttgggtgagtaattcatcaagattaaatggtcatattattaatgtctgatatattaaagaaatgtacttgactgaactactttggtttaaggtcagaagcactacgtatagggcaagttccatttttaaaagttgtgacacatatggaatggaagatatataacatagattaccctaaattgggttaattaatactatttagtatattagtggtatatatcattgattactatattttgccaactcattactatatcccctagattaccctaaattgggttaattttttttagatttttttaacaataaattatgacacgtaaatttgcctgatgtataatcacaatttgtactatttacaatttcacattactatatttactttatttaaaattttcttttctaatataattgtaatctctttctgtaatacccctaagtgtattaatgattattatttctctaaataaaattacttgactaaattattcgatttttaatattgatctttttataccttcctatttaatgttttttagatttttttagatttgattttttatttcctatttaattttgtaaaatcatttttatatgtagcat

SEQ ID NO: 129160 - DNA, 866 bp, Cannabis sativa
  modified_base (27)..(40): a, c, t, g, unknown or other
gggattgcacagcttacccggtatttnnnnnnnnnnnnnncgggactactgactgtcacacggtcatgagtatgcccgaatccaaatcataacctataaaaatccttttataccttcacgaaagggcggcgaaaaactttgagtacgttttctttagactttctccttcacaaaaaagtaagggaaaactcataagcaaatcactgtagtcataaattagggttcttcaacttgtaagacctcattgtcatacattcttaagctcttctttaatttagtttttgaaaatctcataaacaattacatatatatactcataataattgaaagattcttgcagtcataaatgcaggataattttatagtaacattctaaaaagactgttatgatacaccatgtttattttggcatctatgaacactttttagttttttttttatatatatataatcatgtgtattgtagttgttatagaataacatgtaaatttttaaaaaatttcaaataatttacacggctaaaaaaagtttaaaatattttcttatacacgtaattattttctttatatgcgtgataaataaatatttgaactttatttttaacattgtaaagtgctaaaaaaattgtaaaacattattggtcttaaataagtacaacaattatgaaaaaaaatttaaactaaatatcttttctcaatgcaaaaacaaataaaagtatactgaaatgacaatttaaagagatgtattttagatttttattaaataaattgggggtactataaataataagcattgttattgtgcaccagtggtgcctagcacccttaagacgtgtcgccttacgattggctagcaatactccctaa

SEQ ID NO: 129161 - DNA, 792 bp, Cannabis sativa
tttatatgagataaataaaattaatctgaaagtaaaattaaattaaaaaggtcttaaaaatatgcattatgtaatgaatttaaactaatttgtaaaatttatatgtgcactagtagttccttaaataaacttaaggtaacataaatgttgctacattaaaaaaaataaagtaacttaaaagtatcttaataatataatataatacacaaattaacatataattttaaaagtaatcgatttaaaaattaaaagatatcaatgtgagatatttttattttaaattgaattatgttataaaaaagtaactaattagtattttattgacattcaaaagatgtgcattgttcataataaatttaaattaagatagcataaatgttgctacataaaaaaaaataattaaaatattttaagtcaaattgcaactaaactaactttgtgtgttactttctacttttttttaatgaagtatgttagttttacttagcctaatatattttttaatatgtatatcgtcttttggcaatattagtcagttttgaaataaattgaagttgatttcattcatgtttgtattttataaaagtgcttgcacgctcacaaagaaggggttttttaaaaaattggactgaaaaagtagggaataaaaagctcaatatagaaaaggttaaaaacaagaaactagcaataaaaacataaaaacggcaactacatatgcataaaattaacacaacaaaaataacgttatttttgaaaataatttccaaatttaggtgccccatgaaaatttcc

SEQ ID NO: 129162 - DNA, 810 bp, Cannabis sativa
tgtccatgccaagttatgccatgtaaactactaaactctcgaaccgtcttgttaataagattgatggcatggtgcgagatttctggtggggtaatgagaaaggtaaccatgggatccatgttaaggcttgggataaactatgccttcctaaatcttgtggtgggctaggtttctggaaaactaaagaaatgaaccaggcttacctggccaagtaggggtggaacctgttaactgggagtcagtctctttgctgcagggtcttggaagcgaagtacctgaaagaaaaagattaccttacctacaagtacaaagactctgattcgtagttttggaagaatgtggtggaagccaaagctattttgaggaaatgtgcttgtaaaatgatcatggttggaaaggatacgagagtttgggaggatccttggatctcccatggtacggagttttatcctaagtcgaatggtgctatagtttcggggtgtagcagagtggtcgatctccttacggattatggggattgggatcttcagaaattgaattacctctttgacaaagaatctgttttgaccatcttgaaagggggtcgactctctagtcagggtaaggataggtggatttgaaccaaggagattaatgggtgtttctcgtgtaaatcaatttatctcatccaagctttagatagggctcctcattatgaagttgcatcgtccctctggaataaactgtggaatagtaacatattggaatgccataagatactgtggtggtgtatcctctctaaggccctcccagttcgtgttgttctttcta

SEQ ID NO: 129163 - DNA, 1165 bp, Cannabis sativa
gattaaaatttgagtttagattctaattttagggtatgtgcaagtgagtgattttgagtttcattactcttggttcttcaagctcttgaaaaggaattttgctcaagtatggagctttactttgaatgttgaccaaatctaaatttatagtgtttgtatggtgaattttgagctttaaatgtatgtttctattccttgtataattatggataactctaaattatgttttgggagtttgtttaagttttggacatgatttgatgtgtttatgcatggtttttagaagctggaatttgggtttttctgggtttggaaccaaggggccgcaacccagcttttgggcaccacaacccgcccctgttgaaatcctgggttttaaacccaggtgccgcggccctgtgtggggagttccgtagctccgtgtggggagtgccgcggcccgccccctttttcttggcagatgcgaatgcgatattctaatattcataacttggtgacacaaacttagtttcgggagttctatatattgttggaaagctcgttctgagctctctatgaatatctgtgttttgaatgccaattttatattatatgaaagtgaaaaattagggattaaccctttatttgtgaatctcggaatttgtgactagaattaacggtacttggtcaggagcacccggggatttggaatctccatgtttgcgagatatcaggtaagatagtagttagcacatagagttatgcacagtggtgcttatattggaaatgatatatgtgagtaattagaaactgggattagagttattaccctaacatgagcggtttaatggcctagggttattaccctagtaattattaatgtgtatacgctatgccatgttaattatatgtgtatattgaaatttacggttatccgttcaaggcataattgggttgaacatggtagctagaaccgagatgaaccattctaaggccttattgtatatagacgtgtgagtataacatgtaggtctatgccacatagatataaataagcgtgtgagcgtaacacgcatgtctatgtcatatagacatatgtgaaatggcattggtgtttatatgatatgttaagtatgattattgacattttatactgtcttgttgggattggctcacgggtgctcta

SEQ ID NO: 129164 - DNA, 1010 bp, Cannabis sativa
aattgttcgattggttcaatggctagttcgatagggggttcgatgtccgtttaattttttgcattagtctgattgtccaatttgtccaacgcagtccgataggttggacccaatggtcatagcaattaaatttaattaattaatatttttaaattgttttatttaattaattaattattgtttttgaattgttttattttttttagaaaaatacaaaatatttaatatcaataataaaccttacaaaaagaaaattattaaccataattatgatcataattactttttgcctgtttgtatcccatatacggtctgattgtgcctgatatatgtgtttgcgaatgtattgtttgacgtttttgtttattgtattgggtccaaaatgggtccgattttatgctagatcttgaattgctaaccttcaatttcttgaatttttttgacagagacctgcatatctaataattccagtgtcagagcattatacaagtcgtgtcacatggcgcgacggtagttattactactcgaagattaaggtcaatttgaagaatttaaactatgggatagggtgagagaatcccctttcaaacagttctttgagagagagcgattacaatttttaggagcattgattcatcaattgatattgcacaaaatcaaatctgacaagccgaacgaggtacatttttacttggcaaagaagagatgtagatttggtagggtggagtttggtttggtgaccagattaaacttgttgcctggacctactgaggaagaaatttaagagaaagaaagttcggacctgttgattatggaatatttcaacggtaatccttccagcaactttagccaactgtgtagagtttttgagagttgaacagaagttaacgatgtctaaaagttggggatgaccttgtttgttatgcgtgtcctcactggtaaggaggagaagactgtcgatcctccttttgtcataagaattgttaacaaccttccattcttctacgagt

SEQ ID NO: 129165 - DNA, 575 bp, Cannabis sativa
ttaatataataatttttatggagtatcgctaaccaattgcaaggcgacacatctagaaggtgctaggcatcactggtgcccaatagcaatgctcttaattgtatgtgtttactacacaataattaatgtgtgccattaaaagccatcactatatatggttaaaacaatatcctcatattatagagacaaaacaagtgtttctaccataaaaattataatcactaccatagaattattttattattaatggatgtttaaattactaaattaattatattaattatattttcttttattatattaatttaatttcccattttttttagttttatttttatatacttctatgctaagaaagcttgttttgtccctatctatgtatgtggacattttattatacattgattaaagatccaatgacaattaaggaggaaggagtatgggaataaataatgtggagtttagcacatgttgacatatcccttaattttttaataatattttaataatttttaataattttttaatattgtccgatttcaatgccatgccatttaaaattccatcgaatgaat

SEQ ID NO: 129166 - DNA, 613 bp, Cannabis sativa
actaagcggtctttacaatttatcgagtgaatgtcgatagattatcgacgttaatacaaaaatattgaaaacttttaaacagtaaacacgaaataagtaaaaagttttaaacataagtaaagactaaacaaattttaaaactaaccactaaacaatcacaacaatttaaaagtcttcactatgagggtgatgttcgcaatatggacacaacgattcaggcttgatcggttcgccattaaaataacctaatctgcaacgaagacactcttttgagaaccctgctggtggatatggataagccagccactcatcattttttggctgcgaaggaaccttcattcgtttgccaggttttcattttcaaaacgtttaaaaaattatatatattcttgtatttctaaagtaacttcatcactaggttcatgtttgatctctttactagacatttagaatttataagagaagaacactctaagattaaagaataagaaacatatataacttatgaagtaaatgttaggaaaatatgagatatcaatagaagaataacaataagatgaacaaagagaccaagaaaattacaactctatgcaacaaaattacaaggactata

SEQ ID NO: 129167 - DNA, 906 bp, Cannabis sativa
aacccacggacggacagggacgccaatgtacggcgacgacgacggcaacagcaacgacatggacggaatcgaaactctagggcacactctgatcgcaggcggagctatccagaaggttcccgtgatagatgtgtatgcttcttagttacataaggggttactagaggttaaaatgacaaaaaataccttctcctacagtaactatattttgtcgcatttgaggtgtgtcacacctctacaaaataactccccaataaataaatatgggatatggtggaaggacaccccatagagaaatggccctttatttttctgtttcaccattttcgtcgctgaaaacattacctatcctccctcaactctcgtccggtaaagccccacgtgccaaaaccacactgccggccgatcaatcacgcctccaccccaatgtcgaaactcggagctccgaccactctttgcttactggttcgtcctgcgcctgcggaagaagggtcttcattaacgcagctgccacatctttgcttcccatttgctccgccaaagcttcccattacacagtacgatctttcactcacaagctgtaatatctatacatctaacctcagatttgcttcattttacacaagtttttgtatttgtgtcagttctacatttttacatatgtaggatacgttgaaaaagattcaccctccgaggccagattggtatgaagaattctatgcttcagttctggatacgagcatgaaatcttatgaagctgaggtgagtttctaatttgtctgaatagtataatgtttgaattttctccaaccctcaattttgggacaagaatgaaatttttccaggattgattgttttggttgatggtatatacatattggtaagattgcaggttacaagtctgag

SEQ ID NO: 129168 - DNA, 1107 bp, Cannabis sativa
  modified_base (1067)..(1075): a, c, t, g, unknown or other
acctagactattataaagtatgtttgaaaaagtagtatagtgatgattatgaaaagaatatgtgtatggtatatgcatattgatattgatattgatatacgtaatacgtctgagttctaaatggttagaagatgtggactaaatgtgtgataagttatgaagtaagggcaaacgaatagcctgattagtgagttgtctgggcttgaggcaaatggtaaggaagagaatcctttattgctgcaacactgggaacatgtaaattctgatatgcaagatatgattagacaacaaggggaacagatgcgagatttgagagaacaacaaactcttcttgtgtctattcctgtaccactgacacttcctattgtaccactggatgtggtgaaattcatggaaccaacttacgagtagatcagaaggcgaaaactaaatgaaccactaatcatgggatagaacaaaaggttctaaggtggctaggatagtggtcaaggtgagaataagaaaagacaaccttatcctgagtgttcaagatgcaaaaaggtgccatttgagtcaatgtagagccagatcttattttattgtggggtagtgggtcatctgaaaagaacccacctccagttaagaaagaccaacgttaaaggagaaaagtgtacgggtcctccccaagtgctcgttatgactcaaggggactagagtattgttctttcgaccgactcaggttagaattttatgggcaatattatatttgctatttcaatttatattggtattgaacagtgtacattcaatgagggaacatcaaaagatcttaatagacaatgcatgtatcttatttagtgataactcatctgatagggtagaatattagagaaatgacattatgagttaaatttactaatatttccaagtggaatataggacataagtaactaatggaggtatccattaatttaattcagagaaaagaatccttttatttagaagtgatctagtattagtaaatgtgggataatttatgagtattgtccaggatcctagtgttggaaattattttaccagaatcttannnnnnnnnacaagtatgttgattaataccctaaatatgaa

SEQ ID NO: 129169 - DNA, 938 bp, Cannabis sativa
agtttgacacgtgtcctttgaaacaatggctgaattttgggtataacaattgccccttaaaaagtgctttttaaacgcttactgagggtacttcgccataatcactttcttcgagatcacacatgccctcaactttaaagctccacagttttgagggtcattattaacattaatgaaccgtcttctttttatcttctaccttattcccaaaccgtagatgatttccccaacaacccctttttggccttaccgttactgggttcttagtataaaatggtggctcattctagccatgttccataaacttttggtttttggtgaatttcatctagaaattggattgtcactctcctacggaaatgtcccatccaggctcataaatttatccctcaaaacttataacgctggaatatagcaaccgcctttcctctccatatattcccaaaaacttcaaacctcaatttaaattggaaacgaaagattccaagactgaagatcatctgattattccaaaccaaggagatacagtcgataagcatcatcctttaatggtggtctgatctgaattcatcgatcgtttttttaccactattgcttcattgattttttttatctttgtccctatagggatggacgtagattttgagagcatgttcgaaggtcctccttgtcccaacgagaaatccaggaaaaaggtaacccaagcagatgaaatttcggattccaccagagaacccaaatggctcaagaataaagcttacacgaggaaacctccaaaccagccaatcactggtgtttatgaatttcttgaggtttggaatgaggtcttggtcacagtgaatgagatctcttctgcaggaaatgggatcttctaatgcgaggaataaaggtcttctactgcagagaatgaggtctatgcagaggtcgagtccttttac

SEQ ID NO: 129170 - DNA, 974 bp, Cannabis sativa
tataaaacatgtttttgaaaaatattttcatttttctacttttaaaaacagaaaattgattaaaaaagtgttaccaaacgccacctatgtgtacatatatttttaaaagaattatttttgggccggcttaagtatgtgtctagttaaccgatgtttacagtcactacaaatttttttacctataatcataataaaatttgtgactaaaagtaaaagaaaaaaagttatgactaattataaatcatcattcatatgttgtgactaaaagatccgtaactaaaagtattagtcaaaaaatttataatttgttgtgactaaatgtatttttagtcacaatatttaatactatattttagtcacaagtaatattttgttgtaaatttagtcacaaaaaattatgttgtgattaaaaaattatcaccaacaatagtaatttgttgtagtagttacatttagtcacaagtaattagttgtacattttaattaaggaataagtctaattaactcaaacctgatttgaggggatgaagtgatgataaaagaaatagttaataatgaaggcagatatggtagctagagtgtatattttaaaagatgctagaatatatcactataacatagttatttaggatacatattatttaattaggatcatgtattgagtatgtggtcctgcatatttttgttgtaacatcatgttgcacgtatatatctcctatatatatttgtgtatgtatcaacaataataatagatgcaatacacgacgattgcatctttttcatttgttttgtaattttcgaacaaataaatacatgaagagataagatgatatatataatctagtgtactctcctgggttgtcgagaaattaaatataactatcatggttacatatttaacgtagccatcagaatgagtgaggagctcggggaccgagaccctatatttataggtgagatactccatcagtatc

SEQ ID NO: 129171 - DNA, 1197 bp, Cannabis sativa
ttatatatttttccacttgatgagaaactattgaagtttataacagtaataatctgttttattgtccaataaaagatacaacaaagcaacacaagctgtcagcttttatttctctgctaagagagtgacacatagttttacttacaacaacattaataatagctatcagtcttgttataaattaatgtatgctccataaaacatcatcacatcatatcccatcatggcaatgtgtaagctgcaaaagcaatttcaatcatttctcattgttagtaagaagctctgcaatcaaactaaacttatcataataacattctaaatatactcacgtccacatttgtaccccactgggcgattttcgaagttgcagcgttttgggatagtaatggctatttcaggcttgataccagagctcttggcagtattggaaagaagaacagaacagagacaagaagggttctgaccaatcttcttcacttgaagacagcaactgtcagagacagctgctttctcatcttgagcagccacagcacaaggagccaacttcattgcctcattgtctggactggactttccacaagcattgtttgctccataaacacttttctcaatcccaaaagcactaacaaccaccacaaccaaccccacaaagtagatgaacttcattgttgttttccccttcttctgtaatacttgaaaaaagaaataagaaattatatttgtgatgatatatttacatattttatcattctctaagatgggtttttataggccttcaaaagtgttctttctctattctagaatcaaccattgaagtggagttagcactacaataccatgcgtgcgtatgtgtcagttttggccaatcgaggctggtttgctttcggtcattgttttccatttgtggccattagagagtagtagtaatggtggtaatgaagatgaaaaatctttcactttggttttttataagtctattaccgaccaacattagaagagcccaactaccaaatcccataaaactggcaaaaaactcctttcttattggcgtattaggcttcaattgcttttagtagtgcatcaggaatcactctgcactgagcgagaaattaaaaaataaaaaaaatgaaaaatttcgccgttgccggggatcgaacccgggtcacccgcgtgacaggcgggaatacttaccactat

SEQ ID NO: 129172 - DNA, 766 bp, Cannabis sativa
  modified_base (661)..(668): a, c, t, g, unknown or other
aatttttaaaattgatgaaaaaatatcacaaaaatcaaatttttggtgcgtagcaccttgttgcccaagggaggttgcacgcagcctcaaacgcacgcgggaggagggagttgcagcctccttgactgagatttctcggtctgctgcagggtgggatgcgcgggtgctcgtgtctgaatcgaggggcaccgtgtctttagacacagttttttctaagcatgcgcgcgcgtagggccttcttgtccgagggtctggtgcgcatgagcactaccctcgacacccaatggaccccaaatttcaaatcaacatatctttctcgttttttttatcgaaatcaagttcggtaaaaattaaaattgcttaatttttcacaaggaatccaaataaattatttccaaaatgaaataaaatcatttttcatggaaaattttataattcacgaacattcatcaattcacacataaaccaatatgaacacattcaaatcaataaattgatcgttttaaacccatatttcatgaatgtaatataagcatagggtaaataccatttctgatcctgaatatgagttactctatttataaccatttagttttgagatgaggctattgggatttgaactctcaacctcttagttgttaaactaatcaaattactactnnnnnnnnacacatatttagcattaaaagtattattatttattttattactaactatatatttttttttaaatggggccttcagcggtggggggcctaaggcggct

SEQ ID NO: 129173 - DNA, 540 bp, Cannabis sativa
agctataacgtatatgaatataaaaaaaattagactaaaatttttttctggatgccgaaacaaatttttttctggatgcctaaaattattatatttatgaattaaatgaatggaggtacatattttcaaaacttaattacgttataatttctttcttataatcatccttattatctattcttttgttgacgccaaagaaaaattatatctagctttccgataaaattaatctaattaatgaaatttaattgtaaatatagtaagataagtttgttaattaatattcacatcataatagttatacaatcactactaacaaaaccttttttcatagttatcaatcaaagctgatatgacatctaatattatttttcatgtttagtgttagagattttactatatcaattgaagattacaaagataaattacaaatcaattgtaatattgttataaatattaataattatgtgcatgtccaaatcttttatttattaccattaattataatcaacattttttttttcttagtttccctttttc

SEQ ID NO: 129174 - DNA, 858 bp, Cannabis sativa
  modified_base (53)..(65): a, c, t, g, unknown or other
  modified_base (813)..(826): a, c, t, g, unknown or other
acatctatttttgataatagagcgttctatgtaattaagagtgcaattctaannnnnnnnnnnnntcaggaggaattaataagttaggaaatttacttaataaattttgaatttacttattgcaagcttgattacatagggccatggtcctcacagtaagtaggataatattattttgtagtatcaattaattggttttaattaatcaattagaattttaaataagactatgtcttgtttgtgaattttttcactaagcaaggacttatttgagaagaaaagagtttttagggtttatttgttaattaaaaatttttgtaaggtctaattaataaataagttaaatgataattaattataattattaaatagatagaattggcatttgtagaattagaattaaaatatgacatttgtgaaaagaaatatgagctaaacaaatagcaaaattgaaacttgtggggcccataatatggccgaccacttaagtccaataaagctattattttatattttttttaattctatttaaattttaaactaaccctaaaaagaatcctatagatagaatatgacgactcttattttcagaacatacaccaatctcctttgtcagaaaactataaaaaaaagagagaacttcttcttcttattctatttttcgaaattattcttcttctatactgactaattcgacgtccatagtgaattgagattattgccactcatgtctaaacaatacctggtatagtgtagtgtgaagaatccaaccaaactgaaagagagaagatttaggtttagatcttgataatnnnnnnnnnnnnnnaggaatcaatggctagagatctgaatggaagg

SEQ ID NO: 129175 - DNA, 665 bp, Cannabis sativa
ccccgccatggttgctgccccaacagctgctgcagcagcagcagcttacaatcctgtaaggaatgccccattgggcaagcccgaaattgccgcgggcatgtacagaacggcaaccacagttgctcaaccttctttggttcaggttccttctgctcaacatcagcagcagcaatatgctggctactcacaggttcatcatccgtctcagtcggtcactcctacttccgcagctgctgcgagttacggatacgaatatgcagacccttcccatgcccagatgtactatactcaggctcttcaacccacaatggcttctcaatatcagaccatgacagcgactggcgcggtagtgatgcaggaagtttccgggcagatttcagctgacaacatgaagcagcagcagcagatgagaagttcatagccattataatatatcagaagaacataagaaagaagcaattttgaagggacaagaagaaaaaaaaagggtttggctttctttttactactatatttttcgtttgtgtctgcattgtttgttgatggtaaaactggattgttatatgtatttgtgatagataataagaaaactctggtcgtcttaagctctttctgagtttgtcatattgttgtttatttgttataggaaatgaaattggtctgag

SEQ ID NO: 129176 - DNA, 711 bp, Cannabis sativa
tttagactcaactcatgtgttgaattatgaagccctaaaactagtgttagacttatcttatgaggaatagccagttcaaatcctcgataaggaaaaaacgattcctcaaaacaagaccatagtcttggtcaaggtactctgggagaacaacatggttgaggaaaccacttgggaatttgagtctaacatgagaacccaatatcaagagcttttcgaggttagattttgggaacgaaatccttttgacggggataattataatgactacatgttagaatattgattaataaaggaaactagcattaattattgatatttttataattatgcatgattttactatgttgtgggtcctattactagaaatgggcattagagttataatttctcaatttcgaagattttattaaactctaagagtactatttaagctaaatatgatatatgtgatttttatgattttactcggcgataatggaaaatatgacggatggccaatatagtcacatggataaacattgaacctattatttagaaagttatcgtatgttatgttcgagtgtgagtttaggcagggttatggtattggaccattttacccctaagttattcaataatttgagtaataacacaagggaagtttggtcgtgttaatctcaaaggttaggtgtgttgggttttgtgcccaaaataaaacccatttcaatataa

SEQ ID NO: 129177 - DNA, 1683 bp, Cannabis sativa
gatactcttactttggttccatcttcaagatacttaatcccaactttacaaggcttcctgcaaagaaatcactaatgtccacttacaaacatgggagagtgaaaactgaaggattcttcaaccagaattgaaggcagtcacataccctgtgactggatccataacttgaacatttgaaacatgaagaggagcttcaaccgtaaagatcccaccttcatgaccctgaccttgcttgatatgcttcttaacctgcagacaagaaacaagttcataacataatcaaatactgtagtcttgtgcacacaaacaagcgttaagtactaacaattaacatttcatactatgcagcatcatcttcaaccaaggaatgtgattggtttgcattatttcataaattcctacatcatattataaagaatttcacggttatgtcaaatataaaatgaatggtggctcactttaaagtttcaaatattaatgaatacatgaaacacaaataaacaatcaaacttcttccgttagctacacatttattttgaggattgataaataattgacgattaattggggattgaaaagtagaaatccaacaaacttatcttccaggccattcatttaaaatccaatgaacagccaaagaaaaacaatgccaggtatatccaacacaagtacactaagaattggcctgtattaactcaaagattatttcaaaccgtaatcgaactattttctggttaaaaaataaccctttattaaaaaaaatgctgaccgacgaaagaaaactataagaacaagcaataccccatctaattacatcaatcagacgtaaataaccacccattactctcaccagattcttgccttcgacaattacacgattttgagaacgaacaacacgcttaacaacaccagtctctcctttatctttacccctgattaccatcacctgagaaagaccgccacaaggaatatcaaacccttttaactatgttacaagaagttcaaaaaaccaactaacgattttcaattagaaaatcccatggactcactgcacatacattatcacctctgaggatcctccaatgtctaataagcttttcagctgctttccaacccatattttgacacccgaaatgcaggtcgaatgtatctacaatgtccaacacaaacgcaaatgaaatgcttatattaaccaattacagacctttacactctcttaattcaacctagaatatcattctgaaacgcgaaaacgtgtacggattttcacataaatcacataacaatgagttgaaatcagcataaaacggctcaggtggaagatttcttaaatcatagaaatatgccactggaacgtaccaaacagtatactacaaggatatagtggcggcggcggttgtgatgaagagagtgaccgtgtcggagggtgatgaacggtagtggccggcgaggctgttagggggcggggtgagagacttgggctactgaagtaattctaaagaattagggtatttgtcttcgattagttaggcctggccgggctggctcaaccaatttaaggcccagttcaatatcatcattcaatggggaattttgatgaggtaagttgaaaaatgtctattttattaatcaattaaccaaatttgtctctaagtttatatttatttgaaacatacctctttt

SEQ ID NO: 129178 - DNA, 602 bp, Cannabis sativa
caaacacagtttacacatttccctataatcatattctccttcataatattccctataattaaattactttgaacacctcgtaccaaacgctctcttagtaatttataaatagtaagaaagtttataaatatatgattgtgtagttattattaaatatagaatgagtaaatagaactttagttcaattaagagatttgttctgtctaaaaaaaaaaaagaaaaacactgttacctattactttgtgcctttctaataaaaatttttttcctctaaaaaaaatatcactaatctgtttaataaagaattgttatgagatatgttgttgaattttaataatattataaataatatttcaattaataataatttgggcaattaacattaacaaaaaagaaaaagaaaaattgagcaatttgttttcatttatttcaaattgggttacaaagttatcaacttgtgagagagataacgaaagcagataaataagaccaccaaagagatttgaaggctgtttggctttacagtttaaaaactgttttctattttttaaaattgaaaaacagtttttaaaaactattaggagtcgtttggcaaaaaattt

SEQ ID NO: 129179 - DNA, 704 bp, Cannabis sativa
  modified_base (674)..(678): a, c, t, g, unknown or other
caacttttttacttttagttacaaattttattgtgactaaaagtaagattgtttatactggcaaagtagctagtggttgaagaggatcaagatcaacaggtacaggaaaaggcacaagtggaaaagaaggctaaaggtgagcaagttactggagatctttcagaggaatacaaggcaccaccaataagtattgagcatcacataaaaattccctatccacaaaggttccgcaagaacaatttggataagcagttttcaaaattccttgaaatatttaagaaactgcacattaacattccatttgcagaggcgcttgagcagattcgaaattactttacatttatgaaagagattttgacaaagaagaggaagttggaggaatttaagacagtgagacttactggggattgcggtgcaatcttccagaagaaactaccacccaagcttaattaaagatcaggatagttttaatattccttgctcgataggggttttgttagaaataaaaagctctgtgtgatttgggagcaatcattaacgtaatgcccttgtttatttttaaaagactaagattgggaagacccaagcctacaatagtgacattgcaattagcagatcattctttgactcatcctcatagaatagttgaagatgtttttgttgggttttatgcnnnnnataaaactctttacaatctgattagt

SEQ ID NO: 129180 - DNA, 521 bp, Cannabis sativa
  modified_base (26)..(28): a, c, t, g, unknown or other
tacccggtgtttccccttacggatcnnnggactactgactgtcacaatcagcttagtagagtgatggagattgccaataagaactgtcctgtttgtgagatgcacccggagtcttacaaccatattttctttgagtgtcattttgccaaattgataatgactgagataggtacctggtttgggctgaataactggccgagtgacttcaagcaatggaaggattggtgttcgaagaagatgaagaacttgctggatagggtgatgaacactgtcatggctgctgcaatttattttctttggctgaacaggaatggctgctggtttaataggtgctgtcggtagggatgcacatttttcccatagggatggggccccgcggggacccgctcctaatggggcggggatttccagtctaaatggggaacggggtgtagacggggatcaaattttgtccccgaatgttaaacggggcggggacggggatgacactccccgccccgacggggacccgtttaatttat

SEQ ID NO: 129181 - DNA, 940 bp, Cannabis sativa
attggttaacaatattccttaaaagttattttttaaaattatatgagacatgatccttaagtacaccaataggggtatgacactaaggagggtgctaaacactagtaatgccttttagcaattctatttttcaattataaagcaataaatgcgttcaataaactcgcttcagtaaatataattgataaaaatatacgaactcacccttttaaagataaaagcaagctgtgaataataactatcgccttttgagatcagcaagatgaacaaccaatatagaaggttcatctcaagatacacagaatatacaatagaacgacaatacttgaaaagggtagataataaattctttaaaaagcttgcagctcattgacccacatactcgtgagcaagttgaaagactaagggaaacattcccaacataatgcatctcgaaattgtcacactatgatattatctcgcgtttgtttttctcaatatttatagaaggacgtgagaggtattaccaagagtatacttaggcacagaaagtcaccttcaaaataaagtaacttaagaagattattacgagatgaataagtatagtcagcataactggtaatagataaagacaatgaacgattatgcaattattttattattatcctatgtgatgtaaatatgaaaagtgaggtttgtccacgtttcatgaacggttacaaggataagatcacaagggaaaattatcaccctaaaacttctataaatagggacagaatttagggaacaagggacgaccaattgagaaaacgagaatcatacaaatctattcttatattctgtataagatttataaaatcctctttcggtgactcgccggggctatggcaaaaagagggaaaatggccgggaaaatcaaaaccaaggggaagaaaactggtccatcttcttcggacagagt

SEQ ID NO: 129182 - DNA, 983 bp, Cannabis sativa
  modified_base (708)..(710): a, c, t, g, unknown or other
ggggtgtaaataaaatttcctttaaaaaaaaattaataatatcttcaactaaaaaatgttagttggctatatcatactatacaatttaaatttataatttttatttaatatttaacaccatttaaatcataatttattaattagtgactacaaaaattaaaagtataaaaatatatatttatactataacaaaattattgctaaaaaaattactacacatacaataatatatattttaaaataaaaattacgagtgagatacagtgatgatataaattttaaatatagtgacgactacgatacggtaataacaacaatttgatttaataagcgagtatttatcaatcatgtttgattttttttaagatttctttagtactttttataaatttatcaattgtataatattttattccttataatttttaagaatttgcaaataatatattaatgaaataatatataatatatttttttttacagagattcaaaaataagtatataagttaaataaggtttatacatttataatagagacttttttatttttacacttcaaaatatttttttttgcattttacgaaattctacatagaaatccctattgcaactagcgttacaacctaaattttaataaaaaatcgtatataaactcttattgtaactagtgctgcaactactttattagaaacccaaaccgtaaatttnnnaaaaaaaagttaaaaaaatagtatctgtgctaatttcccttaataataacataatataaattaatacattattgatatattggcaacgttttttactattatttttttatttaatttttattaatattgtgagtaaaaaatttaaataaaatctagccaagtgcggtatacttccttgtacaataattataagggaaattttatttacaccccaaaaagtttaaaggcaccccattttaataatttttattttatataaaatttatatttata

SEQ ID NO: 129183 - DNA, 1168 bp, Cannabis sativa
  modified_base (1129)..(1142): a, c, t, g, unknown or other
gcccgttagttcatcctcttgttttttttaataaattagactctataccttttttatactgctctcttttatttttatcttcttttttgaagtttattatttttacctcttttttaaacattataccaatttttctcatgtcatttcaagacactctccatgtgactcccttatgtcaagatattttgagtacagtatatataaaaagatgtatgtttcaaataaatatcaaataaatataaataaatataaattagaagtaaattagaagtagatttaatagatttaattaattgataaataaaagaggtattttcaatttacccctaaaaagtttattttggtatggatttatatatatgtatatatatatatttaaagggattttaaattttattttacaaatatatggagtgttatttttttgttatatccattaatcaaaaatactcttatattatattttattaaaatatacctacttttatgagtaagttgaataatataccctaactctctacttaaatttagaatataatttacattaactttatgggtctaatgagaacattatctataaaagtgggtatatcttaaagaatataaaaataaaggtaaaaattaaaccaaataaagtaaaaatgggtatacaatataatttcctcaaatataaacttaggtacgacacatcacgacaagcccaaaaacacaacacataaacacgaatagattagctcgaaaacatgacaatcattttataataattataataatgataaatatttatttatcaattaaaataataataataattaaattataataattataattattttgtatataattgtgtattattattattgaaaaaagatataaaaataattaaaaatataaaatacccatatattttagtatttagaccatcaattgtaataaaaatacaaaattatagagtatgaatttgaacccgtattaaataacaggttagtttatttaagaataacaggtcgagctgaataaagcataacacaaattcaagcacgacacgaaattgtcagacttgcaaactattggatatattttaccaggatctagatttactaactagtatgtttcattaacatcnnnnnnnnnnnnnnaaaacaatgaaataaacacgtataaa

SEQ ID NO: 129184 - DNA, 594 bp, Cannabis sativa
aaaacgtaaaaattaaaaaaaaaaaaaaaaaaaaaaatctttaatcgtaaaagtgtaatttttttacaaaaaaaaaaagtcttatgtaattattcctttcatcattttgaaaaataaatgaagaggatcttatgtcgctcatgaagtttggccttcctcagctatttctaattgaagagggtgttgttgttgtcgttttctagggggtaatcgctgataagggcctagtaggccgactaagtagaaaagtcactactattattgagaacctaacgtcagacatcacgagaactttaattttcaggtgaatatcgcaaatggccttagcagcatctctcgaaaagaaggcattgaatagaatttaagtagtgagttgcatgctcgtctaattttttattattattatacatatgtatttaattattttaaattttattttagatacattaaattatttaaaatttcttaaaagaataagtaaaatgtaaaatataattacaatgtacaaatacaaaaattaagggtgtatttggaagtaactgtgtaattactatgtaggataattattagggtggtaattacacagtttagtaa

SEQ ID NO: 129185 - DNA, 614 bp, Cannabis sativa
  modified_base (469)..(477): a, c, t, g, unknown or other
ataaaatgatttctgatctttattaattagtaaatatgattatactgaaatgagttttatttagggctcaaaacccaacattctaatgcaagtcgacagtgtcattgcttatgcttcacgctagttaaaggagtatgagcaacgttactcgacaaatgatttggaacttatttcaattgtatttgccctaaagatttggaggcaatatttttatagagaaaagtgtgagatttataccaatcaccaaagtctcaagtacttcttcactcaaaaagactagaacatgagacaaaggctgtggttggaactgatcaaggactatgagtttgagaatttgtatcacctagggaaagacaatatagtacattttctttgactagaaaaggtttcagtaaggtttttagtaccacaatgatctctcctcagttagcttcatgtacggttaggatgttggaatatattttaccannnnnnnnntttactaacaagtatatttttaacgtgttaatatgaatttctaaaacgatgaaaataaacacataaaaggtttgagaaaccttaaagttgttgcagcggaattaaatgactctgtccgctcagatctctaacccttg

SEQ ID NO: 129186 - DNA, 677 bp, Cannabis sativa
aaaacgtacaaagtattgccaacacatactatggctggccaacacgtactaaggctagctaggacattttaaggttgacaaacgcttaccaaggctagccagaacgtaccaagacttgccagcacgtaccaaagttggcaggtacatggaaagctattaggcacatggaaagctggtaggcacatgggaaagctagcgagcacataaaaagttggcaggcacatcccagggctgcatgagcaataccttgccaaccacaagagtgcataagccggcgaggttctacaaaataagggtaggcgggtaggttggccagctcctcttctagcagacactttttgtatatttgcagctttcaacctgaacagtcactcttaactatgaattagctacaacaaccaacaacaatagggtttcaactccatatatgtacttattctttaggaacaattaataggttattttatatatatttaatatgtaaataagaggtgatatctcctcattttaagggatatcaacataatttgactagatttgttgtaagtcctacactatataaaaggcattaggtctcactcaaaacttaagtcatgctaagtcattctaagtgctacaaaggctttattatgcctcatacacgtgctcctctctctccctctctcaagtctcatatc

SEQ ID NO: 129187 - DNA, 1127 bp, Cannabis sativa
  modified_base (72)..(72): a, c, t, g, unknown or other
atataatatttcaaattaaaataataatgttatcttttaatttaaaatatactcaatattaaaatatctaancttataattaaataatatatataatattgacaaattaacaaatttttaccatctgaccataatttaaaacatataataatcaatttttaaacttaaacctcaaaatataaaaaattaataagaatctattaaaaattaaatattttttaatttaaaaaattgatatttaagtttaattattaaaaataatattttatttagatattagggtttaaaaattgaaaaatccaaaattgggtgaaaaatcacccatgtgtgcaccaggaggcttcatgcagcaatttacccgcgcgcacgaggggttcagtgggttgatccgtgcacagacgaccctcctagcagagtgatgtgcgcgtgtgtcccctattcgagatgtcgagctgaccgagttcagaaaagatttgcctgaagtatccgcgcgcgcaacctcgtcttgtttgagtgtctctgcgtgcgatgctcaaccctcgacactcaatggaccccaattttcaaacaccataactccttcattttttatcaaaattgagttctgtaaaaaactaaaattgcttaatttttcacaaggaatccaaataaattaattatttttatgaaaaatttttgtaattcacatacatttgtcaaataacacataaacaaccatgaacacatccaaatcaacataatttaataatattcatcattttaaatctatattacatgaaagtaaattattaccatcgctctgataccagttgttggtattattttacaaggatctagatttactaacaagtatgttaaattaacatcctaaatatgaatatctttaaagcaatgaaattaatcacataagagtttagaaaatctgacattgattgcagcaaaatataatatctcatttcgctcagatctctaactcttgttcctttctgtcactgagtattatcaagatttgagcctttgatatctttatctctttcgggttggttaccaccgtcttacccactatgattgagtacttgacttgctatgtgtgggcatggcactctatcactataggccgagtatga

SEQ ID NO: 129188 - DNA, 918 bp, Cannabis sativa
tttttttaccaatttcatttctacaaaaccttatttctgatcaattaataaagatttcatcaaacttgagaataaagatttcatttttaatgttaggttatatttttgatcaatttatgaatcattaacttcaattgggtaacattcattttcatcttttatttgcatttgttctcatcaaaattaataactgcagaaattaattgcttcacgtttataaaattttggggtgaacaaaagaaaacaataatcaaaatgaacggttaattttaaattgtttttttttttttcttgagattaatatatatacatgatttatttgttaattggaccataagatttgtgttgagtactagacttgtgccaaaatttaattaaaaaaaaaacgataaattagtaatatattgctaaaatttagcttggtgctcgttcttatgatttttaaattaaaatattaaatgctaaaacaaatacccacttaataaaattcacctaaatcccttacactactaagaaaactccttttacatttttgttttatgttctttatatttggattcataatgattctaagtctattcttctaatattttcttacttcttttattttttttttatttttataatcgatacaattgggaaatgttgttgtcaaccttctattacgacttcttagttaatctctgtgctcgaaaacatatgacagaatatttttttcatgacgttgttgttatagttacaatatcatccttataaatttttgaaaattttcgaatagtttaccatgtcgaaaaataggtttgaagttttttgaacacacatagtagattggtaggaactttgttttcgatcctgtaaactattagaaattttgcgaataccaaaataattgtgcggatatccgcacttgtacggatt

SEQ ID NO: 129189 - DNA, 1691 bp, Cannabis sativa
  modified_base (1635)..(1644): a, c, t, g, unknown or other
aaaatttctataattaaatatatttatatattatatcacaataatttttacaatgatgaaaaaaatctattccttcaattaccagtgtaaaatgcacctgaagaaaggtgatagtagccaacctaacttgaattcgaaaactaaaattttgctaataattttttaatcggggaatttttcataatttctataatcgaatgtatttatatattttatcatcatatttttcacagtggcgacaaaaaaaccatccgtgcaattaccagtgtaaaatgcaactatagatttacctgctcaaaatgcacctgaaaaaaaaatgtatttgtacttactatagatgcattttctgaaaacttatatgtatatatataatattactatttcgtaggttttgaatccttttaatggtaatgataaagcttgtcatgtattacaggcctaattaggcctacgatcacaacctaattagacctaattagccttaaatgtgagtctaaaatacacctaaaagtaatacactcgtggaatcacctacaaaaaatgtgcctgaagaaaatgtacatagatgcattcattataggtattacacaaatgacggttgcatgatgggcctaattaggcctacggctctgacctaattagacctaattaactttagacgtgagtttgaaatgcccctgtgcatttacttgtgcaaaatgcacctgatcgaagaaaatgtatatagacgaacatcctgaaagcaattttgtgtggagaaaataaaacattcgaaggagacgaatgtccaatatgcctagaagaatacaaaagggagatgacgtaagaaaatttcctcaatcatatgtttcacccaaaatgtatgcatgatatattaacagtagacttaataagtgtcctaattgtagatttatatttgcttagtcatcttatatttttaaaataaatgtaatttggttcaaattaaatatagtatatgattttttttcttttttaatagtacaattatttgttatcatatatacatatattcttcaattaataatgtattcattttaattttattcaaacattaattatgtataactttagattgtttcaagtagcaatgacacttatttatcactttattatctgtatgttactacttcctgctagcttaccccaaagccagaaaagtaatattactcaagacaacttgagttagaaaactaaaattttgctaataatttttttaattagggcattttaataatttttataataaaatattagatcgcaataattttcacgctaacaaaaaaatacatccgtgcaattcccagttctaaatgcacctatagatttacctgcgcaaaatgcacttgaaaaaaaatgtatatgtactcactatagatgtatttcccgaaaacatatatatataatattactattttgtaagttttgaatccttttaatggtattaataaagctcgccatgaattacgggcctaattaggcttacaaccacaacttaattagacctaattaaccttagatgtaagtttaaaatgcacctaaaagtattgcactgtggatctacctatgcaaaatgcaccaaaagaaaatgtacatagatgttgggttttatgcccnnnnnnnnnntccatttcaatgtaatccattttattcaacatcaataaagaaacaga

SEQ ID NO: 129190 - DNA, 632 bp, Cannabis sativa
ataaaatgtgatttctgatctttattaattagtaaatctaattatattcaaatgagttttatttagggcacaaaacccaacagtcaatttgatataatgtataaaccatgatcaactattaaaggccaaggccttgctgattttatccttaaattttctcatgaacaggtatctattataactaaagagcgagttaacctagatgtgctagaaggcataggttggatcttaaatgttgatagagcatcaaacagtgaaggatcaagcaaaggcattatgctaatcagtccaaataaatataaatttcatgtggctatatgatttgggttcaacgccaccaacaacgaagtcgagtatgaagctttaattacgagatcgaagctcacacttaaaatgaaagtcaaataccttaaagccttcagggattcctagattgtggtctatcaggtcaatggagagtacatagctcaaggaggacgattggaaaaatatctagcttatacttgtgagttgttatctaaatttaagaaaattattgtttggagaatatcgtgagctcagaactcctaggaagatgctatggcatgactggcctcaactcgagaagtcgaattactcgatgtaattccggt

SEQ ID NO: 129191 - DNA, 783 bp, Cannabis sativa
ttaaaaaccgcctctaaagggggtttttgtagtagtgtgatcagtgcagctctttttggtggagtagcattaagcgttgctgataaatattatctctcaaaatttaacacatttgggatatttattttgtcgagccattagagcctataaaaaccacccatctcagatgtcaaagtgggttagaaaatcatttggtggaactcaaatattgaattcaatatagagaggaatattcagacatcttttcacctttatctttatcttatctttatcatatttctgagcaactttgcattttctgaccgctaacttagtctacgagttctcactatcaacaagtatactaaataaaactatttcatatctatgcttatttgttatactaaataaaaactaattagtttctactgtaaatttaaaaggtaactaaaaatataatttcaaaataactaattagcaatttaaatatttagcaattttaccaataagttatgtgagttttttttttccttttgaattttattgtgacttattagtttattaaataaactaagtaacataaatatttttacaaaagtaaaataaaaaagtaacgtaaaagtatttaaaatagtaaattaatttaataaaatttaaaaataaacacataagttttaaagttacaaaatatatataaaatagctggtaaagtagcttattatattatatgacaactcattagtttcaaaaataaattttaaggttacccaaatgtattttaaataaggaataattacataaggc

SEQ ID NO: 129192 - DNA, 914 bp, Cannabis sativa
cgcggtattaaattttcatgaaaattgtgtaaatactataagttaatttataatttattgaggggccaaattataaatacacaaaacccattctataataagcatataaataggtagtggtctctaagaaacactagagttttcgtattctctccttcctcattagaaaaaatacatgaaaaaatagtgtatctttagaagatcataaccttccatgaaatctccatcaatatatgacttcaagttaatactttcgctcctctcgttatcatcttttttttctttgatttagcaaaagttctataaatataatttagggttttctatattaaaatacttttagatatatgtttatatttcttgaatgctttataaatccaaacaattagtcgatacgatacttggtcataccacgtgatacaatattgtattgagttgcactcttcgagttagtaccaaactccaatagaaataatcttaattttctctcatttcatcattgattctctatttgtgaaatggctttacatattcatactaactaggcaatactaacaattactaattagtctttataccctttcatgtaacactctccaacccttcaaaatcaccttgtccttaaggtggtaaaaataaagaaaaaaaaaattgaaactaaaagggaaaacaacataaaaataaaaaactaatttaagctctgctttcaacccaaatgataataagtctctcgagcccatttaattgttggaccaatcaagccaaggtttctatacaaagtccaagcccaaaaatccttaggttaccaatttcttcttgggataattacataagaaactattttttaagaaaaaaaattatatttttatgtttaaagaaatttttttttttttatatttttacaatttttcata

SEQ ID NO: 129193 - DNA, 1033 bp, Cannabis sativa
catccctggaccccgaccccaacctcgacccctgacccaaacctggaccttgccctagataccaaccccaagctcggaccccggtccgagccctagatacgacttgaataaaatcaaaaaataaaaatgaaaataaactttacaaaacagacttttatttttcgtttttcaaattaaaaaataaaagtagttaaaagaacgcatttttgttttttaaaaataaaatttttataaacaaaaattatactttcatttttgtaattaaaatattaaaaaataaaaatattacaaaactccactataataaaaagaggcaagcgtgtaccattcgaactttgtatttcggtatatcaaactattttaatttttttaaaaaaattataaattattttaaataaatataaaatacacagttatataaataaaataaattaaaattatttaaataggaatacaccaaagaaaaaaaaaaagtacatataagtaaatctatctttggatgcaccaatttttcaatcttaatttataatgtcttaatgacactttcgaaataacgacttttctgttgtaagtacaaatcgatgtgttcagtttaagaccacattcttctttacacttcaatatgttattacaaagaaacacagcctcaaattttctatatcaatcgccatgggagccctgagagtgtgcactgtttattctctaggctttccaatcacaccaaacaaaacccacttcccaaaactcattcccactccatctttctccccacaccaaaaaacccaatcaagatccaaacttttgaaggccatttcttcatctgtttcaacagagctcactgacccttttcaaccagagcttgaaagtagtcaaaccccagatgggaaattcgattggtatgcacagtggtatcctattatgccactttgtgatctggataagaggaggccacatgggaagaaggtgatggggcttgatgtggtggtttggtgggacaggaatgagagtgaatggaaggtgtttgatgatagtt

SEQ ID NO: 129194 - DNA, 1222 bp, Cannabis sativa
  modified_base (1038)..(1039): a, c, t, g, unknown or other
attcagttacacactacaactagtctctaattaatttgttagaaatgattgacttatcaaattaagaaaaagaagatatagtatatactataaatcttcggagagaacatcaatgaagggctacatgttccgcctcaaccacgacacaccacagcagttttgattagtctcttgttctaggaactcatctttgtagatgtcccacaatttatttatcaacatcttaatatcatttctttgcatgttccccctctttgcacctccatagttttgaaccaacacaatcaatatagtcatatgtaatgtgtaatattgaaaccgaagactaaagaacaaacttttgaaaggttcaaaaaggtatttaaaaaaggtattgaagggtaaagttttgttaatcatcctaacgcatccttggcttcatatggtgttgatcatagtgcaaaaaaagcataataaatcaacatgtcattattgataaatttattggtttatgattataagtggtttagattatatacagggctgaccgtaaaatttagtgagtcatagggaaaaaattaattttgggcccttattagaaaaaaagtggtattttccaaaattagcaaaaaaaaaatgtgtaattttaaaagggaatgatttttttggggcctttggactaggtggaccctaggcccctaggcacaggcctagccccctatgcccagggccggcgctggttatataatacaaaaagatataaaattaataatataataagaagagatataaaattaataattttttttatagaaataaatagtttataataaataaataataattattaatgttttttatataatatatggttttgttaaatttttattgatctttttgtttaattaattaataattaatatttattaactgaataaagaattaagaaaaagagaaaattaaagagaaaagagatattgagattaaagtaattttagagtgtcacgtcacttgttcatactttatctagattttgtaaaactgtatttttataatttnnttttttttgtttttgtattttttttgaaataatcccacccttaaattttccttgataaatgtcgcaagcacaagtacgattacatttaagaaaattacactacatacctcttttaacttaatgcatatgcctttaatttttatcctttctttcaaaatctattatgtttatcttttttttttt

SEQ ID NO: 129195 - DNA, 607 bp, Cannabis sativa
caaccttattttgtgacttttgaccactactatattgatatggagcttgattgagttcacaagtaatgagttgcaacaaaactcaaattcttttttcttcattacctcattttgtgaaggtagttgtatatacataatgtccttatattcatgtttatattttagggaattattaatcaatacaagttgggcaataatggactagttcataaatgaatgaactttgggagatcatgagagtctctagaacattgtttttcaccctgtcgttggacaaatgaagaaatcagtccataaacgattttgaattaattggaatcatagttaaacctgctactagctaataattctgcgcaaaatcacatacaactaaacagtgcgaaattggttcacctgccctataacaaatcaaattggatacaataaagagacatccacatcgtaagaagacacatgtttagcaaataataattcatgtaaaaatatttttcaattaaattagacttattcgagatgaaattgtcaaaaattttaatatatttataaatctattattttcaaatgttctaagtgatatttaatttaaaagttggatatatatttttat

SEQ ID NO: 129196 - DNA, 918 bp, Cannabis sativa
gtcaaagtttgaggggaaaaattattaattagcctaattaaaaatcaaaaactgaattatgtacatattgtttaaattgtttatacttagtaataattttataaatatatgtatttaacctaaaaacaataataccctttcaaaaataagtgaaataataataatgttatattaatatgtatatacataattatttgattcattagaaaaaaaaaaatatgatgatcttgttagtataaatatatatatatttatataacttatatatttataaaagcattataaattgaaaactaaaaataatacttttagattttttagtgtttaaaaatttcaatcaaaataatatgaaaaagaataataccataacatcagtattatatagatttatagattgtatgacttacatttttgttttaaaaatgtcaaaatgttccattgttaaaaaaaataatttgtgaatataaattaattaaatatataatttatattttttttatccagaatgtcaaaaggctctattgttacaaattaatgtgtgagtatcaattaattaaaaagaattaaaataaataaaaaatgagtaaaagcttgaaataataagaaaatagaaaaattagtttctcgaaaaatgaaagggcacgtcacatatcctaacaatagcattatatagatatatatagattatataggtagctttgtaactttgctcacattttatttgtggattgttccacattaaataataatttttctttatgttagacttttatatatgatgataataataattcgacgcataatatcctatcattcatgcctcttaatatacttgcaaaaagttacgtgcgagacacgtatattaaattttatgctagtttttttctatgttagttgaaagtgatacaattaaaaatt

SEQ ID NO: 129197 - DNA, 784 bp, Cannabis sativa
tgaattaattagggctatattcagagtttacagtattctaacatgtggtatcaagagcatccctaaattagttcttgagaatgtatagtagtgttgattttccattaaattatttttcctgcatttggtgaagtgctgtatatatttatgctattgaaatttctgtgtgcgattaagtttgctttgtatatatatttatacaaactttgatattacgattgaaaatatcaaaatgtcaaaagtgattactaatgaaaagatgctaattgtacgattgaaatcttgttttgggttatatgtataagattatatatatctctttatagtttggttgtaatcgctcaattactgtgtatatacatgccgctggaattttgttcagtactgtaaagtatatatatgtataaagtttcttttttttttttttttaaaaaaaaaaagtataatctttaacttttatatacatatatggaaaagagtttaatcaagtttccgattagaagtttctgtaaatatactacggaaaagacaagtttattaagtcttttgttttatatacaatttctgtatatattatatgtatattaattattctgttatttttttatgctatcatgtatactattttgttattattattattaaaatatataatagatttaataataataataatttagtaacaattaattcaaattttggtttaaaaaatttattaaggatatataatattttagttaaattaattgaaacaaaatatcaccaaagtgatctcttttgtgta

SEQ ID NO: 129198 - DNA, 1416 bp, Cannabis sativa
tcatactccttcagttgacgggaggcataggctataactttgtcagcttgcatcagaacacatcccagaccctgtttggatgcatcagaataaacaacaaatttttctcgattcgatggcatagctaacactggtgctgttatcaattgatgtttcaactcctgaaaacttacttcacatttgtatgaccatatgaaccgttgattcttcttagttaactcggttagtggcatagagatcttagagaatccttcgacaaaacgtcgacaataccctgctaaactgagaaaactttgcacttccgtcacagattttggcctcgaccaatttttcactgattcaatcctattcaggtcaaccatgattccatcttttctaacaatatgccctagaaaagacacctctgacaactagaattcacactttctgaattttgcatacaacttatgatccctgagtcgctgtaatatcatccggagatgttgctcatgcttctcttttgactgagagtacacaaggatgtcatcgataaacactataacatatttatcgaggaaatccttgaatactctgttcatgagatccataaaagccgctgaagcatttgtcaatccgaatgacattaccagaaacttatataatatatatttaaattttaaaaaattcttaataatttaattaacatattaaaatttaaatatattttatcttacaagcataattaaagtaataaatactcatataaaagattatttatattttaattttagtatatttcaatttttttaagaattacaatatactacaatatagatttatacattcagaaaatgaaaacaaaaattgtacaaatgtcccttttgaaggttctaagttttaagtttataagcggtataaatttaatatttatttttagccgcatatgtactcaattcttataaaactataattttactccagtttcatcactacatactccattttgaacttattaaaatgatatttgtaagtagttgatactacatatttctgtctagatctaatgatctagaattttagctttatatgtatcctgtttaatacaataatagatttagtactgacgaaattagaaaaattacagtttaaaaaatattaaatacttatgttgctaaaaataaacattagatttatgtaattacaaatttaaaactttgaatacttatatcactatttacccttattattattattattattattattagtaaaaataatttgaaaagtctataatacactcataaaggttagggaaattaaagtaaatggtcccaaatcataggactatattattttatgtcctcatttcaaaaaaatatagcaaatgaccctaaatcataagactatgttagtaaatgtcctcatttcaaaattatt

SEQ ID NO: 129199 - DNA, 612 bp, Cannabis sativa
ccaaggttggtgagctttacctactaatgtagaaaaaccctttgagcatcttttactttatctttataataatttattaatgtgaaaggaccatagtgtgagaataatacgtacataattactagctatatcaacattttattttttatttttattaaaaaaacatttagttttgttataatattatttatgattctactaattttatatattttgtcaccagaagagttctactctagtattgagctattcctaataaatcaattagttcagaaaaaacagccatattctccaagtaattattattcttttattaatttataattaattaattatggggaatatgtgataattaatttgttgtaatttattagtaagctagtatttttttcatcaaactattcaatgaatgttactagagccattgtacaaattaattcaaaagaatatatagatacagcattagccgaatatagttgcttccttgaatttgcttatcattttgccaaatcttccatttcatccatttcttaatttccataaagcactctttgattatgtgaataagttaatatttaatactaggtgccatttttggttaaaagtgaaatt

SEQ ID NO: 129200 - DNA, 1632 bp, Cannabis sativa
acccaaataaaaaatcttcagattctcagttatatcaagatattaatctggtagccaaataaaaacacatcagatttgatcagatcgtgttaagaatcaaatcaaatcaaagtgaacatatctgaatgcaatcaaaacgcattagaaaattggaaacacgtatgaattacaacatacctatgcttcggcaaacgcagggattgagtggaggatgtaggcgacttgaagttgaagcttcgttcctctcaggcgtgtcccggtcagtgtggtctgtccgtctggggaattgggcgtgaggagtgataagagagagtgtcaaaggagaagggaagatctcggtttatttttaataataattaaataagtttttttaattattttctttgccatatattttttaataaattaatcatacaattttattaaactaatctgttaaaataatagccactaatttctttgaagactggatggaattataattaaaaaaaggaactaaataatatttagctgtctaattcataaatcatttaataaaaaattaaaaataaatttaaaataaaatgattaaaatatcaaaattaaccttaaaaacacttatatatagttagtaaaaattgttgcaataaattcattcgacctgagcacttaactattatgcaaaagtatgtaactacactattaataactccttcagtcacaaagaacttgttattcccatccactaacagtgataacaaaaaagaactaacaacgaaacaaaatcatatcacatagacaaaattaatacattcaaaactatgtcataaagacaagactaaaatactcaaaaccatgtcacacagacaagatttaaacactcaaaaccatgtcacagagataagactaaaacattcaaaaatatgcacaaatacaagactaatcatagtagcaaaaattgaatcacattagaaaaacacaaccacgacgggcctgaccgaagaataaggcaacatcatgcagatataaatttaggaacgaagaactctaatttttttaaattagtacacaactctatacaaatcagttacttgtcggaatttttttttttttttttggcatattaaataagtatttattttttagaaatgttaaaaaagcacctatgaaacttatcacatttataaagtataatattaatattggtataatttaatatcaaattctccatacttatttaactttaataaaaattataaaaaaatgctaaccaattatatggagcactttatagtggtggcacttgaaattagttagtaatattctaaaagttaatatattaaattatacgggacattatatgacgcccaaatacctttttatattaatagctattataaagggtgttaaaccagttaaagctagcttaagtgggcatagagtatgagggggagcgtgtgtgtactgtgtagagtcctgagatcgaatactaagttatacatttcttttttcccaaaaaaaaaaaaagaaagttatacattttttttttgtattaataatatggaggaggttttaatggttacatttttattgtaaccacatggttacatttttttttagccattggatcactattaaatggttgtgattaat

SEQ ID NO: 129201 - DNA, 966 bp, Cannabis sativa
ggaaaattgattatctagtacaattaactaaaaaaattaaacatacataagaagataaattaaaacaaattaatatagttcaaaaaaaaatcatatcaaagataaatccttaaaatttggatcacatttacttttttttttcttgtaaataactttcctaagaatttttaatttatttaaaggaagttttttctcaaagtcagcacttgaatttttagcgacatctttcattgcatctttattggaggaatcatattctatctgaacaaaatacaaaaaataaattgaaactagtttcatcttacaacaacaatgaacattttaaaaaccaaataaaaattaattgtatcaaacaacgatgaagattatgaaaacaaaacataaatgagaaatattgaagataattgaaattaatttctttagttaacaaaatagaaaacacatacacacaaaaaaaaaatataaaaaaaatcctacaaatataattaaaacatcatacaatgcacaacaatattctaaaaacaaaatataagtgtgaaaaccagttttgaatttagaaacaaaataataaaaagaaacttaaaatcatcataaaacagatcaatcccattacaaaacccttaagacctatgaaactagtttcaaaactctaaaaacctgttagaccagtttcaaacctatgaataatgtaaaccctataatattagttttgaatctgtgaaccctatgaaattattaaatgaataagtgtacgagactgatgattcatgttttcattacaaacaaaagattccagaaatattgtttttgtgtcagatccgatgatattattgctgcaacttagaatatggttattagaaaataattttacactatatttttttatcattggattaggcatgttcatggcctgggttggctgggttagaggtattttaataagccaacccaatgattgcggtttgg

SEQ ID NO: 129202 - DNA, 941 bp, Cannabis sativa
  modified_base (407)..(442): a, c, t, g, unknown or other
gaaaagataagtattgttttccgattaaatttattttataatttaattttgatggacttctaatataatttacaaggaaaccacataatatcttaaatatcacatacgaactatattaaaatatatatttatatatactaattttgctaataaacttatagtatctttttttatactttagtataacttatttgtttcttaattatgtttaaaattagtaaacgttgtttaaaaaatgtaacaccaaaatatttcaaacaacaaaataatataatataacttaaaaatctaaaaatgaaataataattttaaagttaactatgaagaaagtaaccaaatatatttaaagataaaattatcttgaaataaagcttttctttttcaaaataataataataacaacaacnnnnnnnnnnnnnnnnnnnnnnnnnnnnnnnnnnnnaataataataataataattttgatatgtaggaagaatctctatagtttttaaccatgttcgaaaaaaaggcaaccaacattaaaattatttttttttgtttcttttttataacattttaacaaaaatcataaaacaagtacattataaatataaagtttttcgttctgttatttataaaagttacaatatggtattctaataaaaaatttagttaataaaacaattttgatatgttaataaaattactaaataatatcttatagataataaaattagttatattatcaaaattactatatatatactaacttttctaataaaatatatggtaagtgtttataatttattgataatttttgaagataataaaattattgctgataaaaaaagtatcttaaaaatcattaaaaaaaaaaaggaaaaaaacagaaaaagagaaaaaagagaaaaaagttacaaaaatactttgggcccgcccattaaacatttatacagtcc

SEQ ID NO: 129203 - DNA, 1060 bp, Cannabis sativa
  modified_base (775)..(778): a, c, t, g, unknown or other
tacaaaccgtaaagttcaggtggtttagccgccaatatccctaataaaaattatgagggcatgtgacattttctttttctttttttataataatttatgttttctaatttatagatttttctgattgtatttaccattatattttcttcttttttacaattttaatatttttattatagcatgtttactattaagcaataggaatcaatggtaagagaattacatatgtttatttaatttattaaatttagaaaagagagaacttgattaaataagagtaaaaaaaaacttgattaaataagagagaaggtacttcccctactaattttctaaagaattctaaaggtaatagtttttgtttatttttattttattttttaatattaaatttattatgataattttatccttttaatatattttttacaaaataactaccatatattacaatttatggtaatttagtcaatgtaagcattccgattacgtttcctaataaaataaacaagataaatcactatcattccacttctaagcagttttagtaaacaacatattacaaatattgatcattcagatattcttcatttatttcattacatttctctattaatttattccgattttaaatattagatagtaaatgtgctgttagttcttttgaaaaagtctcacataattttatacttctaggttatatataagtgccctttgataacatttttttaatcaattttctgtttttaaaattagaaaagtgaaaatatttttcaannnnatgttctataaaactgttttaactttttaatttttaattgaaaattaaaattttaaaaacaaaaaagtcacttttataatttttttaaacaatttttttaatcaatgttttaaactccgactcagacccaaactcggccctagccctggtgccgaacttagcacccgatccggacccgaactcggccccggacccagacccgacttaaataaaataaaaataaattttacagaatacacttttgttttctgtttttaaaattaaaaaacaaaagtgattata

SEQ ID NO: 129204 - DNA, 745 bp, Cannabis sativa
gaggacaaagcatgctggaaacactcatgttgttatgtagggccagttgtaagtccatgaagcagccagaatgacgtactcgtgtataagagccatcattccataggtatacgggcccaatgaaaacttgaagtggggacgttacaatacctatgcctaaagaagaacaacaggtatgtccaaagagaaaaaacaacttcctgtagcgttttttttttacataagtgtttattataatcacagtgaacttccgtcaattttccttttttaaataataatttagggtgacaaaacatgattttaaactcccaatatcattacaagtgcaaatattcaatattcttaatcatttaaaattttctaaaaacatgggagaaattgttttcagtatcctatatattttttaataaacatttccccagctatcactttaaaatggctactcaatcatattaaaataactagatataaatatgagtaagcattatttttggctaaaagatcttgcatgattatatatagtatatattaaaaatatatttccacatgatacatttggacaatatttaatggcatctctagtattgactaatacaaataagaactagctctccctctcgcacaaacacacattcaatcccatccatatctatatattattagttaatatagttgagaacatatggctcaatctctcttctccaaccattgtttgtgaagttttgttcatctattgacatggaaa

SEQ ID NO: 129205 - DNA, 626 bp, Cannabis sativa
  modified_base (27)..(28): a, c, t, g, unknown or other
aacataaataactgctaatttccaaannaactaagcgggctttacactcataatggctcgagatagagcaaatgaaagccttgaatgtaggagacaacctggagtaattgagaacctgagataaaaaatggacagtagagttagaattatgacacgtattcacatatgatgatctattagttaagaagcaatgataatcttggagatataagggccttttaatctgtctaataggtcttgatgaggaaggaaaaggtgttgaaatggaaggggagatggtttcagcatcagttgcaccagtagcctctgttacaatagtaggagagctcggattctggtgcaaagtatcaacagggtcacaaacctgtgtaacaggggtactgggaggtggatcaggttctgggacaccacagaacatgtcttgagatgaacctgaagtctcaataacagtagggacaatatggaaaaaagtttcataatgagcaggcagtccctcattagtgacaaaaggaaaaatgtactcttggaattgaacatctctagaacaaaaaatagtgttggtctcaagattcaataatttgtaggctttcattcccatggggtatcctagaaaaatacatgacacg

SEQ ID NO: 129206 - DNA, 597 bp, Cannabis sativa
gagagagagagagagagatagttagaaagggaaagtttgagataaactttgtaatggaaagagagagggaaagtttgagataaactttgtaactaaagtttgagatacataacttcagcgtacactgtagttatttcaacaaaaattgaagagtttataatgttaaaaataagattcaaatattttattgcacactcgattatttttcttacaaccatggtaagcaattatttgaaccttatttttttgcattaaaactatttagaattttctaaaaaatttcaggtgctcctaaataacaaatgcatacacgattatgaaaaaataaagactaaagacttctcatgaatgctgaaagtagatagcagatataccagaacaacctttttaaaagtgtaacttacccaataatttttaaataagggaaaatagaataggaataattgaggcaaaattccccaaaaacttgaggttgatgcagattagttcctaaccttggaaattggcggtgaaaatacccaaggtcgataaagttgtttgtccgttcatacccaatctgttagtgtaactaacgttacacgtggactgttatagtga

SEQ ID NO: 129207 - DNA, 999 bp, Cannabis sativa
agagagagagagagagagggcgtgctgagattagtgaattgattcacagcatcaaggagagacccaggttctcaaaacctgtagaatcgtgtactgtttggctatcttaatttcaataaaatttcccttttcttcatctttgctactagtttgttctacaatttagctactgttctattggaaactaagctacaggtctggttcttatcattatcacccccaaattataatccaaatctaacaaaataaaccatttcaacttttcaaataaaccaagcagattgttagaagttagacaacatttgatcattaaaaagtaagaatttttattccacatgaatctttaaagagtcaatatcatcaaaaccaatcatttctattaaaatactcaagaattcaaatttcaaatatctatatatcaacttacaatcaacaacagatgcaacaaaaaattattctgaaccaaacttggagtactcgatccacatattcaacaatcagataaaccgaaattcgaaacaagaacaaattaaaagagcgattaacgaacctccgtcccggtgatggagattgccgttgtcggaagggagcgaggtctgtgaagcgcgagagttggagattccagaggctagggctttggcttgggtctgaaaccctgaagccagggtttttttggataatagagcacggagcgccattggtatggaaatcgaagctctgtgaagaagaaaggaaagcgaaagttgtaaaacaagggaatgaagaggtattacttatatatgcgggtgaccaaggctatgctaccgtcacagctggttaccatattgtaatgaaaatttttaggctaattagttttttttttcctaaactttcacatgtactaaatcgtgcccctaaacttttttggctgtgactaattcctccgaactattgagattgttaaatttaaggttttttgtctaattttagtaaaaaaattttaacatggatgaaagttca

SEQ ID NO: 129208 - DNA, 649 bp, Cannabis sativa
cgaggtattgttagaaggagttagttcttatccatgtcagcgttgactgccttaaatatggtttaaatcacagctgtgtaatataatttacacgtagttctttaatcgcgcgctcatattttaatatttgataatagtagtttcccgcaagttcttgctcttgcagctggaaagttggtgccatggctaaaacaaggttaaaaattcatgggaaacctggatttgctattaagatttcaaagaagaaaggtgagatgatatgctcttgtggatgtctttcaacctcctctatctcctaaatcttcattgaaagcgattcagaaacaagaggatgtcaggattgattttgtgcagttcctcagagcaaacgagaaatgtaacatttaaattgcacaaggtaagtctttgattcttccaattttacgatctggatctgtggttcgcaatctagataattcttttaagaattttgagcatggaaatagtaaggtgaagattactatggatgatattgaggatgaagtatggttttggaaaccttcgattgtgtgttatgtcttgggagcgaaccctcctttgcacattcttgaaggttttgtcaatagaatttggaaggacaaggttgatcgagtgaagatgctttcttatg

SEQ ID NO: 129209 - DNA, 1371 bp, Cannabis sativa
  modified_base (740)..(751): a, c, t, g, unknown or other
  modified_base (1052)..(1060): a, c, t, g, unknown or other
atagatgttaaaatggtgatattaattcattaatgacttggactattttaattgggtggacagcaaaatggacaggaatcctagatagaggatacgcttccggtgactatggtggtggtttgggaaagggttgtggtgattttggtatttgttttttgttatttatgatgttgtgctggcagagaaatccatatatggtataaatgatggtggtggcactggggttgtttagttttttatatttgtttttaattttttttacttcggttcataaccgaagcaaaagacccattagtgtcattgcactactatttgcttcggctataaactgaagcaaaaacttttattttttcttcggttcataactgaagtaaaaaatcaattagcgccagtttataaatgaagtaaaaaatatcactatttgcgtctacggttatagcgtcggttacaccaactgaaacaaattctttatatgtcacttaaaaattgaaggaaaaagtcctttttgtagtagggaaacataattaattaacacacatcttctagcattagaaatgtgtctagtgctccaaagtctaattctagactttgtccccattatggatggttattcgttgaatcgtttaacaccgtaaagatctcaaaagttaagtattttgtaagtttccgtctctatcagactctcccctaggtgactacttagagataaatttatgaagtatgaaacaatggtagaagcnnnnnnnnnnnnaataaccttgactctcacctaccaagacaacgttggattcttcttttgatcgaataaaaggttgctagaatggtgtccatttttgatgagttgacaactctattcaatgaatgatatctttaactctcgcctaccaagacactgtatcagtttgttggaaaccttagaacttatttaagatatgatagtttttgtagtttgacatgtctttgttacttgctgaatgtatgataatttctaaattgtgtatgaattgatattgaaccatgttattttctgttattaattgcagtataatttnnnnnnnnnattgttggtctaacttagtttgttattttaatgggacaaatcacaaaggattgtcatccattagacaaacaagatagtgttaggtctcaatagataagtatttgtaaatgcaacatgtagttgtccatccaaagatgacaacttagactagtatttacaatatgaaacaatcaaaaagattataaaataagaatgactttgactctcgcctactcaaatagcgttggatttttattttaatcgaaattatcctttaatgtttcctcttaactttttcatttcgaatttgcttaaataatatatcattggat

SEQ ID NO: 129210 - DNA, 984 bp, Cannabis sativa
tgaccggcgaacgattgccgtcagaaccaaccttgtatgacatgttgcctagagtgataccctcataaatcttggtattagatgacatgttgcctagagtgataccctcaaactatattatagtccagattttttgagttggacacctgtactctaaccaggagagattaagcgataattagcaagtcaactcccttgaccaatgttccggcatgataggggcctagctcatggaaagggcgaccatgaagagaactcccccgcaaaggagcgctgcgggaggtatcggtgatcagaagcctctcttagtccaaaaaactgaagccacctactcccacgggactgaagtcaaatgcgcctgaaaagagagtggttttttcgctgaaagtcagaaggtatcttggaatgcattttgctgagctatactcccgttttgtgaaggtttttctcgtacatgtcatactacggacttagtggccatgctttttcaagtacggcgtcaaagtttgtcccccatgatacgccatagtacaaggaatgcacatgcaatcataactgcttgatccaacaaatatttacaacggaaattcaaaaaggaaaaccctgggacgacacgtatatgatatacagtcagtacgatctgacactcttaatgtcatatggtaaaatggccacctaccaaatcaacggttggatctcgaccagagatgatcaagtcaagctggcacaggagggaaactggcttataaatactcttcatccataggataaggggactttttggaaaaaagtaaaatagtaatactatactactcacaagaaaaaaaaaactccacaaaaaattcctaggaagtttcttctttttcaagaagaacaagagtaaaaaggagttccagtccattgtatatgtatttgtacttgttgacctcgcttttagccaatgacaatgagtctaattttgtaagcgacaagtagtttaatatg

SEQ ID NO: 129211 - DNA, 977 bp, Cannabis sativa
tctctcacggacatttcagctttcattgggaatctgaatacacgtgtccttttaaggaggaatctagtctcgagtttctaggtgagagaaatctcactataacaatatggattgggttaccatcatttctttcacattatcttttttcattatattgtctggtaatagagttttatttttgttattttgtaggttgttttgtggagggcctacaattacagagaattttctaataagttttattttaaatataatctgtttgatattgattttcagtagttttaaattagggtgctagtttgttgttactagccaaagggtaaatacctttggctagttatatttagttttttagtattgttgtgcttgtgttctaggtggtgtgttaaattctaagtttgtattttaatttttattttgaagattgtcattctaatataattgtattttttggtttattgttattatgttttgtcagtttcgctacttctgacgacaactatcattatgggaaggtatttttcaatgtaacggggagatgtttgaagacgttatagctttattgtctaaattttcgggggcagttttgtcccatgtagctcgcaataagttttctgcagctcatggtttgacaaaatatgtccttcggttagacgatgagctatcttggttcgaggaggctagaccgccgattgtggtttgctgcattgttaaccatgtgtgactctgttcaccgcgtcaaaaaaaatttagagtgggaaaattcaacaaattttaaaaatattaaaatatattatattcaaaacaaattaattttatacgtacttatattataaataaaagttatcaattatcatgatatataaattttaaatggctttttttaaaaatatgagaaaaattattaaggttatgataaatatgacataaaaagtaaatgtcactaaatatgtcattatctaaccaatcaaactaaa

SEQ ID NO: 129212 - DNA, 1370 bp, Cannabis sativa
ttttttttttttttttgtaatggtgatttcaagtccatgtattacatgttgcaagacttgaagctcttttctcaatcttctggtctctttccaaatgaggagaaaactgcagtgtactgtggaggtatggctaaacaagatgtgcagagggtcgtgacagtttcaagatttcaacaaagtacattaccttttgggtaccttggtgtaccaattttctcttctaaaattttagctaaacaatgtgagattctaattgataaaatgataggaagaataagacaatatatagagcacaaggaatttctccttttccgagagaatcacattgattaattcaattcttatttcaacacacatttattggagtcaaatgtttaggattcctaagaaaattttaaagcctataaatgcatattgtcgttcttttctatggcaaggacaagcattcagttcaaatgctgaaagtataacttggaaattagtttgcaaaaaaaaaaaggtgggtgatcttggtctgaggaatattgtagcttggaatacacctatcatagaaaaatatgtttgggccattgactctaaaagagatgatctttgggtcaaatgagtccatagtgtgtacataagaatgagaattgatgggcctactctgcacctatgcagagtagttggtactggaggaaagtagtggttctgaaggatgtatttcgtgatttaatagaacaacatcatcattcgatagagcactacaatatttatgatagatgatattgtttgatttacgcagaaaatgaaagagttagataaagcaatgaggtatggaatagatttaatagtccgaaacatgttgttatttcttggttagttggttggctgttcgatggattgattaaattcaatattgtgcatgaattgacatgttaattatgtggcatctgaaaacataaaccagctcttttttaatttttcactgtgagtatgaatggtttaagggctgctaaggagtgggtagaatggcacactcgttctagcactcttgctgcactttataggtagataactcatccaaaatgagtaaatttagaaggagttatttcccaattattgtgcacttaagcactaacaagaatgcaagaacaatataaaatagagactagacacataaaccagcaaatcagtaaaccaaaaattaaaatgggcagttgctacactactacaaaacaagcctttagaggcacttttttcagcataataataaataaccgacgccatagggttagaaatttttggaaggaacttttacgctacttatggcgtcggttatttagaaataactgacgccataggggtttataaccctagcccagccattc

SEQ ID NO: 129213 - DNA, 691 bp, Cannabis sativa
gtgatttcgacttggttgatggtggagctgagttgaacggttgcagggggaatcgtggtgcaattcgaatggtgagtggaagcttggtctgtcgagtttaggcgagctggtgcgatttggtggtgagctttgagtgaggttcgagatgttgctggatttgtggtgagctgcaagtgatggctcgggttgaatggaggaaatggatggaattggtgcagctgggagatttgaacggtgtgcgatttaaggatttggctgatggtggttcaggcggtcacggattcatgtgaaatcgaaggctgggttggctttctatatggcagacggctgagtgtgtgaaggggatgaaagtgatggtggtagggttgatgttgggctgaccattaattggactggtcaacacctgctggggcccagttgaccacataaatgggcccaagactgattaaataatgtgaaatgggtctttgtatctccaaaaagcacttgggctcactcaattcaaactaagtacaaccccaaataattatctgaacaaaaatagaattgtccaatgattgcatcgtgaacaacattgcaatcacatgttttttttttctgacagaccattcactttattttgttttttcaaaccccagttcatttgatcagcctagtaccaaaacatttcttgctaagcctttgctatagc

SEQ ID NO: 129214 - DNA, 1243 bp, Cannabis sativa
actgaaccggtcgaccgttttagtacaggaatccccaaaaactacaaaaatacctcaattcgatcccaaatcaaacctaactttctagatcacctattcaagccataatgaacataaaacatgaaaaagaactgaattaaaattcccataatcaaaaatcaccatgagatagcaaagtttgagctctaaagttcaaactttactcaaacacaacaacaacactcaatttagttctaaatcagctcaataacatcaaaacaacatctaaaaacaaaatcaaacatcctttaaaactacaaaaccctaactccaaaaatcaagcatagaacctaacttagaacttaagaaaataaagagaagtgagcttggaagtttaccttggattggaaccactaagatcttgttaatataccaaaaattaagcggaaaaaccctaacttgctgttgtttttccaaagaggtcgagagggagagagagttgaagagagagagtgtaatttatctaaattctaatttttgaataaaataaaaagaataacttaattgttttacataataatatacaatataacattaaaaatcaaattacataaacttaatttaatcttttaagtcactaaaagataaaggtcaatccaaggcaaaagactattttgccccttgcatcaccaagaatcaaccttgccacttagaggcattttggtcaaatctaaaactactaatattctcgacattcccaatgtctatctaaattgtcttgctatttctaaaatactaaaccatacaaaaatgtgactctatcagccaaacgtcgcgttctacttttatcgggcataaaatatgaaaaatataaattttcatatataacataaataacacacctaaaattcaaatatatctccataaattcatgaatcataattaaaatttaaattcagagttaaaccctagttatctactaattctcatactaaaattaagcggtttttacaattatccccccgttaaaaggatttcgtcctcaaaatataacctaaacaactctgaatattgatccctcatgtcggtctccaactcccaggtggcttcctccaccttaaaatttcttcagagtaccttgaccaaaactatggtcttgtttcaaaggacattatattttctgtctagaacttgaactggttgctcttcgtatgataaatctagatggagttctagattttcataactcaacacatgagtggga

SEQ ID NO: 129215 - DNA, 1396 bp, Cannabis sativa
  modified_base (264)..(267): a, c, t, g, unknown or other
ggatcttcttaatgtaattattttgcttcaaatgcatgactccatctctcttggatctatgaacttctagaccaagtatcttctttacttgtcccaattctttcatgtcaaattcagccttgagtttatctttacttcctttggttactaccttgtctttgcccattattagcatatcatctacatagagtagaagatacacaaatgttgattcttctagatgcttgaaatacaaacagtgatcaaacttggaccttgtgaaannnntctcctgaacatagctgtcaaatcgtttgttccattgttgtggtgattgcttaaggccgtatagggacttttccaacttacaaaccatctcttttccatcttgttccacctgaaatctaggtggttgctccatgtatatctcttcttctaagtaaccatttagaaacgcaattttaacatcaagctgttccacttctaaaccttgttgaattgtcattgacaacataagtctaatggtcttatacttcaccacaggtaagaacacctcggtgtaatctatcccttccacctgagtgaaacctttggcaactaatcttgtcttaaaccttactggtagggctgaacatcgggcgggtttaccgggtttcgggttcgcgggttttgggttcacgggtttcgggttcaaaaaaatgaaaccgaacccggacccgaatagggcacgggttggcgggttagcgggtttcggttggccgggttggcgggttgacccggtcaactcagtcaactctttaaaaaaattattttatacaatatatataaatttttaataaaaaataatatataaaaatattttaatttatattatttaccagaaaatcaacctacaacaaagaaaaaggagctatatttaactattaaggacattacatatctccaaaacaaataaatgagaacacaattctgttctttttatatactaactggaaaatcaaccaaactgtctattatcatcagatcccatcatttcatctttaattgaggactactgtgaataagtagcaaaaatccacggtttcaaaacttgtccaagatatataatgaatctctgaatatcacaaatttagttggatatataatggcatgagcttcaattttttatatctcattgctttttctagtcccagctttcacatgcaccaagcacgtacattcaatttagtgtaattttatgatgctaacaaaagcaaataacctttttttgagagtgtcgtgtgtgtatgtggagagagttactgtgttagtgttagggctgctgaaatgtaaaagtgaatgtaaataatttttaaggttttttatttatttaattattaatttaatatatatatatataaacagtaataaaaaaata

SEQ ID NO: 129216 - DNA, 1132 bp, Cannabis sativa
  modified_base (368)..(385): a, c, t, g, unknown or other
  modified_base (453)..(453): a, c, t, g, unknown or other
ggaaaagccaaatttgtagtagtgctaatctaatccaatctacaaaagtgaggattggatcagttattttaaattacttattttttaatattcaattatttaatatttataaaaaaaatatatattttttttcacataactagcaacaaaatgaaacaaattataattattttatgtctccaacacattaaaataaataacaaataacaaatctaaaagaagaaaaaaaattatatgtataaagaaatgtttacttttattttaaattgtatgtagaaaaaaaattatatataagcatagaatatgcatttgatctattaagttttgaaatataattgtatgtattaaacttttaaattactattttnnnnnnnnnnnnnnnnnntttgtatatataattttttaatttatttttttaaaaaaatttgtagattgaattggatcggttacttntacatgtcaatcaacatctaatctgcacaaacacgaattttgaattttacaatccaatcctcacaagatggatttcccattgatttgctacaaagattaaggtcttcttagcattacacaagttgaggactttgacaattttgtatatagtcttaaatgtgggcttaagagatagagtttttaaaccatatatgtctccaatcaaaaaatatttatattgtgtgacaatttgtacaacatttagctgatgacacagctttcgactataattgaagctagtactttttaaagtgagtgacattttaactatgtattaccgattaatttaacacacaacttttaagatactcctaatctacgtacatttctcctaatttctttcctatataccaaacataatgttacttaatcatacgatgaaatataccaacaacaataagccaccattattatattaccaacaacaatgcaaggtgaccatattttaattaaaattaataaaacttgtaataaaaggaaaaattaccaaaacagcaacatacaaaaaaaggtactcaattttttaccaaggcaaaaaagtaagttttttttttaaagggatattggcggctaaactacctgaattttacggtttgtaacacttaaccacaaaaaccgaatttttagcggctaaactacc

SEQ ID NO: 129217 - DNA, 1040 bp, Cannabis sativa
gaattagattgatttactaatgattattactaatgattattactgtgatataataaacaatacgttaataaaagatgttaactcacatcagtcttgtcatacataatcaaattatatacaatacctttactaaatgtccatccacaaatataattcaaatcaaaattacatgctactgaagtatagtgcttagtaaaccgtacttggtaattctatattaaagattccataactttaatacactattgacttgttctattcatatagtatgatcctaactctcttatacttccttacaagatcatagtttctccatatgaatataaaattttctcatatttattagttatatttctataattaacatattcattcattaataatatatttgtatttcatatattgtttaatatattatccattaaataattatttttaagacataaaccctaacaactagttgcatagctcgactccaaaaaacataattatcttgaccagttaagagttgaaaaaccaagatgttacttggattatcccttgatgaagatagtatggatctggaggatcttcaagcgaatttctcaaattagcaacttgaagattttgattattttgaattataggcatctgcaaattttcaacgatggtaggattcaaaactctgatttcagtttgcaaggtttgatcattattccacattgttgattgagagaggaatcaccgaacttgaatcagaaagaacaagataaggtttgaggcacaatgatcagagaagaatagggaagaaactcagaagaagaagagaaacaccaccttttgtcggagaagagaacatgacaaaaaaaattggaaggaagaattaagattggttaagggaaaacataattttctggctctcatatcatattgcggaatgaagaatagagagaaaagaaaaatgaaattgtatcattgagaaattgagtgaatgaataagagcactaggggtgttattataccgctcaaactgcccacaccgtaaaaaaatacggtttgaa

SEQ ID NO: 129218 - DNA, 838 bp, Cannabis sativa
agcaaagaactatccaatcaacccaagttttaataaaaccaataaaatttaatgtaagcccaaataaaagtctaacatgtaagtctccaagtgattccgtgcttatgttagagaagaagctaacctcttatgtaagaggaaaactattctcaccaaatttggtatcacggattttacctaatgcagacataccgcttttggcaaaagtgttcactaaggaacactggccaggttgtaggagcttatgaaattttacacttgatcttgtgggggacttccataagaagaactgttatgaaagaaggcactaacaagatgaggcttgctgaagtttcacgaaaaggaaaaacagatgttgattgacaagcaactacttcccaagaccacgcaatcggcattggtgtatatttattaccactacggcgtaaaccccaaatcagaaagtgaaccaacgattacaccgtagacttctaagttacccaagaagtatttgatcgctccaggtaaatgggtgtgctgagaccagtcacaagaaccatcttccacagtcattaaagagattatcaatcactagaccgactattaatatgtaaacatgattacgatcctacgaaagccggaccaaaaattatattggaagatgttcaaattctatgtctctgaaacagctcaaattgttgatggccttacaaaaactatttcaagctgaaggtttaatcagttcagaactaaatttgaaattattgacaccactaattttaaatttgaggggagtgtcttagttagctatgtgctacgataattatgtgagctgttaggattcggttagagttagatt

SEQ ID NO: 129219 - DNA, 1232 bp, Cannabis sativa
gccgcccatataaacaggtagggtgagagggggtcgccttgccgtaagccacaggaagagcttatcttaccaacccgacccccattaagacagatgttgagagtagtggtggaaatgcattgcgagatccaactacggaactttagaggtgtccctaagcattccatcacatggtctataaatctccagctcatcctatcgtaagctttgacaagatcgattttgattgcaaataaaccttcctttcctttctttctgttgaaagagtcactaatctcttggactatgacattgttatcatggatatttcttcccggaacaaacgcagcttgagtaagacaaatgagcgaaggtaacaaaggtttaattctattcgccaagatcttaaaaataaccttgtacaccacattgcaaagggagatgggtctaaactggttagttcttttcgggttctggacctttggaatgagtaccacattagttgagttgatacctatatgcatatttccatttataaaaaaatcaaacactgcctcacagaagtcaccactaacagactcccaatagtgcttatagaacaggacagacattccgtcagggccaggagccttatggttattcatggcaaaaagggttctcttgatctcatctgtgctggggcaggtaaggagagactcggagtctttcaaagaaaatctttcttggaataaatgactacaatcgtaagccatgccattatccgctcctgagaagatacatttgaaaaagtcgatgaactccctgccaataagctcacgactagatatccaaagattattcttgtctaaaatactctcaatagcatttcttctacctttaatagtagctgacaaaaagaaaaactttgaacatttatctccgtcctttagccaagaaatccttgccctttgtttccagtagatcgcttttctttccagaaattcattcagcgcacgacgaatgtcacattcccggttccagtcccgggatccaacaggaaggctctgcaaggcgttgagcttcttttctaagtcctttatgaccatatctagcttgccaaattcagttcgattccaatgcagcagagcgacccttgtggcacccacttttttaaacactcgggcagggggccagggaggactaattgacttccaagcattgtcaactaccaagttgcttctctcgtctcgagtccacccttcttcaaatttaaa

SEQ ID NO: 129220 - DNA, 1618 bp, Cannabis sativa
  modified_base (1563)..(1566): a, c, t, g, unknown or other
tttttaaaaaaaattataataatttacggtttctaaaataaaatttaaacatttaattaatttaacgcatgcatgcttgatttttttgttatgcgtataattaattaattttgaattttattattttcaatattataaattatttaaattttaaaaaactagtataatacacatgccacaaacagagacacttataccagttagaacctccaacaaaaataataagataaatataaatgctttaaattaactattggatttttttttttaataactcaagccatccaaaaccatggatgaatcaaagaagcaaattcctagaaaaaaaatataatcaacctctataagagagaattgcgctaatatatgtgctacctaatttgctgatcctttacaaaagaaataaaaactgaaattgtagagtcaagtaaaaccttacaatcattaagcacatagccataaggagaagctataaataaaaaattatttaagtcttgaactaatgtaaggcaatcaaattcaatctcctcatcagcctaagctttattatttatccaagtcaaaggctctttgagtcatagcctccaccatgagcaactgcaaagaatttagctaatgcttctttttcgcttctagcgccataccaatagcagctcaagtcacaaacccacacccaaaatgacccttctcaatagataaagcaccttcaatactaactttgatgttaggaaaaattggtttggtccaatatgcttaatctcatctctatttttattttgatttagaggtgttattctatatcgaagcattactccattaatcaaaattgagtttagctattgtaactatatccatatcagaagagatctttccatcccaaattagatcatttctaaattttcaaatggcccaacataccattgtaacttctactgattcttccccattccagacttgtaatccttcctggaaccacgctgcaaaggtcattgcagcagcaccagacttggcacgcttgtgatgttccatcggctttgggcaaatggacaatgaaccaataagtgtagagcagtttcaggggtccctaaacaattaggacatctgacatcgtggtactttcttaagagataactaaaatcgagttggcaaacaattagaacaagctctccacaaaaagttttgtacctttggtaggatttttagttgccacaacttcctcaaaactcgacattatcatcttgtttctgatctccaatattctcccgaatcatcttataagcactactaacagagtatttcttgatttttcccgtatctaataccaaaaatcaccatctatgttatcacttaaaggatcataccagagccctatccctcccattaagcacatctgaaataatatttgattcccactctttacgccccatcttgaagaatgaataatctatagttttgtctaccaaggcaggatgttaagaagtaacaaaatgattactgttatcaagaaccaatgatcacgaataatctatagtgggggaatattatattattttatataatatnnnntttagattaaataattaagttatacataattaagtgtgacaaagtattaatt

SEQ ID NO: 129221 - DNA, 1190 bp, Cannabis sativa
aatgattggttgaggcgcatgtttgttgtaaaagaaaaatgggctttggtatacggtagagagactttttgtgcagaggtgacaactactcaaaggtctgaaagtatgaataatgttataaaaaattatgttagctgtaagcatgatctactatgattttttcaacattttgataggcttataaatgatcgtcgttataaagagctacaagctgattttaggacatctcacagtaacttgtcattgtcatttcctactgaaatactgaaacatgcagcaaagatatacaacaccaacgatattcaaattgtttcaagttaaggtatgcaatgcttatgattgtgctttgtatatttgtgatgaaacgataatattgacaaaatacaaagtcactcctcatggaaagtcaattgagtatacgattgaatatttttttgttgattgcacatgctttgaaagttctttatacaaagaatatttcaaaaatacctaatagatatgttttacaaaagtggacaaaacatgcaaaggttggaattaaagtagacacattgaagtctatcaattatgaggatcctaaggctagattgggattgcattataaaaacttatatataaggcaaacacaagtatcaacaaagttagcagaatatgaagaagcatatataattgctttaaatggtttcaataaaattatggaggatgtggatgcaatcttaagacaaaaagaaaccaatgaggattaagtgttagcatttattgaaaaacaagtaaaaggggagattgtggcataatttcctggctaatgaatttaccataataactagaatacgaggtataaggactataatatcctctaaaatccctacaacccgtgatcttgaatatatcatagggattgattgcttctaaatcccagctctcgtctaagtgacttgccttatccatcatggtcccgtactgctcggctatcctatagtacaactcagtatagctaatttggacgtggaacctgggataccaactattaaacctatgtgtaatgcgatctacgaggaggggattccaagtataaaagttacagcggctatctcgaaataaaactagagtgttacgcttagccctaatcactgtgggtgaccaaccacattgattacctcgggatgctccttcttcggctttctaagggg

SEQ ID NO: 129222 - DNA, 953 bp, Cannabis sativa
aaaaaagctaacattgtgagaaatgggtaattatgcaaattcctcaataccaccataactgcagcaaagaatgtaagattttgagaaatgggtgatcaccatacctgcagcaagaagtgcatcccagagttcttcaggggaaatagagccattatgctcaatatctatagattgaaaaatgagatagagttgaagctctttatcgtccatataacgcttaaattcatggtaatcgactctgccatcttggtttgaatcacagacatttaaaagatcttttgcgtacttgtattgaggtgggatttgaagagaggagagaccgctctcaatttgggaatactctaagtagcctccgtcggcggtgtcgaagaagttgaatagacttcgaattcttaagtccctttcttcttcggtttcttgcagagccaagagaacatgctccattgtcacagacgatgacgacgacgacgatgatgatgattctcccattccattcaatacaatttcaatttcaattcaaaatcaaagctttcgtttttatgccaaaattggaaggaaatgcatttagcagagttacctactaataaaaatcagatctttgaattcggagttggagggatcattcccaatcatccacacacacacaatggaacagaatcatctttttttcttttcttttctttttgcctattttattattatttttataaataacaaagaaatagaagagaaatatctgaatgaatggagagaaatatcagtcgatctcattattacaatttttattattattattattattgttgttgtaataaaactctgaattagttaattttgtagttatgagtcttatgaccaataattttttaaaaggagagaattatttaattatttagggtgcgtttggtaacacttttttaatgagttttttgtttttaaaagtagaaaagtga

SEQ ID NO: 129223 - DNA, 552 bp, Cannabis sativa
ttctgcaagtgtgtttgtatcagaaagaagggcctgtgggttggggtctgagttctgaggatttgaggaagatgctgaattatcagtatcatatctgtggtaacactatatccttctattgaattgtaaaaagatgaccaatcttgccacagatttgacaaactggtcaagaaccatggccacgaccattggagggaccccgtcctccttgttgagacccatggccttgagaattgccacggccattgaaagaacctctgccagtgttgttgcgatttgatccagatgaatttttattaaactgagcataattggcctaagctgtgtccaagatttggggagtcatttgttcgattcacatctcctgattttgaagcatatattggacttcttggagagtaagagcatcagcccttgtagtgaggagaaaaactactgtcttatattcatgtccgactccaccgaggatgtacatggcgagttcttgatcagataatctgtgtcctgcagcagcaagagaatcagcaagattcttcattttcaaaatgtact

SEQ ID NO: 129224 - DNA, 816 bp, Cannabis sativa
  modified_base (192)..(193): a, c, t, g, unknown or other
tgttattttttggaaaatcgtaaaaatgtaaaaaaaaaaaaattatttgaacgtaaaaatgtaaatattttataaaaaatggtaccttatgtaattattccttaactttaaaggtattttgacatcacatactgaaattttaatttttttttttattgtaggatagaagtttttttaaaaatactgtgtaanntttatactgtgtactgtgttaaatttttactgttgttctatgattatttttagttgttctaatgttacttttagttattctattttgttatttcacaattattttgtgttatttgataaaagaatagtacgtttgtaaaaaaatttattcgacaataatattataaattttccctcaaaattcaatatttttgtaatgtttttttttttacaaaataagcgtcatacaaccagcaaattaaggtttgcctacttttgtttcgcctgattgataacgatccatttgtaattatttccacgtaattttcgctcaatacctttgattaaatttaatgatgtgctctttcttctaagaaaatataagtatagcttttctttttaataagtttaaattgattattcctattgccaaagcttttgattatttattgggcttcagttttcatttttattctctgtttcttttttgtttttaattgctttcaatgccattttttttttccgttaaaacttaaaacctttagggagtgtttggaatgggttaatgctaacaagggaatgagaatgtgaaacattaccttgtttgttttgagtctttagccttgaaatgttattcccttagta

SEQ ID NO: 129225 - DNA, 2126 bp, Cannabis sativa
gtgtaactaggttatttatcagaaggggttcgggtttaatatttttaaaaactcaaaatttggaacctagttagcattttttatttattttttttttctatgtatatatgttatataattatattatatttattctttttaattgtgaatttgtgagtgtttgttaaattgttaatgtgttagtttatgtaatatgtatatataataataatatattgtataattgtattatttagtagtttttagtatctttcttgaaccaacacatataatatatatagatgatatgttggttcaacaggatgcaacttgcaagggtttggtagttgttggtgcggcaggactgactctgagggttggcaaactaggcgtgtgtcttgagccactaaacgttgaggccctaaaattataaaaaaaatattattagtatatagattaaatattaaataataagaaaatataacaaatattgtttggtgtagtagtaaagagtcttactttaagttaagatatcaaatgatcaattatcaacctctatttttttatttttttaaaaaaatatataatgtgtagttatgaaggattgaaacttgaagctagggatgctccccgcttaattatttcccatcagggatagggcagagaatctcctaatgggagcagggacgggacgagacgagaaattctctaataaaaaaataatgttaataataataatttaaatgtataaaaataataaactacataaaaattgtaatatttcacgttaattattattcaataaactaattattatccaaaatacaacttgaaattcataaaaaagatactaagaaaatacacataaattataaataataaaatattactaaaaatataatataaaatactaaacgggtccctgtctgtcggggcaggaagtgtaatcctcgtccctgtcccgtttaacattcagagacagaaagtaatttccgtccccaccctattcctcatttagacaggaaattcatgtctcattaagagcgggtccccgcaaggccccattcacataggaaaatgtgcatacctacttggagctcttaagattccaaaatattagaattactgttttgataataattaaattatatatagagccctaaaatttgattttattttagacctcatatactttttaatcgagaggaagttgaacctcttgtttccactacaaactttggtgcttgagtttcaattttaataaaaaatttcattaagagcactttcattagattctttactttacttttatattttttaaacagtaatttgtgacataaatacttaagtttaacttttaattgtaaataaatacttaaatttaatttttgacggtaataatatttaagttataattctagaaattctgtaggtacttaactgttaagtattaagtaaattgacacggacaatcttttattggttatattttatattatatatttattcattttaaatatatatattaatttatacacatacacataaaataaataaaaataaaaataaaataagtttaaaagaatgaataatggttcctgtggagacactaatcataataaaaaaaaaaaagtataaaataactcacttgatgcatattattttgtaataattctctctctattttttttttcttaaaaaaatttacttatttaaaaaaaaaaactaatgtcaatgctctaagtagtaagtaatatgaaaagaaagtcatatttttgtaaatagttaaaaaaaaaatgaaattatatatgatcaaaataatatgaggtatgttaaaagtaatattataaaatataatattattattagtataatttaacattaattttttttaatttaataaaataaaaaaaaatatcaaaactaattataaaacatcatatcatacaaaacttgatatctaaacgtgatataatagaaaacttgatatctaagagtatctccaatgataatattttggagaatggttgatgatgtggaaaacttatgtggaaaaatatagagatgctataccattggagataaaagaatgttattcttgaaatttacattgatgccacataatggcattgatactatgttttttt

SEQ ID NO: 129226 - DNA, 901 bp, Cannabis sativa
  modified_base (861)..(875): a, c, t, g, unknown or other
ggtggttgcccagccacaagaaggacagaggggttgttgttgagcctgagatccctaactggccccccatgccgctggttgccaggattttgttgttctcgtcgttagacctttgagacaaggtatgtcctcattctaaagggaagatctgtcctagtccccgagggaccaggttggtcagcttgtcgatagaccctatttaatctatcaacaagtcttccttgaagtagatctttgatgagatcctagcctcttcgaccggttctcttgttgaactgccttattagatcggtggcctctctattgcagcgatctaactcttgctcgtgagatcgaaggatgtgctcttggtcatccatccatctcaagaattcgcgtctctactgaatgaatacatcgcagtcagcagcgcgtggttcatcgactaggccagcttggcaaacgacctctctaagtttggctaacttgagatcttttcccaagtccacgcgtggctggccaattcctggtctcgtctctcatgcataatacttgggtacatattcagttgttattcttggggggttcaccctaaggattcttccttcagtcggaggcgcctgtggagggtcctcccttggaggtagggaccttccacttcaattcattgggatgttaatttgtatcagtctagccactataaagtcctactaagtaatcctagctgcccatagaactaaatgggaggtgtggccgcccaaagtctccaggatctcgaaggtcaagaaatgcaggatctggcaggctaaggtctgtaggtattggcaggtcactatagctccactaagagtaggccagacattgttggaaatattttaccannnnnnnnnnnnnnnaccaagtatgtttgattaacatccta

SEQ ID NO: 129227 - DNA, 592 bp, Cannabis sativa
taacaaaatgagcccatttcgaaagaaagcccagcatcacattatggcactgctttccattcaaaatctaaaacaacatatcgccgccgttaattgataaaaccctaaaatccctaaaacccctaattccatctataaagacgccatcttcatatcctatcatcctgtgcctccattatcactcgttctcaatccttcccttcatatcgaagctattcggtgctttttcttcgattgtcttcttgctattctatatctcgtatttttttgattttttctttctccaatcaatggatatgctctattatattattcaagtttttctcgggaaataactatcgttcgatcgtctttcatagttggaaatctatcgcctactctaatcccgatggttattggagtagagtttgattattgtttgtatcttctttgtgttatatttacccctctttaactgtatgatacttgttgatgtcaatgatgataaatctaaggcttgtttctcaaaacattcgcagtggccgactaaagctttcgccttcgccaggcttgagagctaatgctgccttaaccttccttggatgtctgagat

SEQ ID NO: 129228 - DNA, 1269 bp, Cannabis sativa
aaaaaaagtactatctcatagagtggcttgcatgtgagagaagtacttggcaatataatataaactcacacttggccatagcgggtatgggagggtacgtgtggaggtcttaaattatgcaatataatgtatatataaactcttcaataaaaaaaaaacgaaattcatatcaaattcaaaaactcacacagaggatatgttatgctttaatccaacaatattaagtgatcttatgattcgcactttagtgttgagattgagttaaaaaaaaatgatccttattataaagataaatgatagttttaaaaattattagaaaaatatatatcttttttaaagggtgattttttttatttgggcccctaaaatgagtggaccctaagctcggatctaacccgcttatacttagtgtcggccctaattgagatatttttaagtaattagttttctttttcttttaaaaaaaaaaaaaattctctagctatataattattattataaatatgtctaattgattaattgaagctaaatatataaatattaattagttctaaaaatatacatttatatagtctcaaaatttattattagactactatctaagcatatatttttctttttgactattgagttgcatcatattatcttaaatcaatgctagtgtcaataaattatttaaaataataaaaataaataaaatacaattaaaaaagtacatttgtattatatttataattcaaaggaattttattttcaagagagcataattctagaacataattgttgaagattaaaaatcatatatattcacttataaatattaaaaaaaaacaaataaaaattgttgcatatatttattgtaatgggcacttattaaatgatgggcataaaacaataaacaaatattttagggaactctaaaaatggatgagaaaagtccactcatctcatccccacatgagaataagagtagcaaaattgtttgcataataagtgggaatgggaaatgagctaccacgtgtaccgcaagggattcctctcgagaattgctactactttctttgatgtcatagagtttaattaagagaaatggtaaagtgcgttagtagtgcattatcatccttttatgtactaatatcgctattggtttaactaaaaactaggtctcatatgatttaatataataatttttagaaagtatcgctagtcaatcgcaacgcgacatgtcgagaaagtgctagacaatactgatgcctaatagcaatgctc

SEQ ID NO: 129229 - DNA, 514 bp, Cannabis sativa
ttgtcatttaacaaaacacagggtccaatctataatttttgcaaaacacaggctctaaaatggtatttacccaacaaattaatgacgagctgcttattaactcacatttatggattatcaatcgtgactttgatagaagatggatggagcttctaattattatggatgcgtttatgaatatcatcatgcaaataaattgattttatatcactcttcaatttgaattagcaaaaataatatattttttttgcatcatatgaaatccaaacatgactaaaacaaattatttatctctccttctaattcaatcatagataaaaaggagttaatggtaacaaaactcctgatagttttactttatttgtaattaatccctaaaattaaaattttagcgacaaaactccctgttggaaaaattctcattacaagagagaataggaggattacaatcaaaatactcaaaatacaaataaaagtatttcatcaagattacaagaaatctagaaaagaagaa

SEQ ID NO: 129230 - DNA, 1137 bp, Cannabis sativa
  modified_base (156)..(158): a, c, t, g, unknown or other
tttcatatcgttttagaagtttatatttaggatgttaaataacatacttgtttgtaaatctaagacccagataaaataattccaacacaaatatgtatttatatatattctcgactaaatagaatttatacattaaaaataatcatgaaataaatnnngtgaaccatacaacataaaagcaatttctaatcttttatttattagtaaatatgattatattaaaatgggttttatttatggcacaaactaaactgatatgactagggcaggcattgattgaacttagaaataaagtttagacagatactataaaggattttactataactacaagtaaactattaaggtatgaggattgagtttgtgtcccaggagatgattagataaagaaggaaatccttgatgagtttcatagtactccatattccctacacccaagaacaatgaagatgtatcatgacgtcaaggcactatattggtggccggggatgaaaagtgatattgttgaatatgtctcgaagtgtttaacctatgagcaagtgaaagctgaacgttaaaggccagcaggtttacttcagcctttgagaatacctaaatgaaaatgggaagacataacgatggactttgtagtagggttacctagaactactgggctacatgattccatatagattcaccaagtaagcacacttcttgcctataaaggtgacctatattgtggaccaatataggtccataatataggttgttgatcgtactcggttaggaggttgtcgatcgtactggtatgagtactgctgtttgcgattttagggatgacttcttatcccagttatttagttaagatcgggataaaagggtttcacattaaacccttttatcttggttcttaactaataaccgggataaaaggtgcccctaaaaaaattaattcctgtttggcaaacccataaaaatcgaatcttgaacatatttttatgccttaatatttttttttaacgttctaccaaacagggcccttgtctaaaaaaatatttggtgcttatttgaggcgccaaatctaaaagtgggataaaaagtctcaatatatcttttatcccattttttatttttgttaactaaaaaagtgggataaaa

SEQ ID NO: 129231 - DNA, 725 bp, Cannabis sativa
  modified_base (347)..(352): a, c, t, g, unknown or other
ctacattaattcctcactcaaaatgccattcaaaaaggtctacttcacatccatttggtaaaattttatatcagaatacaagcaatgcacaagagtaaacgaatagattctaatcttgctactggagcaaaagtttcatcaaagtcaataccttctacctgtgcatacccttgtgccaccaatcaagcattgttcctcacaattgtgtcgaattcatcactttttattttaaaagatccactttgttccaatcacattgataccttttggtcttcgaaccaaaatccaaaccttgttgcggacaaactgattaagttcttcttgcattacattgagccattcttcannnnnntggcttccttcacatttttcagttcaaattgtgagacaaaataaagaaaactaatcaaattaacataccttgttcttgttaccatgttttcttcaaaatttccaagaatgagatctttaggatgattcagttttactctggttcttgattcattttggatagaatcagtaatggtgtttaaatgaatcgagataggtggttctggttctcctgcattagatgcagcgacagattcatcatttgcgtatgcagaattcaattctactacatcagaatctacatttgctacttctagtggagtatccagaaaactgtctatctcaacttctgtggaaaattctaaaaaaaaattaaaatcatcaacaaccacatt

SEQ ID NO: 129232 - DNA, 2143 bp, Cannabis sativa
  modified_base (26)..(55): a, c, t, g, unknown or other
aatcactgaaatagtaaaattgaatnnnnnnnnnnnnnnnnnnnnnnnnnnnnnnatctcaatagttcggggggaatttttaagggccaaaaaagttcagcggacacgatttagtacatgtcaaagttcaggggaagaaatattataattagccttttaaataaatataggtaccaaatagttatttattgcttaataaatttattttaaaagaagtagaataaaaaaatcaacttttattacaaatattataatcaatagtttgaatattaaaaaaataataataaaaagttaaatataaaaataatttattttaaaaatattaattactaaaaagtctattgaatatattaattagttattttttaaaatatataattaatcataattaatttgattctgtaaaataaatatttatttaataataacatatatgtagaaaatattattaaaagtaaaaaaaatatctttcaataaaaagtaaaaaatataattaggaatggcaaaacgggtttcgacacggtacacgaacatgacacgacacgaattttagtggttaggattaggaaaattagatgcaggttgaaaacaggtcaatatgacttgacacgaaataaaaataagtcaaactcgacatgacacgcttcacacgaatttgatacaatataataaaataaaaaaaatcttaataataataatatgatttatataaaaatatatatttagtgattcaaaattaaattagaaatataaagtttaattttcttttaagatgaaaataaaaatattttaaatttttttatttttatcatatatataacaaactatatacacataattgtatataaattttttaatggaacctaaatttattatttttcattaaaactacagttacaataatagcaaaacgagctacagtggatcagcatgaatacaacacaattttttactggttgagttaggattgagaaaattagacacgagttaaaaaacaaagcgacacgcgtgacacaaaatatagaagcaggtcatataaaatataacaccaacacaacacgatgacccgttttgccacctctaaatataaccgatcattattacactaaaaattaccaatcaataatcaataaatagtcatccctatatattatatgtacacaccacatttatgatatttgaattttgaaagctgaataagagttcccagccgtaataagcttttgaaaagtgaacagtgttaacatttcaaacattcataatttaaaggaggaagtaaatcaaagattataaacatcaattttgtttttataaaagcaagaacttgtatatgcctatttgccctttgtgcataatcatcataaaagtacacagtaaaacaaggaattgaaataaattttccgaaattccaaacacccagtagaccaaaatacacgaatagtaggaaaagataaggacttacagtgagtgggaatgaggtgagaaggctgagaaacatgaagaatacaaacttggttacccttaaactgtctgaaagtccaattaagcaggcacaatgctttctccacagacttcccaactgccacgtacaccttgtcaccatcgtcctcgacgatatcagacacctggcaagtgattgcccgatcaaactcaactgggaaacttgctggagaagaaaacccggaaacgaattcaggcgaagaaggtacgtggttaggagggtatttagggcttagaagctccattttttccgggaaaaatggggtcgacgaagatcggcagtggagagaacagagctgaaagttgaggtgggctatgaagataagtatggagtgttaatgtggcagtcaggtagacctagtgatggtatctttcaaagtaacaattaagtgaggtgcgtgagactatttcgtggagatttcttttcatgatttccaacggagatttgaccttttcgtaatgacttgacagcaatttggccaagaaggaaaccagaaattctagtatcattaaataaaatattacaaatgggtccacaacaattttttagtttaatttttttatattataattatttaaggtattttataaaattataaaaaaattaaaaatataatttaaacacttaggtggcgtttggttg

SEQ ID NO: 129233 - DNA, 873 bp, Cannabis sativa
gtaatgggttttatttagggcacaaaaccgaacacaaccactgccactatttgtgctaaaaagatggcagtggtcagccaagcagtttttataccacttagttttgacatgttgatgaagaaaaagtacttttggcaaaaaatctcatccccatttgatgtggctaacaactaccactctttgtgccacaaagatggtagtggttggctaggcttgtgttttggtgagaaatagtttcttccacttgtgttgtactcgtggatgttgagggaacatattttgacaagtccctttggtattttgtgagtggtgagaactgacatcttcttgtagcagtgctctccaaaaagaaggagagcactgccaccttgatgtggcactggtcgcatagtccgtgttgtatttttttgactttatgttcaagtttaagccctcttatgccaaaatgagttaagtccttattgatctccttatcggattgaggtctctagggtaaaaatgctcacgcgggcccataaaccctagtttggacacacttaggtgtgtgagtctcaacaccaaatgcatggtcaatgttttcgagactcttaaaggtgtcatgaggccctcaagtagaatgtcttaacttatttgacatttgtaaatcttggttgaaattgcaaaattgactttttttttttaattttttgaaaattatatataacaattttggatgatataattttgtaaaaaaatgtagagaggcgtacaagataataactataaaattactcttaccaaataaatatatatgggtatattttaaatgggtattacctatgaatgagtattctattattagccattagatcaaatctaatggttgatatttat

SEQ ID NO: 129234 - DNA, 1051 bp, Cannabis sativa
cagggttggctgacattaaaacagtgctttgattatcacaccaaatggggggaacaacgagttgtgcaaagccaatttcagcaagtaaagattgtagccaaactatctcaacagtggcatttgtatggctcctatattcaccttttgtgcttgaccttgacattattttttgctttttagaactctaggagatcatatataccctaagtagatgcagaagcctaaagttgaccttctatcatcaggatcagatgcccaatcaacatcataaaacccttttaagaccagtttggagcatgattttaagtgtaatccatagtcaagagtccccttaaaatacctaagtatcttcttaacaactttgaaatgaggctcaaggagattatgcataaattgtgacactttgttgatagcatatgccatttctggtcttgtgatcacagcatattgcagggctcctacaaggcttctgtatagatgtggatcagcaacagggtcaccagtaaaacctgacagtttctctgaactgaccattggattgggaagagattttgcacaatctattttggctatatgcaataagtcaatgatgtacttcttttggcataagtgaagaccatcagtgagatgagtcacttgaatgtcaaggaagtaatcaatgtgacctaaatcttttagagcaaaggttgcattaagagctgtgataagattggataattcagtgagagagctgcctataacaagtatgtcatccacaaaaactaggatgaaggtaatgtgactctctataactctcaagaataaggattgatctgcctttgttgaagtaaaaccaaaggtatgcaatgatgttcttagtttgtcaaatcaagcccttagggcttgttttaaacaatatattgctttgtttaacttgcattacagatgtggggagtcgggatcaatgaatccaggaggttgagtcatgtaaacctcttcagttaactctccattgagaaagacattattgacatcaagttgccttatagaccaatcatttgagagagcaatg

SEQ ID NO: 129235 - DNA, 823 bp, Cannabis sativa
ctgtataaatataataaaaatgtttgacttattataatatgtaactattgaaactcttaagtaaaataattaaaagtaaaatattagacctgcattcgccaaagaaggtcactgctaggcttgactcgaaaccgatggttgtagaaattaagacgagcagcttccacagctgctcggtcttcgggagtaccagcgtctgcatggtactcccatatttgtctccctacaaaattgtttgtgctgtataaatatttgttctcactaattccatcctcatttgctatcttcaatcgccacatttttctaatcaaccttcttccactattatatatttttagtcatatgtgaaaccatgagtatgtgtatataaatatatatacaatttatatcaatttctgtatacgtggcatttcataactttaatacgtgtgtggtctttattattatttttgccacgtacattaattagttattaatttggtgaagtctttaatagccgaccttaatagttagcgtccgtacgataatcgatgtaatcaagacagaggtacattagagggtggggtggccttggtctcctacaattatttttttctaattttttgaaaataagaattattacataaaaaatataaattaatattttatttacaaaaatatttctataggtaaagtcaacatctatactttttatgtaattttaattaccaaaatacacatcatcacttacacaatcagatgatggttgcagagtagttgctgtgtggttgcgcgatagttgcatttgacgatagttgcaggatggttggccgaaggttgcatc

SEQ ID NO: 129236 - DNA, 2603 bp, Cannabis sativa
  modified_base (2446)..(2459): a, c, t, g, unknown or other
ttcctcccgagagcggtttgtcgtatttcccccatcagggtacgtacgagtcctcgctctatgggtttgggaagaacgttggtgattcctagcaggatatctccattctcccggtcgagttccaagatcctcctcattttcatgagggatttctcgttcatcagtttctggttgtctcctttctgactgttcatcctgattcttagggggtgtctcattttcctcgggttgttcttcccaggccttttcttgtctcctatttcgtgacccacaaggtctacctcgtggtcttctcaatccaggttcaggtttattttgagcgttcatcccctgcgccaccctggccgacgctgcctaacgttctaactcagcatttcaacgctgcacctcttacagacggcgtctcaggcggcggctttccgtttcataagttctttctcccaaagattgggcacctgcatggttaagctcttcatccctcgcccctagactctgaccattcctacgctgagttctcctcgagcgggttgtccgcgtactaggaccaacgtcgggttaagttttctgaggacgtatggtttgagcactggggccaccctcaagttgagccctcctggaacaggtggtccttcttgactgcagatttgtaaatcttctggagcccatgggctcttttccagaacgatggttagtttcctcatgtggggtgttaatattctctggatttttaccatgaaggaaaaggtttttctttaaaagaagggagggttttttctgagctttatcacagaggctctcaacaaaagtactaaactgttaacgtagattttcgttaaccaaatttgagcctcacggtaataattccacacagaaaaataaaagctatagaaaaataaaatatgaacacagggtttttttacatggttttgcagttaaaattctgcatagtccacgagttaatcttattcagatttttgagtatttttttatggcctctttcatatgagtttttttgtccctttttatagattgtttgccactatttataattacatagtgggcagttaattacaaagttgaccagaatatgtttacagccattatccctaaaatcgtgggatctgattacatatcttgaatgtaaatgcagtgtataattttgaaaattgtgtagctatgattttctcaattttactgggtcaaaaatattgtgtattaaacacgtcttcaattgctgaatttggagatgtctcgaaaaaaacttgattatagtgatcccaatagcgagcagggaccatacttttttccgaggtcgacaatgtatgtcttacgtcgatcgcgggtataaagaaatcttctgacttaccaaggttatgagcctcgctcctgtttgttggatgaagctataggaagtctcctcatattgagatggtaatctcacatacttgttctcgagctgatccgacttttacacttagttagcttattgcaagctaaggtatgtgtcagttttctccagtgcctcgctattcacctttagcgacatatggtttctcgttagtacactaaatatactctaatacctgcgtaattaataagttattccataaaaatattttgtaccgattcacattccctacattgatttctcacctaagatcttacagtcagcgcgttacaaatatactctaatacctacgtaattaatgagttattccataaaaagattttgtaccgattcacattccctttgtcttgacacgtgtcctccagctgaatttcgggtataacaccaacaccatagggttttataataaaatcattttcagcttcttcttcttcattacgaaaatacaacaccagtaaccacgagaacccacgaagaaactcttgtaggaattttatgccgtaaagaaacttaatttcattataatcttatttactttcaataaaaattagaaaacatatcttgaccttgtcatatgctttcgtcacatgttttatacatgattataagtttaatatataaattttgtaaaatcccgaacatatagttattcataattacagtgatgtcgttacagtggaaggtaattgtgattatatgtttcaaactacttagtcccttgatttatcagtgcacttgatttatactgacgtgataatcagcgataaaatttacttacacaatgatatgttgaatgtgctttccaacgcattaccaaaataatagtatcagatgtattggctataaacttaccgtaatatcttttctaagttaatgtcacttagttgatcttagatcaatgatcttaatccttatatgtttaggttcttgcttaattgtaatgcatgtgttctttaacttgttcattacaaccttaagagaggatcaactcaatacatacatcttggaaataccgtagtacaattgagtgggagcgcnnnnnnnnnnnnnngaatctatagcttctataactatctagaagtgaaatgatgactttcttagagcctggtttaacatacataaatagaagagctcttatttcagtaattatattagtttactgaaaatatcttttataagaagctaagtgttttaa

SEQ ID NO: 129237 - DNA, 754 bp, Cannabis sativa
aaaaaatttcaataatttacacaaatactatagcatgcactccattacatattaatattattcaaaaacatcttttctttctcttgaataaataaataataataataaaaaaattgttaaatttattggcttaacatttaaagacacgtgtcattgtgtgtacacgtcataattagactaattcttatcaccatgataaattgtttttaattttgataaaatggaactttcaaaccggtattttaggtattaattctatgagaacataattgagaagattgtagagctttcaggtccttcgatcgttcaggatcaaaagtgtaatagtttgactaagtgtgttattaattagtataagtcattttttcaaaagaaaaatgtttagttgaatcactattaattaagtttagaaggtaattaacaaatccttccttttcaaaacactaccaaatctcctgaacggaaaatattgatagttggtaattactatggtccgcaaactaaaagaaattaaaaaattccttacaaaaataagaagtttgaaaatgttttattaggaatgataattttttatattccggtatgatttttatattttatttatagaaatattatttactctaaaaataagattggaaaattctataatgcaatatatttttagtatctaaaataattttttagttaaattttttctcataatcatgtaaattatagttatttaagacatcatgcaaaattttaaaaaattcga

SEQ ID NO: 129238 - DNA, 748 bp, Cannabis sativa
aagagaaacgataacgataaaaacacttagcgtatattacatggtatacaaactaagtataaacagtttggtgaatcaagatgacagacagcgaggcgatgttcactttgtggttggtgaagttgagctgttctcaattgacggcgatgttcttttggacatcaaggagtggttcccgaacctgggttaatgggaagtctcttccttgtcgtcttacagtcgggtccttttgtggttatacttagttctttattttgtattagtgttgttgctggctatggtgtgttgttattgtttttgtttccctgtttctattgttgcctttgaactggtttgttttcctttttaatgaattggtgctgtgcacctccactttaccccaaaaaaaaaaaaaaaacttctattaaataatcccacaaaacacctaattcttaaaagaaaatctcttcaaaaaatttagaggcagatcttataatcccacaagactttgtgtgagggaattttctcatcttcttggcatttactttttccaaagtcttctatgctttcttatttgctacgagcatatgacataagcatttgtttatgatatatgtgaaaaatcgcgtttttgcaaatgtcaaatatgttaactcaaactttttaatcttcttgttttgatgattaacaaatatttgattattatttgttactaataatttattgattttgtagcaaatttaaaagaaaataaatattttggtaattt

SEQ ID NO: 129239 - DNA, 868 bp, Cannabis sativa
ttagtcaaaaaaaaaaaaaaaataacacattattttgtttaacaaatagcttaaaaaaaattaaattatcagaaatcaattttttttatcagctaatttatcttttcacaaaatgaaactaatttcctaaaataacaaaagaatatatataaaatttaaagtttaattacttacaacacaaatcaatttcaaacccgtgaaccctcgtaataaaattataacaaaacataaaacaataaataaagaagataactgaaaccactttatcagttaaccaaatagaaaaaaaaatacacaaacaaactaatttaaaaactcaaagaagatgggaattggttttagatcaatttcaaatatgagagaactcctaccttttgttttatttgttgcattattggccactccgacaagttttgcccacgtctttttcatcaatcgattgatcggattgagaagtcttatggcgagttcatgaaagctctccctcagcgtaatcacaaaaatatcggttcaaggtggctccgaaccaaaggctggtgtccagcagcgacggcgacgactggaacttctgttcctgggatgaatgaatctgccaccattaatggtggagctttcccagcagcaagtgccgagaatcagggggtacggccgagaaggagggaggagatctgggaattaatttggctagaatagggggagtgatttggggtgatcgagctggttatttggagggttaaaggaacaataatgttaaggatttggggaaagatatcattactccacaaaatgatagtcttgttatttatgataaataaaaaagaaagatgacaaaagagaataatgaagagaatgctgataaggaaaagtg

SEQ ID NO: 129240 - DNA, 724 bp, Cannabis sativa
ttattttaatcaaaaatgattttttaactaaaatataccacaataattcattagtgacaaactggtaacgaggtgactggttactagtcaccaatgtgcatctgtcctggaacacacatcactcgcgagaaaaaggactagaggaccgagaactgacgagcgaaagcatcaaggagaagccaagaaacctcggccaacatcccgagttacacgtaaagtgacagggtttctcagggatgatgcgcgtgtgggatacacccctagccgagaaaactcagctttgcacctatgaatgcgagcactaattggccagcaacccaaaattagggttttgggtcaattttgacccaaatctcatcttaaaaaaatttcatgcataaatctcaatcaaacacactttctaaaataattttaaaataataaacatgaataataaacttaatttctatagaaacatatacaattttcacagaaaatcatcaaaacataaacaattaacatgaaaccatccaaatcacattcaaaacatgaagtatcgttttaaaacctatttaacatgaaagtaaattttactaaggctctgaggcttgttgttagaacttattttactagaatttaattaattattatgtatatttgaatattaacataataatctaacatcctaaaatattattatcaaacgatttgataaacacatatttgtttttagattcttacattg

SEQ ID NO: 129241 - DNA, 881 bp, Cannabis sativa
catgaatatgaaaaaaaattagccaaagaaatttttctagatgccgaaataagttaagggtgtatcagtacatcccttttaagggggtgcattgtagaatcaccctataatttttaattgttataaaactgcggacagcgcaatatcatttcctaatttttctatattacaaaaatttaactatattacatatattgtacaatattcataatataattgttatagttgatagtaatattattttacaatcacaattttgagtatatatatagataaataaataatattgtttgaaaaaatagttataccttaattaattcctcacctcgtataatgttcatcaataggtatagattcttttggagaaaacattacttccttatgattcccaaagtgagttaatactcattaataatgatcatacatgcttattatcacctgtaaaatgtgtttttcatagttttcttttttttttttttgacatatatgttttccatagtttgcctctcctcacgtttcaagtgtatggacttgcaacctacactaaacactaattcagttctaacattatttataccgataaagttaggggtgtttatctcatccaatccgcactattttgttcatagtacatttgatctgtactaagtgcgaattttatttttgtggatccaatccaatccgcacaatagctcaaatctaatccaatccaattcgcaaaagtgcagattggatcggttactttgaattggttacttttcaatataaaattatataatatatatggataaaaaaatattttttttcacataattagcaacaaaataaaacaaattattgttattttatgtctccaacaacaaatcaaaataaataaaata

SEQ ID NO: 129242 - DNA, 673 bp, Cannabis sativa
aatagagtttgaacatttaattgcatgcatccctttttatataaatttaataaattattttaaactctgttttgtttttagtatcataaattttttatttattttaaaaaacactcttactgatatagacaaaagtgacactctattatcaggcccggctcaaggtataggcgggctagacctgtgcctagtacccacctagtccaagagccccaaaaattaccttttaaaataactcatttttttattaattttgaacaatattacatttttttttcctaaataagggtctaaaaatatttttttttgtgatccactatattttgaagaaattacattctttacccattttttattttttatttaattttaatctttattttactattcttgaatttatactcagttttataagtcatattcctcttatgtgtattatgaactttaattttgataagttatgagaggttatatttaatactttgattataaaagaggatccttatcaattaaaattattttgaagttatatttagttaatctgtaataaaaaaatataatttttaacttatctcctatattttagggccggcccagccgattacatataagaaaatcaatagagaaatttacgtgatatactaacttttgctttttttttacaaaaatactg

SEQ ID NO: 129243 - DNA, 1042 bp, Cannabis sativa
aaaaaaaaaaaaaaaaccttctctgataaaaaactactcaacagttatcttattattattattattagtagtagtagtagtaaaagtctaatttattatttctttgtataaatatttaaaagatatgtggggctctacttcggataacaaaaaaattcattggaagaaatggcgatttctttgcaaatcaaagggggatggagtcaatgatagatggatctggcactatgatgattcaagagagatagtggaagtcattttggggcttaaatttgccttcgaagaccgactaaaagatggggattatcttatgcatttgtccacaatttataataaatcagatcttgtgaattttctatgtctcatgtggtttatatggtctgatcgcaataactacattcatgggaaaaaggttaagactcctctccaaatgtggactcaatcagtggcctatttagaccagtttcggaccattacctctgctgcaacactagaagcatgtactcgcaccagtccagcaactgttatcaaatggaagcctcctccagagaatacattcaaactaaatgctgatgcggctttggattcttcgaggagcaaaattggaattggtgttattgttaggaattcagatggttaggtaattgcagcactgtctacactagcaacaggtaatttcaagtcgtaggaaatggaggctaaagcaatgtctgttggtctctcgtgggcacagaaatatcaacttcctatcgactttttggaaactgattgcctaatgcttgtcaatgctttgaatggctgcatttcacaacactcgggattttatgatctgatttctgatgttaaatttcatttgtccaatttctctaatgcttgtgtttctcatattaggagagatgctaacgaagccgctcatggtttggctagacatgcattacagctggaaaatgaatgtatacggttagaagatattctttctaccatcttctctgttgttgtaaacgacattatttgatttataataacagactttttctcaaaa

SEQ ID NO: 129244 - DNA, 1718 bp, Cannabis sativa
  modified_base (1071)..(1072): a, c, t, g, unknown or other
taattcctcaattattcataattatctaattagggttttgctaatccatttcttaacctaggttattacactgtgggtccttgagcccttgaggtcacgcttgcttcttcacgccctgttcttccccttgagtgtggtttgtcgtagttccccaactggggtttgtatgagccctctctttatgggttccggaagaacattggtgatgcctctccgatgacctacataccccgagttgtgtttcagggtcttcctcatttccacgaggaatttcctgttcgctagttttgttgcctaccattctcatttctatgagagggttccggctgatcgtttggatttttagggggaacctcattctcctcaggttgttcttcctgagtattttcctgtctcttggttagtgagccacgaggtccgcctcgaggttttctcactccaggtttaagttgattttgagtgttattcccctgtgccgccctagttgcagctgcatcacgctctaatgcagtgttatgccagtttacctcctccaggcgatgcctaagatggcagttttccatttcgtaagtaccctcacccctaggctgagcacctccacgactgggtccttcatctctcattctaggattttggctctccctatgttgagctcttgtcgaacgtgtcgttcgcgtattgggaccaacctcaggttgggtcctcctggaacgagtggtccgagtgctggggccaccctcaggttgggtcctcctgaaacgagtggtccgtttagactgtgagttggaaggcttttggagcccatgggctcttttccaggacagtgatgagtttcttcatgtggtgtgttaatgttctctatgttgtctgccatgaagaagattgttttttatatgtaaggagggttttttctgagctttttcacgaaggctcccaatgaaagcaccaagctgttaacgcagatttttgttaaccagatatgagccttaacggtaataaacttgcacagaaaaataaaaacagtaaagaaaaaagtatgaacacagaggttttttacgtggttttgcagtnnaaattctgcatagtccacaagtcaaacttattagatttctgatagtgtttcagggcctttttccttatgaaattttcgtcccttttttagtcctcacttgcctctatttataattacatagtcaggcaattaattacagagttgactgtaatctttacaacaattatcccttgaaatcgtggggtttgattacatatcacgtaatataaatgtcgttagtatttgaatatctcacaactgtgattagcctacttttattgggtcaaagtaaatgtgtattaaacacgttaaaaatcataatattctgggaaatcttgataggaactcagtaccaatgaccttgatagcgagctggagcttttcccatatctttctgaggttgataatgtaaatcttgtcgcatttgctctgaagacataacgctctatctgtcaatcacagttctcggtgaggaggtaaacttcaacatccaatatcatttgaatgttagcttctatctgagagaactaactcgtcaagactataaatctcactaaaagatgcttgaagttgattggtgaaagcacaaggagtgtgctttcctatagcgagatgggcgcctcgctattagttgcttgggtttacccaactgttatacttagtttgt

SEQ ID NO: 129245 - DNA, 784 bp, Cannabis sativa
gaaccaacctgattcttgagtgagaaggcgacgaggtagacatcaaggttcgagaacaaggatgtaggagatgaattaggaaaatccctagaatacccaggaggagcaacatgggggaactagggatgttcctgaagacaaacaactgaacaattaagctcctcattgaggggtacctgaaagacccgagggatttacagattaagggaatgaaaacaatgagatgccagaatcttctcatagggatgagaacaaggcaacccagaactaggaaacaagagatccctcataataacgagagaaatcctgagacacaacctaggacaagtgggttaatgttgaggcaccctcagtgtccttctcaaactgaaagggaggaggcgtacacataccctagcggaggatgtgtacctaacccttcctgaaagagaaggcctatgtaggacgaggcaagttcatggtcaggacattcaagatcctgcgaggatagtcgttcagaaaggcgtatacgagggggagatagacctcgccgtattaacgatcgagagagtaggagtaatacgaggagctttcaatctgagagttactcggataaaaggtctgtaagcaaccatgaatgaagacagccagatttttgtgaacatctgaatcaaagacaagctgatttacgcgagcgttaaaatcaaaatgcacctaatttacctcaacaagtcaatgctaatctaaagtaagaggatccaatccaattgcgaatcattgagttggaagataaattcaggaggta

SEQ ID NO: 129246 - DNA, 504 bp, Cannabis sativa
  modified_base (205)..(208): a, c, t, g, unknown or other
gaaatcccccacggcacccatagctgaagccgcccacacctccccctcaccaccgcgaacaactcccccaaacccacaaaccccctccccgggatgaccgccgcatccacagacaacacaaactcccctcttaattttaattagtaaatattattatcgatcgattggtacaattagtgttaaaaatatttatatatataaatannnntatatatatatatgcatattataaattaataaatcagtactccacaactatatgaacctataatataaaccatttatacatatataaagaatataatcacaaataaaaataaacatatatagatagccattaaaaaattgtaaaattgtgactattaactataacaaatattatgtgctctttatatggatatatatatatatatatatggatgattttttaatgggtaatacccattaatgggtactaaaaaaaattgatgagctggcaatttagtgacttgctagagtaggtta

SEQ ID NO: 129247 - DNA, 1085 bp, Cannabis sativa
  modified_base (906)..(921): a, c, t, g, unknown or other
aagtattcttaaatagaggttctactgtagtaaaaaactacttataatataagcgtataaataccacaatataaaaaatgagaaaaaaaacactgagtgttttgtgtagttggttggatgattttacgctaagtccctcatttagttgtcttttggagtttgaatcctcatggtagcacttatactaagtgatgctcctcaagaattccaaagagtaacatgtgtgtgtgccctattgggtaggctatggtatccttgcgtgggaggacctcggctggcaaccatcttagagacagtgtataagtctcaattgactagtcgatggtctctgggactgctgttaaggcaaaggagagataggatgtgcaccacctgattcccttttactgattaaaaaaaaaaggggaaaggatttcacatgaatttgttaaaaccaaaatcaaaggattttttttttcttcacgtgtcgttaaaactagtgttataagttcgtgcatgtcgtgctggtctgacctgtatttatccatgctttttaaaaaatgggtcgtgatgtgtcgtgccacagaaaagtatcgatcgtgccgtgtgtgccaatatttttaaaaggtaggcccggtattttttttatcgtgctcgaattcatatcgtgttttgctcttgctggctcgtatttcttaaacaggccaatctgttttcatacacaggcttaaattcctaccttactttttatatatatatttacagttattaaattatatgtatattttaaaatttaattatatttatataacttttgaacaaaattttataggtaataatcatataaaaaaattattaacattattagaatttgaatatttatttataaatactcaaatttttatatcacaccctataaataaattnnnnnnnnnnnnnnnntttttatgttttaatagttttaattataaaattataatattatatttaagtttaattattattttaacttatatatatgttgttaaatttataatcactacgcaagtatacgcaatcaggtagtacactcacacaggtgaggtcgaaccacagggaattggact

SEQ ID NO: 129248 - DNA, 1275 bp, Cannabis sativa
  modified_base (907)..(908): a, c, t, g, unknown or other
cgaagttagtttaaatttccaattcacccctcctcttggaaacatatcttgggctaacatcaaccacacaagctaatctgagtaagacgccaaccaaatgacgttaccaagccaagaatgaataacatgcatgagttgcttgaaaaaagaataatcaaagaaaagatgattatgatagtcttgaccaacctgacaaattgggcagctagtagaattaatggcgatacctcttgctaataggtgatctcttgtcttgcttaaaaataactctatgctttggtacgaataatccacactaaattattttgtgattatcaattttagcataaggagtaagaccagaattataaagcttactgacctaaaatcttttcccttttccatctccaaaattgtctctcgagtaaacacattcctaagattaagaagtttgtgctagtaccaactcacattacccttttgaacagtcacccaaaagcttggtattttaagtatataacattgatctatttaacccacaggacatcttatttcgtagtaatagcccgaatgtaacgagcaatagaagccttgttccacttggacccttcggaaaacccaaacctccatagttcttaggcttgcagacaagatcctaagaagctagatgcatcttactagtattacctttcacactccacaaaaagtctctgtagagtttatcaacattcttgactactttttgtggcagcataaagatactcatctaatatcaacgaatgcccaacaatactgaatgaaaattgcactctacctgcaaaagagagatgcatactgaagcaaatgagataaaatagtttttatttctaatgatgtattttagtatatacaaataatatatatatatatataatacaatgtgaacacnnagtaatactagagtaaatgaaaaaatgcattaaatgtaaatttacaactaatttacagctagcttgatttcctacactccccctcaagctagatatatactaaacatttctaattttgaacttagttccctaaaattaggacgatggagagctttggtcaagatatcagctgcttgttgactcgagggaatatgcttcaaggtgatgatcttattttcaatctttttactgatgaagtgacgatcaatttcaacatggttggtcatatcatgatgaactagattctttgctattgctatggctgattgattgtcacagagaacatctattgggccttcaagtttgattctgagttcatcgagaagac

SEQ ID NO: 129249 - DNA, 536 bp, Cannabis sativa
tatataaatattattttgagattatttataaattagttataaaagattttgaaggtagttattaagttattctttacactaattaacctaattattaacatagaatatatattaaagtgttattatttctagattggttttagagttatagtacatgcaagggtgaaattatgtctaagtaattgtgtttctatacagttatatggtctgaaaataagggatttggaacctatgtctaagtaaaagaaaattgtccttctatgtaattatatattttaggttaaatagtggcataagtacctagctatattatagttattgtctgaaaatgagggatatatggaatctatgtcaaagtaaaaaagtatatgtttctatagaattctatttattgtaacttattaagtagttgtttagtgcatgataaagctttttttttattgttaaagagtgagaagttttaatctcaatagctttttattttattttttttaaaaaaaaaactaaattaatgataatttatatttaaatattat

SEQ ID NO: 129250 - DNA, 974 bp, Cannabis sativa
tatttaattttttaagtcccgtattaccaaagtatacatctatataaagaattacattttaataaaatatatacatgtattttataaatttatttatgtaaaattaataatgttattttaaattataatacatgaatattatatttactttaaaatatttctattatgatatagtattaatgattatttattgttattattgtaatattggtattttttggtttttttaattttttttagtgtaactctatttaattataacatctcaattagaatataatttaagtgtattcttgaataaaagttctactgtaataataataatgtgtaactcttattttaattttaaaaaatattattaaagaataaaaaaatgaatgattgaatcttaaagaataaaaatgaaacactgagaccgtctttttagactgattatattaattggacctacattagcatgcatctacagctattgtggcatgaaatcattacttacaacatactttattattattattaattattaattgggttgaattcaggttaataataatctttacattgtagatgctatgctaagaaacatttcaaggtccacttgtttttttttcttttttttttttttttttgtaattgattcttataataagttctacaaaataataaaataaaataaatatcatatacattcatcaaatcagtttagtaaataaataattcaatcggcaccggacatagatgatttttctaatgctaatactttagacaaaaacttggttgaatggaacaaaatatttaatccaaatactcagaataatacaaagcaataacaaattcatgcaattagtgatggacaatttttattttattattaaaatatttatatttattattaaaaaatatttatatttatattataattacttttattagatttatttaattttgtaaagatttttttattattttaattt

SEQ ID NO: 129251 - DNA, 836 bp, Cannabis sativa
aagggaagttatttataaaagcgatcaaatataatgaagaagttttgttgtgtgaaggaggagacaataaataatttgttagaattttgatctctctttttttttaacaatctccaacaatctcaatatcacccacaatgcataaacattcgataatatctataaaaatattaattataatataaagataaataatttaattaaaaactttaaatatatataaaaaataattgaataaatacttaagattattgtattattattaacaaataaatcaatcgaatttagagttacgaattgaaatctattaattgaaaagtttactattttttattcttgtttcttcactgaagttgtagtcaaaaataaaattttatggtcaattaagaatgctgtatactcacttgtagttgcaacaatctttaagttttgtacacaaaattctcaatcaatagattcttaaacatataaatcatttgatagtataacatgattgacaaataaaaaaacatagaaaataataataaaaaaaattatatgacaaagaatatcatgcttatccatgattggaatatgagttgaagggggatgttagttggtattggaggaaaatccgtcatctgagaaaccatttcagcaagactatggcggctgcagcagttaaaaaaggtaaatttattgcagctcgtttgtatatggggaatttaaagctgaatatagacagtttttataaatctgtctggtgtaatctttcgctgcccaaacacaggttcatattatggcaggtggttcatggacacttactcactagagataactgttggaatttattttac

SEQ ID NO: 129252 - DNA, 670 bp, Cannabis sativa
aattatactattttaattattaattaaaataaaaaattaaaatattaaataaaactaacagtacgtgacttggcacgtaacgatcacctagtataaaaaaaaatacgaaaataaaaacataaatgttaaaatatttatggtttcaaaactgtataaaaattacaaaacaactttaaatgtacaaaatatcattacgaatataaacaaaaacaaataaagaaacatcaactaaacttaaaaatgatgataaacaaaatcaacaaaagataaatcataccccaaacatcattgagcatacataaatttagatcaatgaaagttaataaacataaaatacaataaacaactataacgaaaagtgaccaaaaccatgaataacaacgaaaatacaaataaacaaactactgtcaaaagtaaaaccatcaacacagattatttacaagcctaatagcaacaataaacataaaaagcataaataacagaaaaattatatagaataatatacacaacaaaattaaaaataataagccaaatagaaaccaatttcaaacggaatatttacaaccaattaaagccaacaaataacgataaggttgttcatccgatccaatccgtatttttttggtcaaacaacatccaatacgcactaagtgcggatttcattttttgg

SEQ ID NO: 129253 - DNA, 1068 bp, Cannabis sativa
  modified_base (678)..(687): a, c, t, g, unknown or other
  modified_base (807)..(808): a, c, t, g, unknown or other
ttttttttaggaaaaaaacgactactatttcacttttattaatttacttattattgccaacttctcaaatatttatatctatggacaaaatttatgataacaatatcacttttttctttattaataaggtgttttattttatatgtatataggaaaattataatttaatattttatataattttttttaaatatttaaaataatttataatatcaaaaataaaatttatataaattacataagaaagaaaataaactaaaagattagcatgagtttaggatttacacaattatcaagacatcctaaatcatatacttagctgcaataaatactattaatcagaaattttgatatgctaatatgattttttttttttatatattggatgtgtttagtagtatttttttaattagttttttgtttttaattaaaaaggtaaaaatattttctaaaaatatattttataaaactgttttcactttttaattttttaattgagaatcaaaaaacagaaaaaatcacttttaaaattttttaaacaatttttttttctaataaatattttggattctgaccctaacctagacattgagacctagactccagtctcgactccagtcccaacacggaccacgaccctggtcccaaacccgaacctagacctgacttaaataaaannnnnnnnnnaaaataaaaataaaagttatagagcatacttttattttctatttttaaaattaaaaaacaaagtggttatagaatacttttttattttttaaaaatacaaattttacttttatttttgtnnttaaaaaattaaaaaataaaattattatcaaatactacaattatttgtaaaaagattgtacctcgaactttggaaataataagttcaaattacttgtaaatttgcccattttattgtattatttgctcatttttgtaaatagtttcttgacattaatttatttaatttactgtaatttcaaaagcccatgcaaaaaataattgcttaggcaacgaaaaaatttgaatatttataattttataatttgtatatttgaatgt

SEQ ID NO: 129254 - DNA, 1038 bp, Cannabis sativa
  modified_base (946)..(954): a, c, t, g, unknown or other
agactataaattatcttagtaaacctgctattgcatagaaattgataatagggagataatcatataaggccataatcaatagaaataattaaagtcgataaaattgctgcatatttcacaaagaatttgggtaataattattagtatattcattaaaaaaattgtttattatttagaatttagatgataattaatttttttaataaaattaaaacaataatttttttgaaataaaactatatatataaatatatattgcttgttattaactgaggtaggtttgagcttttactatttctagtactatagatcagatcagattatagtgacttgttttgatttattttgtgcttaattacagaaataaatgcatactcaaataaatgtatactctaaatactaagggaccaaatttaataaatgcaattaattgcaactcaatattattggacaagctagtcataaatatagacttgggtatgcgataaagaagagtgaaaaatatagatataagattatttttaatggtgttatttattttaagcttttatatatctctacattacttaaacatatcatatttttttttcacattattttcaggactcttacttttaaaaatactctaataatataacatatatattttaagaatactataattataattttgcacattattatatataaatatttttttattaaattattatatacatatatatattacacttttaattttttttttttaaaaaatatagtatcaatgtcattatgtgccatcaatataaatttcaataataacattcttttttctctaataatataatatctctatatttttttacctaaactttccacaagggccgaccctgagttgaaatgggccataggcaaaacaaaaaatttgggtccttactgtaaagataaatgatatttttaaaannnnnnnnnaaaatatgtatattttttaaaagatatttttttatttgggctcctaaaatgagtgggccttaagcgcgggcctagcccgcctat

SEQ ID NO: 129255 - DNA, 639 bp, Cannabis sativa
ttggggggggggggagaatgcactattgcgatagtttttaaccgtcaggaattcttttccctaatatatttttcaccgtcacttattctatacccaatattcgcgatactcttataggcgacgattttatagattgtcgggaactctctacctaacgatgtaaaactatcgaaaattccaaattttttagtaatagttgaatgctttgtatcaataggttattatgtgggtacgcttttaatggaattaagttatctcaaattagaaggattatttttattaatacttttcctttatttctaaagaagaaaaaataaaaatcttgtttatttcaataaagaaactttctatctatccacctttgacaaaaatatatctcgtcacttcccaaacacaattttaaaattagctacgagtacacggtagtggttaggggtgttcgttggatcatatccaatatttttaggcctatccagatccgatcaatcatatattggatgttggattttaccatccgatctgattcaattaatttccgccatccaatcaatccaacatccattggatattggattggatcggtttcggatgtatttcatatataattatttgtttaatttagatttatccaatatttta

SEQ ID NO: 129256 - DNA, 873 bp, Cannabis sativa
cagactccctcttccgcgacacctcacaagaggaagagtaaagccaccactacttctgggtggatttgtcaaagaaacaccagaaggtcacccaggacaaagggaaaaaggtcgtgatggaccccacaatcaaagctcgtgacttcatgactttgtaggaaatgtttgtgagcaacaattttgtcacgaaagttgagggggctcctttcaaagatctcatgtctcgctcaatcaaacttgcctcacagttcatgactgtatactcgcgagcttcaattgtgggtctcaaggacttcaaacttctaaaaaaacaaaactcgcctcttcaagaaggcttgaagaaagcaaagttggacgttgttgccaaagataaagaagtcaaggacctcggtaaggccaaagatcaggcagaagagaaggcccagaagtcaaaggataagactaaaaagttagaggaagaaaatgctaatcttactcgcgatcttgggggtgaaaaggaaaatgtgaaggaagcttatgattgggtgtttttaattacatctataccacgctgaccaatttgtcggacaatgctttcttagtttttggtctagaggtagttgagatggctaatgctttccgcactatgtctcctactgagactcaaggactaggtgggaaccttttccctaaggaggttgaggtcacaaatactgccaaagtcacggatgacactgataaggtcgtagaagatctcaatgcccctggtacttaatttatttttctttcttcaaactttttttgagcggtacacgagtactcgtgctttgtacttggttttaaagacaagttaaactttacacttccttggttttagttggcaatttcatatcc

SEQ ID NO: 129257 - DNA, 639 bp, Cannabis sativa
ttttgtagtgcacaatctgaaagccactccccactttacttaggttccatcttagacagaggaaaggaaaattggttggataccttaagagctactccctccttatgttcaatctccaatgggagagggaaaaacaaaatcaaaacatctaatccaccaaatattctatcaaagagatagattaatcaatagaactttggtggaagatgaacaattcagtggcaaatccttgattcactcagagttagcaaattgagtggcagagagattattgtgtgagaaacagaaaggggattcaagcttagaagtgcaaaagtattgctagcttatgtttaggactacaaatattttttaaaaaacataactcatacttgcaaaatataatattatataaatgaatgttatgtaaaacctcaatttagttacagatttaagatccctcaaatgggactaaggaattgatactgtagcaacaataaaataatttggtaaaattaatttttgtaactggatagtacacttttctttgttaaataaataataatttaatgtactttttttttatttaaaattaagtataggggaattaccccatatactattttcttaactttcttttcaaatttacggttttggttt

SEQ ID NO: 129258 - DNA, 603 bp, Cannabis sativa
aacctaacttcaacaataaacaattagaccataccataagactaacatcggacaccctatcatactgatatagacatcatcccaaacctagaatctgaactaatcatcggaccaccattagacccttatcaagcacttttggactaagcgaaaaaaaaaaccagaaaccagaaaaaatgcaaaaaatttgaagaacgactattttcacacaaaaaacaatataaaatagccacaaccaacagattggacatcaaaatagcattataaactaaatagaacagccaacaataagattaaacaaagaaaattcattactcattgaatcgtgtttggtgctccatcactccctccaaaaaaaaaaccaccagagcacttattatatgagcttttggtgtagtttgtatgaaaaattagtgttatttggttagaaaatgagacaagataatgaggtttatgagtgagttagtgtgaatgagtgaagagataaaagaaatataagttaggtgttaggaggggtattatggggatagaataaaaaatttgccttttctcttaattttttttgagaaaaagcgtttatatcataaattcaaataagttaga

SEQ ID NO: 129259 - DNA, 719 bp, Cannabis sativa
aaaaaaaaaatccctatacataatgcgagttaaaaggggaaattgtctaattaccatggaaataaaaattagccaaatgtattcgacattattcatcatatagggttggtacagaagtaccaatcgaaagtaaatgacaaagttgttaaatgcatgtattccgggtaaaagcacaaaagtatcataaccctattaaaattgtgtttattaaaaaaaaaaaaataataataataataataataataaataaaacatatttaagatgaagttacgagctcctaaaattgtctttaatgatgtatatttagtgttcaccacaatcacatcattttgattaattatacattagtaagttgtatatatttattaatgtaatagattattacatatatatctaaatcagggtcaagaaattgaatcacatgcagaaaatgcattaatatatagtaagcaagaagataattgataattagctcctctccaatctatgtcaagtgggtcccccaattctcatggcagccataatatatatagaattacaagtggactatttgtatgggttttttttgttgccgacatggcacgcataaaactaagagtttccaaagtcaaattaagttttaggcaagttgtgtacgttgtagttggccagcattagcattaccaatatcaccattttttattttgtatttttcttttcttcttctgttgcagataag

SEQ ID NO: 129260 - DNA, 764 bp, Cannabis sativa
atctccggaattgagaaattataactccaatgcccatttataacaatgggggcggtcattacacaggtagtcaggggaaattgaagatctttctctcaatcttctggtttagtgtaatgttgtttaaaatacctgtgtctattggtcttttgctcactatacctctccaccatctccgtatataaagtccccataagtaggtctcgtggggattctcgttaatattaaaataatactatgtaataaaataatttaaaatttatattaatttataaataaggatatacaataattataagcatagataattgaaaatcactcacccttatttgattaggcacttgatccttatattgttggggtacatcagaaaagttataatgatgacccggagacaaaatggatacttgctggcccataaatcgaatgtaagcactggcttcagtcccaactactttgccagtttcaaaatccacctcaagctctaatggcttaccagcgtccctccttcgttgttcaagtttagtgtttgatgcaaggccacaactttttctgaccgctggttcaactttatttattcgagagaaaaattattctattagtacattgaacatttatgatgtacttatactaagaataatgttagatttgagaaaacatgaaacctaattcgcgggatgagggtagcctagaaggattagggggatccctaccatcaccatccccaccgtggtatgtcactagactagctgacattgtacttt

SEQ ID NO: 129261 - DNA, 984 bp, Cannabis sativa
  modified_base (921)..(930): a, c, t, g, unknown or other
ttcattgcaaaagaacccaaatcatgttcatcgattgtaaattaactatatcttggattcggttttttgagtttcgtgttctgacaagttcgcccttgtttcgtttttcttaggaaaggatgcaacagatgatttcgaggatgttggtcacagcgatagtgccagagacatgatgaacgaatactacgtaggagagatcgacgcctcaactatcccgaagaaggtcacatatacaccaccaaaacagccttactacaatcaagacaagacatccgagtttataatcaaacttctgcagttcttagttccccttgcaatcttgggtatagccgttggcattcggttttacaccaaagcaacctaagcttctatcgatcgacatcaatctagttagtgtttgtttggtggttaaaagctggctattatttgagactgtgtatcattatatctgtattgtatttgttgcttgttgaaagttgggtgggataagaaagaactaagctaagtgtaactttgtatgtctatcctttttcttctctagaataatgaaatttttatgaccttaacttaattcatccttattgaaaaaaaaaaaaaaaaaagagtataaatggagactatatggtactgtgttcatttctaatgtctatcctctcactcttaaaaaattagtctataggcttgtttgaaaaacaatttggtcaatactaccattgatgctacatttggtacctttgaataagaaatttattttagtttgacacatttggataagagaaattgggtcatgtaattgaattttgagtttgtaataatttttaggaagtattgctaattaattgtaaggtgatacatctagaaagtggtaaaattttggattatttttaggagcattgttatggggtaagttgaaaaataccnnnnnnnnnnatcaattaatcaaatttacttctaattttatattgactaattagtaatttttcc

SEQ ID NO: 129262 - DNA, 626 bp, Cannabis sativa
tttttttatttttcactattcaacaaacagtagaagaattaataatagtaatctactttctacacttttatgctacattttccattactatatatgtttttattgctaggaatggaaagtgaaggggttgccctaaataatcaaaaaagtacaaagcgaacttggactaaacaagaagaggaagcattagtgtcagtcttagaagatataatcacaaaggggtagcaatgtgataattatagtttcaaacctggtataaatctcataattgagaagatgcttagctctttatgtcctaattctattaaaaagctaattcacatactgattcaaagattcaaaattttaagaaataatacaacactatctaatatgcttaacaaaagtggatttagttggaatgatatgaagaagtgtgcagacgttgacagcgatgaggcatcgaagaagtcatatatgtaggtacacactaatttatttgcatccaaaagtaattaaaatttaatatattttttaaagaataattgtggtaccgtttgaaccacttgagggtagctcaagtggccataagaggtgcgtgtgtattggaggtcctgggttcgagtcccaggttatgctgatgtaat

SEQ ID NO: 129263 - DNA, 536 bp, Cannabis sativa
tagtcacaagtaatattttgttgtgactaaaagtcacaatatttagtcacataaaaattatgttatgactaaaaaattattttttgtagtgatttctcttgaaataaaacacgtaaacattgacacattataatattactttttcttcctatatgggagaagagagttacaaagaaatagaatgtattgaaaaagctctaagttatagatatcatatatattgtctttgtattgtgaactcttgtggtaattagctttctaaaaaagaaaacttcaatatgcatgttgtgtccgtttaaggcagcgttttgccgtttttactttgttcatctcatgattaacttaagatacatgtggtttctgtaccatttcattcatgcatgaagctctattacaattaatatatgattcataattaatggtcaagggagaggccattaaacgcgtaaagaattaatcaatctataccttagtaacacatattaaattaattaaaatatatattaattatgtaacataatatatatatatatata

SEQ ID NO: 129264 - DNA, 1191 bp, Cannabis sativa
  modified_base (1040)..(1040): a, c, t, g, unknown or other
  modified_base (1164)..(1166): a, c, t, g, unknown or other
aggcgacggttttaaaccgtgctttatattataggcgacggtttatacccagttataggcaacaattttaaatcatcgggaaacctacattagcgacggttttaaaccgtcacctattctacccgttttacgacggtcgtataggcgacggttatagaaaccgatgagaatactttaaacgattatttaaaaacgtcaggaaaatctatttttgtagtagtgcaagcattaaaacaaaaattctaaactaaatataacaacaaccaacaagattgcacaaaaaaaataattacccatgagcttcgtgtatgatgctcgtccaaaaatgagagaaaatatgtggtgtagcttgtagtgtagtagcttctagtatagtgaagtgaaaagaatgagtgaagataagagaaaattgagttgatttgtggtggtagagcagctcaggcagtaagaaggaaagagagaagtaaagagagggaaagagagaagaagagggaggggtgatgtaaatggagatgatattttgggcataatacaaatgtaggcatatatgctacaaatattggttattatgagtttaagggaaaaattttaagcacatataagcataattaattaaattttcctctcaaattctgttttatcataacgaatagccgaatatagttcaattaaaataagctcacataaatattcataattaaacaataaatttaaaaattggttaatcccatctcaagataccaaacacatattaatattaagccattagacagtaatattaattgtaagcggtactctcgatttagcaatcaaacattgataataaaatcgtgcctaacaatatgtcaatctttggacaaacgaattgctcatacaaaataccttataattttcacatatttatcaccacacgtgtttgaaatttagtgaaatatttacttgcatttgggtcagttattaacatatgcatcacttacaaatacacaccaaaaagtccgtggctaaaagtattagtcccaaaaattacaatttgttgtgantaaatgtgtttttagtcacaataattagggttactaatccatttataatctggggatatatatatatggaacacttcttaatggatattacccatgaatggttactaaacaaatttaactatannnattaattttaaaaatatcaaaccat

SEQ ID NO: 129265 - DNA, 1284 bp, Cannabis sativa
  modified_base (1227)..(1231): a, c, t, g, unknown or other
aaattaagctgatcacgttttccaaggcaattggcagctttcctttttatttttgtttcctttattttgtctttgttttatttggaaagttgtctttcttttaatttccttttttctttgttgtaagttggctatataaagccttttaaaacactttgaaaaatcagatattttggaataaaattttgagaggttttcttcttgagttcttgagagaactattcaaacttatcaaagactattccttgtggcgttcaaccagacttatcaattggatttccaccaccatttgtggcgtcttccttcataccaaggttcatgcttaactaagcattgggtcgcggttccacatcaaaattgcgagaattcttagaggctgccataattggtatcaggtttcatcacaactgttggtgtggttcgtatcatttggtatcagagcttaggatcatcggctttggcctatatatctattgtgtttttcttttcaattgatttctataatcttgtttaactcgtgtttttttcctgtcaattcgtgtttcatctcttttgtttttcattgtgaaatcggaaaactattagaaccacattctattaattttcttgtctgaaacatcatgtcttttcttttcttttcttcataaaaaaaaatcaaaaattcaaaactcttaattttttggctgatttcttgtctccaaattttctgtcaaatagtttccctttttgttattgaaatttaaaaattaaaaaataaagtccaatttgttattggtgaattctagtttccctatttgtgtcacaaatctatttccttatttttgtttctcattggtttcccaaaattgtttcataaggcttgtctacttcgtttccttttttttctttgtgtcattagcaagtaaaaaaaaatcaaatttcttaaaaaaagaaaagaaaaggaaaccgagccaaaaaaaaataaaaaaatctggaaacctctctttatttttttttggtattttcttagtctccatagtctaaaggcttgtttgccaaaaccccacacaagtgttccaaaaatcatcattaatttttttagttttcatcagtgttcgtttggtttgtttggttggaattgctgcttgaatcctctcttgtactgtttgattagtctttaaagagcttaaataagaatatgaatggaaaaaggcagaggtgtgagcttagttgagggtaaaagccatnnnnnttgagtgaaaacacgagtgaattgagtgaatttttttttgagtgaaacacgtg

SEQ ID NO: 129266 - DNA, 607 bp, Cannabis sativa
  modified_base (28)..(35): a, c, t, g, unknown or other
cataattaaacataaacaactgctaatnnnnnnnntaactaagcgggctttacacatggagaaatcgtcggtgctggtggagatgcacattggcgatgtgttttgaccacgaaatcgagatccacgaaccccaaaactcaggtcccccgaaaactcgcccctctagttttctctttctttctctctctctctccctgtatttttttttcaagtttgaggaggactatgttcgtggtgttgacggggatgagaatggagtttgtggctctactgggatggggacgggttcatgggttcatggttgacggggatgaggatggggtatgtgggttcgtggtttgatagggatagggacggcttcgtggttgacggggatgaagatggggtttgtgggttcgtggttcgacgaggatgaggacgagtttgtgggttcggcggggacagtgtactagttcgataaggatggacgagttcgtgtgttcgtgggttcgtgtgaagatcttgtaggtggattgttggagttggtctttgcggtggtagtggatttctcagatctaaaatttttgtgtatataagtgtgttgggaatattttaccaagatctagat

SEQ ID NO: 129267 - DNA, 559 bp, Cannabis sativa
taccatgtttggtggctgagtttgaaagttaaataaagtttgattactttcttcaaaaaaaagaagaaaattattctaaaattttaaaatgtcactaataaataaagaaataaaataaaaattaattattttttttattccatttctttttatcacctccaaccaaacgatacttaagtttaaacacaattaattagtctatttgtattatatacggaggagttttattacaactttctcaatttacgcctctggaaacatatgttgtttttaaaatatattttttttatagtagttactatgtaaatttttttaataatttattgtcgaaaatagaattcttgttattttagtttaccacacttgtaaatgtagcaaaaataatgttatgcaagtacacacaattgcaatttgtaataaattttgaaagaccaaatatcgtctcacaataattaatctgttttattaagggtgcgtttggaaagccacaatgtaattagatttgtgtgtaattggaggtaattacacaatttgacatgtttgtctgatcatgtaatta

SEQ ID NO: 129268 - DNA, 2189 bp, Cannabis sativa
  modified_base (1208)..(1210): a, c, t, g, unknown or other
agattgactcatggactatgcagaattttaactgcaaaaccacgtaaaaaaccttgtgttcatatttttacttttatagctttatttatactgtttgagattgtcacgattaggctcaaatttggttaacaaaaatctacgttaaaagtttggtgctttcattgagagcatctgcgaaaaagctcagaaaaagcctcatgacataaaagtaatggataacgctaaagaaaataatcctcatgaaggactcagtcatcgccctggaaaagagccattgagtcctcagggatctattgagtcatcagatgaacagaatgcaagccctaggaaaacctagtattggggtccccggcttgacggacctatggtaaacaacgaccggtcacttcctaaccatgttgatgaggaaggcgcctatgacccaaccaggtacatagcaatcgtggagttagaaaattgccatcttaggcgacgagtggaggaagcaaaccgacgtaatgccgaattagagcgtgaaatagccacagtaagggcatcgcaagagaatagttcttgaaatcaacctgagcatggaagaagagattcacgaggcaaaccttgcagctcaaaaaccaaggggtaggagacaacccagagatattctcagaactcttaggaggggtaacctaaggaaactgaggaaaattaggggacatagcctgggatatgtggaacatcggatgaaaattgccaaccctctctccaagttcataagaaaggaaacccctatagggggaatgaggtgaatcaaaccttaggaggaagagcagaacgaaaagaggtggggggtaccacgaggcgtacgttatctcataatcgatccatgcaaggaggagagaacagttgttgcagaaataatcaaagaggtataatacatcatatgggaagagtaaggttcgacaacagtcacgaccggtgtgacctacgggaatatttgaacttgagaaaacctgattttcgtcaacgacttggtccaaaacaaagggatttactccattttcaaatggatgagttggagaataagtccagaagaaatcaagtcaaggaactcgggaggcaatcgagatatgattctattgaagagtttgagccagaagcctcaggatcaaaaagaaaagacgattccaaaaggctaccgaaggataagaaacacaacaaatatatccctnnntatgctgaatataccgagctcaatgaaactcagaaagatatctacctcgcacatgtacaggaagttgcttttagcgagccaaagcctacgaaacatgcgagaagcaaaagggacccaactaaacggtgtgaatatcatggggatatttgtcataccacggaagagtgtcgtcagttgaaggttgagatagaaggtctcatagcacgaggacactttcaacaatatatgaaggggcagggcaatgcccataatcaactcgatctgcccagtaactcgagcgaccagggataataaccctcctcggtagaaggaagggagacctctgtcatctcgagagggaacgagtcaaaataagagaaggggcagttaacctggtaaagcaattacgtaagagaattgagtaaatattggcccgctagggttgccatatcaagctacaacgtttaaagctggtcgtaaaccagtaacagttaaagacaaacaactaaaaccaggattagttcacctggaaccccgagatatgtcagggatcaaccctggatattgaaacaattgtgggagtatgttagggattgaccttgaacatcaaaacccgttctatcaaaaccagatgcttttggaagattgataaaataaacaattgaaccggggaagttcttatgagattaatgattgtaaatcacattgctgatgtaatattttgaacttcagttgtgataaaataatcatttctttcaacaagtaattataaagcgtaaaccctttaaaattgcttgaggggcatatatgtatgatcaactggaattaatctgaaaatacataatacaatgcaaacccatcacttcaaaataaaaaaattttgaaaacatttttttaaaaaaaaaggtcctcgaccaaaccttttcgatgaaagaggggttgaacttttataactccctgaccaaacttttttgtcgagagaggggtcgaatcgttataa

SEQ ID NO: 129269 - DNA, 2119 bp, Cannabis sativa
  modified_base (58)..(58): a, c, t, g, unknown or other
  modified_base (1497)..(1500): a, c, t, g, unknown or other
  modified_base (2073)..(2073): a, c, t, g, unknown or other
atgcattcaatgcaaacatcaaagtctgaaaaatcaattgaatctaaaattctatcanacacaagtcgctcaactctatttttagagatgtgttttaaccatttgtgccataacgaatttgatttttcattatccattttacgcttagtaccacatgatttcacattcaaggtttcattatatgaagcaacggtgtcaagtaaatataagttatcataaactataagagaaccagttccaacaatatttgaattaatcgataaactaaaacaattgtttccaaatgaacaataataacccaatttgtccaaacaagaaacagaaactaaattctgtctaaatgatggtacaacaaaagtatctaataagtccaaatagtaaccagtacttaataacaacctaaaatgccctattacttccacatccaccaacttgttgtctcccacataaatggttcttttcagcattacttggcttttagtaactcaggcgaccttgcattgaaacactaatgttagtagtagcaccgcaatctaaccaccaagtgtttcttggtactaaagctaaatttacctcaaaacagaccaaagtaagaaatgtgcctttctttacttgccatgatatatatatgtacttagcacattccttcttcacgtgtcctttcatgttgcaaaagaaacaaccatcatcattgttggcttgagtttgtttcttatgtgcaggacctttattcttatagcagcctcattttttcttttcttgctcttattcttagaggtgcttggcaaatgagcactttcagtcttctcttacttcaatatttattcctcttgaacacaaaatgaaatgagctcattaagagctcattttttcttttttcgcagttgtaactgaccttgaattcatgtggaggaagagagataaatactaattaaatgcacaagcaagtcatctgaaagctcaagctttagtgccttcaactttgaagcaaggtgagacatttccataatgtactaccttatgttttccttgcccttgaagctcgtgaaaataagtttctttaaacgagtacttgttttaaccttatagcaaagcatttctcaattttagcaaggaaagttgtggcatcggtgacctcctcaaacaccgcaccgctaaaagcctcaggtatgccgcccttgatgatcataagactcatgtggtttgaacggtcccacttctcataaatcctcctttgctcgaaggtattggtatccgtaagaggagcaggacgatccatccttaacgcaaggtcaagatccatgcagccaagaacaataaaaatgttctccttctagtccttaaagttattaccattagggactggtaccgattaaggttagcagatacactagcaacaactgaaaagaacaatacaattacataaataacatgcttatacaagaaccaaataaaacaataaattcaaataatggttaatcccatctcaagataccnnnnacaatattaatattaagtctttggacaataatattaattttaagcgatactcttgttgtagtgatcaaacattgacaataaattatgtcaaacaatatgcaatctttggactaatatattattcacacaaaataccttataattgtcacacatttatcactacaaatatacatgaaattcaactaaatattaactcgttagttaataaatttatgaatcacatacacacaattattttaatatttttattaaattaatctttaataaattttaaaattaaaatttgaattgaattgttactattttattattattataagtaaaattattatatatttaataaaataataataataaaagaaattagaatagaattaatatataaattgcattccctataacagaacaaaaagactaacaagcatatataaattgcatatgtatgaattaatatattgtaatttcttatatatatgtgattgatatattaataggtaaacgtaattggtagtatgtatgaatctatcatatatatatgggtgactattcaattgttacatttttattgtaacnatatggttacattttttttttacctgcaatagcaggttaccaatag

SEQ ID NO: 129270 - DNA, 1192 bp, Cannabis sativa
  modified_base (93)..(109): a, c, t, g, unknown or other
  modified_base (270)..(295): a, c, t, g, unknown or other
acattatatatataatcatgaaaaaaattaagtgaaccatgcaacataaaatgttatttctgatcttcaataataagtaaatctgattatatnnnnnnnnnnnnnnnnnagggcacaaaacccaacattttatcgttaaaaacttagctacctataaatgatatttcaataaagtcatataattattgaaaggaggcctcaattatttatctctatcaagccaagctcgaaggaaataatcgttttacttctaaatacttatagaagttnnnnnnnnnnnnnnnnnnnnnnnnnntcccactcaattgaactaccatttgcttaatctgtatgtcacgagaagatctaattggtcaactttaatgaataaattgaacaacataataatacaactatgatcgaacttaactatttagggattaagatctatagacctaaggtcaaccagtcatattgactaagaaagatttaacggtaagtttatgatcttatctaagttcaatatcggtccaatccaatgtatactctatagctctgatactggcgtactttgctaatgccctggaaaggacataacacttatagaaggtgtaagtataccttaccgcagattatcatgtcagtctaaatccaatgtactgacaagtcatgggacttaaaattttaaacatataaccatgattatattctattgtgctgacacgctactataatttagccttttagtgacacgcacaaaagtgcgggtcactaaatagttaggagtgatttttagtgacacgcataattagactctaaactttcggtgttagcctcatgtaatgtgtgtcactaaaaatatagagtgtcattaaagagtaaaatccaaacttttcttatttttattaatttaaaatctatggcctatagtgacgcgccaagttcgattcgataaatatttcccgacccacttagcgtgtgactgtatgataattatatttaatagatgcatagaaaccaaccctatcaatatcatgtgaggcgcatggtttttaaaaataataaataaaaaaaaacctattaacttctctttctctttcctaacatcagcccctctcccctttaacaaatcctaatataaacttttcctcaatcctttctaactccagcgcctccctcaattaaaaaaaaatgcagccctctctctctctct

SEQ ID NO: 129271 - DNA, 980 bp, Cannabis sativa
tgttttatttcatttttatccaaagaaagaaaaataaaaaatttagaatatcactccctctctcttctttgagtcagccaccaagaaacccatggaggaaaccatattttctcttcagttggatcatttctagggggattcaacaatcttgactctagaattttgataaggtaaggtctttctttctttttttgtttgaattttaaggaaaaggtgtggttgttcttgcatgattttgagattagggttctgtaggtttgaatttagtttgatgttgttttctgaggtgttatggatgttattaagttgagattgagctaatttatgtcttgttgtggttgttagaaaaagtttgagttttataactcaaactttggtctttaatgatatttttttgattcggagtatgttgtgatgttttgttacatgaaatatgtttattgaggtatattaagcaggcctggaagatttggtatgatatggaattgaattgaggttgtagtgaagtttttagtgtttcctgcactaacaggtcgaccggttcaggggacctgtaggaaccggtcgaccggttggtccccagaaaaccctacagaaccagaatttcagttggggaaccagtctaccagttggggcatttatgggaaccctagtctttctcatttttgtgatatttagtgtattgccatgctattcatcgatagaaaaacttttagtttcaagtttaagttcccgaaaagtgatttagcgtgtcatttgtcacaaattaagtgatttaggggtctataattcgtcgagcagctgttccactcaggttggcggggacacctgaattcggtaacgagttaagactaatataatgatatgcatatgcatttacatatttagcgtgcatgtttattacgcatgttagtttacattgatagcaatatcaatatatgtagagttatattgagtattgatagatgtatgtttggctc

SEQ ID NO: 129272 - DNA, 1487 bp, Cannabis sativa
ctaagtttgggtttaggttcgggttcagattcatggttgtgtcttggtagtcaggtccagggtcccaggtccaggttgggtcctgtgtctcgcgtcagggggggttttgggtccaagtcccccatcttgttctggatccttggtccaagtttgggtccaggttcgattttggagaccaggtccctcatctaggtcacggtttgggtctcaagtcccaagtccgagtcttgggtcccgggtcccggtcctaacccgagttttagtcctagtctttggtccctgatctctgtccgagtccaagtccaggtctgggttcgagtcccaagtttgagtttcaatcctgtgtttgagtcaggctctaggttccggtctgggtgtgggtctgggtttcggtccaggtcttggtctgggtcttggtctgggtctgggtttgggtgtgggtccaggttctggtacgggtctaggttttggtccagatcccgggtcacgggtcatgggtcgcaggtcctggcgcaagtcttggttggggttcaggcgtgggtcctagtaccgatcccagtctgggtttgggtcagtgttcggttcctcgtctagatctagttctaggtccaggtcaaattccttttcaaaggtcctgattccggttcttgttccaatttcgagtcctgagtccgagtttaggtttgggtcctggtctaaaaatggttccaagttcggttgggtccatgctctgggtgatgggtcaagatccagatcccaatattgggtcccagcctcattctaattcggatcttgggtcccaggtcatctcagtgtccaggtccaggtttgggatcgagaccagggtcaggtcttgggtcctagtcccagtcttgggtcatgattcttgttctaatttcgggtttgggtccccaatctacgtcgaggacctgggtctaggtctgaatctccaatcccggtccgcgtcttgcagccaggtttgggtccaagtccgtgtctgggttctagttcgtgccctgagtcacgatcgaagtttttatttgggtctgcttcctggtcttggtctgggtctgggtctgggtcctagtcagattccagttccgggactgagaccgagactgggtcctagtcccctggtcttattccctggtcctggtctgcttccagttccgcttctagtttcgggtcacggtgtacaagtccgagtctgggtccgggttggggaccgagtctgggtttcggttttagtccgggtattggtccctgatccaaacgtcgactatgggttttgtcgaagccctgggtccagatctggatctcggtcttaggttcaattcttgttccactttaagtcccaggtcctggtccaggtcctagtttagggtctgggtccggggtcaagtccttgttctcggtgccagttctaaagcctgagtcccaggtccaggtcccccatccaagtctgggtctaaggtcccgatcagagt

SEQ ID NO: 129273 - DNA, 909 bp, Cannabis sativa
  modified_base (845)..(870): a, c, t, g, unknown or other
atataataatataattactaaattattcataattatctaattagggttttgctaatccatttcttaatttcaaggtattacattatctctttatcctttgctctgaaggtctctcttctgtccttcaaaattttaaaaatatggagcttttgaggggtattgcaatttctaggcatgccccatccattactcatctgctgtttgcagatgacagctttcttttttgcactgctgaccaacgttcttgtgagactctacatcatgctttatctatctattctagagcctctggtcagatggttaattttgctaagtcttccattttattctctgcgaatactagtgctgatattagaagcttctttttccaaacttttcagctggaggacagggcgtttattactaaatacttgggtctttctcaatgcctgtcacgtgttaaatatcatgcttttacttttcttaaggataagattgccaatattattcattcttggaatcataaatgtttctctagggcagggaaagaaactctgatcaaggctgttcttcaagctattccatcttatgccatggcttgctatcgcatccctactaaaatttgcaaagaaatcgaatctctgatctctaaattttggtggggttcttctacagagtcccacaaagtccattggaagaattggtcgagtgtttgtcaatccaaatttgttggggctttggggtttcggtctttaactcatgttaatcaggctatgcttgccaagcaagcttggcgaatttttcaatgccctgattctttgttgagtagagtccttaaagcctgttattgttgggttttatgcccnnnnnnnnnnnnnnnnnnnnnnnnnnagatttacttattaatatatatcagaaataacatttaat

SEQ ID NO: 129274 - DNA, 938 bp, Cannabis sativa
ttttttttttttttgaaacagatgcatgtgcatattcacaaagatagacaatgctttataattagtactgttattgttattttcatcatcattctgccaagtgaaaaaccatatcataaaagtagataatattgatgatattaataataatatcccaccatgctataaatagatataatatatatttacatattaaaaaatgttcaatatatatatatatatatataatgtatctcctttcaagtctcacttaagcaaactctaaatattcgatgacttagctgtgctagttcaccagccgtaccttctttcttaaagaaacaaataaataaattcccgcttttcttatcaaatatttggtctaaaatcattgatgttttaccgaaaattgaggaaagaaaatgatattaataatttgaaatatttagattattaattattataacctccagattggctattttaatattaatatttgaaaattagctattttttaaacatagaatcttttcatatcaaaaccaaataatattgtccaacacatataatccaaactcttattttgtatcctcactttcataatgagaaaggttttctgtttattttttttagatattatggaaccttaaaagcaaagaaaatggagtaagaatctttgatgtaaatttcccatgatttgcgactgtgatttatacaataaatgcatttctattagtataagtacttagttggtctacatttaacaggaatattcacagtgggagtagaatttttgactatttttttaaaccaacgtgcatatgtaatttttctaattttctaaactgcataaaatggtacaatgcaatacagtttagactatcaccaaataattaaactatcacaaatacaacaaaacttgaacaacacttgttaaaaataccataagattgaaataa

SEQ ID NO: 129275 - DNA, 938 bp, Cannabis sativa
actgtgtaattactaaaaactttccatattaaacattagctactaaaaaaatattatttttccatgtaattattaactattttgccgaacaaaatattagaaatttatatgtagttaccaccttatatttaaacacaccttgtattttaaaatatagtgtaaaaactgtgtaattaccagcttagtaattacagtacatagtaattacacaattacttccaaacacaccataaatatgagttgagcgaacatgacacgcatgaaattacaatactatatagtagtacatgtatatgctgtgtattcctttgcataaataacatgtgtctctttagtctacaacaataataatgaaatgagtaattttaacaaatgatacttggtcatggtgcaagaaaaagatgacccataaaaattaccattatcaatttaggtacttttaccagcgtgcccttttggtaggatagagtttaattattttgttttcctttccaaataattaatatcactgacattaattaattatatagagtttattgcagtaattaaagttttgagtttgtaacataaactcaattatttttttaatagctaaatactcaatattaataaaattataattttcgtcaatacaaattttattttaaatttatttaaagaacatttagaagtaattgatattaaatattttcgtctagattcaatgatttaaaatctaggctttatatgtgtcttgtttaagacaccaatgaactctttattcaaaaaaaaaaaaaagacactaatgaactttatactgataaaactagacaaaaattacagttttactgacattgaatacttatgccatacaaaaatcattaaatttataccgtttataaattcaaaactttgagtacttattaggggtgttcataaaataaccgatccaatccaat

SEQ ID NO: 129276 - DNA, 1054 bp, Cannabis sativa
tctaccatatgagctacacccccattactattttgttataatacattaacacaacttttattttttatatattcactcttctgacaatattttagctttaacacttcaaaactactttttctctttacttattaatcttaattgatgtccttctctttttatctagtacaaacttgaataatctgtgtgttttgggctcttctaaagtaaattacaaaaaaaaattattgatttctttattatttactattatatccttttatttaatgacaagaataatcataaatttttcaaatataatttgattatataaaaagatgagaatataggcatagattagagagttccattttattctcattattaattttttttacaatatcatttgtagtatatatatataaatggaatactttttaatggggtattatttattaactggtactaaatatatttaactataaatattaattttaaaaatatttaaccattagattttagtccgatagcgaataataaaaaataaatttgaatttctatgcttaatttagctacttaataaaagaaaatatataaaaaaaaatctcttttttacattatatcaaaaatatatttatatgaaaaatatttaagtcaaattcaactttttttattacttttttttattatttttttcaactgatagaccaatctcagcccatataatgtaaaataaaaaaattttctaattaaatattaaaattaatcataaaaattcaaattttttataatattatccattcatgagtaatacccaataaaagtacacatatataaatatacattatttcaactatgataataaaaatataagattaaattatttaaatctccactatctaatataaaatagtatagggaaatttatatcataatttttataaactaggttacataatattttttttttatgaattcatgactatgaaatttctttcttcaaatatatatatatatatatatatatatatatctcttatataggaagaggtttcaatggttacatttttattgt

SEQ ID NO: 129277 - DNA, 965 bp, Cannabis sativa
  modified_base (875)..(883): a, c, t, g, unknown or other
aacatacttgcaaatagatctaaggtcctggataaatataataccaacaaatagctcatgcgtggagctccccctagctgcggcgagctccctttagctgcatggagctccccctagctgcgtggagtagcttgtgcgtggagctccccttagctgcgtcgagcaactcgtgcgtggagctccccttagctgtgtggagcagcttgtgcgtggagctcctcttgggtgcattttagaatttacacctggcgaacttttgggcataacactaatgactccaaatattacacttagtaatttttgagggtcaatactttccccctagtctataagaagtctttcatgtgttcttgtagactaattttggtgagctttatcttcatctcttagtcccaaggctggttcgtcagccatttgtcataggtcttttagacttaatctaatcgttcttcatccccttatcattgtattaaagtgttggtgtgctcatagagtatgcacgaccagctgatgcacaacaagcgaatgaatagccagcctactaacaaatgttaaactaaggaacaaccagctgatgggccgaaccagctgatggacgactagctgataaataaccagatgaaggaggattagctaatggacaactgactgagggagagccagctgagggatgaccaactgatcgagggctagctgagggacaactatctgaaggatgatcaggtgatggagggcaagctaagggacaaccagttgagggacaaccagttgaggaatcattagttgacagagggccaattgagagatgactagctgacagacgactagttgacggagggccagtggagtgacgacctgttgggttttatgccctnnnnnnnnntccatttcaatgtaatccattttattcagcatcaataaagaaacagaagtatttttcattcatttgcgtatgttttggttca

SEQ ID NO: 129278 - DNA, 1248 bp, Cannabis sativa
agtctcggatgcgtcagagtgccaaatttgggataacaggcttcgctgcttaaagagagacacagattagggcgttagaacattattaagaagtcatgcatgtaagaacaaagcaataaaactaatcctaccctgacggtctaattttgcctagcgaaagcatacatgaaaaggctggtgtagtcgtccccaagaaagctgtccgaggggaggaaccagctggaagataaataggccaaataatccaacgtgataggtgtgggaggaccggaccccatccatgactggcctaaaaagtgacctaggtttgaaaaataaaaacccttagcatgatcgccccatcgaaaaaggggcatcctaaacctatggagacgttcatcaaactctactagcctacagccagaataatcttgaacggaaggaacgtgatgaacagttagtggagacttaccagatccaggggtactggcatcaggagcaccggtgttgggaaccgagaacggaagcttaggccggaaggttgcctgctccttaccagcttcaatccgaagaaccctcccagcggcggcttggaccttgatgtaagccaattcttgttccctcctgaagaggtacttcttatatcggtcctctacggaagcaatgatatccgcccgaagcgccttctcagagtcaggactacgaacgttgggacaaagaaccttggacagattgaaatcatccactgattggttatctgtgatcaacttggccctcctccagtgtgcagttgtgaccaagtccccaacgttcaacccatccttcttgtacgtggaaaagaccttggggtgctgaaggaaaagttgtgtgggggctgtgcggtgcatcagaggtatcttgacccactctgtaagcagttttgagcgctcgttgggttgaaaaccggaggagaagaaaaactgatgatggtattccttaacattcttttggaaatcaaaaggaactggaccctcattagcaggatgggcccggagtgtgaaaaaactgtccttaagtttgtctcccttctttgggacagatacaagttcataaaagtacaaaatttcagctgggctaggcgaagcccagcctttggcaacataaaaaataaataagcctgaaagaaggcagtaggcctgggggatgagttggtaaggcgcaaggccaacaaaaactagaaaatcgatgaagtaatcctggagcggcagcattgccccggacatgaggtga

SEQ ID NO: 129279 - DNA, 1637 bp, Cannabis sativa
tttctaacaagttggctaaatcctgatctttgatagaaatcctcgagtggtaagctattctaaattgctctagctcaattaaccatttaatcaatcttcttgatgcatcgagttttgacaacgcttgtcgcaaatgctgatccgtgagaaccttaatggggtgtacttgaaagtatggttagagctttctggatgcatgtaccaagcaaaatgtgagtttctcgagaggtaggtatcttaattctgcccacagtaacattttacttacatagtaaatgggttgttcatttttgccttcttctcgcactagtgtcccatgtacatgaaacagccaaataaatgaacaatatttctccagtaattggtttggcgtgaactgaaggtatagagagatgtttttttatcttctagaatgcttgtttgcactcttcattccacttgaaccttttattgcctcgcaagattttgaaaaaggggagacatttatcagttgacttcgagatgaatctgttgaataccgccatccttctagtcaaagactgtacctcctttagttttgtttgcgaaggcatctcgagcaatgcttttattttgttggggttagcttaaattcctctcgcattcacaatgaatcctaagaatttctcagaggacacccaaaaggaacacttcttagggtttaacttcacatatattttttcaatatggcgaagcactctgggaggtcctttgtatggttctcacttttaatagacttcaccaacataccatctacatagaccacttttgtgcaatctggttctcgaacataccattcacgaggcgttggtatgttaccccagcattctttaacccaaatggcatgactttatagcaataaggtctcatatttgtgacgaaacttgtatgttaatttggttataaccagaatatgcatttatgaaagtcattagctcatgtcctgctgtcgcatttagcaattggtcgatccttggtaatagaaagtagtctttagggcatgccttatttaagtcggggaagtctatgcaggttctccatgtcccattttgttttgggacaagaactagattagatatccacgaggggtaaaatgctttccttatgaagttattggttaacagtttgtcaacctcttctcttaatgtattttgtctctcgagatctaaaggtcatcatttttgacactataagggataagctgggtcaatgttgaggtgatggcatatcacattcgggttaagcctgaccatatctaaatggctccaagcgagttgatctttgtttgcctttagaaaagtaattagttgctattttatttctttttccaaacccttcccaatgttgatacacttagtaggattgtttagatctaaattcacctcttctcattcttcaatagccctgagttggttattttcatcatggattctcggatccaaatcttccattccttcctcatttcttctgtcaagattaccatcaattgatggcttgcccttctattcttcaattccacactatagcattaccgagctaataattggttgcctttcacagcctctacccctaaatgagtgaagagttttagggataaatgcttgatcgagcttattgcc

SEQ ID NO: 129280 - DNA, 593 bp, Cannabis sativa
atgggtagttttattgcattttatatcattacattcttatactaaagcaacattatgatcaattttcaactgtttttattctattatattacatgcatatacaacaaaatcaaatagtattttaatttatacttacaattgctaagatatagatggattacttttattttgtgttattttattcaagttattaagttatcaaaattaatttttcatatttttgtacaaaatttagtttaagtcaaaaatttactattaattatgtttgagtaaatagtggctaaatcgctatttgattacgttaccaactaaccccccaaggaattttttcacttatattttatttgcagacatgacttttgatccaatatcattcgttaactttcaagttggactctccacgtatacatcttgtacacctaagcaagtttacattggttcacacataattacattttttttaaaagtcattctaaatgtaattattttgtaaataaaaaaatttatattataaaatttaaagcctatttataaaaactaaaataataatggaaaattctataatacaccccttaaaacggatacaccgatac

SEQ ID NO: 129281 - DNA, 1432 bp, Cannabis sativa
  modified_base (51)..(62): a, c, t, g, unknown or other
  modified_base (936)..(941): a, c, t, g, unknown or other
ttaaaaatcactaaccaaacatgacttgtgttttaaaaacttcaaaaactnnnnnnnnnnnncatttctaaaaacaattttttaaaacaaaaaacagaaaacaataccaaacatgtattttttattaaggaaattatctcatatactatttttttttaatttttttaatttacagtttgagtttctaaagtggtttttccggtgatttctatgtgggttgctatacgatttttagttttgatttaagttgatccgctaattgtaatagagatttctatatataatttcataaaatgcaaagaaaaaaaaattattttgacatgtaaaatttttttaaaaaaatccttttttattattatttaggtctacatgaaaatatgaatataacacaaatatattatagactaaagaattatctaatatacatttcaaaaaataaaaagttaactaatacataaaagcaattaccttgtttaaagggtaacatctttgctgttagctctttaaataagaaaaatttctttgagatctgtgctgaaaaagatttctaaagttgtttttattaaataaacaattccaacttcaaagttcaaagtatagacttgtgaagttttatattcctcataatccaatcttttttaaatgaaaattagtaacaaaatatataagtgaagtttcccattttttggccatggaattggaagatatatacattagaacttttagcacaagtacccaataaattctctcgaagatgtagaagaaagatacacatgtaattattttactattactaatgagaattctaaaaagtaatgtcaaattctatggccattgattggtcatgagtatatagatgaaatagatggatgtctcttcttttgtttcacactaaagagaaaattacaaggactttttttaaaaaaaattaaaaannnnnnaaaaaaaatttaaaaaaaaaaggaaaattacaaggactttaataacataaaaaatgcatctactttcccatataaatattaaagtaaaaaaaatcataaattccaaataccaataaaccaaattcaccgaaaggctaactacataacagtaagactagaatattgttgcacgtgatggcacatgctgaccacttatcttagttttacaacttacaagagattttttgtttagattaagaataattagctccaacaacttttgataatattaattctgcctcttaaaatatacgatttgtaaagaagtttttcttaaatttttacactttacagaaatttaattctttcgttaagttttgacacattatttcatttaaatattgatgtatctttgttaattaattttgcctcataaattttgacaactatcaaatcgcactcctcaaaataaaaatgagaaacatttaacattttttagtaaatcttaaaaa

SEQ ID NO: 129282 - DNA, 746 bp, Cannabis sativa
tggggctggaacaagctcctgtggcttaactcgcataccatttaggtagctgtcaagtctatggcctttaacaatagtagtgaccattgttttccataaggaaaaattgttcctatccagtttgagagcaaacggttggttcaatgtgcttccaaactgtggaacaacagggctggaggatgatgcaccatattgtgcagtcatggttggattggcgacattgctgcctcttggagagggagctgcagacctagtagttccttgaggggtttcttctctggtggccatactgccggcggtgctctgatagcaacttaaaaaatagagatactaggtttttgtaaaatgcagctcaatgagcctctgcaacttcaattcattatatagatattacaagaacattctagactgattacacctcatcattggccgtacaaaagcacctttagcaataacaaaaatatactttgaatcctaacagaaaggagagagggagagagggaatcatttcccaatgattacatgtgaaagaagacaaaataacaacaagcagagtgtataattaaatggtaaccagtaaccaattgtaaccagtaataatattgtaattttctaacatgaaatgggttttatttagggcacaaaacccagcagtcacaacagcggtaaaccaataagtgtttatcccaaaaaaactgcttaatattcacataagataatctagggttttctaccaaaccccatgg

SEQ ID NO: 129283 - DNA, 1354 bp, Cannabis sativa
attattacttgtttttaaaataaagggctggtaaataatatttgaattatgtattttattaaatgataaaatagattttgtattttttaaaatggtacaaattgaacgtgttagattgattttttgtcaaaataaaatttaataataatttgacgtagagatgttatagcaaaattggtaaaaatttttgtatatgttcatgtgaggaattgtcttcaagttggttattttaaaaaaattatcaaaaattgagttcagatcttatttgtaccattttaagttcattttgtcctttaactaaaacagacaaaatatagagttcaaaatagtatttatcttaaaataaaataataattggcgataaaaactttttatattttaatttttatatacttaattctcttaaatattacaattaaatacgaactggatgattattgtatacactcgtgtatacgtgaaagtaaaatctcgaagtcaatacaataataatctaattagtatttaactgtgatatttaactgtcaccttaaatttacaaagcaaaataaacataaaacaatttagatatcaaaaaaaataaaatgattaagtataaaaaatcaaaacataacaaaatttcgtcaaaaataatccaaaataaaaatattatcttgagagctattttcaaaactatagatattttaaagaatagatgtagggggtgcgtagatgatggatggtcccaataattgtatatttcaaaatatccaattccacacaccaatatgaatactgattggcttataaatgaaattaggtcataacataattataatattattatttattattttttttatcttttttaattttatacgtgacccacaaaatatttataatatactaacttaatcaaaatggatctcattgcaaagggactaaaatctacatcagtttcataattgttttagattttagttaccattttagggtatacatattgttatattttaatggagaaggaagagttattattgaatattacacctaaatagtctaaaagaaattaagctaccgaatttagaaaatacacacttaatttaattactatgtactaaatgtttgactataagattcaaagattaaaaatagtaacacaaagtatattataaaaagatttatactcaaactacctaaaattgtacaaatcctaacccctgtattatcattagatttctttataattttggctaattataatttttgttccttaaactttaacatatatcaaattatgttctctagacttttaaggtcattaaaaatatccctgaactattaagattgttggatttaaagacttttgtctaat

SEQ ID NO: 129284 - DNA, 920 bp, Cannabis sativa
aaaatccactaaacatctccttcccgaaaagaataaaatccataagaattttatttcattatttctcttctttttgggaaaaaatatattttgtcttgaataataataaatagaatattaggaatgtgttttatcttacagtaataaatcaggatatcaaataatcactttatcttcacttcttttgtttttttttttttttcatcgtacttaattagtagatatacacacaaatatgatacacaagcatattcaattaaattcaattaagatgcaaatacaaaatataatttattttgttaaaactctactctagtgtgctaaattataatgcaaatatattacactaaaaagtaatttaaatttagatcactgatcacaatatagcatgatacaaaatttgttatttttaatattctattattaaattttaattaacatgtttttttggattaaataacttgtattattattattaaattttatgtttagctttgcaatattattattattttatatttttctaataaattattaagtgaacattaaatgtaatattaaattttaggatgtataattatgcaatgaaacataataataaaagtgatataaaaatatcacaattttttttttttaccaaatataacttaatttttacatatatcaaataaaaattattgattgaaattacttgctacattataaaattttgctgaaaaattgagatcaaaacgtcactacgtacatacaggacagggagcatgccaataaaaacaaattatagcacttaacactcacctgcatgtatatgcatataagaataaaaatggaccattttacataaatgtatacattattttaattaattacaaaaaaatgtgcaaaaaaaaattaattttaaagatgtatacatttgaaaa

SEQ ID NO: 129285 - DNA, 808 bp, Cannabis sativa
aaaaaaagaaaaaggtctatgaaaacaatcttctacctgtattttttcctattatatttatatattacggtttattacacaacatcttcctaattttacacaatagtaattaatcttcaaactaaacattatccaccatatatatatcatgtttgatctttgtttttcactgtctttatatagtacaattacgaaggaaagcagtggtaggtctccatatgatagtgaaactataaataaaaatcatggacccgaaattaatatgttaaattatgtagtacatctctaaataaatgtagattgtatagattaatatgcaactattgtgcactttgaccaagctgactaattataagtaacaattgtgtaagtagtaggcgtataatatagtcaagaatcttttggaccccaatgaaaaaagagaagaaaattaatcagaatcattggctaagtacttaaatgttggaataattggtccaggcacatgacaagagtcttcctttctgttagcaaagtctcaaatcaaatctgcggtaattaatcgtgacatgttttaatcactattttactctagtggttaagttaaatttaaatttggtggttgttaattggttttaacttgcttatacggttagaaatttcttactttattttggagtttaatgttcggtcaaattctcacacaaaccaataacgttcagaaaaaaaagaataattagcttttttagtccctgtacttatgacactatactatgatgccccttaatttataagtgtagttaaaaataccccctaaaatatatcagtt

SEQ ID NO: 129286 - DNA, 1395 bp, Cannabis sativa
aacttcaattatacatattatttcccatattctttatttttgtaccaaacaaagcttatcatcttttgttttaaacttcatttcccaaccttcatgtgaatttttttatatgtattctgtgtatacatatatctagtttatgagttaaataaattaatttatgtgtgatattgtttagacacaaataatttaataaattattattatggcatggaaaaataatagaatttattgaaaaatttataaaataattacagttaaaaactaatgctaatataattcaaatttcaaaaaaaatgttttgattaaaaaattttataataaattgctttgaactaaaatatatttacttatttatcatatattattaaaagttaaattatttaaaatacataatatttaaatgtttattttttttattttgtttaagaaaatattttttttattatggtttttaacaacttaaagtttccttctttttttacatgtaataaaaaataatttaaaaataccttatatttctaaattacttttcatcaaatggatataaagtcattgggaaataataataaataaagatataaaaaatgtaaattttatattacataagtttttatatatagaaaaatttactagaccaaaaattttttttaaaaaattataaaaatacatcaacacaattttttttacgctttgaacttttttttatttataaaaataccttttcagtaaaaacaatcaactgtttttctctttaatagttaatttatagttgcataataattatttcatggttatttttttggttttattttttattgttctatagtttatttatagttgatttataattatcgcaaagttgattgcttgttgttttttagttgtttttttgttgagcaaagtgtatttttgtaatttaaaagtatttttttgtaaataaaaactttaagtagtaaaattataaattaaacataaaaaattgtatttttaaaaatttatcttttatatatttgtaattattaattacattacattacattataatatacttactattatatttaaattattaacaattcacaatattttaaaatatgtaatttaccaaatattcagcttagttttttttttttccacaactcagttgcagctgtttttcctcataacactgctacaactactttctcccacatcataattgtaacaaactgaccctaaacataaataaatggcaaaagaaaaatgataaaaagcactaatagtgccaaacataaccacgagttgctatacaagtacaattaaatatcgagtctcacatatctttacttaataaataatataaaaaatcataaactattcataagacacctcgtggtgatattgacatcacta

SEQ ID NO: 129287 - DNA, 1070 bp, Cannabis sativa
  modified_base (44)..(60): a, c, t, g, unknown or other
gtaaaaaagtaaaaaatagcgcctcgcagtatttttgtaaaaannnnnnnnnnnnnnnnntaccatgtaaatttcccaaatttatcagtgatgagagttatggggttatatctcaaaatcaattggtaatgagtggagtaatgttcttatatatgactcaatatttttacatttgattcatgtggaataatgttatcaattatccccctcaagatggtggttattttttggtacaaatcctgaattaccttattacaagttgtgcaatttgctcacttatttcttttttgtttctcaagcgtatttgcactattctggatcttgtgcggctggctttactatctgaataggtgtggatcgaaagctcactagtgatatgactctaacaccataacaagaatcatggggggttcaattttcaaaattaattggtaatgagtggaattacccattttcttatatataactaaatattcttacatttgatacatatattggacgatgttatccaataattagaacatgctcattttttcttttaaaaaatagtttacagtgttagaaataaagtttaaatatatatattttaagtgtaataagtagcccctactacaaatatattatatatctttgattttaatatggaaaaaaaaaaacaaatatacacataaatatagacttttttcatcaatttttagttcccgcttaacaaaaatttagttttatatacgattttataaaaaaagcgaagataaaacaaaggaagagcccaaatcatgatgaaaataccgaagatgtatgcccattttggtgagtaaggggtcaaaacgctatatctttggttattatggaataaccgaagatacatatttccacgaggacacttatatgtttggttattccataatatatgagataccactgaaatgaaggtgtagttttaactaagaatcccagagttgcagatcatgtgaagtaatagtttatgggcataaaggattcacttgcgattataggcccgccaaagggaaagcgcacaggtattcaaaagagacaagattttttaaaat

SEQ ID NO: 129288 - DNA, 1267 bp, Cannabis sativa
  modified_base (1202)..(1202): a, c, t, g, unknown or other
  modified_base (1241)..(1242): a, c, t, g, unknown or other
atatatatattaaaatttaatatggtatatgaatagttatttatatttgttttaaatatatgaaaagtaaaatttattttataacatattaatattaatattgctattaatattattattattataaaaattgaatatggaagtttaatagatattagaatttaaaatagattaaatattttgtattaaagaatactaatataatgtaaattagtttaatataattattatgtagtcttaagtcattccattaataataaattaatatgtatgtaagttactctatttataatagaatataatatatttttagttgaaaaataattaaaaaattaaataattaataaatttagaaaataaaaaaaaaatatggaagaaacttcgattagatttccacctaaactccttaaaacattatatatatatataaagatagatagattctttttttattattatttccatgaataatagattaatttgtgataagttattagatagattatatggaacaccttggaatatactcatatatgaaaagagattgtgattgtattagggttaggtatgttcagtataatttgtaaaggactcaccaattttagtactcatgggagttgaatttttctaaattcaaatgtctaaaaaattctctaaataaaatacaaaaattctattgataacaatacattatgaggtattaaataacaattttaaaaatataaaagaaaaacagtataataatcaaatcaccttctatgaaacattgctagaaagacaaaataagtaacaattatattaccttctataactcatataatttatattgttgtatgtagactgttgtagcatgaatcagagcaggtgagtaaggaaaaaaaaatgacttcatcaaatctgtattctatatatatagatagtaaagattttttttttttttaaaaaaaatattaaataaaataatattgaaatgatacggttttaaagagaatagaattagatatttgaaacaattttataattattaataatacatgaattgaatttaataaaataaaaattaagaaaataagaaaattaaggagagaacatatataagtatttagagtgattttagactgtcacatcaccgcctcttacttctcttttatgtagatatatgaatataaatagatagatatagatatctattctatataaantgtgcctatataactgaattcttagtttatgagaaattnntgggtgactttttatttatatttaa

SEQ ID NO: 129289 - DNA, 608 bp, Cannabis sativa
tctctctctctctctctaagtaacaatttgagtcagtaatgacacagattttcaaatcccatgtactccttgttgtgaattttttcaattgtgtttgatatgccaaccccacctgctcaaaacccaagtgaaaacctttgttattttggaaaaggaagatatatataaggtaatatatgtaagatttaaaaaaagatacctagtgttattgcactaatgaagatcattgaagacaaaatgaagataatcaatgatgctcttcctattatactgatgacctttcctaccacatgttgcccaactagagcagaaactgtagccacagctgcaaagtagagagctgcaaagaccaagtttaaaaattcatacaaactcattaatggtaacacaacaccttaattttcaactcaaattctttttaccataaggaactggaaaccttcttagaaggtagtattctacaacagacatggatgaagaatatgccataacaagagttgctgttgcacttgacacctacacaaacaaattttcacccaagtttaaacctttattgggaaaaattaagttacttgttgtaaccaaaagtttgactttttagcagacct

SEQ ID NO: 129290 - DNA, 534 bp, Cannabis sativa
tgagtttccttcatttttcaagagctataattaacagaagcaatagtcttcgttgacttttttttggagaaatttctgtgtattattttcatttgatttgaacaacttcgctaattgatttttaccactttttaatgtgaccttatgttcactagtaatataacataagatttaaggaaattaattaggatttcatgttaaaatacccatcacaaatatctatctgttctatgctatattgaatttcccctttaatccatttcacaagcacaactcttgtcagtagtgctacgtagaaaaagggaaacccaatgccatcattataatttatgggtaaggttttatttatttacttttcatttgatttcattcgttaaatggcagggtgaaaatgctgtttcggtacttacaagtagtggagagaagggagaaaatgaaacaaaagtagcagaagcacttaaaatcttggaagagcaattaagccttggaaataccaagttctttgggggagagactataaacatggtggacata

SEQ ID NO: 129291 - DNA, 586 bp, Cannabis sativa
  modified_base (63)..(77): a, c, t, g, unknown or other
gtctacctattagtaacctgctatttacaggtcaaagataaatgtaaccatatggttacaatnnnnnnnnnnnnnnngaatagtcacccatataatatatatattataaaaaactactaactatttataaggtattatctcattatgctgatttagttttcattaatgattcttgcaatattttttgagcgtatatgctttaatcacagagtttctgatccatttacatgtgtaaaaggtaagtaattataggtaaaaatacatatattcttgttaattaaaaataatattagaaactgaatattctccatcaagatcaatgggaggtggtctttacagatttatttagtgtttgatctcccggatccaactttgaccaaattatctgctcgatattcctattatcacatttttctgcttcggatgactgttgttcctccacccataaccataggcacaattcaatcccacgcccaaggcctcccacctagacttacaaagagggtttaaatttatttttggctaattaggattttttcccccgaactttcacatgtaccaaatcatgccccctaaacttttttgg

SEQ ID NO: 129292 - DNA, 598 bp, Cannabis sativa
agggcataaaacccaacagtacatgcccacgcatagcaagttggtacttaatcatagtgtgtaagactgtaaagaatccattcaactgaaggacctcagattttggtgatactctgctacagaagggatacaagggttggagatctgagtggaaggagtcatttaattttgttgcaactaatgtaagggttcttgaactttatatgtgtttgaattgcattgttttagaaattcatatttaggatgttgaataacatatatggtagtaaatttagatcctggtaaaataatccccaacagaagatccatcaacgactatccttgcgagggatcggcctataaatttccccgaagatgcacaaggcaagagacagatccgaattggcacttcttctacttaaatcccttcaactctccattttgagaccgagggcaaacactttgtaaatatattaatgtaattttattattaactccataatatttctactaagcttcctcttcctcaggaggaaaacggtatatcaaagtaaagtctatctcttttgtatttgtatcaacatgttggaaattaatataccaggatcttagatctact

SEQ ID NO: 129293 - DNA, 957 bp, Cannabis sativa
ttggtcaaatctaaaatctcaacttatctcaacattcctaatgtctaactatattgccccactatactaaaaatactaagatgtgattctaatagccaattgttgcatttcaatgttgtcaggcacaaaacatgcaaaaaatatgaatattccattatatgacatataaaatatataattcttcaaataaatctccgtaaactgataattcataactaagatacgaatttcataattaaagcctatttatctactaatttttaaattaaagttaagcggtctttacacttgatgtcttacacactgcctgaaatacccacgcgagatcagactctctatgtagtctttcaattgtcgacattcttcagtagtatgccctatatctttatgaaattgacaatacttcgttgaatctcgcttatgtctcgcatgtctcattggctcaggtttgcataatgcaaccctattttcatttgcgagaaaaatattttcacgagtttcatttaactcggtgtatactgaataaattgaaacatatttgtcttgctttttctatttcattttatttaaatatgattctctcgagtcttcttttctttcggtatttgaaccacttttatcatctattttagttgagacgacacttgttgttttcctactcgtgttaggttttcctttcaagatagttttcaacagcttcatctcatttatagcttcttctttacgcacaaatacttgtgctctttgattgaattcattaatgttcctcactgggcgaccctgtaggtcatcccataactcgcctccaatcgtagaaacgtcagttgtgatccctgcctgaggagcagtaagctgaatactttcatttaggtttctaacctttgtagtggatgtggtgaagtgactcaagtaaaccttaagtgactcgcatggttgttgctttatgttggttaagga

SEQ ID NO: 129294 - DNA, 925 bp, Cannabis sativa
ttttgaattgcaggattcattattgaaaccagtgactaagatcttgcttggggtagcattaataacccttttgataacattcgttttaaaagaaaccccgcaatggatgaagaagtttaatgttacgggtgtaaatttcccgccatggattcttgcttgtgtggttatagttttcacacgcatgaggaagagaaccaaggatttgctaaacaagcatggctggtgagtgaacaatgaacatatgccatttcagattttgagagggaataattcagtttcttatatactgtttactatgtgaaaatcggttttgttcacaaggttttttaatttattttagtgaatttcaattagttgtatttaattttgaaaaaaaaaaatattaattttagtttattttcgttagtttttgaagtacttttatttcgttttctataaaatattaatttactcaattttgtgtattttgtaagggtttaaaagtaatatttagttaaaatgggtcaaacttaagaataatcaaagctgcccattgttatgatctcccttgccgtatctcacttttagcaacaatttaccacttgttttacaacttggagtacattacatgacaagtcttgtaatttatttaattatacaagggacgacaattttttttactgaaatttcgttgtattattaattaaaagtgtaaatctgctaataaaatagtatgaagattagctccacagattggacgacctaaaaaagaacaagtagcaagagccacacaattgattttcttgttcatagattatttaacaaagataatagagatattgtttaaaagaagaaagtagatattgacaatcagaaataatcagccgaagacatttgaagagtatcacggattgcatgaacaactacttgacaatcaattttaata

SEQ ID NO: 129295 - DNA, 792 bp, Cannabis sativa
cgaactgagttcgggcccggaatgaaatttgaattgaaatattggcattctatttgatagtgagaaatcggaattttatttgaaaataaatgagcatgaaatgtcataaatacccttgtatgtgtggttatgtgggcattagccctaggggaaaaatggtcctttgacctattgatttactttgattgaagaattgaatttttaggtaaatgaaaagaaaattctggtttttgcttcccccatacccgacccctctctctctcaaaccctctctcttttctagctttgatttttggtggaattacatgatttggagcttggaatttgttgattattgagcttgaaagtgaaggaagttttagctatatttgaggtagcttttttcagattttaactttgactatcttgctgaattttcttgatgatggaacatgaatttggttgttgatgatgttgtgttgcatgtttaatgaattggtgttattttgatgaattttggtgtgcgtttgctagttattgttgtgggttaaattgttgggtttggatgagttgttttgagtattttctaggttgggaatgaagtttcaattagtgatatgttgctggaaaaatgtatgagattattggatttaagctcaagttcttgagcttgaagagttgtgtgtttgagcatgtcattgtgttgatattgcaatctgatttcgggggtttattgttagatgttgatgcattgaatatgttactttgactctcttttaattagtagaaaccttgtttagtgatttgagagtt

SEQ ID NO: 129296 - DNA, 705 bp, Cannabis sativa
tcaccctactggccactgaggccaactatgtcaagtacaaactcttcccaaaggactttgtgccaaggcctaagaaggagaagaagaaaaaggctaagccacgcaaggctggtgtgaccgagcaggagaaggagctcattcaacttaagtgtgaggctaagttgaagggagacaacagtgccaagcagtatgcttaagaatattcagagcagaagaggccaagaaagaagtagaagaaggctctcccaaacgaccaagtaccggtagaacatgttatcaggattaggaaacctaatatgcctgctcagccatccgccctggtggagggtaaaggaaaagtcgtcctggtggagcaggaggaagactcttaagacgatgatgcctcgtatgtgcttgtttgggaatatgctcctgcctgcgtgcagggtatttttaacttgcacgtacttctttcatgatatgcttttcatcatatttgcttctaactgtgtcattttgtttgtgcagaaatgtctaagaatgtgcttcaagacttgaagaagagggtggggtacagctcgagccagactcctccgcccaaaagatctaaaggcggtgagacttcgtccaaagagaagaggacagtcaaagagtgttgggttttatgccctgaataaacctctatttcaatgtaatctctatcaattaaatatcaataaagaaaca

SEQ ID NO: 129297 - DNA, 1098 bp, Cannabis sativa
aactggtcaagataactatgtttcttggagtagagctatgcaactttctatttctatcaagaacaaaattggttttcttgatggctctattccaaaacctcctatcactgatcacatattgtacaatgcctgaattcgtaacaacaatatagtaatctcttggattttaaattttgtgtcaaaagagatatcttctagcatcctttatgatgaatccgcagccactatttggaatgatcttaaaattagatttcatcaaaggaatggtccgcatatatacaaccttaataaaggcctaatgaatcttaggcaagatgctcaatctgtgggaatgtatttcactaagttgaaatctatttgggaagaattgtctaattacaaatccacttgtacttgcaatgggtgtacatgtggtggaatgaaaaagatccaggaatttcacaatatggaatacataatttcttttcttatgggtctaactgattcttattcccaagttaggagtagcatattgttgatggaacctcttcctgaaatcaaccgagttttctacctagtttctcaagaagaaaaccagaaagaaaatcttggtaatgctaatgatcccaactccaacatggcctttgcattccaaaaggacaagagtatgcagaacaagaatgataaccaaggaaacaaatcctatcctcctaagaaaggtagaccattttgtacccactgcaatatacatggtcacaccattgaaaggtgctacaaaatccatggatatccaccaggattcaacaagcaatccaagtctaaggatgccacggctaatcaattgcagaccagtaatgacaacaattcttccagtgaagagactcacactcttcttcctcagttaagcactgcatagtaccagcagctgctcaatctattggcaaaccagcaacctaatgtgacaacctgtgagaccagcactgctacaggtaacataggtatgatcttaacctataattgttcttttattgaacaagattcctggatagtggactcaagtgctactcggcatatatgtaacaatgtcaaactctttaaagatatatatgcaaagcacct

SEQ ID NO: 129298 - DNA, 1770 bp, Cannabis sativa
  modified_base (41)..(43): a, c, t, g, unknown or other
  modified_base (1722)..(1730): a, c, t, g, unknown or other
aaataaataattaagtatagatgaaacttaattattaattnnngtttaatactaagaaaatatacttaacttagacaaaagactaattaccaacataattacatatttaataaaatatgcctatttaaatattatttatttttcgggatatgacatcgtggctcatgatgggggattttaatattgtgtttacttttggcaatcgtagtggaggccaaatcatttcgtctactgagatggttgatgcttaaaattggttgtctttagggcttgctgatgagcttcattctaaggctgcacacgggtcagatttttgggttgtcaagttcgggtttttgaatgtcgggtgtttaaaatgtgcaacaaaacctgattttcaggtggtagggtttgacgaattttgggtcgggtatggcgggtttgctgtggttgggttcggatgaagacccgtatcaatatttgcataaaaaaaacccatatagtgaacagtttaaatgtctcaagcactctaaacaaaaataaaataaatagtttgactcttattttactgtggacggaaagtacaaataaaaaaataaaaaataaaacaaaccaacaaactcgtttcccaagtaaagtgacttgaatagacatattgaatgaaaaataactatgtggagactatggcctattactctcgtaggtgacagaggcatagactctcacacttttttaattttataataaatataaaactgtctcttcaacttttgtagtacaaaaatttgtgcctaatttttaggtttcggattaacacagaattaatgtttgcctttttttaaaatctgaacccgatacccgtgtggagcattttcgggttggacccgaccccacaacacgggtttttaattttttggatttttttggcagcgggtcgggctaggtggtcaggtttgcgggtctaaatgttcagccctacttcattccacaaattcttttttcacctggactaataaataattttttttctaagttggatagaatgtttaagaatgaggcctagttagatgtgtttcccaatacagaagctattcttcaatgggatattatctctgatcatttactgcctagttaagagtttgaagattagtaatataggcatgagaccttttcggttcttcaatagttgatcctctcacttagactttaaggatgtggtattgagtagtaggtgcagcctatttaggggagatgcttcaattttgtggttcaaaagttgttacgattgaaaaatgtgttgatttttttttaataaaaacactattggtgattttaaggaaggctatgaggttgctaaagaaaatttttagcaagctcagatgaatctccaagctaatccttctgattgctctttacacatggatgaatagcaagctcatgagactttcagatttcataatgatatgtatgagaaattcttgaggcggaaaagtaagattacttggattcggtttgggacgagagcacaacctatttctacgcttcaatgaaacagaggaaggccatgaaatggattgtttctttcctttctaatcaagttattctggtcgatgactataacctggtggtgaagaattttgtggtgttagttttatggtactaaatcaagtacggaactaaagaatttataacgattatcattgtaccacaacctaagatctccatgttgggttttatgccctnnnnnnnnntccatttcaatgtaatctttattatttaaatatcaataaa

SEQ ID NO: 129299 - DNA, 766 bp, Cannabis sativa
taaagatatctttatatatatagttaaatataataattgaatttaaaaataaaaaaaaaaatttaaaaaatattagtagtttgtgtggatggattaacctgaccaatttcattagacggttgaaacttttctttttcttaattaggcgtgttgcacttagatttttgtaactcgatctttacattaataaaatgtagcataaaccaatcaaaccgaccgacgtacacccctagttgtcactattgtttattatcagtgaatatcgtctctaatagtgactttcagctatgaagcatcgattatgattatttagtgacgacatgtggtcactgatgctcattagtgacgaagaaaaacccttccgtgacgatttttatcctcattttttttttcttaaagtggctttagggaaaattttctcaaaagaattcacacatgaaaaataagttacataattgtattttaaatttgggtaagtctatagtagtacatcttcctaaaaggacgtttcagtagaccccttagttgtttcaatatttatgaaagtttcttagtccatctttttttcatgattgtgtacgttgtagttgtttaagattacctgtaaatttttaaaaaaattataaataatttacaaagtagaaaataaagtatgaggacattttccaaacaccaaagggaatcaagtttcttagaattaatcaccaatgcctcatcaaggttgtatagcctgttgggttttgtgccctaaataaaaccctttaca

SEQ ID NO: 129300 - DNA, 1402 bp, Cannabis sativa
agagggagagagagagagagagatgagatgagttatcagacttagaacttgagagttagaactaagagctagggtttgactattgctctttatatgttgagcttacattcctaatatcccttaaaaacaagtaaataaagctattattcacataataaattaataaagttcaaatgactaaattgcacctcaaaaataaggaagttgttgatattttctctctaatattgtgggttgttaaggtccaattcgttgtctaactgcattatattcatacttataacaatttgcttttgaagcttgaatcagttactggtcgatatggatttaatttcaattatgacaatattaattagtcgtcttctttgtatattgataatatatatttttgttcttccttaagttcttcttcttaattttcttttttttcctttagtttttgaaatttttagtcacgtttttggggaagataagagtgtgattgttttttattctgattttcgaggactggatttgcaaatagcctctattacatctagtgttgagctgtgcagaagatggttagtatttttttaatcatttttttcttttgttttctttatatttgtttagtgttgttttgccatgatttatttatttaatgtcgattttactgctcttgctctatctcgccaaaattaatggttattttttaggtattctcgtattactgtggtggttctatccgtaggtgtggaagatggaggctataaatacattttttcttcgttctctttgactatttttgtattttttttttattctaattctcctataaatacatttgaggagctcggtaacaaaagagttttgaagtgtgtggttcttttatgtttttataagtggttatatttgtttcattgttttgcatttatttttgtgttgttttagtagtttttttattcttattttttaagataggcttgtaaatatatctgctattgcatctggcattgaggatgtgtagaagattgttagtattttttaatcctttttttattttattttttctgatttattttagttttgttttatagttgtgttgccatgattatttatttgacatcaatttcactatttttgcttaatctcatcggaattaatggttgtttttcgactatcctggtgttgttgtagttgttctgtctatgagtgtggaagatggaggccttgtatttttttttttttttttttttgtttacattattacagtattctataaaaatacaaaaagaaaaaataacaaaagattacatgaaaataacaaaaaaaaaaatagcatcaaaacaataacaaaataacataaaaaataacatacaaataacaaaaaattaacaataaaattataagagcacaataaaaa

SEQ ID NO: 129301 - DNA, 1131 bp, Cannabis sativa
gtaagtaaattggtttgccaaaaaaataacctttattttctggtgtgtaacaattatagaatataaagtgtgtacacttcatcctgttttagtagactttttatttgatttagtatttaggggaggtttttaatctgttttttttttctttttttttttataaatgtatacattgtaaatatttaggatcacctataaatttttaaatatttttgaataatttacagtatcaaaaataaagttcaaatattttattacacttatgatcctaattcattcaaaattttcggcatgatagatgtatactatttataattttttgaaatcttattggtgattataaataactagaacgtaaaattaaattaaaaaaaaattggataccgaaacaaataggcaagattggcctgagggtaggcgagtcagacgtgcgtctctggcgctcgaacgttcaggacccaaaattgtaaaaaaaaattattaatatatattatattaaataataagaaaatataataaataatatttggtgtagtggtaaaaagtctttttgataataattaaattatatataaggttctaaaatttaattttgcgtttcacgtaacttagaacccgccttgtaaataagatatctatcgaaacatctatttagggtggactacaaattttttcacaactatatttggtgcatgtttcattttatttttctccttttaaaaacagtttgttattgtttgatttggtgatgcagagactgtacaagttggatgctcggaaatttgtggtgggaaatgttggtccaataggttgcataccttaccaaaagaccataaatcaaataaagaaagaccaatgtgttgaattgccaaataaattggctattcaatataatgggaggttaaaacagttgcttactgacttaacagaaactctaccaggatccacttttatctatgccaatgtttatgatctagttttggagctcattacaaactatgacaaatatggtaagttacattattaccattgagattgatcatatactaattaagccttattataaaaggaatattttcataaacaaaagacaaaaaaaaaattataaaaatatggatttacaattttttt

SEQ ID NO: 129302 - DNA, 1780 bp, Cannabis sativa
  modified_base (39)..(44): a, c, t, g, unknown or other
tgatattgaataaaatggattacattgaaatagagtttnnnnnngggcataaaacccaacagtctgatggtttgtctaattttcaagtttttgtgttagtccgataagaccaatctacggtctgatatattgtctgattgtctatcaaattatcatgttttgtgtttaggcctgataggaccgacgtaaggcctgatattaggtctgctagaggccaattttatatttcgtaagttaggcctaatatattgtctgattgtggtctgatgcctttgcacaaaatttcgaacttccacttgtgtgtgtgtttttttttttcatttttgcagttttcaaaaactccacgtcttttacttccagtgtcagaccattataccgggtgtgtcacatggcgaaacagtagttggtattactcgaagataaagtcaaaatttgagaaattcgaattgttggaaagggtgaaggaatcccctttcaagcaattatttgagagagcatcattacagttttgttttgtgtaatgccctgatctataaggacatcacgtgtgtacttttggaagatagtttagtaatagtagattaattatttaataaaatctgtgataatattaaaaactttactaaagtaaaaaaccctagctacgaataagattacatcactaaaatttgttttgggccccttgttacaaaaattttacaaaaaggttatatacaacagtgtatcaaaatacacatcagatgcaactcaaaataacttctagcaactcgactatacaagctagataagtcaatatgtatattttctagagaagaccattgtctcttaactgcccttatttctccttgcccttacctacaccctagagcacctgtgagtcacaaagactcagccagaaaagtaacagtgaaagcacatataataatttaatatctagatcaggatcgtaatatcattgaactacaatattcaaatagttattgttaaccccaaaaattagcgttgctaactatcgagattagtcgactaataatcaaatgactaacaagagcacattcgacaagcttactcactcggagcgcatttctcaaagtcaccctcggctcaaagagccttctcaaccatatcagcacaggttgttgtatcatttgtagtaatcatcagatcatgcctaatcttggcattcaaactcgtgaagtatttttccttcttgttgaagtctgtaggcattataccgaaggcaacttggctagtcgatcaaacttgattgtatattccattactgacatattctcaccttgaaccgaatcggtgaactctcttcttttggcactacgaactacttcattatagtacgtggaattaaataaatcctaaaactcttcacaagtcattgtagtgtcgtcctgagtgaggaacaccatttcccaccgcacaagggcgtcctcttggaattgaaacatggtagtcattcccaataacacccataaagttcaaaactcttcgcagatccttccagttccaaaaagaactgcacaataaccttttccaccaatatttagtgaatctggacaaggtcaatgagaaacacatacatttcccattttcagtgacttgtgacacatgtaccaacctattgtatttggacaagtggccttggggtctatttttccttcgtacaactccatttgcggtattccaaatttttttggcagctatgccttaatgattctctttacacatggcttttaatcctcttcttctaagttgaatacggtgc

SEQ ID NO: 129303 - DNA, 1464 bp, Cannabis sativa
attaattttctaataaaaacttgtctggaatattctttagactattaaagattgactcggttgttttattttacttaggtaacactcttacagatctataaataattatcttttttggaggctaagatgctatttttgtttgacttaacttctaaaacgagaaaaatgtcagataactcacatagaaaaaagttcatacaagtaagaatttttttagtgaattgttaaattgcttctacactaacatatagattcaaaacctcgtctacttccagtttatatgtcgaaacattaattgataacacaacttatttgatataagatttttttccccttttttataatttttgaatcctcgttcttttatcagcttaccagatttattctcctatttttttttttctttgatgcaggcaatgcaggacaaggttttactccacatgttatcaacgtagctgctggcgaggtatgcttgcatccagccattatggattctataatgttcattttagatgtttgacagttacatgaaacaaaaaagatatacatcatgttttttttattgctgaacttttttaagcaaaatagtgaaacgtaacctttagtggcagtcttttagagttataaattcttaaattattatatcattaagaatatctatcacgtgttggggtctgaatgatccaatgataaaccaaatttcaagactctggaaaaggaaacagattagaacatgtagatgttcatggtttttacatctttatttttaacaccaggtttcaaactcgctgaaacctttcagataaatatgttatatgtatttgtcaccaggcatgcttttgttctttttcatgtaattgtgcaattaaaaccatttcatttagttcttattcatctacacttgtatgtacataactacagttgtatgtacataacttttctgtggattatctctgaaggtgaagctgatttcagttaacaacttttgcatgagttctttaattattgacatttgttttaatgttacaaatttcgacattttcatgtgaactttttgctccaggactgcctatttcttatctggtaacttgtagtagatttttggttagttgataatgaagactaactttgtagttttggttacttaactgcacttgtttttttaaccccaaaattggcttcggtgtaaatagcattgctgctagcatttctagtttaagaattcgacattgcggagaatatacagaatttattggtttgcctagtcattaaagacaagtacaataattattttatttcttctttcactaaatccccttagagagatgacagtattttttgtgaaaaacctaaatggcttgttcagatgttgtttctcttcgggctcgtttggtacgttgtattaggtcgtattgtcttgtgttgtattatatcgaactagattatatattatatttttatata

SEQ ID NO: 129304 - DNA, 1685 bp, Cannabis sativa
ttctcataaaccaagaattatgttatataggcacactttatataaaatagatatatatatactatatagatattttagtttttctttatataaaaatagagaaaatagtataagtatttgtgttccagtttatttaatgatatttatttatagatttattaatttatattagatataaaaatatttttaaacaaaatatagatttatacattgacgtacgtgtgattggatagatatttcgttttttaaaaaatttaaaataataaaaaaataaaataattaaaaaaaattaagaaagcattatagaattaaaaagataattatataaaaataataataaaaaaaagatataagtatttgtgcttggtgtactcaatgatatttatttatagatttattaatttacattaaatataaaaatattttaaaataaaatataaacacgtacattgatttacgtatatagtgtgactggattgatatttttttttttttttttttaaattaatataataaaaaaaagaaaagaaataataaaacaattaaaaaatgagaaaaaaagataaatatgtagattattttttttttttttaaaaaaagagagaattaaggagaaaacaaataaagctaattagagagattttagaacgttatgtcacgatcttatatttttgctttatatatatatatagattttttacaatttaatttttttttaatatttttatagttttcataaaaataacacataaacaataagaaaatcagataaaaataacaagaaaccaacataaaaataaataatgtataaataacaaaaatcaataataaaataacaagagtacacataaaaatacataaaaaaaaaaaatcatattttaaaaattgtaaaaatatttaaaattctgtatatccgtatttttataaatttcttttgttgtttttatatatatatatttttttaaaataattcaaaaaaatcgagacctctttttttttggcttaatgaaaaaaataaaataataatctagacctttttagtaaattaatattaataaaataaattaatagcatatgttcaagagagtcccgaactttggcaaaggtgaaactctttatatgtaaattaatattttttttataaaagaaaattaatattttactcaacgagatctctggattaactttttgtttctcatttcgacaattcgcactagtttatgttatatcaatatgatattttattgtgtgccacacaaaaaaatgatatatataaatatatatatatatatgtgtgaaaatggataaaaatatataaaaagtaaaaggaaaagaaaaggtatattcttttttatttttatattttgagggaaatattcttcctttttgtgataattaaatattatttacgcacgtggttccagaataaaataattaatttataagtaaatattacatgtggtcctatggacacgttgttaggtcaacttagcactttttttcattaatgtgaattcgttggtccacatggcaaatgtggacggctaattttcgagggggactcgttcaagataagaaaaggttttgtagagggaaatttcactatttgcccttaataatatacctcatatcaaaatatataccctaaactaatttgtacaaattaatgcctataattttaaaag

SEQ ID NO: 129305 - DNA, 3402 bp, Cannabis sativa
tttgagaagagaaataaagagagattttaattgttaattaggatattttatgactaattaataaaaaaatatttaaatgataattttatttgataagtatttataattattaaatagataaaattagcatttaaataattagaataaaaaaatggtatttttggaaaaagataagaaagtctcattaaattaggccatatggatttcgtccaagttatcgccttttagggttattgtcattttcttaaggccaattatattctaaatcaaaacctagagagactctataaaaggaacaaaaaggattttaattcactaacactttctttgtatgtcgaaacctagacagctgaatttgagaaaaggctttctcttcctttcatatttttgaatctctctctctctctctctctctctctcaatatgtttcgtttagtgattgacaattttccacacaattcaagacaatactcagatcagtatgaaagattgcgtagaaagatgtttttgctattaataaggagaatccaagttcagttcgtgttattactctgcaacagaaagtatgaagggtaagagtattgaatggaaggagtcatattatttctgctacaaccaatgtaagagttcttatacttttacatgtttatttatctttttaggattattcatatttaggatgttagattataaactataattaacatacatgtttagtaaatctagatcctgataaaataagtcccaacaagctattcttgcataagagaggtgtttgctaacccaagtatgcacatttaattggatcttgtgaataattcgaccatagtcgaaagctttctatttggttggccttaagttgttgatgagatatttgatgggaaaggacaattcttccatgtgaacaaggttctgaatagacatcttagagtcctttgagacacccccaaaatatatatgagatttaattctgttttcagaaagccctcttgcggcacagaaatcatcaaaaactagttggatcataatgacagaagaaatcatacccttctacagaatatgagtaaagtaaagatttataagcttcaaggacatgcacattggattaaataattaattatacattattgtgtgtatataaatatgtgtaatttgaaccagttaattaatgtatctatttaattataattgagctagaactctaataaatacttaccctaattaggattttttttcccacgaactttgacaagtaccaaattgtacttcgaaaattttcaggacgttaaaaattctacctaaactattgagatgttggattcaaggacttctgtcaaattttgtttaattttacttacgtggtgattgtccatgtaccagatcgtcccctgaactttgacttatatcaaatcgtgcccttgaactttcatccactttaagcattcattaataaaatttaatggaagtccttaaatctaacaatttcaatatttcggggaaaatttttaaagacctgaaaaatttggaaggcacgatttaatgcatgtcaaaatatgagagacaaaatttgtaattagttttttatttgtaagaaaaaaaaaaacagtttgaatgagtagcaaatatatatacatataaatatatatttgtttactttatatttatttcagtccttgatcgcattcaaccttccttatttttttttttttgagtaaatattattttggatcctatgttttgtaaaagttactgattggaccttctattttgttaaatgacaacaggaaccctgtattttctaaaatggtaaatataggactctgaggttaatttttgacaactttttttttttaatataagcaacttgaagacaattcctaacacgaataaatatagaaaatgtaaacagttttatcataacacctttagatcagattattattaaattttattttgacaaaaagttagttctgagtcctatttgtatcgttttgaaaaatacagtatctattttattatttaataaaatagagggttcaattgttaatttttacaaaatacaagtccaaaataatatttaccgtttgatatccgtatatattattattttttatttttgacgtgatatccgtatatattattaattgccttacatctttgactttttcggtctaaataagagaaaaagaaaaaaaatacttgagagcacttgtaatgttgattaagactcagaaaacattgtattgtgccctgaattattaatatatcggaagtttctcccacaaagattacaaattaaaatcatatttacaaatggtccaacatttttatcaccatcgatcgacattcgacgcgtaaaagtatatagccaagaatcaagaaggacagggccaaactgccattttcaaaataaaaatataaataaaattttaaaatcaatatttcggctcatatatattaatttctacgtgtgctatactagtaagccattaaaacaattacattaatcaattaagcaccttctaaaattcgtttttatatgttctttgctttttttttttttttcatatatgtacaattttagataagctaggtaattctcttttgtatttgttattgtagcttgtgattatctaagaatgataaattcatcttgaatgtgtaattaatgtttaatctagacgagcaaaactaaaaacttctgttgtttttcctttagctttcatttgagatctttcagccaatatgtgacagttccagtattagaatctttgacctgttacaaaatccacaactttcccgtgagcacctataaatttctcaatattttgtcttgtgggattctttcaaatgtcacgttcgctcctgtaatctcttaaagatcgttcgttatacccatacttctaggcctacacgtggggagagtgtattagagttattcccacattgttaatgtgtgaaaataaaataacatatataagatgaatggactactcctcctattgccaattaattttgagatggaacatcattcaccttaatcacaccttaatctcaaattctaagactagttactgctagctagttgttgggttttgtggcctaactaaaactctatttcaatgtaatcttgaatatttatttatcaataaagaaacaaatttatttcagtacttgtttaatgtattatttgcttcacatatttatttcatgattatttgtttgatttataaatttatctagatccttatcacattgatattcttaattactgtgttgtcaatacagttcttatgattaaggtttcattgatatgataatcaacaatgtagtttacttggtaaagtaagcttggattggatgtatggagtatatacatagaaagggaccgatattgaactt

SEQ ID NO: 129306 - DNA, 721 bp, Cannabis sativa
atatatgtatgtttatataggatctctttttatatatatattgtaaagttttaggatagtggtaggttgggttgagttgagtttggtagggttttgtatagtctcttattgactatatataataacttcttcatcaatacactataaatatatattttttatttttaatgaataactaattctaagtgcatgtgctctatcaaaatttaattaaaaacataatatttatttaaaatagaaaaatatatgtagatgtaaaatttttgtaaagtattaaaaaattaatagtaacagtaaacatgtacttaaaaaattgataaaaacttatagtttcaatacagaattttgtttatgaagttttttttaaaaaaaataaataaataaataaaataaaaactgaatttacaaagtagtgattaataattttctttcaataaaaagtcaaattttaaatttcagccaaggtccccaaacaaactgcttggacagaattacctgtatacatatatattgtgattaaatttgtgaataattatcctatcgtgcattataggtaatattgagtattagcatatagttaacgaataaaaaaaagaattttatttgtaccctatcaaatggtaaatatacattctattgttaaaaaaaagtaaataatttttaaaaattacttttaatatttttttaaaaaaaaaattctcacattattttgtgttattaa

SEQ ID NO: 129307 - DNA, 950 bp, Cannabis sativa
  modified_base (925)..(925): a, c, t, g, unknown or other
cctatgtccctatgtgaacgtctgaaagaatagggactttccagcttagtttggactgatggagccttaactgggcaaatcttgaaatatattcaaccttgaaatattttctcttgtttgtttggtcacattccttagctctaaactgataatatttctgcatgtttcatggtaaatgagagagggatccaccagaagtatataagcttagttggtgtaactcattctcattccacacttctcattctctctcttgaaaaaaggaaaccaaagaaagctcttcactttccattgtggctgacgcaccatagtccttcaacacccacgattcttgctttgttttgacgatccaagccttccaccatcttcctcaaagttttttcactagcgggtaagctttcaaatcctgttttctacttgtttacttggattttccattgttgtattcaagtttttccatgctttgaacattatttgattctcaaattagattgtattctttttggtattttgacccgcatgatagttttagaatgcataatgtgtgatttctagacaaaacagatttgatttttgtctttgtcatgattctttactcttttagtcacgaagaacacgttcgagttttgaaagacacattttgatccaaaactaacactggccggtcctaggggtcttatttgagacctggccgaccttagggttttttcatgggagttggctagttctagggtttcatcctagaaagttggctagtccatgcctgtgtttggggaccctggccggttcttggctgggtcatgggaacttggccgaccttctcaaagctttggaaccctgggcagcctaggccttggttctaagtgggttgccagttttctatcctcttttgaccttggcaaaaattttgttgggttttatgccntaaataaaactctgtttcaatgtaa

SEQ ID NO: 129308 - DNA, 803 bp, Cannabis sativa
gtccatggttctttgtacgaatcagatgcgtcctcagctgctggggtttcattctctaggttggtcggagggttggtcagcatcttccttcgctttttgggcttcacagaaactaagataagcttctttgttttcattgaggtaatcaaagttagcctctgggttagccctccaaacttcataaaagatgctcagagcagctgactttaaactttccaccgccttttgaagcacctcctgttcaacaccaaaagatgtctgctcaaagtcaaggtctcctacaaactctccttctcctcggccagatcattgaccttagtctctatactggaaagaagcgcatgaaggttttccctctcatatatcactaatctccatcttcaagtcttcaacgaacttgttagcagcaaggaattgcttattaacctcgtctagttgggtgatcttcagctcgacctcttttttagcctcctccatctcctttttcaagttgttggtggtggtcgtgactttcaagaccgtagacttggcacgagagtatgtgtatgccatctttagattgagttgcataatgagataaaattaaagcctggatagttaaaaaacatgtgaaggaaaaccaaaggaaaaatacttactcgggtggattcttttagcaagcgcccataagaagctctatagatatgtcctcccctctggccaactgaccatttacttcgggaagcacacaatcttggtagaatgaaagaatctccttccctttctttgtttttggattcagcatgggaggagtggctagaggt

SEQ ID NO: 129309 - DNA, 1134 bp, Cannabis sativa
gtttagttgaataaatcaaaaaatgaaaactagtaaaaaattatcaaaaacattatctatgtaatgccattagctaatgatgcacacaacaaccaatgcatttcttctagaaaaaaaaaagaaagattggaccatgttattaaatttcaagtgggttctggttatgactactactttttttttttgataattttatgactactacttcttagatcaaatggactgtttttaaattctctacgaaaaaatctttgaggttagtacccatctttaacggcaagttaaaaagtcaacacacacgtaacactaacacgaagggattcattttcattttctcctacacctttctgtgaaaagaaacaagatgatgtttgatttgttataatagaaatgtcatagaatagaaattataatggtaattaattataatgtttgtttattgtttagaatgagtattgtaattaaaattaggggaattactttatatattattttttttaaatttacggtttatgtttttaaagtggttgcagcgttagttacaataagggattctatacgattctttgttgcaatttagattgcagcgctagttgtaataggggtttttatgtagaattccataaaaatgcaaaaaaaaaaactgttttaaagtgtaaaaatgaaaaaagttccttaaaattattgtgtttagtttggtgtgagaatgtaatggaataaaatatatattaactaaaatattcttattacttttactattataattataaaatatttaaataaaaggtaaaatagacttttgaatttcttttattatatttttactataatattatattagtcttataatggattgtaattgtgatgacatttacaataattttttattgtaacgataattatcttatacaatgtaatagattacaaaatttaaaaaagaaaagcaaacaaagtaatgaatatgttgattaccattacaattccaattcttataaactaaacataccctaagaatgagacttcaaccaaaaaataactagagtaatttgcgtcataaatacttaagtttaactcttagttgtaaataaatacttaagtttaatttttagtggtaataatacctaagctttataa

SEQ ID NO: 129310 - DNA, 2188 bp, Cannabis sativa
ctcttatgttgtaaaataattgtaagcttttcttgagaattcttaagaaactcacttggcctagctccttgtgatcttattaattcttcaaagcaatacaacaaaaaggagaataggctattacaataatcatagggttaaacctctataaatctctatgttcttatttgcttaattattcattattataaattattatctattattctcaccactttaattgactcgacgtcgttagctaaaagtatggtgaacattatttatgataaatattagttgaataatttgatatatgcttgaatgttaaattattaatattttatattgaatcatttatatataaatatcagaaaattctttattcatatatgagattgtgactagtattgtacagagaattaagatcactggtcatgaataaaatattcatctacatattaaagttatagaatctttcaacggttgctagtacagttcaccgatacttattattcgatgcaagaaatctcgactcagattgttgatgtaagaagacatctaagggaatatgttgtgtatgataaagattatatattaaggactaatatataattaagctatctttatcaaacaagtcatttactataaatacctaattcatatcacaacgatgatcaattagtagatcgacttaaatcctgagtaatcatgaactcttgttcatgttattattttatttgattcactcgttaaaatttctcagaaaatatgatttttagaaattctgttttgtgaaactaataatgtggatggctgagaacatgatttacaatcatggaatcctaacttttctaacagatcgagtgttggttctatttaagcgttaattctaaagctaaatttttttgcataaatttagatttgatctaaattatactttcactagtgaattaataatactaaaggatgaagaaataataagaagagtaaaatggtaatttaactaaaattaattatgaaccgaaataaggaatgctaatcactggtattaattatatcaatagacactgcaattaaactcagtaaatataattctataattactaagattttatttcatatttatagtggagtaaccatagaattaataaataagactatttggttgatgaaattcaataaataatctaatttattggaacctggtattataagcccatggtctgcagatcaccactttgcaacactatcaagggtatggataacactaaataataatgttcaaaaaatctattttgaattagtaaaatagtatttatttattttgtaataaataatttatttttaatttattatttaaaaaaattgggagacaaagtattgtcaagacaaagatatcaccattgtctagttaagacaatggtggcgctactcactgtgcaataacatagtgataggcgccaatggataatgataggccccactgaatttatttttggattaattaattaatttgaaaaaataaatatttatttaattttaatttaaaaagtagttattcatatttaatatggttgatatatttcctcaaagtggttgggatattgtctccatgttgttaaaaatattttcaagtggttgagttattccagcaatcggttatcagatattcaatttaaactaaatatataaattcaaaataaatatttataacagaatgaattataggtatttatttaaatatttaaatattattatttaatatttaaataaataaatattttataattaaatttttgttattatttaattattattatataatcttaaattattataaacctaaaatggttgaaagccacaacatcatttcacatcaaaaagagtttttgctcatatgttgagataaaattaagaacttgattatttagtatatcctaatcaacctacattgatccttgtgtaaggtggaaaatctaaaagatcaaaatatgagttcaatactgttccttggatacaacttacaaaaagatggcaatggcacttgatagacttcaagaggtaaatattttttatttatctttttatttctgattttatgcatatacatataaaacacattaaatttatacaataacaaaataaatatatataataaataaaaagtaaataaataaataaatgtatttataccgagcttggagagaga

SEQ ID NO: 129311 - DNA, 1447 bp, Cannabis sativa
cgaggagtaacaaaagactcttaaaatcaaccttgaaaatgcccagaagaaaatccaagagctcgaggaagcaaacaaggctacccaggccaatgctggtagaaaacttgaagaagccaaggctgacgccaaaaatagggtcaacacaatcgctagacgatctatctactaagcctggtttgcttatcttgggatggatttaagttttctgggtgaaaagtctggggagatgctagcttattgcgagcaaactaaaaaggaggaattcggcactgcagaagatgaagttgatgatgaagaagaagaagatccaattaagtctccaacaatgtaaacgtagtcatttatctttacgttgtttttttcttttttttttattcagtaaaatgaccatcaggccgagacaatatttgccccttgtggcattttgtaaaaacctttgctatgttagatggccaacatagttaatttatatattttcttttgcctcgtatcttgctttttgagttaaccatgtttgtttattgcattttatttcacaatttaaacatttgtttctcgatttagcctaagatactttaagttggatgcatctccaatgttattttcattgagatatacaagtagttaataatctaccatgacttttgcgaacagtttttaatctaccatgtttatacacgagcagttctaatttgccttgttatacgcaaacagttctaatctaccttgttatacgggagcagttttaatctgccacacatatttttttagagcaaagttaaaatattttgaataattcaccttaggaattattttgaatatcttttgattgctcatatgaatagttaatcctctattcatatttttagcttaagtattatttttcaaggcacatttgtatttcgtttataatacatgtcatgataatgcgagccgttacatattcagctcgcacatagctttctattgttttatgagaaaatctcacttacaactgctattttaatttttccttttaaagaaaaggtttttcaatatcttgactttatattgtcaaaagacaattttaatcaactattctttcctttgtaattttttttttttaatttttatgtttgcaatactgtatatatttttaagtgaactctagttattatacacgtatatatgcctccaaataattttaaagggaataaactttgtaattacttgtacaaattttaattttattcacaacaatcactaatatttgctatgtggttggaaatctaattatgctatgctatgttatgcactagaccagacatttgctatgaagtaagaattatgagcatgtattagtcgaatccaggagaggaacattggactgcagttaagcatattttgaaatatttaaagagtacaagacattatgtgttagtctacaaggttggtgctttaaatc

SEQ ID NO: 129312 - DNA, 768 bp, Cannabis sativa
aaccaactcaattcaaccccaaattttccaatactttccagaacacctgcaagcactaaaatataccagttccaaacaacaaatctcaacaaattaatcaaattccaaaaacaccattagagttccaataaaagtttaaaagctccaacttgattcaattaacaaattgatcatccaattaagcttagaacaatctaaataaccactatacaacttcagaagatggcaccaaactaatcttaagcacacagcccctaaaacctagccaaatgaacatgaaacctaacttgagttaaggaaacatcaagaaaacaaagtgaggagtaatacctttgattcaagcttccaattcccctaaaactcactgaattgatttaagaaaatccaaacttcagctggtccccccttggtggttcgaaggaaagaaagagagaaagcttagaggagaagatgacttggttttctctaggttcttcacttctactacaaagtattattattatttttatacttctctcttttctttttttttttttaaaagtaaagataataataaatgaaaattagattttattaaatgaataacctcacaaaagacaaaagtcctaacttaaagaaattaccttttaaccccctagttagattaaaaaaaactaaaggaatgacaaggctagtttggtcttttccaaaacttaacaataaaatcccactattgacataccaaaatataccaacgagactctctaacggcccaacgtcactttccac

SEQ ID NO: 129313 - DNA, 593 bp, Cannabis sativa
gcttataaagatttgtcctcgttagaaattataagaagacttagaagagcagaaaaataaaaggaagtaatagtgagccggcctcggcccatgttacttcctccgtttagagaagtgaacttggcggccatagccatcgatttgaatatacgactgagatcggcagacatgccggctgtgatgcaagatcgtgcatttcggtgtaccagagcattgctcaactcaaatgtacataaatatatattataatttatattatatataatgcaattttttatttaaacttaaatgctttaatttagagtttagacttcagtataatatatatttatattatattttttttctgtgtgtagtttatttattttatttgaagtttaaactacttaaaaaaactataaattaattcaataaagcccaaaaaatgttaaaaatagaaaaaagatggtatttttaaaaatcaagtagttttatttgggcccaaaaatgaatcatttgacctaataaaactcgaacccgaccacattaaacccgccgaacccgacccgaaacccgccatacccgaccacccgaaactcgggttcggttacaaa

SEQ ID NO: 129314 - DNA, 808 bp, Cannabis sativa
gattaaaaaagtgttagcaaacgctaccttggaggttcatttaagtgagtttgatttttttctttcttttttttttggccaaaattataaaaaaaaagttaacagaataataaaaattctagcatgtatttgaatattttagatttatatttgtttgggtaaacttcatacaacacaaagtaagcttgagaatcacttgaaggttcattttggtgagtttgcaactaatttttttgtgtgtggggggatagctgtcaaattagttgctttgttttttaatgttataaaagtttatattttttttaaaatttgtaatggttatgtatataactttttttgaatgttctaagtatatattgtagttatgatagtgtaaatagtagatataagtgtatataattatatggagttgttttatatgatagatgattgatatctaaattatgaatatttggtttagtgaaaaattttgtgtatatgtagatgacatatatgtttgttggtattttattatagagtataggaatatatatttatgtatattcaaatgtgagactagtggaatggtcaagtaaaacaagtgtactgtattaattggtcttgtaattttttttttttcttaaaaaaaagttttgtaagaatttttaattaattattctattgtaatgtatattcatttttaagtgttgcaatatgtacatatatataaattagttaaaatttattgtgtataattgcgtaattgttattttagtgcaattgtaattttaaaaagagaaattttattttctatatttacatatactta

SEQ ID NO: 129315 - DNA, 1089 bp, Cannabis sativa
aaaaaaaaacacgattgtttttttattattatttctttcccatttttattttttaattttattcttacttaaatttttttctttttttttttttttttattttagatgagaatttttttaaaatattatattttttttattgagtacttaaattttctattttttagttaatttattattatttttaattgttttgttttgttattttactttttttttttataaaaagataatatttttgtaaaaaatttcttatgataataaaattataaatttttgtctaaaattcaatatttttataaaaatttcaaaaaaaattacataaactcaacccaaattgaataactcacgagaaaacatataatttgaataactcaacaaaaaattcaaattgcctaataaatataagaataattacataaaacatcaatttttataaattttttacatttttatgttttaggttattttttaaaaaaaattacgctattatatataaaaatacaacaaaacaaaaagatagtcacataaaaataacaacaaaacaacatcaaaataatattaaaaataatatacaaataacaaaaaaaaaatcaacaataaaatagtaaaagtatgatataaaatatataaaaagactatattttatataaataatatttaaaaactgtaaaaatgtcgaaaacaccgtacataccgtatttttgtaatttttgtaattttttttaaattatcccataaatatattgggtgggttgaatattactataacccacccaagtaacccgaataaatcagtttatgtatttaactaaaattgtttataatatattacataaattatgtttaatagtttaatttattttacaatttaaagtttatactttatagtgtttagttagaaatttgtactttttagttgataattttgattgtatataaatattgaagctaatatttagaatcaatttttttttaaagagaatattgtttaatactttaatgtttattcgatatactagaagaaaattacgtgcaaggcacgtatattgagttttatgttagttattataatataattaagaataa

SEQ ID NO: 129316 - DNA, 530 bp, Cannabis sativa
  modified_base (488)..(497): a, c, t, g, unknown or other
aaaggttacttcaaaagcaaattttgatgctccaaagaaaaagacgaatacttactgtggttcgttggaaatttggcttcaggaagtgttgtaggggcaaccacttctttatttctgtatcatttagattatgcccgaacaagactagggactgatgcaagggagcattctgttaatggtcagcatcagttcaaagggttaattgatgtttactgtaaaactttgtcaagtgacagaatagtaggtctatatcgagaatttagagcttcaataatggggaatttagaatatatgacatcaattctcatttctaaatgacgatcctctaaataaaagaaccttaacactgtttcaatacggaaccaaattccctgtcccaaattgccctcccattcccctgtcccttccatataaaacagcaattaatgattaaaccacgtttggaatttggatggtgtttggttaggaggaatgaaaatataggaatnnnnnnnnnnatgggaatgagaataggaatggaatggaataaa

SEQ ID NO: 129317 - DNA, 1918 bp, Cannabis sativa
  modified_base (27)..(41): a, c, t, g, unknown or other
aggatgttaatgaaacatacatggtannnnnnnnnnnnnnnggtaaaatatttccaacacatatatcaaataacttcttccacccttatcagatcaaaagactttatattaaacaaaatcttaataattgcttaagaaataacaattatttataaacattgaatttaaatccttagtgtttatgtggtgttatctctttccaaagattaatatatcatagattttgtatcaataataatatacaaaacacatgaaacgtgataaacatatagatataatatggtattgacatacaagttaaagaatataaagctcaatttcataatatcaattcataatgaaaacctcttaaagagaaaattttattaatactctcaacatatcataatgaattgtctgctataatatgaaatatgaaataaaatttccattctaataattgaaactaaattattcaatgactaaaataattaattcaaaaatttaaagaagataacaagcttcatcttcaacttagacaatctccaccctactatccaaacatctgtctcaacttgctaggataacaatccaagtttaagcagctggagctgaaataagaagaaaataaacatggttagtggatctaaaattaataacctaaagggataataattctcttaaatataagaatttataacaaagttagaaataccttatttctttgccaaaaacttaggacactggatttccagtggaacttttcgttgcaataaaagcactttcctttttcctttgcctgactgttgtgagcaagaggttggcctagtatttttgttcgaggatggatgttaggctgatcattccctcctaagtaacgggttgacaaaacttactcatctaccgcgtggcccacagtttgactctatggccttggattggacggtccgttaacttgggtttggtgagtgtgttcagctggacattcttctggctcgtgctttggcccaagaggaatgtaagcatctattattaattgctggctggagacttggtaggctctcctgattagtacggcggcctacctggatcgattgtcaatcacttcttgttgagctctcatgatttccatctctcaatctcaccattcttcaatttggcatctttgttctacaaaagcaaaatttatagttgatctactatcatgctgatcatgattaagagtgttattgtggccttgtatttgccctagtgcagattgaaatttctgtagctcagtgtcatcatcgattggcctttaaaaatttgtagcagatgagactccagtaccgggggtagtttgctcagtccgagtactaatggttccagtttcttgcacgcccggagtgaacccagccagtggggtagtcactccttgacctatagttggtgggcctattggtggttgaggattagtcagagcggtgtctatcttggttggatctcttgagtttgtaggcgtctggaagttcggatccgtaaccattggatcaattacttcagtatgatttttcttcatgtttatacaaccattttgagtactcactattctaggtgagtactcgtataactgctagtgagtgttcttgttttacttgaatactcacatttttttggtgttgtctaaattcttccgacaacagatttaatgtaaaatagagaaagtaaaattttagtcatgtattttaaaaaatagagttgagaagttgttgagaaaaattgtatattaattagaataattagtatttttgcctcctaaactttcgacactacctgatcttgtcccctaaaatatacaacttgtcaaaaattcccctataatataactaggtaacataaccgcgctttgcgcggtttgttgaaagaaaatataatttaatttatagattttaaatatttt

SEQ ID NO: 129318 - DNA, 546 bp, Cannabis sativa
  modified_base (493)..(506): a, c, t, g, unknown or other
ggcataaaacccaacaggaagatctaataaaaggggtcgcgattcttaaattgtttgaatttgaacgcgacagagagcgatgctcactgctctccaaacaaaacaaagctcttcccattccgctaaagttcaagaactcttcttggcatcaatataccaggaagaaagatccattatctcacatccactgctttgaagtgcaaaccgatctacaaggtgtgagagacgacatcaggtgcaaaatcttccctgccacattgataggcctggctcaacggtggtaccttaagatttcccgtggattaattaactcatggaaacatctagtggatgatttttgtaaccaattttctccttcccaacaacgcaaatcgaacacaatgatttggtggacgtcaagcaacaggaagacaagctcctcaaggacatctaatagttcttagaggcagtcggtaagggttgtgccctaaataaaaccaatttcaatataatnnnnnnnnnnnnnnaataaaagattagaaattgcttttatgttgcatggttcac

SEQ ID NO: 129319 - DNA, 1744 bp, Cannabis sativa
atttacgaagacctactttgaggcggcgtacctttatctcagtaaaaatttcaaagattttggctttgtatatttttaatggtggtttttcgaagaaagagaattagctttttttaatctttttggcctaaattgactaattgagtaaaaatgagatttttgttataaatagcacataaatattaccttataaaatactagagaactaagtggcgcttcgcgtagtgttacccaacttatgtaatttttttatatatatttttgtacttattccatgatataatctaaaatataacattttaatgtgtgattataaataaagtaatattattcaaattagaaacgtaatttgttatttttaaaatatatagaaatatggtgatattataacaaatataaaaaatggttgaattaatagagaaattgttatgtgatttcaaaataaaataaatgaaaaaaaaaataatagtttttagctttaagattgatgatacaaatattttttaaagactattttgactattatcttttattcattaaaaggaaatactttaattactctttataaaaatttttacattttgttttgtggttttgccttctccacaaaggttatataccatttaccaaaatgtatatactaacaataacaaaaaaagaaagaatattactaaaatatttatatatactatactaatcaaattatataccacagttaaaatatatactatgacaacaaaattatatactaccatagtgtataaaaaaatagaaactaattaaatattacataataatatattatataattaaaatatataaaaataataattaaatatatgtagcatatcaatatggcagagctgcttgccattcgtctaggcctgactcttgcacatcaatatagtttcagtatctctattattaatagtgattctacaatggcaattggtttgattaataagactcacataaattttagttttcagtctattttattagatatctattcgttattaattgtttttagtggtagttcttacagcgccatttctcgttcggggaatagtattgcccatacactagcaacctctgttactagtttaagagagtgtgtttgaacggatgtttgtccacagtttttgagttcttctgtaacatcagatttatcttaaggaattatgttctttaaaaaaaaattatatacctacattgaaatgtatatattatgctaataaattaatataccacaattgtacataccaaaataaaaaataaatatattctaagaataataatgtatcatacaacaaaaaacaaatataatgtacaacaaaatatatataccaacaactcataacaacccataaaatctaaaaaatcgatataactttaaaattgaaaatattttaataaaactaatatagatataccatgatacttaagtaatatgcttctaattctaaaaaaagttaagtttttatgtggcaaaaataatgtaaataataaataggattaaaagtcattttccataaattttaaaataaagatatttacctatataatgatatgatttagggtcctttgttacaaattctcgtgaaaaaaaccccatagaaaattgagtaagtaggctgagataaaaaatagaaggagtaaagaaaagaaaaagggaaattatagtaaattgtcccaaatcttaggactatgttagtaaatcttttcatttcaaaacttgtagcaa

SEQ ID NO: 129320 - DNA, 549 bp, Cannabis sativa
attaatgaatgcaggttgactccttaaatcttcataaacccgaataaaactctgtaagtgctaaactaattgagtaaatcttttcactaaacataccaggagagatggatagagattgaatagcataatgtgtacctcaaattagaaagaagcatatccaatagtaaaatcacctataatatgttaggaaataaatattaacgattaataatgtttttaaaatgtattatagtgaataataaaaataacatatatattggacataaatcttatattagtattctgatttcaatctaaaaactcacatttgttatatgtgcttattccaatcaagctatacaacacatttttcatctttaccgacacttaaaatagatccaacttgcttttggatcagcaaggttagatactaaggcacaacaatgagaataacttcaaagttctataatatgttcaaatatatcaaattacattaaaagaagagcgagagaccttgaggcattcaaggagattgttggttaaaatccacttataaccagtccctttaca

SEQ ID NO: 129321 - DNA, 1051 bp, Cannabis sativa
cagagatgcttccacattgaccttcatcagagggattcagaaccaaaacaatattgaaagaaaaaaaaaaaaaaagatgaacacaaagctataatgataaaaaaaaaatatatcaataatctatattctccgcagaaaaacacggatccatcaagatttctacttttcgggggtgccactgaaatcgatctaacagtatttaaattaccgcataagtgttatgattattattgagtagcaagccaagattgatattttcagtttttaaggagaattgctttaattaatagaagacaaaattgtcaaattacgatgtcaagaaagaaagaaaaagacctgaggaacctcaatgggctgattaagctctccgggtttgatatcttcaatcggaacttgatctttagtcagcttcacataacgcgaatgcccagtcccatcccccatctgatctcttcaaaattcctgaactttttttttaaagaagaagaaaaaaaaaacaacccaattacttccaaattattagtttcaatcctcacaaaattagctttcaaaacaaccaacaatacaattccacatataaattgaaaaatgtaataatgtttttttttcttcagttaatcaaactgtagaccagatacgagagagaacttactggtgaaggaaacgaaaatgagagaaggtaggtagctagatccggggtaaggaagtttcgaaaaaactggggattatagagtggcgtaatagtaaataatgggtgtgtttggttgaaataaacagtccaacacacgaaatgtatttggttgaagtctccaaactatgggacaatagacaattcaaccccttccttttatatatttgttaaaaaaaaaaaaaaatctaaaatatcattataataattttgggatataaataatttcatattttggagaattatatttttaaaaaattttaaattgaaaaatacttgatagaatgttgtcaaaaactaaagggaaatttgaatttccatgcttaaataacctaaaaatttgtctcctaaatgcaaagttat

SEQ ID NO: 129322 - DNA, 651 bp, Cannabis sativa
ataaaacccaacatggtcttcatcctctatcttaattccaatgttttctagatcaagaatgatcttgttgaaatcgtcgaggtgatcttcaacacttttccctgccaacatcttgaataagtacaatttttgcttcaagaacagtctatttgctaaacactttgtcatgtagagactttccaattttgaccatacaccagaagctgtcttctcctttgacacctcatgcagaaccttgtaccctaaactcaggattatcgcactgtgagctttgtcgagcatctccaccttctccttctctgtcaaactttctggtaagttctcttctcccagcaaggctgcctggatcctctgctgaactagcattgccctcatctttacccaccatagaccaaaatcgttctttccagtaaacttttcaagatcatacttcgcactgcccattttcttggatgttcaccagattcttgaactgagatcaagacgatcttcttcgaacttcctctccaaggctctaataccaattgttggatttgtaatcctaaaactatgatcaaactctatcttgttggcaatcgaaaacaactaatggcagcaatgccatacacacagatatatatgaaacatagcacttgctcttaaccaaggaaa

SEQ ID NO: 129323 - DNA, 1253 bp, Cannabis sativa
tctgaatttccacataatccatgtattttgccttcaattcgtggttcttggatggggatattgagttctcttgaattagctgttgttcctggctttccttgttgtctttggtctctgttcttggcagacttccactgctttccttttccaaaatgtgtagagaaggaaaaggtgaagcagtaggaattcttccagcacttattgttgattgttgcagagaatcatctgcaattttttgtttctccatgtcgtgttcctctccattagtccttcctcgggcctcattacccaccctgagccattttccataagcagccgtgccttccttaccatccacctgaatcatagttgggttttgatgacaatctttgtaacaatgcccaattttcccacacttgaagcacatgaacggtagttcttcatattggaagcttatccatttcttggtgcctttatacggcagggggaagcctgggcaaataggtttatttatggacatccatattctgaatttgaagaacccgtctgccaccattttggaaacatcagaattttacactgtgatcacctcccctgccttggccgccattcgaactgtgttattgatagtcagtagatcaatcggaacatcccatgctcggccccatattggaaagctggttaagtcatgtttccaagattcattggaattctccattttccccaagatgagcaccccattagataaataccatggcattttagataaaattctgctttgaattgactcagaggcaaatgtaaaggttaagaagagacatgtttcaaatttctctttaatcttgagattccattcgccgtctttcagtcgccatatccctcctaacactttcttgaggaatcctctgctgtgatcggaattggtacagagtcggcctctgaggtttgattttgcaattgtgatcgacaagcttttgtcctcctcccattcttcatcttcacccgtgacttgaagattatgggtcttctgtagaatttcatccatggtagaggcgatcacctcaatcccagaactgggaacccttcgaaggtgagggacgaagatacgggacgacctggtcaagccctagcagagcgggaaaaaaatcaacattatatttctattcagcccatataacaaacctattatttatttgatctaaattgctatggttaacttgttgacagatccaataatctcattttaatcatagtccaattgtcaatagatccta

SEQ ID NO: 129324 - DNA, 640 bp, Cannabis sativa
aggtattatttgctacagtttcctttatgttttgtcctttttattacaatatatttacatcaatctggaactcgtcaactaaaataaatcattcttgccaaaaaaaaaaaaaaaagaactaaaataaagcatgaaaaataaatttaagacaaattacagtattaccaagaaaaacagaaaagcaaaggcactattttttttatctgaaaaagaaaaaaaaacactattaattatgttcttttgttcaggctaactttgtagactttaaacatatatctatgaagtctcatcccactacaaatattttattcacatttataatacttaattttcatcaaaaatttgccctgatctaaaaatattaatcacaaatatcataatttattataattaaaatagattttattattatatataataggtaatgactaagattatagacaattttttaacaaaataatattttattgtactgattagcacaacctgaatgaattatgttaattatcaataaaatataactttttaatcatagtgtctgaataataatataattataaatttcatacttctaatgttgaaaactagtaaacatgtgacagttagtagtctcgtgatccgtaaggggaaacaccgggta

SEQ ID NO: 129325 - DNA, 1548 bp, Cannabis sativa
tctctctctctctctaaacggcgcagccattgtctccatcgcaatacaaattctgccacgaaacccatcgattaagcggcgcgtttttacttttataggcttattgttggtcactttgattaataattagtagtgtccataaattcaacattattattatcatcaattcagaaatgaaagcatcttactttagatatataattaatgggattcgtgtgactatgtcgtttcgttgggttgtgttgtgctgtgtggtctcaaaggagattacttacattggattatgcatgccatgccattgtcatatatgtatgtgtatctatagatcattcattatctatggtccctaattaataatgggccataatgtaataataggtggaatgttggagcattatttatagttcatttagttgagtgggtggatatatatgggttaaagttattcatcagtttaattgtttttttttttgggtattcaccattcatttatctgattaattaaagttcttattgatcatcatgatatcatttgatctatgtagggaggtgggtggtgtaatgatataaagtcatgtttagagagagctaacacgcgcagaggatcaacacgttacatgaccaagtttgaggttttctctggaatcctaaacaataatgcttctcttaatccaggtacgtaattcttaattacttttgattgagggtttaattaacatataataatatatgtattataacatttttataatgttttattccatattgaactaaacatttatgccactcatcaaacattttttgaagtagctagtccatttgtcacatgctagatgaaagatactattctttgagattttatcattaatttatgcaaacaaaagcatgtgattaaccatttttcttttaaatgaagtcattttgtgtagttcattcctagcgacactaataaaagtcaaggtatatagtaaataataaaaagaaatttattatctaggaatccagacaatggcatatggccacccaaataaggaaatttctttggtactttttaataagaaacatcatggcagatacagttgtatatatatactcttacatataaaaacctttataaaaaatatgaacaaatataaccgacacttgacatagtcattcctctttgttacatatacttattctatattttctaagatacagattacacatttagatctaatacttacggatccaatatttttatttttgaggacttatttattataaaaaaaaaaatatttataactacattataatcacttttattaaatttatttaattttgtggagatttttctactattttgttctataattattaaatttaaaaatttacatttaattatataaaagatagtatttttgttagggaggactataaccctgcatcaatgtttatgggtccgtctaggggtgttcatccgatccaatccgcatttttttggtcaaacaacatccaatccgcactaagtgcggatttcatattttggatccaatccgattcgcataa

SEQ ID NO: 129326 - DNA, 1154 bp, Cannabis sativa
tgtaaatattttacaaaaaaatggggccttatgtaattattcctaaaaaaaatagtatatggggtaatttccctcaataaaggggctttttacactttaataaagttaatcttatattagaatatacatatatatttttaattgggtaaattgcggcataaatacataatatttcagattttatacatttaaatacaatatttttatttttggagacaaaaatactcaatgttacaattctcttacatctgttactaatacttccgttaactcataaatatggacacgtagggggtccagatgaattacatttatttatttattttttattttaaaacttaatatttttaatgttagaaacttaatgctacttgttttaacaaaaaaaaaaaaaaaaacaattctcgtaacaattttcacatagtattggcacttccattcgataaccatgttccatatactgcactggttcactcagttatggtaatttagtattgcatctctctcatttttttaaacaagtaacatttagtttctgacattataatattaaattttaaaataaaataaataaatgtaatgcatttggaccctccacgtgtccatatttatgagttaatggcattagtagtaacatgtgtaattaagagaattgtaacattacgtatttttgcctctaaaaataaaaaataaaatatctaagtgtataaaatctgaaacattaagtatttatagcaccatttaccattttcaatatattgaaatagaatataaatgatatttgtttcgtataccctaaaatcactttttttttaaaaaaaaaaatgaaaaactttattcaacaaaagttaaaggaacatcgaaaattttaggtcatgcatctgtacatacacgaactcctaaaggacaagtaatgaactttgccaatgtataggctacacctttcccgtagtatatagaatgggataacaagtaccactaccaataacagctaataaaaaaattacttcatcaattaaatgtgtaaagacaatctattattccaattacaaacaatatttgagtattttgccttggaaatattgaaacctaaaccctaaaccataattatgaataattaagatttattatatataaatatggattaattaggg

SEQ ID NO: 129327 - DNA, 1061 bp, Cannabis sativa
tatatatatatatatgatattatcactttatttattcattttcaaatgagatattaaatttataatggtaatattaaaaatatttttttttctaattttttttcctgattttttttaaaaaaatcaattaaatgattttcgagagattttaaatttctaaatatctttttatgttttttttttttttgtttaaaaatatttgaaaaaaatcattaaataggtttggagagattttattaatatatgataaaataattagtaaaaaatttaaaaagtaactaacaaaatttaatattttattagcaattaaaaatatatttttttatttaagaaagagtaaaaatagagatgtcaaaaaaaaaagcagatctatagaaaattcagcatttaatttgtgacctaaaaaagaaagagaaagaatattgtcaaaaaatatagggtgattaaaagactaaaccaaaaccaatatagagataaaatcaaaatagagataaaaaagattagaaattgaaaaattctcttcaagaataaagacctcgaaaaaaaattgacaaatttgtgaaaaaaaaacacatcatataatttgtgttctaaaaaaaaagggaaataagagatattgtctaatgatctaaggtaatataagactaaaccaaaaccaaaatagagattaaaaaatattagaaattgaaaaaaattctcactacgaatagagatttggaaaaaaattgacaaatctataaaaatactcataatataatttgtgatctaaaacagaaagaaaaaaaaaagggttattgtcaaataatatagggtaatgaaagactaaattaaaatagagatttgaaaacataattgataaaattgaataaaagtcaccatataattataaactgaaagaactttaagaatatagtaccataactttgagaatagtacgtagcaaatttataaaagactatatatattgatattttcttaattgattttatgaaatattgggttatttatttttttttttaaaattcttgaattacacgattaataagtttttgatttgagat

SEQ ID NO: 129328 - DNA, 767 bp, Cannabis sativa
gagagagagagagagagggttgaggaaggtgaaaaggggtgaaggaacagtgacacagagatggggtggacgaacgctaatagttgatagagaaaaagggtggagaggagagagaaaaaatggggaagaaggtccctgatgtgttggttttatcgattaggttttctcaacgtcttttctagcaaaacattacaaaaaaatcctaaaaatcaaacactttatttcattaaacgctaatttttcagacgcatattaatacaccgacaacacttttcccaccaataaaatttacaactttttagttgggtggtaattatccaattaaaaattttaacatttttgttggtgttatattgtgctggcaaatgtgtctttccccaaaaaaaataatcaccttttggcggtgtcacagtaaatttttgtcgataaatttcaaaattacactggtgaaacatacttttgttgagagctccgacaaatatgaaaattcttaacaatacctttgccgacgcatttattgaaatttgtcctcaaagggtttttttttttagtagctctttttagtaccgcactttgttcttaagggacaatctcagtctcgtttccttagctacactgagtttgagtaggggtgttgtcaagacaaactcatgacaattatttcagttagttgttactaactgttttctgttacagtcagcttgattgtttctctttctttctgttgtaaccaattcttgttgtgatcatcttcagctactgtattg

SEQ ID NO: 129329 - DNA, 1730 bp, Cannabis sativa
gtatcccactttacaaattatgtctactattgtattaggtatccaattttattatttattaagtatacaatttcaaatttcccttacaattaaagaacacgaataatgagcataaaagtataggtcgaagatgcctacaaaaattttcgataagaaatgttacgcaaaatatctaaaattgtattatttttttcttttacaaatttattttatataaaaagtaattttgtaaatttataagctttttacttttattatgtttttaaaaaataatcgctcgtatttttataaatattttattatttttgagtatttatgaaaataaataatccacttcaactcgtaagaagacctcactttggtccctcaaacttgagaaatattcaaatcaaacaatttaaagacattaattgcagtaatttgttaagaaaaccctcttaaaaaaaggtaccctatgataattatttgaaaaaaaaaataagaagatacaaagaaaataagaaaagactaggatttcatttaactgcaagatcaaaaagtattgaaatacaattaataaaaataccttatgtatgttagttccctaaataattattttacactctccctcaaattcatgatgctgctgcaagcgtcgataatttgcttaaaagaaaacaaaaacaagaaatcctatgtgacttagtaaaaaagtcagcaagctgcaacaaggaaggaataaaaggcaaagtaatggtgtccacttttagatggtgatgagtacaatggcaatcaatctcaatatgcttggtgtgttcgtgaaaaactgaattgtgagcaatctgaatggtacgttggttgtcacaatacatatgagtaggataagagtgaatgacacccatatctacaagtaaccatctcaaccaaacagttagtagtagacgctatggcacgatactcagcttccgtagaagattgagaaacaatggaatatttattgctcttccaataaataagggaatctcccaagaagatacaaaaactagtgatagatggtaccccgaagataccgtagaatgcgaagaacagcaacccaaagaatagtagtaggagaagtaacaaactgactaacaatatgaacaacatatgcaatgtctggatgagtaatagtgagataaaccaaactgccaacgatggtgcaatacaaagtaggatcttcaaaaggagagccatcagaaggagaatactaaacattcaactcagagggagtgtcaacaactctagtatcagtaagatgagcacactcaataatgtcagtagtgtacttagactaagaaagaggataatcttttggagaaaaggcaacttcaatacccaaaaaatagcgcagagaacccaaatatttcatctcaaattgagaagctaattctaactttaacactccaattccttgtaaattatctcctgcaataatcatatcatcgacatataaagaaagcagaatacgacatgtagatgtgaattttacaaataaacttgaatcatgatcacttgagataaaactaagagataaaataacagtacataacttctgaaaccatgcccaatgggcctgtttaagatcatacaaggtcatttttagcttgcaaacctcttcttgcttatgagaaacaccaggaggagaaaccatgtagaccttctcatgtaagtcaccattcaaaaaggcattcttaacatccatttgagatata

SEQ ID NO: 129330 - DNA, 2137 bp, Cannabis sativa
attctgtgagtcatcttgtctaccagcaagctacactcttttgaagaaagtctcatggagctaatagggatacccaaataggtgaaaggaacttcacctctctgaaagcccgatgcgtctatgatacgttgtacctcagaataggcattccattgcagtagatagctgatttgcttgagttatgctgcaatcctgatgtttgtgagaataatttcagcccttgtaacaagtagtagatgctcttatagtctccattgcagaacaggagaacatcatcagcaaaaatgagatgattcagcttgagttctcggcatctatcgtgaaatatgaaatctgatttttgccccacctttttcattattctagtgaggtattccatgccaagcataaaaattaatggagacattggatcaccttgtctcaatcccctctttgcagcaaagtagccatgaagagaaccatttatcataagagagaatttaggcgaacgaatgcaaaccataaccaactgtatgaatgattcagggaagttcagtccatgtagaatctcttcaacaaaatctcactccaccgtatcataagctttctacaaatgcagcttgattatgcagctagcttttgacatcttccttccataatggtgcataagatcttgacaaatcattatattatgtgcaatgaatcgcccttgaacaaaacccccttggttttgggaaaccaagttaggaagtagaaaattgagccttgaggagattagtttagttgctactttgtataatacattgcagcaagctattggtttgtaatccttcaccgtgtttgggcacttcagcttcggcacaagagtaagaacagtgttgttaatttctttcaacaagcaaccagtcttgagaaaagaaattatggcttcagcaatatcttttccaataattccccaatttttttgaaaaaagtagctcccaaatccatctggaccaggggctttaactcctgggattgccacaatcacctttttgacatcttctctagtgtattcaaccattagaaattcagcttggctgtttgttatcacattcccctctcttattatcccctgttttacacttgttctgtttcgcatactggtacctagtaaacccaagtaatagttaataaaggcatctataacttctttgggttattctactctttccccatcagcattggtgattgaaagtacctggttatgacgccttctttcttgaatactggtatggaataaatcagaattctcatctccatcctttgcccaagtaagcttcgccttctgttgtaaaaaagctaggaaacttttatgttttgagacataattgtttctagctgcttgtctgaagtttgcaggtcaggatcgaaaggttgctggtgaagttttgtctgacaatcttcaagagcaatccttgcttgaacttcttgagcttggatatccgaaaagtgttgagtattcaaatccttaaaaaccatcttcatagccttcaattttgaaacaacacagtacatccgagtccctttgtaaactccctgccatgtttgtttaaccagttcagtataattaggatggttttcccacatcttgaaatattttaacggttttcgacctgtcaccaccttatgatgaagagttaacacagcaggtgaatggtcaaatattacctcattcatgaaaactgcctcagcagtaggaaaattgaccaaccactcttggttagcaagtacacggtcaattttggagaagattctatcatcaccaaattgcttattactccaggtgtagtaatttccactaaacttaacatcatccagccgaaaattagccacacaatcaataaattcagtggaagatacatacctaactcgcttcccaattctttcatcttttgccaagatgtcattaaagtcccccataacaatccaagcttctctcgcagccaaattttgaagttcattctatagtttcttccttccttcttcatcattaaaagcatagataaaagtaacataaaagaaatctttgttatccaccgttgaaacttcaaggtgaataagttggctagaacactttagaatgttgacattattgctggtttgaacccttcttcat

SEQ ID NO: 129331 - DNA, 716 bp, Cannabis sativa
cgggctctagagacttagagtgatcactattatcttcccaattgtcaaagctggaagttggagagctttcactgcacaaagacaagtttgcaccaagccgaagatgatttttgtaaagaagttgaagaagatcctggtaggtaagggttcatctacaaaagaaaggagacaaaaagtgagagttggatgaggaaaagaagagaaaacatatcgaatatgccgactaggtcaatttgaagaaaaaaaacagaacttcaccccaacaatgaaatccctaaacctaagggttttaaggaatattaatatttaaaaacttatgaatgtgtaattttagataatttctagtcaaaatagtgagaaattagaagcctaaagagtcaggacatatatcattcagaagttaaaagtcctaatgttttctagatctcaaatcagtcaagaacccaaaatatacagcaaaaatttgaaaagataatgcatgtattcaaaagaaatcacataagaaagaaaaaaagataacttactcactatatgtagtagggctgtacataaacttctgtaaactgcctaacctgaataatttgcccactgagataacccgataaaaaatataaacccaaaaatctgacgaaaatatatgtaaagaccgcttaactttaatttggaaattagcatataattagtgtaatgaccgctctagtaatgtggattagtaa

SEQ ID NO: 129332 - DNA, 718 bp, Cannabis sativa
taatgaatactattgatccagaggtacgatgtatgctttcgaattacgacaatgccaaactattatgggatgatttaacagaacggtttgcggttgtcaatggtgcaagaattcaacaatcaaaaaccgatattgctcgctgcgaacagtcccaatcgatgtcggttgcaatgtattacagtaagttgaagatcctttgggatgaactgagtaattatgagcctattttacgttgtcattgtggtcagtgcatatgtaatctcggcaaggctcacgagaaaaggcgagaggaagaacaacttcatcaattcttgatgggattgaactccgaatattacagccagattcggtcgactttgctttctcaagatcctttgcctagtcttaatcgtgcatgtcaacaagttgttcaagatgaaagggtgcgtggaatgactcgtatcaagaatgaaaaacaagatattgtggggttcgcagttcgtacaaatggtcggggacgtggtcgtggtaatgagaaggtagacaagtcaggcttggtttgttctcactgccaacgctccggacatgatgttgataattgttttttggttatcggttacccagattggtgggaggagcggtatggtccgccgccaaaattagaaactaagagcgcaattggaaagtttccagcttcccgttcttcactttctgctagtaggggtcgagggggggctcg

SEQ ID NO: 129333 - DNA, 567 bp, Cannabis sativa
attactaactcatgagagcagattggaaagacacttcacaatagctgattccagcaccaagatctcagcaaatcttgctgttggtcctaacagatcagcgaatgggacactaaatcgatacaatccatcaggcagaagctcaaactatccgtataataatcgtgtccctcccaaaaattttggccgaggtgcttcctcaacaccaagattaatctgtcaagtttgtcacaaacttggacacacggcagctgtgtgtcattacaggtttgacaaagggtttgttaccccaaaaattggtgattctcgtgccttcctgacagaaattgacgaatctgaagaacattaggcctatacatcctcaatgatacctgactatgctcttgaccaagaatggtatgctgatataggtgctacgaatcacattgctcttggcatggaaaattttgaacatgaacaatcttattttggccaagatgctctcactgttggcaatggtaagaaacttactatatctcatcttggtactcactcaattcctactgtttctcaacctctaaagcttaattc

SEQ ID NO: 129334 - DNA, 1048 bp, Cannabis sativa
  modified_base (284)..(285): a, c, t, g, unknown or other
  modified_base (705)..(716): a, c, t, g, unknown or other
ggctttttactattttattgtatagttatttaactaaatagaagatatttaatttttttttcacactaattttttttttactgggggctatagccctcacactcaaataactgtgtccgtccctgaactacacggtttcgaatcaaaccaatctatttttaaatgaattggtttgatttggtttaagcattttattgatctagttgaattttgaattttaaaaacctcaaaaaattttatttttagtcacaacaagtattgtgactaattacaaattatcattnntatgttgtgactaaaaagtcagtggctaaaggtattagccacaaaaattagaatttattgcgactaaatgtgtttttaatcacaatatttgttgtgactaaaactaagttagtaacaatttgtatttaaatgctttagtcacaagtaaccttttattgtgactacaagtcacattaattagtcacaaaaaatttatattgtgactaaaaaatttagcactgaaagtagttatttttgatagtagcgcattactaatttggttagaaaaaaataaaaattcagaccaaatgatcaattcatgaacaccccttataatttggctaattatgatttttgtcccctaaactttgacatgtaccaaatcatgtcctctgaactgttctggctattaaaaagtctcctgaactattgagattgttnnnnnnnnnnnnttttgtctaatttcattcaattatttatgtactaaaccatgctcttcagactttgatatataccaaatcatactcctcgaacattgacatgtactaaattatgtcttctgaacttccatccatgttagatttttttttattaaaattagacaaaagtccttaaatccagcaatctcaatagttcagggagcatttttaacgacattaaaagtttaagaagacatgatttgatacatgttaaagttccgaggactaaaacccgttataattataaacaaatgaagaaagagtaaatgctaggtaaagtaattaagaaagggaaatttgatttt

SEQ ID NO: 129335 - DNA, 573 bp, Cannabis sativa
  modified_base (92)..(92): a, c, t, g, unknown or other
aagtgacaggggcaaaattagtataatgtttaaaaaaagagataaaaatgatagactttaaaaaagaggataaaaataaaagaggacaatanaaaaaaggtatagagtgtaatttagtccactggaaataagttgcccaatttatatggttgggcctaatgttctcctacagactgcaaaagccaaacttaatattttttcttaagaaaactgatgaaagtgaatatcatgtatgttacataataataataataataataataataataatagtaaaagtggaataagataatcataataataatattttttttttaaaaggaaccttgttgaatttaactacgtatgaaaaagtaaatgtaacttaaaaaaactttaagtattgttattgagtactagtggtgtttagcatcttctaaacgtgacattttgtgattgactactaatactttctaaaaattattacattaaactatataaaattcgatacttagttaaataaagagcattgctataaggcaccagtggtgcttagcaccttctcgtcatgttgtgttgcgattggctagcgat

SEQ ID NO: 129336 - DNA, 817 bp, Cannabis sativa
ttttttttttttttttgtgatgaatcagaacttgtattggcacaaaaacaagtgtttacagtctaatagcacccattaagggcctaaataatcatctatactatacatgtattccacaaaaccacaattcattctatacaattacattattcacaaagtcaaaaatcattgtttatcctcctttgaaattttctttggccaaaacaaatgtattcgatgtgttacttcagcctttagttctttgatcaacaaaccagtttctggttttgctttctcccaataacacttatttctcaatctccatatattgtatgtcaagctggctgaagaggcagcaaatgtcattttcttaaacttactcaacttagctctcccaatccatttaatgagattggagagagaagtgtgagaagttttccaattcagccaagttgtcaattcccgcaagcacatgctggtttcagcacagcaaaaaaatagatgttcagcagtttcttaatgtgtacagcagagtaaacaaacttgatcttccacgattttcatcttgaagagtctatctctggttttcaatctctggtgcatagcaagccataacacaaagctatgtttgggtgagttcaacctgctccaaacttgcttaggccaatgcactttttcccctgctggtttgaacagattatatccctcagcaatcgtgtatttctggtgcaaaacaaccttgcccgaagcttctttcatctgatctttgagcttcaccaagctcttccaataccaactactttggcttggtaatttgtagtcccaccagtcctcatta

SEQ ID NO: 129337 - DNA, 744 bp, Cannabis sativa
ggtcatataagcattttattgtattaagagcactttattttttaaaatacattataaaaatctcaatttttttttttattttacctcaaatttttatattacactgtacacgaattttttaattttttctctacatcattaaattattatattttaaaatatatacttattcatgttaaatatataatattcatttatgcaaacataaaataataaaaattaataatgtataagaatgaacaatatatttagatgatattttgtactgtattaattattaatatcataagtattaatttaattgaatcctattgtttaatataggaaaatgatctgtattaattttttttttgatgaaatatcaaatgattcgtattaattagtattgtaatattttgaaatatctgaggtcggggtttggtggctgggtatggattcgaggtcagggttaacgtccgggtccgagtcaaggtttaggattcaaggacagctttgggtctaggatcgtgtcgcgtctgaggtcgcggcctagtctgggctcccgtgctaaggttcggggtcggggttgatgttgagtgtattgtaaaaaatagtataattttatacaacctaataatatgatgtaatgttaaacaaagtactgtattaaataatactatacaatgcaatacaatagaatacaatacaacctaacacaatactatacaatacaacacaacacaatataatatactaaggtgctat

SEQ ID NO: 129338 - DNA, 1089 bp, Cannabis sativa
tattttgataattataggtgttgtcccccattagagatgctaaaaaaatttggagaatgcttattgaggtgaataatttagttggcaaaatataaaggtactatactattggaaagaaataaatgtcattctaaaaatttagattgatgccaaatagtggcattgatacactattttttttttcatttaaataaaaaattatgaagttgatgtaatactacactaaaatagggatttagaatttagtaacatttataaatgttattattgcttaattttagtaacatttatggatttagtgacattttttaaaaatgtaagatataaccgtgtgagcaaagatacaaatgttattataatctctttggtgtcatttgaaaaaatgtcactaaaaataattaaaaaatattttaaaatatcattaaattatatattatttatttattaaattaaaaaattaattttaatataatttagaaaaatgtactagatgatattttagaaaatggaatttttaaaaatttataattgtcgacatattcataaaataaaatttataaatattttcattaatttaaacagattaacattacaataaaatgtcatatgtatacaaaacatccccaataaacacataaatttattatatttacaaaaaaaaaaaaaaaaactaaaaccaaatactaaatgtattatacaaattttatttcttctccaatttctttcatttcttcaaagaagtcttccaagctcttcattttgaattataatctgcatagctcaaaatatatttgggtatgctttctaatctagccatgtatatctgaagatgccatccttgcatcactataatgaaacaatgcttgcaagcctgcaaataataaatcaaaatgagatgcctacaaatccaatcaaaatgaggatgttacagtaaacattatattcattattcatacactgaaagaaaagaaagattataagtctatgcctgctcttttacactttcagctagctatatcaacccaacatgttctatatcaacctcactgtttcttgaacacaatgcaatttcaaaggactagtggagct

SEQ ID NO: 129339 - DNA, 802 bp, Cannabis sativa
agtgtatttcttttgaaatagggacgcttagttcttcaaagaactgagcaggtaccaagtttgccttggtttttaaggcacaacatcgtagtcgagcgagtgtgttggctgttctgtcatctttaggggcttcccttatagtacagactttgagctgactgaacagctcaggtaggccatcatcttcttttattgagctgtatattcacctaggacataacctatgactagttgggagtcatggtgaatgtctaggtggttagctcgtgctttgtgtgctagcctgaggccagcatttggagcttcagcctcgctattagaagctttgaaacttaccttgttaccttgtgcctcagttggccccaggtgccctgggtccatgcctgcattaggcagggggtcaatgcacctcttgggttcttgctctcgcttcttctctggctcctgcttttctcctgaacattgagacatttagggagatatgcctatatgattagccatgaaatttgtgagagcttgtcatttgtttgcttgattggtcggcctgatgcttcagttttctgtagaacccatcacaactattgatcggtgtatctagaagtatgccttcgcttttttgaatccaagagcaagttgtgggtcagcttctccatgagtgggtaccgacttttagcgtcgattagtgtcttgctgatgaagtatacaaggtgttgtacaccatcttcgtctcttgtgaggataacactcataacatgttctgtgactgctaggtgcacgtgtagctcttctttgtctagggatt

SEQ ID NO: 129340 - DNA, 823 bp, Cannabis sativa
gtaaaataaattccaacatttagatcctggtaaaatattcccaacaaaagcttactaagactatagctcgaagggatcggcccccaatagacttaaccttggacttgataagttctgcctgaaaggtaacattgaggtcctgaggagtctttgatttgcggggcttaggagacatgatttcaaactcaaggtcacctcgttcaaaagcaacagtgatggtgggtgtaaacattggtcttatgagtggaatagaagataaacttaagggttcgggccaggccgcgtctcgccaaaagcgacgcttgccctcagaaatctcttgcaagaattgcctataatgactggcagtctcttctttgtttgacttaatcaaatgatctctaatcctgacatcgtttatttccaatttagactgaggttctatatttctgggtttatatgggcaagctatatgtttgggacattccagtattgcagattctggagaataaatttctgaaccagattggaacatcgtttatcatattcctaaaaccaggggcttgaggaatatgataaacctgaactatgggtaaaccctataagtcacccaggagatacgaaccctaattgttaaaccaaatgaagtaacggaatgtaagataagccataactcaaataaaagcaaagggagaacgagatacttactatgtgaagtcgaaaagctggatgctggagacttctgcagatgaaaatgtgacgaccggcgggataagttttttgaacacctgttacgaaaattatgaacaatacgcaagtacacgtaatcaagtagtaaactcac

SEQ ID NO: 129341 - DNA, 1354 bp, Cannabis sativa
cataatagataaaatgtatgattatatgaaaatagattattatgcacatatattgtaataaaattatataatgtatacattagtgtaaattgccctatttttaaattattaataaataatatttctagagtttctctctgtgaggaaagaaatacgctaggctcagtcccttttttgaaagggtttagctttacttagtgcggctatatatgggaaggacgacgatgatatcgatgacaacatctcctccacggcaacaactacttgacagaaattgtcttctcgacgagggcttattctcgacgttggttggggaggctgctctgtattgtgagggcgagcggctagcaagcaccagttgttagagggtgcaatcggaggtgtgtttaggggaaaaatattggcacaaagtaaaagcccaataaaatagaataaaagcgttaataagtccaaacggaatgggtaccccaaaacctgagatccgagtacattaaaaaggcccaacactgcgcgacccaaacctagaggacagatacaaacaaaaagcacaaacgacaagggagagaaataaacgccaatggaaaccataaaaaaagagatggaaggttagaaccagagcttaccgatggaggaagggctaggcacgggacatattaaagatgagggagacccaaagggagtcctccgaccacagccggctgaagggtggggcagcaggggccactgccccaagcccctcagtccaataggccaatattttttttttattacaaagcccaaatgacaaacccattttgttagaaaattccaaccgtgcccacctatctacattaatgcacaacacacaaaaagcctattttagtgcacactaatgtctaattatatagtatatgaaaatatttataataattaaattgtgtatttgtttgataaaaccaattaattagttggctcctaataaaaaaaaaattaaattattggcatatgaaaagattcaactgttggtgcaccattaatctttttttttcagttatataaataagcctatatatatgttctcttttacaattttaaacacaatacactatttcttttataagttatactatattttttatattctaaaatcttcatttgttgttgaatttaatgtggtattgagtttgcatatacaagaaaaaaaattatcatagaggtacactttcattcaactcttcctttcactttattttttttatgtaataaattttaatagtgttcacatattacatatttgtatgtaattttatatatatgatatatctttcttaactttgaatttttttaataagttctttatctttcaaaaagagag

SEQ ID NO: 129342 - DNA, 858 bp, Cannabis sativa
tggtaaaatatttccaacacttgtgtgaccaatttgaagctcgggtagattccatttgcctcttggtacatcaacaaataaatatattcgtcaatgcatggctatcaaattaattaatataccatacatacatactattactgtatacatatatatgtacatcctagattgtctgtcacataaaacaacgccacatgcaaaggaatatgttgacacacaagggtaatttttactactactactattaaaaagcttttctaattcctatatatatgtcgaatagggtatctcggggtatggttaggtgaccaccccaaccctaatctaatcacaataataaaaaaaaaaagaagtttactcgggggtaaacaccccgacccctaaaaggggtgtctcaggggaaataccttgacccccaatggaggtatctcagggtacataccccgacccccaaaaggggtacaacccggggtgggagtctcggctattgaagccacgaggtatacacacccgaccccctaatggggtgtcttggggcatcaaggccaattggggattcaagctcggggtgatacccattcgcggggtgcacccccaaccctttatagggtgccacaggtagtggtcaacaggggggggggcgagctccataccctcctccaaacacaaagtgttttcatgccaatttttttttcaagtgtatcacattctacaaacacatttttaccaatttcataaaaatcaaaatctggaaaatagagggaaaataaaattttttatatgttcatagtattcttcaacattcaagaacaccaccaaccttaaagtttcaaatttccttattttttcatcaaattg

SEQ ID NO: 129343 - DNA, 537 bp, Cannabis sativa
aattgtgttcactgtttgggaactgtcaatatgatgttacaatataattctagtctatgaaataaatttaagactaggttgaggtgttttgttattttatttatttaattaatcagtattttatatacagttgaagtgtaaattaatacataaatatggataagaaattgtacgtaattctacatagatcaaatatgttttataatttgtataaataattaagaaatatgctagcttctgattttggtaaataattacataattgtatattttgttaataaatagtattttagtaaaatttcacgtaaaaagtatttatatgaatatatattttacgttaaaaatattcatatgagtacatgcaatgtgttggtgtgaattatagttataaatgattgtgttgggtgtgtcatgcaagtgaaactgatttatgtgttacatatctttacgtaagtttctgtatgagtataaagattcatacttgaatgtattttgagtgtattgttgtgttaatgaatgtttaggatcttgttctca

SEQ ID NO: 129344 - DNA, 511 bp, Cannabis sativa
ccatcaccacccgaactccttctctctcccatcaccactgcaaccattaaaccattacgagaagggcctcgcgagttggggagttcgacggaggcgatgctctggtgacgaggtttcacataggcggtgcgctggtgtgtgggttcttagccagaagccctttgagggggtttgaacgacagtgctttgagggggtttaaccgacggtggagcttcgagggggttttgttgtctctttgcttgggttttatctggtttagcaaatcgcagagaagacttccattaccaccatcagaagaagaagaaaaatggcagaagaagaatatttaactactgaatggactttgattaattcaatctttatcattacaaaatattaccattacaaaataaactgtatgtacatacctgatccaccttttgtgtttaggggaagattccatggaataaacaaattgatacggtttatctgataaagaagaatgacagaagaagaagaagggttaggggg

SEQ ID NO: 129345 - DNA, 874 bp, Cannabis sativa
acttggggcaatgaaggagtggattgaggagcggttttcgggtagggtagattcaagcgaaccggttatgacccaattgtgcatgtactcaatgaccccagatgaggattttgtgttggacttgttgggtggggagtttggaaaagatgtggtggtgggtggtgggttttccggtcacggattcaagatggcaccggcggtgggtaccttgttggccgatcttgcgttgaccggagaaaccaaaggacttgatctcgagtattttaggataggacggttttcggagaatcccaaaggtaaagtaaaacattactaggaggagttagtcaatcatcttcgatcacatctttgattcgaccattcttattatttttgtttttttacttatatttttaatatgtagtacgggtgatgtagattagtgtttactattcacgtcaaaagaaatattattattattatttagggatttttttatatacgtacaactaaaataattatattacaataaaatactctattcattacaattaatacattattaagtaagtcacaattataaatacatgtgcttctgaattttttcttttaaaaaagttactctgacatttttttttaactcaagatagtcaacatttaaaaacatcaattatatataacttaacaaatagataaaaaaaataaacaaaaacagaatattatttatatatattgaggattttctaaaaaattactaaaaaataaacctaacacatataataaagttatgtaaataatattatgttgtttattaaattatatgtttaataaatgaaaaacaaaataaacatatatatatatataaaatattttatgtttattataattgtaaaca

SEQ ID NO: 129346 - DNA, 889 bp, Cannabis sativa
atcatctctttcctctattttattatccttccaaggtcttaattttaaaaccttttcaataaaacacactgaaattggtctctctattgttttgaagtctctaatcaaagtaagtccctttgattggataataaaattttaaatatgttcacactaaaatcaagccacccacaaagggaactagaatgaaaagcaatagactattgtccgtgtttttacctggatgacgtgtggccttctcaagaaggcccacaagcaacgagcctattttcggcgtaaaaatatttgggtaaaaaaaatcagccacatcgacgtcgaacctagactccgtgtctagaaaggtcaaaacatcatcctcccaaatgatgacatcatcaaacctactccgttaaacaagatatcttctctttgggaatgttatgaggatccgaatggatctcatcttcctagactcatcataaataactaagaacccttccaagactcctttggggtgtcgtaatctgctaagatatgatcaaaagcagatgttcaggaaaagaatatgaaagatcatttgagattgcccaccaattcaaatgctatctacgtgtcacacccctgacacgatcccacaatatatagggatttgtctcttctaacaactcccagaaaggtgctcggaaaaagagctactatccaccttggaattgtaatggccactactgtgacacaatcttttcccatgcaacagacgatgactcacgtgtggcctgtcaacatcaatatatatagtactatgaatagtaattgacagatgcttttgggattgggctcctatgatcaggcccaattcacacaatattgctatttatctaaaggctaattagtaatttttcctcccgaactt

SEQ ID NO: 129347 - DNA, 1970 bp, Cannabis sativa
gtaatttgtatttttttttttttattatccatacaaagaaccctattcaattgctcaataaagaaaaacgtttaaaagtacttactagatacttaattcacaaagataactaattaagaaaaaaaaaaagatgaatttcgacataattttcttatgttttaatttttatacatttaatccttttattttatttttttgtgcaaaatctctttaagtttacttttctttacaaatttaaggtatgtcagttacatattaccgttaaatactaactggattactactatatcgacttcgaagttttactgttacatatacacaatacagtgatcattcaattaatatttgatgtcaatatttaactagcgtgtcaaatttgtaaagaaaaataaacttataagggagttttgccacacaaaaaataaaggggttaagtgtataaaaattaaaacataaagagatttcgccacaaatcgctcaaaaagattataggattattattttccttaaattcattttctatcgtaaaaattgtgttaattacaatctaatattataatatttttttttactatctacgttttacgatattaaacctgtaaatttataaaaattttgaaataatttatagtatcattaacatatattttttgatactctaatttgtatgcatgtaaaaatattttaaacttgtttttgatataataaatcatttaaatttttttaaaaaattaataaaaataatttgtatgcacaaaaaaatatttaacacatatttttatgataaataattgtaactatagcattcctctcgtacacatgaaaacgtctatctttatcaattctttaattaataaacattattacacctgatgtggcctgttattacacctgtaaactaaaaccttttgtaatataattgtgaagcactatgaagcaagggatggaaatttgactcgggatgaccggatactcataggtagccactccgaatgggcgggaatacccgtttattggattatggagcagggtacggacaattttatttacccaaagtaagtttaaggcaaaaacacaagtgatactaccaattctatattcaatatcaaaataaaaatatctatattctaaatatttattcctattatgtattaaagttattgactacaaaattattgatttattttttattactattataatagataccttttaataatatagtgttctacctatcaattttaatttctaatatcttctttaacttattattatttacaaacttagcatcaatatatatggtatatgtatcaatatatatggtatggtatatatatcaatatatatggtatagtagtcatatatatgcatagcttagccttccacatttctcctcacaaaaagataacaaattaaatagtgtatgttattttaaattcaaaaactctttttatttacattttgaattacataatgttattttattatttttttagtttttatgagtattcaatgaatctttatatccaatggggattcctttaacctaaatttgttgggaattaagcgaggcggggatagggcatagaatttttcactctatgacattttttatatctttttttttttatattgttttgtcgtaaaattaaaaaaaattaattatattttttatttaattattttaattatttattagttattagagttgtaaaatttttaaatttttaacgttattaaattatatgaagtagcttgatttatgatttactgctcgcatcaattgtatttgacaagataaattttctaatttttctatttatcaatatggtttattaatttgtagtgaaatattttgtaaaatttttataacatttttattagggaaatttgaaattccatgctttaaataccctataatttttcccctaaatgtataatcattaaaattggtcatatatgaccacttt

SEQ ID NO: 129348 - DNA, 572 bp, Cannabis sativa
taaagcagttgagctaaactagtgggtataacataaacaattatttatattaattataggaatactttgattcacaaatctaaaagataaggactacgactactccatccataatagtataatgcttgtattaaattggtgcacaaaatgtgggtatttttaacacttaatattctcaaatagtatacttataataatgtaaactatgattataattaattagtacatgaaaatagtgtccattattgtcgccgatgaaaatgcgaaacattcttcctaatactcagtttttatttatttaaatttctttaattttatcttaatagacaaaagttaaaagtacccctctccctcgcaatcttcgccgaataaaaatcacaagtgacaaggcttaccacccatgttccactttattacaatcccttttcccattttttaccattattattataaaaattaggatttttataatttttaattttgagtttggaagatataatttagtaaatattaaagtttggggatataatttaattgtaaaataataaaattaaataaaattagacaaaatt

SEQ ID NO: 129349 - DNA, 579 bp, Cannabis sativa
  modified_base (419)..(453): a, c, t, g, unknown or other
  modified_base (502)..(525): a, c, t, g, unknown or other
tctctctctctctctcttgtgatcgagatcctctgattataagtggttgcctaaacaagattcacaagcaatgctaataaagctacccctatacctagccataagctaggaatggcacgactccactggttatgtatatgcctccctagcaatgggtggtctcgccgcttataggaaatgatatgatataaaagggaggttagggttacacccgagcattgtatgagtcaagtttagagccacattttaacattttttagattttggtgtaacccgaacctactcgaaacaactttaaaaatatattttttaaaatataatttccactttaagaaaaatcttcaaattcaaataatcgaaccctaaactcttgttatctcttaaaattcacacagacaaactctctctctctctctctnnnnnnnnnnnnnnnnnnnnnnnnnnnnnnnnnnntctctcttttcttcttaaaatttctaaccttagtgatagagtaagtgcnnnnnnnnnnnnnnnnnnnnnnnnatcatagattggaagactgtaaaggatcacacaaggacattcgggctcagatct

SEQ ID NO: 129350 - DNA, 705 bp, Cannabis sativa
  modified_base (112)..(122): a, c, t, g, unknown or other
  modified_base (678)..(679): a, c, t, g, unknown or other
gagacattatattccactgcaacaactgtaaggtttctaatactttatatatgtttatttgatatcgttttagaagttcatatttaagatgttaataacatacttgttagtnnnnnnnnnnnttggtaaaataattccaacatagacttggagagttcggcctcaagatggcttgggccattattttgtagttgcggagggacatggttataaaatgtatttagaatattgttgtaaacttttaagacgggatcccaatatttatgtacatttatttatttataaaagtttagcctcaagacgatttgggccattattttgtagttgcgtgcacattaattaggaaattactatagtgtgcctccgcaagtagggcattaaaattttgatatcagagctgcgaggttgtttacagaatactgtgaagatatgtacagtcattgttagagacaagctcaactcgcagttcattgagcttttacttattcattggttagaaaaacatgataggaagcatgttagtaacatgtcgattgattactgtgtttcctaaaatattatttatgcagtaaatttgagtgtacgtgatcgctatctaacctacctggcttatgggttcgcaggctaactccaacaatatggacgcccaacgaaacacatgttgggttttatgccctnnataaaactctttacaatctgattagt

SEQ ID NO: 129351 - DNA, 2057 bp, Cannabis sativa
caacccccaataccttcctttcttggttgacaacaacatcaacattcattttaagtccagatatgctcggaggggaccaaggtacatcagatatttgtcgctgaaagtgtactggtgcagagtcattgctggtgtggacattgcagttaatatactgctgctggtttttagttttagcccgatagtattgctccagatgtgcactagcaaaagatgcaatgacttgactaggctttgactaacctccttgaatgaccttatttctatcatgccatatagcccacatggtgcaaacaattaattcaaagtcttgcttggaatgtagagatgataaatggatcaaataatcaccattgtacatgagtgtgtgtgatcaatggtgaactttgtttctctccaaaccttccttgctttggtacaattaaacaaggcatgaccaatcgattcccatgcattattacacaaagagcaagttacaaaatcaattactttccttcgcaccagaccagtagctacaggaagagcattttgcatcactctccatgcaaaaattttaaccttaaatggtagatttaagctccaaaaagttttccaccaagtgctgcgagagtttgatccatttgtttcttgattttctgccaaattctcagcaaggtggaaacccgaattcactgtgtagcagcctgttgtagtatggtgccaaatcaaacgatcattggaaggaaagaagctaagaggaatggtaacaattctgtccacatcaatggattggaaatattgattaagtagagggatgttccattctctttggtcggttatgaagttggaaacagtcaaagaatcagccccattgaatctaactggtttgaaatcagtatatcccggaatccatttgtcaaagccagccaaaacattgaaaccattaccaatcttataacgcagtccttcaacaagcaattcccttccccaatgtattccttgccaagtgagtgaaggtgagtgaccaagccgagcttccaagaaattgttatttgaaaagtatctatgtttgagcaatcgacttagtaaggaattaggcatctcaaagattctccaagcttgcttagctaggagtgccttgttaaaatgtacaaaggagagaaaacccattccaccttcaaatttcgatttgcataacaatttccaacttcgccaatgaatttttgaaccatccttagttgaaccccaccaaaaattagccatcatggattctaattggctacaaaaagtagaaggcagacgaaaataactcatggcatatgtagggattgattgaaccactgctttcaatagaacatctttccctccaactgagaagagcttgtcattccaagcatgtagttttttccatattcgttcttttacatcactgaacatttcttttttatcacgctctgaaaaagcgggaagaccaagataacattcatgacattcactaattggcattcctagagtgtggtggaaaaaatccttagcagcttgtgtagtgttaggcgagaaagacattactgacttcgttgtattcatcaattggcctgaagcgttgtggtagatgtccaaaacccttttaattgccacggctgtactgttagtagcttcacaaaaaaggagactatcatctgcaaagagaaggtaagaaactgatggagcatgacgtgttaagcgtaagcctttaaggttctgggccgattcttcatgctgtaatagtcttgataatccttcagagtagattaaaaataagtatggtgacaaagggtcaccttgccgaaggcctcttgtaggtttgacatatccaacctcttcaccatttagcatgaaggagaagcttgtggaacttaggcaactcatgatcattgcaatccatctatcatggaaccccatcttatgcatgacttctaggatgtaaaaccatttcactctgtcaaaagctttactcatatccaattttagtgctgagtagcttttatttccccttgttttatgtttcaagtggcgaaccaattcaaaggccacaagaa

SEQ ID NO: 129352 - DNA, 1234 bp, Cannabis sativa
tttttacccctagatttgtagcttacttcttagtggagtaaggataaataagtcattcatccttcatctttagtgggattttaattattcttaggcttaattaattagtaaatagctgaataaaataaagtgttactctttagtttacatttagtcatttgaaaaatcaaaaatagaaatcctatctttttcctctctctctcttgttcggccaacttctagagccaatgggggattagatcttcttagcaaattcaaggagtttggctagaaaattcataggatttggaagatcgaagctcaaggtaagcttcctctccttcatctctttgaatttctgaattaggttgttgtatgctttgaagatgcttagaattattttctagtgttatatttgagttagttaagttgatttaagttggttttagctgttgtggttgagaaaaactaatgtttgagtttttaaactcaaacttaggtctttaataatagatctagattcatgggtttataattgtttttattgcttgacttatgtttgtggtgacttaattaggtattttggaaagtttggttcaatttggggtaaaattgaatttatggtgaagtttttaggatttattgcagtgaactggttaaccgatttcggcattcttatagagcaagttaaaagtttccccaagcaaaaccctaggaattggttttccattttaggaatccaggttactggttctagtagttttggaatcctagtttttcacgttttaacgatatttagggtattttccacgctatattcatcgataggaaaacttctagttttaattttaagtccctgaaaagtgatttagtgtatcacttatcagttttacaaatattgtgaattaggggtctgtaaatcatcgagcagcagtttctactcagattgaccggcacacctgaattcaaaatcaaggtaagattagtataataatatgcatatatgattacatgtttagcgtgcatgtttataaatgtatgttagataacatatcagtaatggcagtattagtgtacatagagttgcactgaataccgacggatatatgtttggcaaagtactgattgacgctatggtacgactagagtatcgagtatatgctggtattatggccaattatattgtcatatgaacgttctagactcaatacgcgtgggacgcaagataggaattatgattgagtgtatgggcgcc

SEQ ID NO: 129353 - DNA, 610 bp, Cannabis sativa
aatatggatttaaaacgatgaatttgtttattgtgttgatttagatgtgttcatgttagtttatgtgttatttgatgattgaatgtgttttacgattatctttttgaaaatattttatttggattccttgtgaaaaattaagaaattttggatttttcgaaactcgattccgataaatattgagagttatgattttttgaagtttcaggatttaatggtgtcgagaggggtgttcaccgcaccaggtactcggacaagacaccttgtccacgcgcgaagctcggacaaaatcgtgtctgaagctcgctgatggcacacgttcagacattaacacacgcgcgtccatcctgcacgtgaccgagttttctcggtcagggggtatgcaaaccccatcatttccccacctttgcgcacgaccacaggttgtttgcagcctccttgggcagcccgtgttttttgccccaaaaatcgatttttaggtacttttttcacccaattttgatttttttctcttcaaaatcataaaataaaataaaatatatttttttaatatatttaaacttaaatatcaattttaaattaatagtatttaatttttaatagattatta

SEQ ID NO: 129354 - DNA, 509 bp, Cannabis sativa
acaaggctttattagcttggaggaggcctatcagcaggtgttcgaggtcctttcggcactagcccctgtaacctccattctcaaattttcctcgttcgcttctattcctaaaacatattgtatactcgcacgatttacgggccctcctcatcggtgctcacacctactcaaaaccatttctctaggtacggagcaacacaaactagatgaagtgtggctctcagacaatcgaaaatgaaagctcccaagcagtacatgagtcaatcccgaagcaagagagtgggaaagggtccgggatgaggtgagaattccaagaagtctatgaaagaatatgagccgagatacactgagtactccagcttggtggatactcgtgaaaatgtttataagcgacctgccatatggtccattattaggaaactcccacgaacacctcaggggggccattgttgggttttgtgccctaaataagatccatttcaatataattagatttactaataaataaa

SEQ ID NO: 129355 - DNA, 1879 bp, Cannabis sativa
  modified_base (1220)..(1238): a, c, t, g, unknown or other
tgatcaactcttttaagcaataatgcaattgtgttaagaacgaatcttcttcactattatccaagttgcaaatgtgatccaaaatacttgtggcagaaaattcaaaaaatgagtctttgttattagaaacaacatcgtttaatttaaatttttgactttcgaataccttcgacagggctagctctaaattaatttggaccttaaaaaaataattttttaaacccttttataaaaataaatagtatttttaaaaaattattaaaaaaatatgtatatttatatataaaaaaaaatcattcaggctcctaataggagtgaaccctaagcgtggacctagcctgccttaatttaaggccggccttggccattggtcttgtccttggccttgcgtgtcgggttcaacctgcaagtggcacccgttccaccgaggctgcctgcacttgccgatgaatttgaagtggttggtgggcttggatgacacctgggtaaacaactcggttgtggtgggtgtatcaaaccgattcacaaatttggttttgagtctcgaatttaaaggagaagacaaaatttggtaggtcgggaccattccatgttagtgaccatctctcttcatatttggccaaattgtgttgtgagcttaagagaatgtatgattttgatgatgttattacgacaccatcagccaaacaaaaaaaactagaaaatagaaaaacacagaaaatttagccaacaaccatttctacacaaaaaatagcataaaacaacaacaactaacaaatcgaccatcaaaataacactataaactaaatataacaaccaacaacaaaattaaacaaagaaaaatcattacccattgaattcatatataatattccattttaaagaaaaaaacaaccaccaccaaagcaccgagcttataatatagtctgtataaaaatttgtgttatttgataataaaatgagtgaaaagaatgaattttgtgagtgaataaaattgagagatgagagaagagagaagggggaaatgctacgtgaagagaagggaaggaagagaaagaaatgttgttattttggctgtaggggtactatggggattagaattaaattttgtttagtctcttaatatttcacaatataagtttaggagaataattttcccaagttaaattttgtgtcttggaacacaacaagaagaaagaaactaaggaggcgtttggttnnnnnnnnnnnnnnnnnnngaataggaatgggaatgagaataggaatatgaatgaaatggaataaaatttaaaatgtataaaaaaaaattgataaaaaaataattattatttttttcttgttacattggaatggtcattccttcctttttaaaatagaatagccattccaccaaaatggtaaaaagaacattccattggaatgtcattccaatactttaaaatacaaccaaacaaaggaatagaatgaaaattgtttcatttccattccattcaatttcattacctccaactaaacgccacctaacagaaaaggccattggtatggccaaaaagcatccgtaaaatatcatcaataactaataacaaaattctatagtattttataaatcacaacaaaattatagaaaaaacgataatcagatatcaaagttaccaaacatcaaaaatagcagtttggtgcataaatataaagaaattgttttagttatatataatatgcctacgtaagctgtgaactgttaagtgttgagcgttacaacaacaatctttagcaaaatttcataaaacttcattaggcaacaaaatttcccactcttcatggcataagcccacaccaaagaggtataaacgggttattacttctcttcttctcatgtatt

SEQ ID NO: 129356 - DNA, 1199 bp, Cannabis sativa
  modified_base (650)..(662): a, c, t, g, unknown or other
  modified_base (792)..(798): a, c, t, g, unknown or other
cagtatttcacagaaaaacataccaaaacaatttatgccattaaagacctaaacttgagtttcaaagctcaagcttgatcaataccctcaccatagtttaaaactaatatccagagcttaaaatcaattcaaaatcaacctagaaatcagattacacaaactttaaaccttaacagcccctatcttcaaaattacataaccaaaccaattttaaaacgtaaaaacaccaagttagaaagtcaagaacttacctactccaattactcttgattcaaaggttaaaaccctagaaaataagatgaagaagctgctgattctcccctggtttgaggtgcacgaacaagaagagagagagaaaagggttctcttgatttctcttaatttctttaattttcctctttctttctacatgaataatgggttaattcgcttaaccttggctgagaaaatagttgcaaggtgtcacaaggttgggcagccacctaactcaccacttaaccaaatgaccaaaatgccctttaacccaaaactaaggtttttcaaaagctaggggtaaaatggtcaaactccataaccccgcttaatcccaatattttattttctctaaaatattttccactaagaaataaggttctaaacttacccatttnnnnnnnnnnnnnatccatcgcattttccgttgtcacagagcaaaaattacaaaaattgcatatttcacatattaatcaaataatacccctagagtttaatgaaatttccggaattgaaaaattataactctaatatttattnnnnnnnattggggtccacaaataattaattcacaaatacttataaaataatagaaattagtgctaattgccttttctaatccaaatcactaaagcagtcattacactaaatctccagctcttctgatatgttgtttgaggacgttatagctttattaatgtctaaattatggggacagttttgccccatatttttgttcgcttacttaagcagttcatggtttggcaaagcatgcccttcattaacacaatgagatatcttggttcgaggagattcccgcacgcgattggcgaatattaacatcgtaaattcgcgatttgagttgatccgatagtttctatgtgggttgctatgttgattttggttgcgatttaggttgctccgttagttgttatgtgggttgctat

SEQ ID NO: 129357 - DNA, 3178 bp, Cannabis sativa
aaaatattaatacataaattagccatatttataggataaaatattgacttattaaatttccctacatttgactcttgcttgtcctcaagtaagttaatgataaaatgaatggtgcttaaacaaattgatctttatgaaaaataattttagtttcacaaattgtacaaccacttataattccaagaaaaattcaaactcttcaattattagaattttaactcaagataattacttttcaaactcaattcatgtgtgtacgtgtgctcaattaactcatcataatactaacattcaaatcaattcatgcatgacagtagtcaatgctcatctcaaaataaatgtgtatttgaatgaaaatctactccataagcttaattatcaaaccattctccactaatataattatacataatctaaaaatcaataagactttataggcttataatgtaaggttagggtgaaaggtagataacaaggttcatttatgctcaaatcacaccatagcatacatatacaacgttatctcaaataattcacatttgtttctcgagcgttcattgccctctcgtgttggtcgcggggttgccactccctgtgttgggctatccttccaccgtttccaccatgatcaccattgttgtttctcgagtttcctccactgcttcacctaagacaaacattatggagtcatcacgtcccatatagtgatcgggtaggacttgttcatccgtagggagcggtcgattgttgttgtggggaaccctgttggaagggtgactcatagccctctcttggttccctgagcatttttcaggtccatagaacaccctttcccgttggtttctcggggtagggacttcctgtggataggttcggtggtcttgacgtatttgttggttgtgggtgtcagtacacaacccttgagtgttttggttgaagaagcttcgaattaagtcggcagcttcttgagtgtgacgatcttggtcatcttggtgcctcctcatttctcgagcatgatcttccaaccaagattggaactctctcctttggttagcgagagagacttttagttaaagtcgctcgctcgagtttgagtttactcctggtgtacagtttgaaattggccttgcattcagcctattgcgtctcgcagctgatccatctctgggtcaattcgttcgatatccacatgggattcatttcgtggcctaaagacgccagggcctcgaccagtttgagtttggcctgtgccatcattaggtgggataaagtttttagtattaccccttccgatggcgccatcagtagcactgcctccaacagtggtggcgttggtggtacgcccagcagttatctgcccgacgatagtaatttggccagttgtcccttgaccagcagtagtttaggcagtggtgatggtggtggttgcaccaccattaccaagacgcgggggtcactctccattgtttccagggagattgcttgctgatggaacttgttgggcattatccatctcctcatcaaatcgttcttgagatcttcgggttaacacaatttttttcgataaagattttggtcaaaactctcaatgaaagcaccaaaatattgattaaatttttagccagccaatgcgaagttgtaataaatgatatgtaaacaaaaaaagtaacagtgaatgtaattaatgacactaaaatttacaataaatgtaaagaaagacaccaaaatctaaagaggtttgaccccagatgtcggtaatagcctactccccttgtattttattaatcagaattacaaaagtcaaaaacaggctcttgaatgcaaataataaaagagtgttttttctctaagtgctcaaaattgcagatccttttcccagccaatgggtgaccccttatataggagaaaaggtcggtgcttctcgctttaggagatacaaccaacacagaactatctcaaccgtcttcttgattttcggaggtaattaaagtcagatttttatgataatatctcactattttcgtgggcttataactatctttgagcttcttgtgggatttgaacatttgaactagtccttgacgatgagggtctcctaagggtgtgacacagtcgttgaccacattcggagatagaagctaacacttgggggggacatccccgagacctaacctaagggggcgttaattgtcatctcgaggtgaccccccgagaccccttgtatgttatgggtattcatagtgttgtgtggatgtcttcatctacctttgagaatgtcctcatatctatggtggggggtagtgtcctctaccccttactaacttggcctgtaggtgcgtggtgattgttcatcctacttatgaaggtgttagtctattgtttttctatcttggagacacccaccttattcaagctaggagtaagagtaactgtctgacttttattctaacaatcatgaccacatttcataattaacggtcactccaacaatcatgacttaacatattcttcattaatttagtcccagtattttcgtgtcacgtgttgttactcttaacacatcatcgtcgtcgttagaatttagataaacaataagattctgagatattataattagttgtaaaaattataatatatttataaattattgtaaaagataaaatagataaaataataaatttgtatagctaattcattttatattataacttttctgattgaatttttgaaatgaacaagtaattaatgttttttttttataaaaaatcatttataaattacaatattaaaatgtataaaagaagcatctaaatttgtgataatttttatgattcaattaataatattttcttaaaaaacaaaaaaggagtgtaaaatatttgccactaaaactatctctatgttacactaatttagtgtaaaatatttcacttttagtgaaataatttcaataatttacactaaatagataatttaaaaaattttgtgttttatattatttacattaataattaatttatgttataattaaaataatttgcggcataaatatttaaatataactcccaattacaaataaatatataagtttaatttttagaggtaaaaatttataattttggaacttctatagttacatgtgttaagtaaattgccacatgacaatccatgattggtc

SEQ ID NO: 129358 - DNA, 523 bp, Cannabis sativa
attaatatattcaatattggaaatttgaaagcaacgatgatgcaactggatataccttagatctattattcatggttttttttattgtatttgtattatacctgatttgaattttaatggggagctccatgtctgtttgttagagatctacattatatgaatctaaatttcgatattaggaggagttgttttgttcgaacaaaaccaaaatacagtgttgaatttcagtttcgacctagtttttctactcttattttcatcaattttagattcaatcgtttcgtgtcttcttttctagtgaattcgccaaaattaatggtggtcttcttcctgatttcatttcatttcagttgtcttgctggtttgaatgatcgaagctttttgttggtgatcgttctattttgtacggctgaaggtttagaggagagggtatttttgaaattatttatttgtgagctatataattgttgaaatggccgacccactgtattttagtaatttttttttgccttttttgtatttt

SEQ ID NO: 129359 - DNA, 1979 bp, Cannabis sativa
acttgtggcgtaaatgtaatcccaaaatttgtactggtgacgtggcatctggtagatgacacatgacaggaagattgccccttagaggagtataacaccagtatactgactaggctagttgatatcgaaatctttaaatgggcttcaggcttcactgcttgctaaacgatgtgagccacgcaacatggagagtcgataaaaagaatttgctaaggatcttcagaaatactttccttaaccagtttcataatagtgggcaattaatatccctattttcatagaatttgatttatgtaacagaatgaaaaaaatcatgagatattcacatttagacctttccctttgtctcctaatttttttggtaacttatgtattcaatctttcatataaatggtgagaccaatgccctattcggggaccttcctttttacgcactttgagtgaaaaaaacactctgaaatatttgtaactttttttgagagatattgagaaactcacttggccaaaccttgtgatctcgatatacttttataaaagcacactacaaaataatgccacttttagtgacacctttttagtcacaacaacaacaacaaaattctggctaaatgtgacttttagtcagaacaaaaatgttatactagtgactaaacatattatttagatacaaattgtcactaatttaattttagtcacaataagtattgtgactactaaaaatacatttagtcaccacaaattgtaatttttgtgactaatacttttagccacagactttttcgtcacaaagtaagaataataatttataattattcacaattttttcactttgtgacgaaaagtaaaaatttttgtagtgacaatacaacaaaaacgaaagtagactattaccgctataaatgggctgaaccactgtaaatttcttatgttatttataagtatttattattatttaattattatataatcgctttagtaaactcagtgtcgttggctagaaacgaagccaacaacatgtatagctgccaataaattagaggtcattagaccatcaagcaaagggttgaatcctaagcttttagagagccaaaactctacaaaattgtaaaatccatttaatgccataaccatgtaaaaaatacttatattaaattatatatatttttttagctttaaatcatatttattggtttctgaaaaactctataaacaccgatatatatactttttggaaattcctgtagtaaatacctaaagggacgttctagtagacctcttacctattttagcatccaggaaaaaaatttagtttaattttttttcataattacatacattgtagttataagaccacttgtaatttttttaaaaactctaaataatttctagtatcggcaattagatttaaacaattacttactacgcgtagagatggcaatataatctacggttacgagtatacatggttattccatccaaacggtgagggaaataaccgttcaaatgggaaaaatactgaggcggggaataactgcattgcacatatgcgggtatggtgtaggtacggtattagtatacatcaccccatactcgccgtaatatatacatatatatatatatattgaatatttgttattaattatatatttattttattttattattgtatcatatttatagtttatttttttagaacttcattaagtttatggttaattattgttttgatttttatttttaatgttttgatgtgtttacttaatatttttttaaaaataaatgtatatggttggattttaagtttgaaaaacatttaaaatattgtttaattagattttatcaaaatttagtttaattattataattatttttcaaaaaatatatagttactcagtacaagaaacgtcacttttgccaacacatttttgtgctggcaaaagttggtattgcactagtaaaatagaaagatcggaagagcg

SEQ ID NO: 129360 - DNA, 1495 bp, Cannabis sativa
tatatatatataaaatgacaagtattaaaagataaatatttatatctaaaaatagaataaagaatataaatatatttatatatatggaggagattttattaatgtacatagtcacatatatttttagctattaaattattattgaatggttgtgataatttagaaattaaaagaaaaaaaaaataataaataacttgtaacccaatactttatatccttataaaatcttaataaaaattaattatttttaaaattaaattactaataactattaattaattttatgcaattagttacctaataaaaatgtattagcaatttttttttgaacttaaataatcgaaatatttgtaacaaaactctttgtatttaaaattattacacacatcactttatttaataaaattagaaagaatgacctctagttagaggtaattttacactctatcttattttcaatacatttaagtgccaatgtgtcatttccaaattggttcaagttatttagaatttttaaaagaaaaatgaaaattaaattaaaaaataattttaaaatgtaataacaattataaaattaaaaattagttaactatttttgcttgttgaaattatcttcatcaatctagagattgataaaaaaaaaataactaagtagattatcaatcaatcgagattgttagtttttttttttttttacaaataagcataatagtaagaaaatagtaatcaattcactaaaaactaaagagaaatctaactgtagctggtgcgctacagaaaatcttatttttagttacaacaaaatttatgactaaaagtaaaaaaaaaaattgtgactaattataaatatccattcctatgttatgactaaaagatctgtgcctaaaagtatttgtcacaaaaattataatttgttgtgattaaatatatttttagtcacagtacttgctgtgaatagtaaattagtgactacttgtatctaaatagtatgtttttgtcacaagtaattttttgttgtgactaaaagtcatattaagttacaaaaaattatgttgtggctaaaaagatgtcactaaaagtagcttttttttgtgtagtggtggattggaggaatgggttcgtgggagagatgtaggagattgtatcgaagtagaaaattcacatgatttttgtaaagattcggttttgaccgagtcaaatatgtatatatatataaaataataattaaataataatatatatgtatgtataacaaaaaaataatatatacaataacagaccccttcgcccccctctctctctacctatctctctttttctctctcttcaaacacaagaaagaaaacccacaaactccataaccaccaaactccggcgacccacctccggccaccgctcggtcccacgcgccagacaaatcggaaccccaggtgccggcgacctcacccccaagcggcgccactcctttcgccgccgttagcttgggatcgcaagt

SEQ ID NO: 129361 - DNA, 590 bp, Cannabis sativa
aaaaaaaaaaaaaaaacttctaatgacgcactagaaagactatagtgccctaacaaaatattttacatatataatcatatattttttcacatataaaaaaataattatctatagtaattgataatttctcccaaatgagttttctttacaatttgacccccaacttataaatcttcccttcgtcaatgcttctgaccactagaattaacgatacatcagtatagtcaatggcagaggaaaggggaggtgggtcattttcccctcatcacctctcaactttttataatttaaattttttattattttatattttgtttctataaaaataatttttttatttatgttcttacatatattttttttatttttatcccacatttatatccatataaaatttatattttttttgtttttatttccatgtacttttttatttttattctcataaattttttatatatttcaataaaaattataaagtaattctacaatgcactcttaatttatttcggcattcaatagatttttttaatctaatttttttttcatattcatgtacgttatatctatttaagatatcttacaaaatt

SEQ ID NO: 129362 - DNA, 611 bp, Cannabis sativa
aaaagattagtaacaaataataatcaaatatttgtttatcatcaaaataaatgagtgaatgacttttggtcaacaagtaactctttgatgggaccataaagttttgaggttggaatcataccagtgctgaagaagcttgctatggaaattctaggaccaacatggcttgacacaactctatgcacaacacttttgaatctatcattggatataagctgaagaaataaaatgtattatataggtaattaggtatacatacatgaaatataactacttttttttaaagatgacttagtttgtggttataacaaatattctactcatttatgagaaattttgaatacaacataaaaaatagagctcaaaacaggcaattgtaaattaattgtttgaactctattttcagtattgtaaattttttaaaattaacacgatgttcaaaaatgatgcccctactacaaaatttcctatacatatttatatcatgattagacaattactccttgttagagaaactaatagaaattagtggtttataaattacactatataaaaaatcttacttttagtcacaacaaaatttgtaactaaaagtgaaaaagttgtgacta

SEQ ID NO: 129363 - DNA, 884 bp, Cannabis sativa
cttcgatggcaacattggacaatagtcaaagaagatccaagttccaattgatccaataatcacttgacgatatttaattaggaggatcaagccaagtggcctaacaaccatcaataataggggtaactaacgtcgtggttggacaacaaacaaccacacccaatcggaatatgggttcaacagtcaattcatcacccattcctccaatagtcaattcatcagccattcctccaacagttaatttgttagccattcctccagcagtcatttcgccagccattcctccagcagtcaattcgccagccattcctccaacagtcatttcgttagccattcctctagcagtcaattcgtcagccatccctccagcagtcaattcgtcagccatccctctagcagtcatttcgttacccattcctccagcagtcaactcgtcagccatccctccagcagtcaacttgaccaacctgattgtcctcgaaggttctctaaactaacaatcccttactatagtaaacaatgcaataattgatttaacaccttccattgtgaatgcaggagtgaatgttgcacctacccaacatgagttgattgaacgaataattccacgaaaactggaaggcatggagaccatgatccaaagaatcccaggattgccaactccaataaaaaagatcctacctagaagctttgcagattcaccctttctagatgccatcgccttggtcgaaatgccaaagaagattgtgttcccattgatgaaaatgtatgatggaatgatagatcctaacgaccacatagctagctacaagcagaggatgttcactgccgcaatacctcgcgagttacgcgaggcgtgtatgtgtaaagggtttgggtctagt

SEQ ID NO: 129364 - DNA, 759 bp, Cannabis sativa
aataaaataatattttaaaaaagtataactagaggtagtcattaacttaatatttaatgaactaccaatgtttcaaaaatatatataatttagttattattatgaaacttaaatatttattaacaagggaaatcgaaaattaaacttaatataagtacaaattactaaaaaaaaatgagtatagttgatttatatgttacaaaacccagtgtgatcatgtataaagtttttaagtcttggttaaatcgtgtatgaccaattcacatagtttataaactagtcaacggtcaaccaaacttaatattgaccaattatagtattagaaagaaaccccaaaccaagtcttacaaaaaagctataatatatacgcgcacacaaacatatgctataaaaacccctcattagctccatccttataaactcatcaacatatattattaattattttctttatcaaaccatacatataagcataatatatcaagtaccaaaagtatatatatatatacatataatacaatacattttttagttaatatacagttattgataatgatgagaaaagtgatagtggttttggtcactttggtgattatcaatttattgtgtgttgattcagttgaaggtggtcgagttttgaatgagagaagagatttaaataacttattgattttgtctttacaaagaggtggtaataaaccaccttcgcctaatccaactaaacctgcatctttcgatgaaagaaactttgctggaagt

SEQ ID NO: 129365 - DNA, 845 bp, Cannabis sativa
aaatactaacttttttttttcaaatattacatttataatttgacaagaaattttttacatttatacttttcttaattttttttcttttcatttttgaagtgagttgcctcccatgtgttatgagggcaatacctgtaccaaacaattagtcagtgcagcttccatcaacatgtaatttccatgttgattctttaggttttttggtgctactgctgttgctcttgcttcttctttggctcttacttttctcttgaatgttaagagatttcaagaggtattcttgtacattcatccacaaagtctacaagggcttggccttttatggccgagtttgatggcccacgtgagtagtcggccagatgcatcaggtttttgtaagatttgtagcaatggttggttggtgtacacctttattaggtgtacttagaagtacgacctcagatttctagatgtaaagagcaagttatagcttagcttttccatgagtgggtatcgactttcagcatcgatcaatctcttgcttaagtagtatactatgtgttgtataccatcttcttctcttgttaagactgcactcatagcatgttctatgacagcaaggtacacgcctaactcttcattgtctagaggttttgatacgaaaggtggttgagcaaattatttttaagctcttggaatgctttctcaaactcccctatcaactaaaatttttggttccctcaaagaatattgaagaagatgttgggttttctgccctaaataaaacccgtttcaatataattagatttgccaataaagatcagaaataacattttatgttacacagttcacatgatttatttcat

SEQ ID NO: 129366 - DNA, 815 bp, Cannabis sativa
  modified_base (51)..(66): a, c, t, g, unknown or other
aaaaattgctaattagcctatattctattattattgatgaccttcaattannnnnnnnnnnnnnnntatcttctaagaatattttatttggtttttatatggtgaagtgtgtatgttcttttgatcgcttgaagtaaatattttgttattgttgttgctgttttttttttcttaggtcaatatatgccatttttcatcatagttttgaattattaataataaaaattattttattattatgtgatttgatatatggggaaaaatatttagaacatttaagaaataagataatgtatatataaatatatatattgaaatatattttttcggtaatttatgttcttaatttatatcatatcctaacaataataaataataacattttggtaaaaaaatataaaagtaacaataataattaatggtaagatagaaaataaataatagataactataaaaacaaattggtaaaaacattttcttttaaacttgatatcttatcccttgcaaaaatatatatataattatatataattacaactataatatatatatatatacatgtaacatatataagaatatcaatcattaacataaatttaccatatttcattacaataatttttttatacaatagaaatttattattaatatatgtgcatttgtaaaaagaaaagttgatactcaatcatagtgtgtaaaattgtgaagaatccaatcaactgaaagagtgttgagctcagatctttataataatctgcgacataaatgaacaagggttagagatctgagtcgaatgagtcatttaattccgctgc

SEQ ID NO: 129367 - DNA, 970 bp, Cannabis sativa
agtagaacaactaaaaaacatcagtagaacaccagtgaaaatttaacacagtatactgcagtatgaaacttaaaaaaaaatacaagttaaaagtaaaaaataccgcctagcagtatttttgtaaaaaaatgataaaagttagtataccatgtaaatttctcaaaatatatctacattgctaatatttttttatgaataagtctctttttcgaaaataaaactaacacaatgtcacaaactagtgaagtcacaaagagggcaacttcccttaaaaatccaagagacttaatctttacaattctcacccaactagccaataattctacaaaacgattttcagaccgcgcacaaaaatcacaacaatatcttcaaaaaaacttacaaatgcacaaaattgacgaaaacagagaaaatgtgccccaaccataaggcaacaacccactctgaagtccaaagcaactaccctcaagtttgtttcaatccaaagctttgaaaccaataagtcttgagccacctgcaaagccaaagcaatggcacaaagctcaccttcaagcacatccgctacaaaatagaacccaacaacaacccatgcctcctcaagcttttaggttttttttttattaaaaaaaaaaaacgtttttgaaaacaacaataccagcatctaaacccactacagatgcatcaatttgatagcaccaaactcttccaaagaccgaggaaccaacttaggagtccagctaacaacacaaacttcattcttaacccaaatccgattatgcaaaaatcacagagcttaaagtgacaatccttaaacaccatttccacatcacagttcacacttatcttataaataagagtccaaatagagtgataagtgttggattaaaaatcctatgtgggcacatatgtataatgtatatgctattataaagtgtgatacaaaattaagtgaccaattatgttatgggta

SEQ ID NO: 129368 - DNA, 519 bp, Cannabis sativa
aagtgtatatctattttatttgtaattaattaatcgttgaagtgtgattcttgtttttggaaatctatacttttttttaagaatttgaaatagcatataccatttcgagttgttgaacatgaggaaaagttgttgtccaatttgttttccttaattttgttttgatcattttgttagtatatatgtattatgcggtgattgtgatattaaatttgtattgggaggtagtgtcatgaggtacatgaatcctagttttaactattgttttaatagtatttatatttagaggagtacgattttaaaattggaacaaaaatttgattgttgttttggttgaattctaaagaattttggttgacttaagttctcaattttttttttttttttttatgtttcataagtttgaaattgtacgatcaggtattatttggtggacaccacaacacgtgaaaacgtaattactttattattgtaaaagtaattacaccaagacttgaatactttttactagaccacaat

SEQ ID NO: 129369 - DNA, 871 bp, Cannabis sativa
tacaaaccgtaaagttcaggtggtttagctgccaatattccttatagatatgatgttatatattatatttataattcctctcacctatttatgaaatttttttgaataatttatggtgtcaaaaataatgttcaaaataatttgtttcacacatattaaaaaagatacatgtatacgtgtgcaactcactagttaaatcttatttttgacactataaattattcaaaaaaaaaattggaaacaaaaaataaataattataaaaaattgttactataactataatctacattgtcacattaaaaaaaaatgatataattactctatatatcaaaaatataataataaaagtcctatgataaaaataaggagaatcactccatatcctacttcttaactttttttttatttttccggtttgggttgcttcggtgattgctatgtgggttgttatgtatatttaggttgcgacttaagttgctccattggttgctatgtagatttccgtaaaaatacaaaaaagaaaaattactttgaaatgtaaaaaaaaattaaaaactcctaaaaaacaaaaaaacttttttaagttgtgtactactaatgtgctatattaatagtctatatttttattacaataaaatatgtctaataattcatttagtcatgttagtcgtttgcggcttatagattagttaaccatgttattacgatagataatgaattttttttaaataaaagggatgccttatttttctgtgaaggtgttttcttttttgatgaaataaagtgatccttgaccaaaaaaaaaaaactaataacccattttgaaagagttttgaaaaaccgtgtttttgcaaatgtcagttgtatata

SEQ ID NO: 129370 - DNA, 899 bp, Cannabis sativa
aaaaattgtcaaaaattaagttcagtgtcctagttttaccattttagaaaatacaagatctattttgtcatttaacaaaataaaatatctaatcggtaactttcacaaaacacagggtccaaaatagtatttatcctaaattctatacattgttgcaaaacattaactcttacctagaacccaacacatttaacttgtacaatatgtgagccacatggtagtttcctgcatgaacttaaggtgacacttatttcaaattcaccagcctagtggagtaactcttggaaatcttagctccaagttttggatggctctccatacattttccctttttgttataacgcccaaacttattgtagaacaataattctccatttgaaaaacaagaaattttcatgaattttcattcacttttttctcctaaagaataaaattgcgtatatgaagaggatgaaatgtaatttatgtaaagataaagacatataaatcaagttaacttgccatgaaaatagtaactatagagttctcaatcggataaaaataattcaaatcaacaaaagcatcggtaccaaaaataataatttccaatctctaaaatagtcatatgtgattttaaaacaataatagttattttattttattgcaaattgatctcaattatttttttattaaaaacactctcattcaagtggcaaaagtaaagggctattaagttgaagtaataattatttttccgagattatgttgaagagaacattaatcattaaacatccgtagatatgtatctattgcttctatatcgagcattgctattagtcaccagtggtgcttagtactttctcgacatgtcgcgttgcgattagctagcgatactctctaaaagctactatattaaatta

SEQ ID NO: 129371 - DNA, 584 bp, Cannabis sativa
caagttacttctaattcataggatctctattccttacttttacaattttagggtatatttaattatacatttaatataatctaaaataataaatgacaagataaatttcagtggtaccataatttagtaatatcctcctattctttcatgtaaatttaaaacatcttaactaattattttatttaactacggcttatatatgtaagcaacaattgtatattaatatattttcaagtctcaggtggattctagtcctccctcaatacctcttggtttgtttatgaagcgtataacaaaatatataaatcttatttttagtattgtaaattattaaaaaaaaaattaaaaaatttataaatggttctaaatagctataatatatacgattatgaaaaaaattagactaaaaaacttttttaaatttcaaaagagataaagagtttatccaaatagccatatagaatgcactatatacctacccttagggcttgtttggtacgcatgattggattggactagacaacataatttgttcagtctagtgtttggacatgttggaaccctggataactaatccagctaaa

SEQ ID NO: 129372 - DNA, 1033 bp, Cannabis sativa
agtataaagtgtaatttccttccttaaatataactcccaataagtcaataaagtggggattgtgaaaaatgccatttttggtattgaattaaccgaccatcaagttcgactggtgcagtccaagtccaaaactaccagctaacacatcatatagagttggatttttttgtttttcttttctatcaaaataataaataaataaatattttaattttggtttatgtgacattgtgacaaggaaggtttgttgttgttgaaatgtctaataggggaagattattaagatcttgtgtttatggcctggctaaaacgtggaggagaaacgttcctcattcatatctagctacttttataaaaatacttaaaataatagcaacatgcatcacatatcaaaattaatttcattattattattatggagttattaagcctaaaaaagtatcgttacttatcaaaaacaaaatgtagagttgttcattgggttgattgatgacctctcttatcataataatgaacctaaagtttgtcattgctcttcattcaaataaataattataataataatataataatttgtcattgctctattctaaggtaggcaggcaccactagcactatatgcaaaatttaatattataaatgagtgaaccaaaaatgatcaccctaaataaaagtcattactattgaataattttattcttttatctttcgacaacaatcatataaataatgataataattttaattttattcctctgttttgctaattcacgtggacaggaaaaataaagacttcttccaaaaactagaaagaaagaaagaaagaaaaattaagactttctttcaagatataatattaaggaaataaaatcatttttttttattatttattttcttttgagctggtttgggctttttgaaggtctatgagctcgaatttgggttagcttttacaaaaatactgtcacacggaaatcttttaaaaaatactgtatttttgaaaaacaccagtaaaatacaaagcagaacaact

SEQ ID NO: 129373 - DNA, 1928 bp, Cannabis sativa
tccttgtaaaatatttccaacaacgtgtcctatatttttgatacttgggtggaggaaaatatccctagcagcctataaatgactaaccagcatctgtcacattcaggcatccgagcaggattgtggagaagatgtctgacctagtatggacatgtttgtgccgaatgaagtacgagagatgacaactttggagattaatctctttatgtccagacacggagacaatccctgcaattacgggattgagttagagaagaacgaaaacctattctagtttcctatttcatacattgtaattatagaatcattgtagtttcctattttgttcattgtaagcaaaaggaaaaccattcttcatgtattaagtctctataaatagtgacctagcctcactagaaaagggatcaagagaattgctgcaaaaagatactctagagagaaaagagtaatctaagagagaaagtaactcagagatcaattgtaagagctttcgagaggaagaacacttcattccttctctcaagttaatacaaatacaagggaatcaatttcctgctttggtggtaaccctggtaactcttctggaaaaacatccagaaattctcgaaccactagaacatgatctggtcccgctagtggttccctagtagtatccactacatttgctaggaaaccgatgcacccctcacataacagatctcttgctttaagcactgagattagagaaatttgggatccctacaccttacccacaaatacaaaggggtcatggccttcaggctaaaagttaccatctttcttttacaatcaatagtggcattgtatttagcaagccaatttatacccaaaataacgttaaaatcttctagatttaactctatcagatcaactgacaacgctcttccttccacaaatattggatgagacctaacccacctattggagatgaccacttccctagtaggcagtaaggtaccaaaacctcttgaaagcataacactaggtctactcaaattgttaattaccctacttgaatgtgtcgcactaaaatcaattagaatagtcaataaagtaccggcaatagaaacttggcctgtcatagtggaaaggctgacatcagcctcggcctgagttagggcaaacacccgagtaggagcatatgtgtcatccttcttctgttctggtcgcagtagctgtgggaaattccttttcaagtgacccactaccccgcactaaaagcatgccctggcctgtcactcgccctggtggcgcctcttgcaccttggacattcaggaaaaatctgctagttttcgtttccaccatgacaaaaaccttggttactttggaatcttttgtttgggcctgaagctgatggttcattagaccttttcttgcgatcaccagggtcattacccctaccaaaacccgcaccagatgtctctcgcaatatttttctttcgtatctgatcttctgcaccctcagtagctagggccaactcaactatttatgcataagtccgaacaaacccaggttgtttggcagcaactatcacatcccgtgcaatgtgttcatccgatccccaaataaattttgcttttctagcagcttcagtatccacttcatctaaaggaaattttgccagttgatcaaacttggtggcatactctgtcaccgtcatactaccctaagtcaatcgtataaactcttctgcttttgctgcccgaatatacttgttataatacttctcgtaaaacattgttcagaaagcatcccaggtcatgaccctgagacacaatctcccaccagatacaagcatcatctcgcaacatgtagatagcacatctgacccgatcattattttcgactcgcatgaaataaaaaatggaggtaatcatactcatccactgctctgctttgagtggatca

SEQ ID NO: 129374 - DNA, 507 bp, Cannabis sativa
ccaaccctctacaattccaagcaacaccgccttaagtggttttataataacatattttaactaaaatttatttagtaaagttgccttgcaagcccctaaaagaccataatagtacagatgtttacacaagaggtggttgtactcaaagctaaatttaaaacatgacaagaaagaaatgaaaaacaatgattccaaatacaactaagctaaccatatcattcgccaagagtgcatgctatatatattcacctaatacaataatatagaatctctatctaataacactctatataacctctaatttattataaaaaaaattaaatcttaattttggctagttatatataagaataaattttaaattgtaattagttatatatttttaaaatctcctattaaaaaattatacatccatataagaatataattatatttaataatatatatataatttataaatttatgggtaaattgcggcataaatacctaatgttttagattttatac

SEQ ID NO: 129375 - DNA, 644 bp, Cannabis sativa
aaaaatatgccccacagccctgtctccattgtcttcatccaccatttccctttcaagctccagatacccgaaaggatttgcttgactctgtttctaggcagaggagctttaccaaagcatttggctagagcccctttcttcaccatctcctatgatatctcgaaagatgcttccagttccattgacgactcctccaaaaatttcctcctcatctcctccatgctatctgggggttcagagctttcccctttctcaccagactctgagcctaccatcggcgttggcctcagatgttcattaaccctcgtcacacctgtttcaccacatcttgcagtgttttgaggactacccaccagaccttccccattatccctagctccgttcatccctggtctttcccgatagccacttgaccttccccctgattactcatcgtcacacatcccaccttaacccggcgacacacagattacaaaagataaaaagaaaaagactctaggtcagtattggacgagccaacttctcatagagagaacatttttttactgtcatttttaatgactaatcttccaaacagttacctactccaaagcttttcgtaaacccatcagcggacccatagagtgttggaaatttattttacc

SEQ ID NO: 129376 - DNA, 637 bp, Cannabis sativa
aactctgttcattcctctgttttgcaataatgaaagatgaatttcattctctttgtttctctgtaattgtttctcttctgcaactaaaaggaaataaatgcgggcgagagagtgctaaaaaagttgaaaatatatattgtattataattaagagtgattctacaatgtattgatctattgatgcactctctatctatttgagtatttagaaaaaaaaatctatttatatatatgtatacgttatggttattaaatactactacgaaaatagtttttcgtgatattttaaacagtcatttaaagtattcctgtcggtttctataagtgtcgcttatacgatcattgcaaaacgggcaaaataggcaactattaaaaactgtctctaatgtgaacttcccgacggtttaaaaatgtcgcctgtaatagggtataggcaacggttgtaaactatgccctatactataggcgacagtgccctataccttctgttagggtattttccaatctttccaccaatcttcacctttagaaattgttaatttcttatctgtgtccggttcatcgaacacggcctgccacattgacaatagtaattataagtacaatttataatcaatagtaaagaactcgaataata

SEQ ID NO: 129377 - DNA, 1159 bp, Cannabis sativa
  modified_base (1128)..(1134): a, c, t, g, unknown or other
tttgatcttttttttatctttttttttttccatcttattccctttgatattctataatattcttttattttaaatctacaaaaataaaagattaaaaagcgtaaaattactcaaaataagagtagaactaaattaaaaacacactaaaaattaacctaaaaataatactaaaaacaacctaacaatgatagaaggttaagataatagaaactcttaatgaaatctaaaccctatgtagagttgagtaccgagctacatgagtactcttgatagactcacctacgtgaatgtgggagtggggccgcttcctattaaattttaagtaaatttctagatcgttcaccatactggaatagacatgcatggccattaaagcacagatctttttggactacacccgagaaaggttggcatgacacatcgttagagatagagttaaggactacgcgtcactctattatattctaagttgtattcactacgcaaatgttcaaattgaaagatacctttgtctatgctgaatcttattgtttagattactgctcgagaaaatattttttgaaattttcaagtgaggaattgttggaacttttattgaaaattttaaattatggtatgagaagtgtgtgggtgcattgagccacatgggatagaaacacttcattagaagtatatataatgtgcaactttaacatatggattggggccccaaggggtaacccagttttgtgcgcatgggtgaggactcacacacctgaccaccacgtgcgcgtcgttgctgctgtgcgactgtgctgagcgggcgggtattgtgaggtgtcactttattgtttgaagaaaaattatttattaaatttttatttttatttaattaattaaaaatagtttttaaatttgtttaattaattggtaaaatgagacgtgttctcctctttattttttagcattgttctcatgatctcacttaacgtttctatgatcaacgtatttcttcctgctactaccttctgtgtattccctatataatgcagtagaaccaacggaagaaacacatctttgagaaaaaaaatcttttacaatttatagttacgattatatattataagttgtaaagtccttttttggcannnnnnntgacaaaataatttttccatttatg

SEQ ID NO: 129378 - DNA, 585 bp, Cannabis sativa
tctaatataactataatacacaatgttatataaaaagaaataggatataattttgtctttacaacacctaaaaaatttcctataaatatatatgtgtgaaaaaaaaaattgggtaattattgtttttgatcactatctctacaagtagttgtagtatttttggtacacaaataagttgcaagttcatgttttttatgaatatggccatatatgacatcatgatgtagttacaaggacttcttataaatttttaagaaattctaaataatttagaatgttaaaattaaaattcaaaaagtttgttacttgtatacttatttggatatttataaacgtgtctaacataatatttgaatactgaattttatatttcaaattactaaagaaaaaacaaaaaagagatctccactaattataaggttaccctttacaaaattcaacttaatgcattaatagtgattaaaataataagacatgtgttaactactattattagcaatgttagagcatctcttaggggtgtttattggatcacatctaatggatttggactcatccgatccaattcaattatttattggatat

SEQ ID NO: 129379 - DNA, 1045 bp, Cannabis sativa
aatcatgctcttaaacttttaaacagttaaaatttttccccaaactaatcaaatggttcgatttaaggacttctgtataattttgctaacgaaagtttgatgtggatgaaaattcaaggagcacaatatgatataaggacaatcgttaagttagtaaaattgaatgaaattagatagaagtttttgaatctaagaatctcaatagttcagaagaaatctttaacgacttcaaaaattcggtggcaaaatttgttacatgtcaaagtaaaaaatcctagttagtcaaaatattggaaaatatatctttcttgcattcaaactgttcgacgaaatactaagctgaaaattcagttggaaactttcatggacagacatgtttctttcttctcattctaccgaattttattaacaaaaatggaaactttagaaattgggtttacaataatacctaaactcgtaattcaatggcagtaccttagataataagatgggtatatgagcaaaaagacaaagatagattacctggtcgccattggagggaacttctcctgagccaagacgaagatctaaagccttaacgccacctgaattagggagctcgaagaagtcggatatggcggaggaggcagaagctggagtgagtaaagcagggagtagtagggaagaacaagtggcagagatgaaggaaagagataaagcttctcttctggttttggatgataatggaggaagacatgcagagatggtctccgaagaagatgacttacgtgttacgaagcgattggtcagactttgtggagcacggaaacactgctgtggcgcgaagcactggagaatcatctttttttttttttttgtgaattttttctttttctttttcttcttattttcgtatagtaatttttgttttttgttagtttattcctgaccacgttcttttttttctaatggaaatatttatttgcactgaataatcaaaaaaaaaaaaaaaaaaaaaaaaaaaaaattgggaaataaatttggagttgacacgtggcaagcaaaa

SEQ ID NO: 129380 - DNA, 540 bp, Cannabis sativa
atgttatcatacttatattcacctaccataacatgccacgtaatttcttttatcactttcccaccaccttcattaacccattcttataaaaaaaatgataaatttattacactatctaaatatttattattattattattattattattattttaataatacaccgttaaaagtattaatgttagatagaagaaaatgttagatgaattgttcccaattgatttgaaacttgtttatcaaaaaaaaattttacgtgaaactttttaattggtaaataattcactacaaaaaattttacttttagtcacaataaaatttgtaactaaatcttattctttttgataaaaaaaaattataactaaaagtaaaaaaattgtaactaattatatattattatttttatattgtaataactaaaaggtgtggttaaaagtattacacaaaaattacaatttgatgtgactaaatatatttttagtcacaatacttattttaattaaaactaaattagtgacaacttatatctttatatattaaaag

SEQ ID NO: 129381 - DNA, 1046 bp, Cannabis sativa
tttgacccgagaagggtaaaatcaggaaattaatatatttacgtgcttatgggactatattattatatagtatgcttgtgttgtctttttgaggtatgttctgacaagttggcgcggtatagtcacaactgggtatttcgggtcgaaccgggttctgggccgaaatacaattttggcataaattattggcattttaattgagtgtgattaatctgattttatttggtgtattgtatgtggaatgaccattatacctttgaatgtttatgagtgtgcttaatggccataggggcacttttatctttttgggcatttggattattaacaaaaaatgggatttttggtatgttggaaaatcattttctgctttgttttgccctagccgacccttccctctctctctctatacaatttgcaatttttattgaaattgtggtgatttcttggagttcaagctcagagtttggaggtgtgaagcttgatttttgtttgaacttgaggtagcattccttctgttcttttacttaagattgttgctaagatttttatgatttaaagtatgaaaagatgttgagtagctcttgaatgcatgtggttatatttggtgttaatcttagggagttttggtttaaattgtatggttttgttaggatttatgattgttgagctttaggtgagattttagaatgtttactatgtttgaattcaagatttgtttattgttttgtgggctgagaattttggtgaagctttgagtctcttgaagttgggtgttcatggtggtttttctttgctcaagtgttgagcttatgttccatgttggttgtgtttaaatcttagtttagatgcatttgagctgtgatttttgagctttaatatgtgtttttaccctctgtttggttgaggttcaaaatttagggaaagtaggtatttttagaccttaaaatctggttttctgggttttcgaacccagtggccgcaactggatttttggtcgccgcggccaaaacctagcagagagccatcccattttctcgattttgttt

SEQ ID NO: 129382 - DNA, 1632 bp, Cannabis sativa
tgttggtcatattctaggggcttttaataccttcagtgaaaccacgggccttattgccaacaagtccaactttttggcttatttcggtggggtaaaagatgagtgcaaagcccagttattggagatgatgcaaatggaagagggtaggtttcctctcaactatttgggggttcaccttagaccaaaaaaatggcatgcttctgattgcggcattatatattcttgacaaaattcataaaaaacttcacaactgggctagcaagaactatcctttgtgggaagggcgcaactaatccattcggtccttttggggattagaaatttttggatgagtttattcattcttttgcaaaaagttactgcagtcattgataaatattgtagggactttctttggggaacaaaaggaaactgaagcaaaatgcacttctcttcttgggacaaagtgtgtatgctgaagaaatatagaggcattgggttccagaaggtaagaaatggaacataaccttaatggctaaatttattagggctatctctagcaagaaagataaactcaaggtccgatgggtgaacactatctatttaaaaggtaaagatttctggcaaataacattcaaacataatgcaagctggtatttcaagaaacttttacggttaagaaactctattgagattggagatatagctcatgtttgtcaaaaggggaagttcaaagccaaatctttctatattttgtatgcttccttgtagagggtagactatgctacaagaatttggcataaattgagtattcctaaacatagactcatttgttggcaagcgattaacaaccacctcttgaccagagatcatttaagcaaactgttgtccattgtttctgctcaatgcccggtttgtgactatgctatagagactcatgcccatctttttttggactgccctttcaccattaaagtggtagccaaagcgagcagctggttgggagatatcagttggccaaaaagcttcagggatctggtatgtgtggctgtcttcttcgctaaaaagcctccaagaaaaagtggtcaatgttgttaccttggctttagtttacaatatatgggtgaatagaaattattgtatctttgaatttagttgtaaaactgctaccaggattagtttggatattaagaataatgttaagattagagtgatgaactcttcggttagtattaaacaagctgaatacttgtatatttaatgtaattgctagttggtaatgtcccttagtggttgccttttcttgcagctggctttttgtttattttgtatttcatttgttttgaataaaatttttttcttgttaaaaaaatataataaatttaaggataaataaatataatttttttattcaaataaatataattatgaaacagtagcattttccaattaaatatttttgacttttttcttttttgaatataattttgagattatacactaaatgtgttatatagtttgaaaaatatattatatgacttgtcttattttgtatgataaggctttaaactactttatgttaggttgtatagattgtactatatatacaaatatatatatatatatatttaaagtaacttttaattatattga

SEQ ID NO: 129383 - DNA, 992 bp, Cannabis sativa
attagagatagctaaagtgaacatgatgcgaattgtacaaggtttgataacaggactgtaggtctcaaagaagtcaatgcctgctgtttgttgaaagcctttagcaacaagtcttgctttgagtctttcaacactaccatctgcattaaatttaattctgtacacccacttgttggtgatgactaccatatcagttgttcttggtacaagagtccaagttttcttcttctttaaggctgtcatttcatggcccattgcagcattccacttggggttggcaagagcttcctttagagaagttggttctgtttcagtatgagtatgtgcaagaaaacttcttggtttatagatgcctagtttagatcttgtgatcatgggatgttgatttgtggtgtgtggaggacaagggtcagtaggtagaatggtagtaggctcagtaggtggtgaattgtttagagaggtagatgtttggtgactgggagcagcattgtgtgtcgaaatagatgttatattaggtgagggtagtgtaggagtagtaggtatagtggactgtgtaaagacaggttgtaagggtggaatatttgataaagttggagccgtgtgggggatgggaaaaagctgttgtggacagacgggaacagtagctgatggagttggtaaagtattgggaaaaaggtcattgtagggaaattctttttcattaaaagtgacactcctagctacatatattctaccagatggatgtagacacctataaccttgaaagttggggctgtagcctatgaaaatgcatttagaagacctaaaagaaaccttatgagatgcgtatggtgtgagaaggggaaagcaagagcacccaaacaccttaagtaaattataatcaggtgagtgcttgaataatttttcataaggtgtgtcaaaatttaaggttggtgtgggaagcctattgattaaataggctgcagaagcaaatgcttcccaccaaaaggata

SEQ ID NO: 129384 - DNA, 511 bp, Cannabis sativa
ttgtttatatgaaaaactgtaaaaatgtaaaaaaaaaaattctttaaacataaaattgtaattttttttacaaaaaatagtaccttgtgtaattatccccatagtaaattagtgtaaaagagtttgtgtggactcatataggatcaagtggcaagtatcctagtccaagacactgtctcgaaaaatagatttgaggattttttctatatcaaagaaactaaatctatcattgatgctttcattgagagctcggcaaaatggctgatgaagagcttcatgaattcgtgagatccacattgaaatctatgaagttgcgtatagatcaattcttcaatgctcatctgaatgcaataaaagtgcatctcaaagataaattagatgttagagttgagctatattgctcatcaattgagaaaactctggttcccttagcttaggccctgcctatttcgccggaggtcgaaaatctcattggtagttttgaggaacaagtgagaatcatgaagccaat

SEQ ID NO: 129385 - DNA, 1344 bp, Cannabis sativa
cattcaagcaattctactaacctttattttttttgaaaattaagattagctagtacttactaatggtgataaagcaaaagcaagtaattacacaaaatacttttgaatgaataaaatcaattcactaaacaagcaacaaatatcaaatcacaatttctaatcaacaaataattctagcaaaagagaaattaactcataatagattgtgcaaatattacaaagtttaaaagaaaagagagatagaaataaaaatccattttagagttatcacaagactctaagtttcttttctaaatttattttcttcttccacttaatttttaccaatcccaaagttaaaatagaaaactagaaccctatataacactcaaataaccctcttttttttttcctttttttttctttcttttcttcttctttttcttcattttcttcttttcttgctgttggagtagcagaccaaccgcctgctcttcttatcaattcacgcctgcacatatcaaagcatttaagtagtcatgccaggcccaattatataccaaagcaagtagtcatgccaggcccaattctttttctcctccttgctttcttttctctttttaaattgatgggaccataatacaaatgaaaagtttgcattttaaaatcttgtaacaccacacataattatagttaattaattatgaaagactaaataaacaaataaaaattaagaaaattaattaaaactaatttaaaaatactaaaattaatatttattcaaaactaaataaaaagttactaaaataaaataaaaatagttgagaacaaaactaatttaatgcacacaaaaagttaaataattctattttcatagagttatcacactccaaacttaaaaatttgcttgtcctcaagcaaaaagaaaagaaattaaaatcaaagtaaaacaatatgcaatatacactaaagttggtgatatctagggctgagtatcagtcggtttggtcggtttttttacaaataaaaatcgaaaattcgatttttggtttggattggttcaatctaaaaaccgaccgaccaatctagaaatatccttaaacgaccaatgtgaaccgcgatttggttggttcaaactgccaaaaccgattttttttgtgtaaaatataatcatatttattttataagcacattaatacttgtttttctccttaattaacccatgtcatttatctaataaagcttagttcgatattattaatttgaattattacatagaaaatataaattgacattttatttacaaaaatacttctataaggtaaagtcaacatttatacgttttatgtaattttaattaccaaa

SEQ ID NO: 129386 - DNA, 544 bp, Cannabis sativa
  modified_base (60)..(69): a, c, t, g, unknown or other
aaaaaaatcataaaaatgtttaaagttccgtgaaaccgtatttttgttgtttttttgttnnnnnnnnnnatttgtgaaattaaccctttattttattaagacaaaaacgtaactatttttgaaattaccatatttaaattttttaataggcttcaaaattgaaacatatatctcaaaaggcacattcttgccttatatgcaaagaacttgcatgactactacgtaggcccgaacttgttgaagcactgaaaatcattggtcgaattgaatgcctcttaagtcttaatgttgcaagcaaaataaactacatccaactcatcaaaaccagcaaatactgcatcttccaagtgaacaacccaagggtcgtcgaagccatcttttatgatcatatttgacaattttgtaccttttagaaaaagaaaaaaaaatagtgagaacatgtcaatattaatgaagaagatttcttaggtgccgtttggtaatacttttgttttctaattttttaattacaaaatgaaagaaaattttttgtttttaaaaattt

SEQ ID NO: 129387 - DNA, 1048 bp, Cannabis sativa
aaaagaaaagaaaaactaaatcagtaaacaaacatatatacctattttatcaaaacgtttagaaatacatcaagacaactttataatacatatttgtaatctattttccatacagttacgtatgtatagtataatttaaatttggagcagcattgaaaacttggagtactacttagtaccttaattgattctatcagtatttacatagttaccttagtcttaattggctctattagtacagaaattttatcttaaaattaattaatttaaaataatattgtttgatattcacttttaaaatagtgatttttttttccttttcaattttgaattactttatcacaagtgtcatttgcttgcttgcttgcttattgttttattcggattttaagtttctttgcacgattttgtgtagataattttactatttggatagatatagatggaaatcttattagtttttgatatcatgtcaagaattataaagttcaatcttaacattaaatggttgtgggatattgttatccaatattattaaactgagagacttgaacctataataatgaagatggaaggtataataaattaagctctgaagtcaaaacaaaagtactattcctatatgaaaacgcctaattatgcacatagataatagatgatttagtatgaatgtgaaatattttcctcattttttcttatcccttcaaaagaatgaaaaatgaaattacgtacatacaaatagaaaagtttagaaagaaaaataaaattgagaaaaaaatataatatatttttataacaagaaaatagaaagaaatttaagtttcaggcccaaatttgtaatttttatgttcaaatataagtcattttagtaattctcacacttcagttttattaaaaaagaaatctattcatttttttctctactttaaattttaggaaaaatttatttatatttcaaaaaattttcaaaacaccccgtattaataatttttattttatataaaatttatatctttaattatactaaatttttttaattttttttctt

SEQ ID NO: 129388 - DNA, 1432 bp, Cannabis sativa
  modified_base (1020)..(1022): a, c, t, g, unknown or other
tatgtacaccaatctattgataagctggaacctagatccattaagggaaacttcctaggttatgccttaggaactaaggggtatagaatttacatttccaaaacgggtagaccaaaggttgtgattgatagaaatgctgtttttaatgagttggagtatcctcacttaacatccgagaaaggttgtgtgtctccgtgtgatacaagaaaaataggaaacaaagacactgcaagtgttaaaatagaatatggaatgtagctcctggaagaagttcacaaacggaagccattgtggaacccgaaggtagtgaacagacaaaagctgatactcagctggaagataacgaagaccaaacagaggtgccagaaaggtttagacagataggcctggaaggttaataattggctcgtgatagaacccagagagaaattcaccctccaacatggtttgcaaaagcagacttgattgcttttgcgctagcactagttcagtagactgaaattgaagagcccagaagctatgaagaggcaattttaggtggaaacaagtctaaatggcttcaggccatggatgaggagatggattctcttcgtaagaataagactttggtagttgtgatgaggctgaagaacaagaagattttggagtacaaatggattctcaaggtgaaaaggggaatcaatgagaatgaactagtaaggtttaaagccaggttagtggctaaaggctttactcaggtaagaagctttgttccaacctgtcatttttgtggtattaaggggcatattcgacctaaatgtttcaccatgaaaaatttgtacaaaataaattattttggtaatttgaaattctttcgaaagaaacatagtgttttgaaacaaaaatggattgaaaaaaaaatgtctagctggtttttttgataaaagtgctacttctgaaatgtagtattttgacagtggttattctagacatatgataggtgccaaggatttttagtgaatatcagaccaatgcaatgtnnngaggtcacatttggcaatggtttaacaggttatatcattggtatggaaactttcaattttgaagggttaccaaggctgaaaatgttatgcttactgaggaagaaaaagctaatttacttagcattagtcagatttgtgatcaagtgtttaccgtcaattttgacaatgatcattgctttgttcttaacagtaataaataatgcattttacaagggtttagatctattgataattgctacactctcatatttgttcttacttgtctttttgcatgtgaaaataccagttctgtacatatttctaaaaatctttttcaatattctcgtacaaaatacattgatataagacatcattttattaaggaacttgttgacaaccaaacattgcagttggaatatgttgatactgaa

SEQ ID NO: 129389 - DNA, 659 bp, Cannabis sativa
caccaacttcagatggccatgtggcaacaatatctcgaggcccacatattgccgaaagcaccagaaacgctcaatagagatatctgaatgagcttgaacaataagaaacatataatctcgtccacacacatgctcaacatccttaaatgataaatcttccaataaattttatagaagatgatgctaggcacatgtattttccacacaatgacccattagtaattgaagctcaaattaaaaataagagggtgtcaaaattctagtagataacgaaagttctgtcaatattctcttcaaatctgcctttcaagctatcagtttagtggaaaccaatctaacatcttgtctagttcaactccaaggctttaatggagataccctacttctacagtctaattactcattggcttgaccttttcaacctcatcctctacaagagatctcaaccattcttcaactgccatccaaacctgctcattcactgccttgagaaaggcactcatcttggtcctccaataggtgtaattagcaccctttaatattggagggcgactggtagaaccgccatccctaaacatatccatagaatacaagaaataaccttcgtgacactcttcgagatgaaactccaagatagttagtgttggatattattttac

SEQ ID NO: 129390 - DNA, 684 bp, Cannabis sativa
gaccttggacattatgtcctccacctcaaccaactaagctataaatatttgttgtttatattacacttaaattttacttaaataaaaggctccttatcaatgaagaatacatactgaagatgaagcaacatgctaataatttagcagctgttggtcaatccatcaaagatgatgatcttgttctttacattcttagtggcttaggatctaaatatgaagctgtgattatcaatgtcacatctcgatttgaacctctctcacctctagaagtccaattcatgctgtaaagtcaggagatgtatattcaacaccacaccatagactctccccacaatgttgaagccaatttggcaaatgtaaatctcagcaacacaagaggttcatattcgaatcgagattcacgaggtgcctatcatggtggtcgatcctcaaattccaatagaggaggtcatcgcaacaaacctgtgtgccaactttgtggacgtgctggtcacattgctcttaaatgttatcacaagtttgatatcacattcacaggagcagcatctgtaacgttcccacttcaagcctccattgggccttccctcacagactcatggctcttatacacgagtacgctattctggcttctggtagtaccagtcaatccatttaagccctcttcaactgtgtagtctcatacct

SEQ ID NO: 129391 - DNA, 1231 bp, Cannabis sativa
tatttatttacaatgatcgacaccacttcttgtcttcatgattgaatttctttggtaggaacattgtaattcttagttttaggctttcttttatctccttaacaagtctactcggtgttagctgctcttccttctaaattataacatttcttgctctccaaatattgtatacttgggaggcacaagctgctgcctataattgttttttaaacttactgatttttgatttaccaatccacttgatcagctgaggcaatcaattacttcttgctttccaaaacaaccaatctttgatcctttgaaggcactcctctgagaatttgtatttaaaaaacaggtgctttgccgtttctttctcttcttgacatagacaatgtttctcttcaatttggattctaaatttcagcagcctatcttttgttttcaacctgcaatgcatagcccaccaaatgataaaataatattttggagcatttaaacgagcacaaacctcattactccaatgtagcttgttcattgaaggactgaagagtttataacctgctgtaatagagtatttatgtatagcagattcatgtacatcaattaggcccttgacctagtcttttaaagccactagcttcttccaatgccaactagaatggatggaagtagattgacttcaccaatctcccttctttaagtatacactatgaatccacttcatccataaactttcttagttatttgtaattgcccaaatgtacttacacatagcttctttgttccattcttctagcctcttaatacctaatcctccagctatttttggtgtgcagatggtactccaattaattgatccaaccccatggtacattgcttgacctttccataagaaagctctacatattgcttctatacccctgattatcttctttggaaggattaaaatctgactccaataagcttgtattgcaatcagaacagagttaatcaaaactttacaagcgtatttttgtaagtaaaaaattttgggccgtaaaattgtaaataaaacataattaaaaagtattttgataatttcccatgattataagtatacaactgcgtcagttttcgtgtaaagtcgattcataaaaaaaataacactattttagactatgtattttacaaaaattaccgattggatttttattttgtaaaataacaaattagatcttgtatttttcaatagggtaaattgcggcataaa

SEQ ID NO: 129392 - DNA, 530 bp, Cannabis sativa
tccttgtggcgcgcaaagacttagcaaatgtttacaagttatctgatccacgtgtcccctctcgactggtccacgtatttttggcgaattctggagcaacaaccatcaaaacataatgaagattgcttatttatgatgttgtatcttaaagaaaaacaatttcagcatgaaaaatgctaatgtcaccttaaagttttattaaggcattttaatttcgagtcgtatacaatttaatttaataaactcagtcttaaattacatatatcaatttgatactctcattctaaattgaaatctatgtttattcaattttaacatattcaaatctcatatcttatttgaattcataaatagcatgtaaaagctgcgtagtcagtcatatacacaataatcacaaattgaatatatcttatatgaagaagaaatagtatgtcaaaaaacaaaaaataagaaataaaaatcttgcattaattcataataaagtttcaagaaattcaattaaaaactctaaatagaatttaatttaatat

SEQ ID NO: 129393 - DNA, 793 bp, Cannabis sativa
gtcaaagttcgagggaaaaaattactaattagcctaaaatttaataataaaaaaaaaaaacttcgaataacttaatagcaattaatactgagatgtctcatagtaaaacataaagtaactttaaacacccagcacctaaaaaaacacctttctatatatataaatatatatatttctatgaattttgtttttctcttcacatttttatgaattttcatcttttacaagtttttgtacgtgaatagttcaaaaaataacaatagtgctacacaaaagcaatgttaaaacaataataaaacaatctttctttttcacaaaaaataaaataaaatccataaatatatatatttaaaaataaacatttgattagtatttttgtaaatgctttaccattttggtttcaagaaatttataaagtttttttaaaagaaaagagcaaatttacccaatttataatgaataatgttgtttattgttacctatagcaatagtaataaagctaattccttcacaatttccatatctttcatcgcggtgcataccacgcaggcacatgcatttgtaccctcccactgtattttcgcatcttctgcatttctctactaccatcccatctaaacactcattgatatctacaatatacaatcaaacattaagctaaaattaatttttaacaatattttttaatataatcaactcgaaaactattcttaataaatacatataaatgatagagcaatttgcggcaaaactcccttatgttttaatttttatacacttaacccccttattt

SEQ ID NO: 129394 - DNA, 3153 bp, Cannabis sativa
  modified_base (94)..(100): a, c, t, g, unknown or other
cccaatgtaaggtttctaatatttatatgtgtttatttataatcattttagaagttcatatttagggtgtttatcaacatacttgtgagtagannnnnnntcctggtaaaataatttctaatattatcgtcatgtaaaacatcaacatcatctgtctcattagaaccttctgtaaaaatattttcccaaatttggcgatgatgtacattatgaacaactctctggttttgaactcttacaagatcatccagaaagaaaacttgcttagcttgattagcaagaatgtacaagtcatctttgtaccgtacaccactgacatttacgctagcgatgttattttcgatgattaattttctctttctcgaatctttgttgaaccatttacactgaaataatactaccgaatatgcaccactaaaagtcaaatacaatatttcttcaagtttcccataatagttaaaactttttgtccctataatagacaccccactattttgagtattgcaaactttatctcaactgtgtacaacaaatcgaacacaattaactatacatgccagatatgaatacacaaccagatcagacacagatgccaaagctaataattgatcactatgttctaatgacccgagtttatacaaatcaaaaatctaaaaaaaagaaatataacacttagaatttgagagatttgacgattaggaataagtaaatattagcaaaagaaatttcacacctttgtatgaaaccacgaaggaaatttcttttcatgtaaaaagttatggttagcgttcgggttccttcgtctaattatttcgaggtgctctctattaaacaaaaaagttattacaaaattagctaaaaaagaataatataattttattcattaagcaccatgtaatcatttgattaacttatgtcatataagagtcaatcttgatacaattccctaatacgtaccactcagctcttttgtgagtcttctcgtcgagagtcgagagttgttattgtttgctttccgagtggacaacattgagatttgaaaattgttaagtattaaaatagaagaggagcatattcattgcactcaagacagttaaattttgtatgcacacctttgaagtacatagaacaaaatgtcagtgcttcatctataacatatccttcaacaatagatccttctgtgtgtgtgctttattcctaacataattttttaactttttcatgtatctttcatatggatacatccatctcataaaaacttgcccacgtaatatggcttcctcgggccaatgtagcacccaagtgtatcatgatattaaaaaatgttggaagatagatcctcttaagtttgcacaaaatgtgaatgagatctccttgtgccttctacatatctttaaaattcaatgtcctagaacataaaattctaaaaaaaaaattgcacaattctattatgtggcttgatacttccttcaacaaaaacttgtcaatacaaactggaagtaacctctacattatgacatgatagtcatgggatttcaatccaataatatttttattagttactctcttcttcaaagtcaaaaaaaacccatctggcaatttaacttctttcaaaaatttataaaacacttgcttatcttcagcagtcaacacataaggggcatgaggtttcagcaatcttttctgagcatctttgtaaatccataaggattgacgaactcccatatttttcaaatcttatattgcactagtggcgtctttagacttgtcataatttaagagggtgccaaggatactatcacaaacattcttttcaacgtgcataaaatctaagttgtgtttcaactcatttgtactccaatactcaagttcataaaccatgtttttttcctccaatcacttttagtgtcacctctttttcgtttccccatatcccgttgtgataacgcattcacttgttctaatatttcaaaacaagtaaatcatcttagaggaagtctcttctcaatgtttccatcaaattcacagttctttctcatacaatgattggatggtaagaaacatctatggccaacataagggtcttaccaatcactcgaatggaactatcatcctcgtgtcatgtaagacaagctttatatcccgggccactccatccagaaaacctagcacgtgtggcgaaatcattaattgtccaaaggagagttgcgcacatcttgaacattgaattacttgtagcatctcttgttttaatcccgttattccacaattcattcagctagtggcctcaaaaatacatccatgtccttaccaggtgatttaggtccaagactaaggagaatcaacaagaaattattatccttcatacacatccacagtggcaaattgtaatttgccaacactacaggccacatactatacaattggttcatgtttctaaaaggattaaatccatcatcagctaaacctaatcaaacattttgcggatctcttgcaaaattaggatgtctgcaatcaaagttttttcatgcagcagaatcgacaggaagacgcataacaccattttctttcatgcgcccagtaggatgccataccacctctttggctgtacatcttgaactatataatctttttaatcgaggagtcaacggaaagtaatgcatcatcttatgcgctacttttatccccttgtgttcatattaatccatctattggtcccacacaccgggcagaaatctttcaatgcatgctaatagtaaaataagcaacaattattcttgcacacacgaattgattcgtaccctgggcctaatttatctagtttcttctttgcttcatagtgtgttgcaggaattttcttatcctttggaaatgcaaattttagaaattttaacaattcataaaaaatataatttggtattttctctaaaattttcaagtgcattaactttgctataaaattgagggaggatatccaatctcaactggggtacaactctgtctcgatctcttcaaacatctcatcataatattaacccttcttaatcccatcattggtggctttttcttcatcgtttataggagggaagaaatcttcaattacatcaaccatctcatcgacatcaacattgttgttagcctcgactagttcat

SEQ ID NO: 129395 - DNA, 1172 bp, Cannabis sativa
tccattttttatctatgaaatagtaggtttggccaccgtactgtcaaaattgtaaaaatggctctaattgtaatattcccttaattaataaagtttttctgatgtttgcactgcatattatcttggtaaatctcataaactgacctttaccaattctaccaccacttacattgcactcttggaactgttacatttaaacttatgggcctctgttcctataaattcatctaatgtgtatagatattatataagctttgtaaattcttattctaggtaaatttggatctatatgttaagaaccaaagatgaagctttacctactttcattaagtttaaagtacaaattagattacagttaaggtgttccatcaaaaccttacagtctgattggggtgatgagttcagggctttcactcattttcttgaaacattaagaatagttaataatctagctttttcccatacaaatgaacaaaatggggtaatggagagtaaacacatacatattattgagacaagcataactctcttagctcaagcatctcatccattaaaactttgggatgaagcatttagaacagtagtgtaccttattaacaggattcctactcctaccttacatatttctaaccgcttagaatttttatttgataccctctgattaccacatgctaaaagtgtttagttgtattggttatcctaatctaagatcctataatagaaataaacttcagtacatgtctacaccttgtaattttctagcctataacatgtcacataaggggtataagtgcttgtctaaatatcatagactctatatatctctagatgttgtgtttgttgaggtttatttttcctatgctcaaacgtttacctcctttatccaataccactcattttccctctaccacttctgctattctgccattttcgtcttcctcaatctctgcaatccaacgccaccagtatctcaaaatgtagtccctccatctttatcacctccttcatctccaccagtctccccaccgccttctccacatcatgagtaacctacacttaatcctgctgagatgcttgatgaaaatgtacctattcaatacagtccatcaaatatttttcctccaagagttacaactgcttcctcattgtaacgtccccgcttcaagcctcca

SEQ ID NO: 129396 - DNA, 2205 bp, Cannabis sativa
  modified_base (483)..(485): a, c, t, g, unknown or other
  modified_base (690)..(696): a, c, t, g, unknown or other
atttgttaattaagagacgttgttaagtctaattaataaataagttaaatagcaattttatttgataattaattttaattattaaatagataatttttacatttaaaggattgaatggaaaatgtggcatttgtgaaaggaaagataaactattgaataaaatggcaaaaatctaactagtggagcccatcttatggtgggccacttaaggataattttagcaaattttttatcattttttaatgtcatataatttaaatctaatcctaggaaaaatcctatataaggaataagatggttcccattctatccaactcaagtttacctagttttcattctttgtgagacaactagaaaacttgagaacctccttctatagaatttgaatctcccttctttcttcttcataatttcgagccttatagtgaaagagtgcatcacccatagcaagtctagtactcaataatagtgtgtaagactgtnnngaatccaacacctgaaggagaatcaggctcagatcttgataatactctacaacagaatggaacaagggttggagatgtgagtggaaggagacataattctgctgcggtcaatgtaagatttcttgaactttatatgtgtttaaattccattgttttaaaagattcatatttaggatgttaaataacatatttgttagtaaatctnnnnnnnggtaaaataattcccaacatcttagaggtgtccacggtggttctccgtttaagtgaaaatttaggcctaggttaggtgcatcatgggtcgacgatggtgtcgtttcggtggaaatcgtgattgaaaaaagaaagaatgagtgagagggaaagagagacagcgcgagagggaaagagaaagagaaaatggggagtctaggtttttttgaataagaggggtgtaagatttggtgaatgaattatgtattttactcgatagaatagtatgtatttatatacaaaattagagaaagtaaacaggaaactagagtaaataggaaactaactaaatacatttaatataactaatatattctaacacttttcctctagagcataaatgttaatcatgcacagcttgttacaaagagaatcaactcgcaccccatgcaaagcctttgcaaaaatatctcctattgtgctcctttcttcatgtattgtgtgaagatcagaccttgttaaattttctcacaaaaaaaacgaaaatcaatctcaatgttcttagttcgatcgtgaaacacgagatttgaggcaatatgaagagcagcttaattatcacaccataatgttgctggaacgaaagttttaaacccaaatttagtcaaaagttgataaattcatattatctcacacagacagtgtcatagctctatattctaattttacactggatctagacacaacattttgcttcttactcttccaaaagattagattgccccaacaaatacataataacctgaagtggatcgtctatctaccttggagcctgtccaatttgcatcagagaaacatttaatctggatgtgtccatgatccttgtaaatactacctttttctgatgctcctttcaagtaacacaaaatttgttctaatgctcctcaatgatgaattgttggagaagacataaactgactaataacactaattgagaatgcaatatctggacaagtcttagttagataattcaacaatttccaaccaatctgcaatatttcttaggatcttcatatggttcccgatcacatgtaagatgcacggcttgatttattggaatactacaaggttttactcctaattttcctgtctcatttaacaaataaagtacatacttcctttaagatagaaaaatatcttgtttactctgagtaacttccaactcctaaaaaatacttgaacaaccctaaatcatttgtgtgaaacagggtatgaatgaaagacttaaaggatgagatgcctctagtatcatttccaataataatgatgccatccacatacacaactaataaaatgatactagtagttgatcttttatagaaaacataatgatttaacttactttacaacaaaccaaatttctcaacagcctaattgttgttactgatatttcgcaacaccaaaaagtacaatttaactggaaaagaagagagaattatttgagagatgacaagtgcgagtattcgacctagaa

SEQ ID NO: 129397 - DNA, 801 bp, Cannabis sativa
atataaaacaaaaaaataaatcttcctttttgcttagtgtagacgtaggatgaccataaaaatgtgggtgtgtacatctacataatgaaagaggtttttctatttgttaaactcaaagttggaaaaaattactagttaagagtctctcatgaaaatttatctctgttccaataaattttgaattaagtctaaatttttgtatatataagattcaactcaatcttgggagatataaatatgttcaatgctatatataaatatatactcatatatttcaaaaagtttatgaatcaatatatatacatataggttggagaaatttgtttagggtttgtttttgattatgagcatttgggtatttttttattttgtttgagtgatatttttatgggcttgtctgtgggcctagtttttttttaaaatatatttgatttcgataaatttgtagtctctattttttagttgagtgctagaaaaagttgattgtaggttatattttattgatgttatctttataaaattgaatgctagttgactgtagatgttacttgttgagaattgactgtagatgttgctattttataggagtgaaaattgatcgtaagtatttttgtgagagtgagaattgaccgtagatgtattttacttgtgcaagtaagaattgaccgtagatgttttctctatttttgctatgaaaactgactgtgggttttctcttacttgaacaaattgactatgaattatttttttactctcacttgtaaattgattgttggagtccacttatgttttttttttttt

SEQ ID NO: 129398 - DNA, 1097 bp, Cannabis sativa
ttaagtttaaatttctgctcttattcttaataatctcggcttagcgggattaggttatgtttaatggttaatcgtaatgtgcctttctttagggcgtgacacccttagtcacacaatcatattagttatgttacccataaaagattttgctggttttgtgaatgaatccatcaggttatatttcgatatgatcttcaagattgtcacatcacctctctattatatttttaagtagatggtacttcctctcaatgttcttgcccctgttgtggctcattggttccttagagtcagccatcgctccactattgtcacagtaaagcactagtagttttttttacttttagaaccacttctaaagcagtgtagaatttcttcaaccaaattatttttttagctgcttcacaagctgctatatatttagcttccatagttgaatctgcaatactggcttgcttaatacttctctagactacagctccttaaccaaatgtaaatactcacccagatgtcgatcttcgactatctttgtttgatttaaaataagaatcagtatatccagtaggatctaactccccaccagaatatacaagcatgagatctctcattctccaaaaatacttgacaatgtgctttacaacaatccagtgttccaaatctggattagattgataacgactaataatccctacatcgtagcatatgtcaggccttgtacacaacattacatcgctcccaactgctgatgcataagattactttctcatgtcaccttcctcttgaggagtatttggacattgatccttatatataataactctatgtctggactgtaaccgtcctttattggaattctctattgagaatctttctagtatcttatcaatataagttgcttgagaaagtgctaatgttcttcgctttctatctctatgaattttgatcccgagaacatatcttacttctcctaaattctttatttggaatttatcgactaaccacttctttacatttaataacatttctacattatttctaataaatagaatgacatcaacataaaaaattaagaataccactacattacctttaatgta

SEQ ID NO: 129399 - DNA, 1216 bp, Cannabis sativa
agtccaattccctgtggttcgacctcacctgcgtgagtttactacttgattgtgtatacttgcgtagtgatcataattttcgtaacactatcgaattaaaacaatatttggtcttattttttaataatgtggctttgtgtatgtgtgcttttaattaatttaaaatttaataatagttttagaggaattcaaattataatggcatatcttttactttgatttagtattatactaattgttatattaaaacttgaaattcatagctttagccactttttattgcatttttctaaaaaaaaaattataatcttttgtgttgttagagaatatttagaggaatatctaagtttggtgaaaaatagtttgattgagaccaactaaaaggtttaacttatcaaattacacaaattgataattctcaattctatgcttagatggaaaagaactagcacaacaaataaatatataatattagacgtacaaacattgggtagttatttaaggtttcatatgacttgtttgtacatgtataccaactcgggtctcattgcttttttgagagtttcaatagtagaattttatcatcgcattgtcctttcataattctattcaatattgtttgatttttctttgtgctgaaattaaattagaaatggagttggagtctttgggttgtgtctctacttgtgttctttataaaaatagaatattatagtttaattttcaacctgtttattacatttaaattaaattaaataaatgattaaatgggtaatgtgaattataagttagaaataggaaaagtaggaagtattagtgattaaattaaataaaagtttcataagaaatgatacaatgacaaagattaaagaacagtggtagaaattacacctagtgataaaaattttagatatgaaaattttaacacaattttttgaaggtgttaattggttttctaattagttagaggtatacatttactaattttctatttaaattaaatgcacaattttttgcaagtgttaattggttttgtatgtttaaaatttttgggaatgtctaattatagtttcaagtctaatttttttttccttgttgcaaggaaacatgcgtggtgactatggaagcggatcctctgtctaggattcctgtccattttgctgtccacccaattaaaatactccatgtcattaataaattaacagcaaaactctaa

SEQ ID NO: 129400 - DNA, 526 bp, Cannabis sativa
  modified_base (82)..(103): a, c, t, g, unknown or other
acaaaagtggttacagaatgcatttttatttttcaaaaataaaatttttaaaaacaaaatttttactttcattttgtgattnnnnnnnnnnnnnnnnnnnnnnttaccaaacgacacctaaataattaaaaaattgtgtgagcaaacaaattaatagggacaatgttgctgccaaaaaaataggataatttcataaatacttaaaaataataaaaaaaaattacaaaatacagttgtatgaaattttaaatatgtttaaggttttaaaataatatttacaaaaaatacgagctttttatattttcatgttatttttatgttgtactcctattattgtgttgttgttttgtttttgtttttatgtaattttttagttagttttatgtgattttcttgttgttttcgaatgacttgtaaaaatattaaaaaaaattggcactgaaaatgtaaatttttttttaccaaaaacagtattagtaattggaataattacataaggcacaattttttgtaaaatatttacatt

SEQ ID NO: 129401 - DNA, 1440 bp, Cannabis sativa
catatattttataaatttatttacttagtagaattaataattttattctaaattgaaatacatatataaatattatatttactcaaaaataattctattatcatatagcattaaagattatttaatgttattgttattacattgatatttttttggtgttttgaattttttttcttagtgtaactttatttagttataacctcttaattagaatataatttgcttagtccaagtgtaatcttgaataaaagttctactgtatctttattttaaaatttgtagagagataatttttttatactttttttttttaagtttttacaaaatactagattttggacaaaagtttacaattttactatcacataaaattttttacaaaaaatgttgtctttttataaaacaacaaaacagaacaattaaaaaaatagtagaacaactaaaaaataaccgtgaaaatttaacacaatacacagtatttttgaaaaaattaattccgccccacagtaaaaaaacaaaaaaattgaaaattttagtatggaagtaaaaattccttttttttggtaagtaagaattttattgcaaactaccaactttttacaaaaaacaacaaagaacaactaaacacaactaatgtgttgtacttaaactatcaaacctttcaatatcctctataacattctcttttctgaattgataaaatctaaaacaaatctctcttttaattctatttacaagaaaattcgtagtataaattcgagcattccacaaagtattatttcttgcatcctaaatattataaaccaaggcatttatcaatgtaatacacctctcttcttattaacttagacctcctacaccttttaatccatttcagactatagaccaactcacttttctgaagctttataccaacccaatcacacagctcataaaagatcattttactataaacacaattgaagaagaggtgttgatgagttatcatatcccattcacaaaaaagacaactatccgagtcaatgacaccaaatttacaaagctattgtctagtttggagtcttccccaacaggccacccaagtaatgtgtctatgttttggagtactttgcctattccaaatgatattaatccacctcatttcaaaattctcttctggtcagattttggaggaaatgttgggaatattgaaggtcatatttgtttgaactctatagttcctattttgctttcgataatctccttgattataactattttcctgtagtaccaactagaactttgcagagcgttataaccccaccaatcttgctctttaatgtagactgagtgaacccaaggaacccaaagattatcttttttatggcaatatcccacacatacttgctaatagctcccatattccaaacatcaatgtttctaaggccaagacccccttta

SEQ ID NO: 129402 - DNA, 2467 bp, Cannabis sativa
ctctctctctctctctcaccaattgaagcttctttggttttcttgagattttggttaaaaaatttgtgtcttggagttaaatctcgtagaaattattggtaccaactgaggagcacttgaggtagttcaatttctataatttcttgttgttttaaattcataaattggattattagtatgttattgtatgccttgtgtaaatgatcttaaaatgaagtttatggactggaaaactagattttttttgtgattttatcttttgatcttgaatctaaatttgggttaattgttagttgtattgatgttgtgattaatgtaatttttgccatgatttttatttggtgttcttaggagctttaaagattttgatgattgtgaattgtatgattttgagttatttcttttgaagtgtttaagcatgataatttgaagtatggatgtttaaaaacactttggtttggtacagaaatcaattactaagttttgttagattttgatatgaaatggtaaatgttctgtttttgtaaaaacttgtttcttggtcatttttgggcttttaagcccattcgccacgactagatatagggttatcgtgagaggctcgaacccagaataagggttagtccctgcccaatctggtcgcagtgagcttatatctagcagcgatgataaatggtcccagccaatatgcggcgagagtttaattttacccgttttgtttcaagcataaattttgacttcgaactccgatttggacgttctatatatcatcagaaagctcgtttcgagatatattacttggtctagggttgaattctgaattgtgaattgttgataaatatgattttggtgattaaccctattttgtgaaacccaaaaatggtgactagggataccgacgcttggtcagaattacctatagattgagatttctcaacatacactaaaaattaggtaagaaaatgaactaagcatatggagaatagcgtagtggcacaattatatgttgtttgattgctattataaatcgtgaatttggattattaccctaagtacgtactgtgataaataggcaataatatgttaagtgaataaatgagtagagttatgtgagtaaggcataactaggttagactcgatcactaaaactgagataaaccctagtaagaccttatatgtaagaaaatgtgtgtgagcgtaacacgtaggtctatgttatatagagattaattataatgacattattatatatgaaataatgcgatatagtgtggtggcatagttatatacgcagaggcgtgatgtatgaaatgtaattattataattgttcatatcgtattattatactgtcttgctgggccttggctcataggtgttcttttgtgcaggcaaccatgagttcgagggttttgaagatgacttgtacatgttctggccaagctagaccacaagggttgggtctattagggaattgtatagaaattccattttgctgttaggtcggcctgtatgaaataacttgtaatattttgaaaacaaattttacgagatctcagatatgtaactttaaatattttggtttaaaataaagtgtgtattattgcaagttatttatttaattaagtttaatatttggtttaaatcacttggcttatggaacccgattaatgggattagtatattgtaatcactacacgcggtgttcctctaagtaggacattacaatttggtatcagagccttgacccaaccaaaagtgtggcacgaggacatcggacctccaaagaaggggtgattgtgacagtcagtagtcccatgatttgtaaggagaaatgtcgggtaagctgtgcaattccacatcacttgaggaaggtcaagtgtgatgattttgagaatatgtaagcatgggactacacaactgaagagggcttaaatagattgattggtactacctacatcataaggtgcatcttgttttctagcagcccatcatgaaataactccacagttaagcatgcttgagcttaggtaatttcaggatgggtgacctcttgggaagttttcccaggaagcgcaagagtgcgggcaaagcacgctatgaataatcatgttagtttgtaaggtcagttggtcaagtttaataattctaagactgtgttggttgggactacatagttgaatatggcttaaatggattgattggcactacctttattaacaagatgcatcttgttttttggtagcccatcatgaaagaaactccacaattaagcgtatttcatgggtgacctcctaagaagttttttcgggaagcgtgagagtgaggacaaagcacactaaaaatactcgtgttagtttgtaggatcagtcgtcattctaagaagcaatcatagtgacgtactcatgtataagagccataattttgtgggtatatgggcctaatggaggcttgaagcggggacgttac

SEQ ID NO: 129403 - DNA, 803 bp, Cannabis sativa
  modified_base (127)..(137): a, c, t, g, unknown or other
tattatttttgggttgtaaaattccttcaacaacaacgtatataaatgtgtcacgtaaattgtacacatttgctagatcagtgataaaataaattcaagaaaaattatgtattattattattattannnnnnnnnnnattattattattattattttcgagtgcaaggaagctagtacttcatttacattttcatggggctttcatgtagtaaaataaattcggacaaaaatgtattattataatttttcaatgtgataatagttgaggagacaaaatattctattataatttcacatcctaataagattccaaaaaataaaagatgatgggaacaaaatgaatcacttaaatatttggattaatcttctatttctaacgattttagagagattttttagtatatgcatgactcatgagtaatgatttttacttttatttttgtaaaaatatctagctaaaattggataacatgccttacaaaaaaaattggatagacattattgtatacatgttgtgtataatataattgtgcttattactctaaatatattacaatatttttacatctctaatggtgttacatgtgggattattaatttatttagcaaagaaaagatatataaataattcataattaaataaaaagagtaattctttcaaggagaaaaaaaagatcaacagagtaatgatctcgcttaattactaattctttctaaatttaataacaaattttgcgtattcaggaaataaaaaaaaaaaaaaaaaaaaaataaacaaattaagtgtataaacattaaaata

SEQ ID NO: 129404 - DNA, 1171 bp, Cannabis sativa
tggcccgggtcacagatcctgaaatataacaataagattaataagggtaaatattattttcgaacctgtattttgtaaaagttattagttagactttctgttttgttaaatgataaaatatacttggtattttaaaattatacttaataataatctaatctagaaattttatgataaaactggttatatttttttgtatctattcgtgttagaaattgtcttaaagttagttatagtaataaataaaattgttgaaaattgagttcaggatcctatttttatcattttaaaaaatatagggtctattttgttatttaacaaaacaaagagtctaattggtaacttttaaaaaacacaaattctaaaatagtatttacccgaataataatatcataccttgtaatatgtataattgtccctgtaaaagttttgccctgggtgcattttttgacatgatttaacaagattatttgaacttgctatgtacttgggtttcagtttcttgtgcctccttttgttatttcctattcctaccaataagaagtcaaaaaaataaataaaagatgagaagaaaggagtttctaaattagtgtcttttctcatcatttattaagcttagctttaaatttttaaatctcttatcacttaactggttttgttttttatgcaatgggagaattgaatttgtgtctcagccttgtaaaaattgcatggtgttgtctctattctctttgcattcattttggagattttttattttcaatttaatttcttttacactttgtaaataaaatattaaatttcatcaataaaataataagaattttcttttttttttttaataagtagttagaaacattactagctagaaacattattaagatttacaaacggtgaagaatcttcgcccaaccaagtaagctcactgtctaatttaaggatataccattaccaacatgagacaaagaacttttttgaaaatttaaagtaaaaaaattctcaaacagaatactttattttttcagtttttttttttaaaaaaaatacttaatttttttattttatcaaacataattggaataattacataagccactattttttaaaaaaaaaaaaactatatttttacatttaattttttttttttacatttttacagttttccataaaa

SEQ ID NO: 129405 - DNA, 599 bp, Cannabis sativa
  modified_base (538)..(565): a, c, t, g, unknown or other
attctccaccttgacttcaattgtgtctaggaattcaatactttagaaagcatagcatatcccaaaagacattaagtcgagatctgcaacagattgagacaatgttgaaacttgtctcttggtaaagctttggtgagcatgtcagatggattgtctttggtggagacctttaggagcttgacttttctatctaatatggtgtttcgaatgaagtgatacctcacatctatgtgtttggttcgttcatgaaacacttgattcttgctgagatgtagagcactctgtctatcacagaagatctctacaatttcatgccgaatcccaagttccctggtgatgcctttcatccatagagcctccttgacttcctcagcgcattcaatatactcagcttcagttgttgagagagaaactatggactgaaggtttgccttccaactgactgtgttattgttcatcttgaacacataaccagtttgggattttctggaatccaagtgttgggaattattgtaccagaatcttagatctactcacnnnnnnnnnnnnnnnnnnnnnnnnnnnnaactttctaaaatgataaaataaacacatataaa

SEQ ID NO: 129406 - DNA, 830 bp, Cannabis sativa
gtcacgtggtaatttacttaggtacctataaaagttctaaaattataacttatgtattattaacgctaaaaattaaaattagttatttatttgcaactggaactagttaaacttaaatatttatgccacaaattactttatatatattttatattttgtgagactaattagtggattagctagctagtatgcattattgcaattgatcgtactgtaactttcgaccatgacaataataatgaatgtgatatagatttataatatataattaataattaataattaataattaataattaataattaattagatgtgtgtttttaatttaatttttgttcgccaaatctttcctgttttagtatgtttgttcaagttgatatttgtttaatattaattatatatgtaaatatttataatattttggaaaagggatttcattcaaattgaaagaaaactacaacacaagattaggcaagtctgcacagggcctgtgcatagagaagaatatcatcaaaccacacagggaaaaatacatcaattaaagccttctaccccaaagtgagttggaaaatttccagccctcttaacatgagaaaaaccaataaaagaacaaccttttactagcctacgcacatcatttaggatgtctaaatgttaccataatcacggagaggagcaaccacggttgtgttgagtatttttagccaacgacacgaagtcaagaaaataacaattttgttataaaataatataaaataatataaagtagacgagaagaaagaagaagaagatgaagagagaaagagaaagtgaatgagaatttctgagt

SEQ ID NO: 129407 - DNA, 1096 bp, Cannabis sativa
ttggaggttatttttacattttttttaaaaagcatataaaaacaatttatgctttttttaagtatataatgtcaaatttcccctaattaaatatacaataccaaatgataattattatgacaaatttatactcttattagaagaatgcaatcttcgccttacccagtaccatggacaatgtctagtgaccacctattcaaggtccctaaccctgaaatccaaatccaatgtgggattgaagttcatgtggatctcagcaatggatcttgacgtttgatactctcatcgtggccatatcatttcgtttcatttgaagatctcatggtgcagatatgcactcattgttcacgtagcaatggtacgttaccattcactgataatgagaaaaagtactttttcaatctagggactatagaacaggtatttattccttggcccaataatggttcttcaggttctccatcttcatctccttattcataattttttctttttccatgtaaattatatacaattaattcttttattcatagattttgataattgagatgtttttaattgagattttagtgtgtttcaattattttcaggcttattttatttcggtgaatttaagactggtttgttattttggaaattaatctggcattcataatttgatgggtggtttctcgagtgcactgtatattttaatatattacatgcatacaagtattttttgctttgtgtcttggttctactttggcagtagttgtatgaattcatagagatttgggatcctcctcaactacttttctctaaggctcgatcaccattcaccgaccgttcttagtcttgtttccaccagacccttgaggatgggaggcttagatttcagtgttgattttgctggaagcaaaggtgacgcgtgatttaagcatggtaactttaatattgagaaattatcgataataccaattaagcaagaaaggaaattctcgatgaattaattcagtatttataactatattaattatatttatagtattatttaaaatatatttatttttgttagtcaagctatttttttttaataaacttagtaactttattaact

SEQ ID NO: 129408 - DNA, 958 bp, Cannabis sativa
tcttaattaattattatggtgctcgtctatgtagatgacaacctctgttgaactttaaaagtttattataagactaaataaagccttctctcttaaaaaccttggccacctgaattacgtcttgggcataaaaatttactgagacactactggcatgtatcttcctcaaggccactgcccttaaaccatgtctaactcctatggctgggggaagccattgtcctaatttaatagagaagtccttgaaaacccatcatattacaagagcttaattagagcactccaatatcatgttcacacaagacctaacataacatttgttgtgaacaatttaagtcaattcctcatgtgtccaaaaatagttcatctcaatgatactaaatgaattctcaagtaccgcaaaggaacacaatgtcatggcttacacatccaacacaaagacagcctgagtttgattggatgttcagatactaattgagcttgttgtccaaatgatagaaagtaaattgatggttattgtatttatttttgagagtctttagtttaatggtcatccaagaaataattagtggtatgtaattagaatacaggactttggcacatgtttcagcagagataacttggcttgaatccttatttaaagaaatgaatttttctctgtcattcatctcagtaatatggtgtgataacataagcgcaattgctttggcctctaatcactacaagaaatgccacttttatcagagcatttttgctccagcaaagtaggtatattgcgctagcaaacttttaccggtgcatatatgcgtcggcaaaggtttttggcaaaacccctctggtaaaagactttttactagtgcaaaatgggtcaaaacttgtattggaacatcaactagacataccacggacatatttgaggtatcagaatcaaatttggagcaagttcatttttgagcac

SEQ ID NO: 129409 - DNA, 2117 bp, Cannabis sativa
aataatataattcctcaattaactcataattatataattagggttttgctaatccttttcttaatcccgggtgttacaactatcatgcgagcgagcaatgtcacaaacaatctacgttgtattttgttccccacatcgctagttggagcagcgagcagctggttcaataaatttactcatcattcaatcacttcatgggaacaattgtctaaggacttttaaaaacagttccaggccgcaagggataggcgacccaaagctttctcgctcaccaacataaagcaacaactgggagagacgcttaaggcctatttaagtcgttttagcacaaccactacaagggtgaggaacctagatgatagtacccagcctactactctccaggcagggatcactaccaatctctccactactggaggtgaactttaggattatctacagggtcgcccagtgaaaaacattattgagttcaatgaaaatgcccaagtatttgttcgaaaagaggaagctaaaaatgagatgaagttgttgtagactggctcgggaaataaacccagcaatgtctcaacaagtatcgtctcgaccaaagctgataacccaggaacctctggttcaaagaggaaagacaactctaaggggtcagctaaagacaagaagaagcaaatgaagcatgacaagtatgtgccgatttacaccatttacactgagcttaatgaaactcgcaaaaacattaatctcacgcatgagcatagggtggcatttataaatctgagcccatgagacacatgagacataagagagatgcaaccaaattttgcaagtaccacaaagacatcgggcatacgacagacgagtgtcgtcaattgaaggatgagatagagagtctcatcgcacgaggccacttcaagcaatatgtcaaaagacagggcaatggacataaccagcctaattcgcccaacaacccaggcaaccaatgattacaacctcctcctgttgaaggagaggatatcatggttatcttgggagggccacatattgcagcaaagagcaataatgcccaaaagaggtatgtgaaggaagtgaagaatagcaatctgcctttgctccagaaccttcaaagaaagcaaagactgaagaacctccaattatatttttggaggaagatgaaaaagacgtgagatatcctcacgtcgacccattggtaatcaccatccagctcgccaataagagagtaaaaagggtgctggtggacaatggaagttcagtgaacatcctttatagggaaacattgaagaagatggggcttgaaaaacctaaattaagaccttgcatggtaaatctttacggatttataggtgacagtgtcgccagtcaaggaataattgagctcccattaactttgggtgaagcacctttatccaccacaataatgcaagattttttggttgttgacctgtcgtcagcttacaatatattggtgggtcgaccagtattaatcgaactaggggcagttagtttgattaagcacttatccctgaagtttcaaacaacaatgggtgtgggagtagtgcgaggtgatcaaatgctggctcgcaaatgctatcacatagagctgcagtagagaaaagctggtcactagctaatggaagtcttgactgaagaaggtgagaagaaggatgaagatcttgatcctcggatttaagatgaaagaaatttattgaaaccaattgaggagctagaagaggttgttttagatccaggaaatcccacaaagtgtgtttacattgggaagaacctgaatgaacaactaaaatagcagatgataagctttttgtaggcgaaccaagatcagttcacctggagccatggagatatgatagggattgaccctaagattatctgccatcacttaaatgtcgatccgaattacccagctaagagatagaagaggctacccttggattctgagagacaaggggcactcaaagaggaagtgaatacttattggtcaatgactttatacgcgaggtgttttatccctcgtggatatccaattctgttctcgtcctaaaacccaatggaacttggagaacttgtattgatttctctgatttgaa

SEQ ID NO: 129410 - DNA, 672 bp, Cannabis sativa
atggtgggatgctttccacattcacccacatgggggttttatcaaacttgatttcagcaggtgtaagccaagctggccatggcataattactattagagaaccacagatgaaccatggtcttctggccagaacgttcaaagcatcgtctcgattcgcaaaactgaattggataaggccttcctctaattccttccatttccaccctttaatggcattccatgacattttgagagatccttggatggcagccttcccatatttgtgtttactgatgattttccctaataatactttgtttgcctcctgaggttcatcgacctcacagggattaagtttaaacgaaagttcttcttgagagatttgcactgaatcctcgaagaggtcactgaaaccagtcgggtccataacaaactctggtagagatttgggaacaatgcaaagctaaaaaaaccaaaagtgccaaaagaagagcaattgcagaacaattctcttaacaactccgtgaagttaagctcctagagagcatttcctaaaaaaaaaaaacttcattgagatatttcatttattagaatagaaagagatgaaactatgaatagaaatagaattatcattttttattactactacttaggaaaagaatatgataaatacctcaaatatttgaaagcaaa

SEQ ID NO: 129411 - DNA, 1685 bp, Cannabis sativa
tgggttactatactggattttctgctgattatatttatgtgtgtgcaaagatagcacttaaccacttatgttacaatagtattacgcacttgacatttagtttgaaggctatcgctataattgttccaattatttccttagctttgtataggtgttaatgcaattctcttctctacatttttctcttggtagttgctttttccttacaaatttgtctccatgaatttataatttgttctacaggtgcaaccgacaatgttgcattttggaagatcaaataaaagtgacttgtaataaatacatatgtacataacacgttgaagaattattccaaaaatattctagataatgttaaaaaatatttataaaagagcattgtattcactacaaccaaatagttatctaataatgctcgaaaactattcaagatccaagcatttatttagagagtatgaatagttaggaaagtatacctcttgcaaaaatgtctaagtctaaacatactaacaatatgctggagagagtagagtagtaaagagacaattatggagcaaccacttggtgtgtaaccattcaattaacacacattatacatccttaatttatatatatatatatatatatatataacatatttaatacccatctaacctaaaaagggttatgtagtttattgggttaataaagattaattgatagtggactataattcaatgagccaattatagtcatatgggtgctcttatgtgcctctaaaataattaatagttattaaccatcccactatagttgttgagaaatattgtgcacataattaatgattgtaattatggtattatattagtccacaaatgaatagttttaacattctcccacttggataatataatcaatcaacataacattgtctatcacacataaggtaaccaaataaattgtacataatatcatatcgataggatacatatattacgtatgaattgatcttgaagatatttgatacaatagcaatcattaatactcaaaccaaacatgcatgaggtacaacaagttgagattgtgcgcattcatctccctttgtacctgtcacttcagcaaacaacactgtatatacataaatatgacaacaacaacgataagtgactacaatatcattatgcatgtccaaaacacaagccatgaacattccatacaaaatactaacatgtttaatacacaataacgaaactccctcttagctcaacaagctaggctcctaacaatcctattcgagcaacaacatgctctacaaatacacatatgggtaagcctttcgttagtgggtctgccaacatgttagtgataggcgtgtactcaatggaaataagagactcagaaactttctctttaacaaaatagtactttatgtcaatgtgttttgagcggaaagtacttctagcattcttagagaaagtcgctgttgtagaattatcacaatacaatttcagcggcctcgagatagagtccataacacccaatgctgaaatgaagtttcacaaccatattgcttgacaagtagcctcataacacgccatatactctgcctccattgttgaggatgctgtgagtgtgtttgacactttttcacgaaacagctcctctagccattataaaaatgtagtctgatgtggatttcttatcatcca

SEQ ID NO: 129412 - DNA, 564 bp, Cannabis sativa
aaaattaaaaacaaaattaagtggaggcatcgggaccctatcggacccatcagaccccttaatcgggccatcattttaaattaagtggaggcatcggacccctatcggacccctacatcgggccatcatatgcaataattatgaaaatttaatattgtaaaggcatcgggccaagcaaagtatgcatcgggcccctatcgggcccagacatttacgaaattgaaaggcatgcatcgggctctaaatcgggcccctatcgggcccaggcattttcaaaattcaaaaggcatacatcgggcccctatcgggccccctatcgggccaggcattttacaaaaatcaaaaggcaagcatcgggcccctatatcgggcccctatcaggccaggcattttacaaaaatcaaaggcaagcatcgggcccatatatcgggcccctatcgggcccttatcgggccttcatcttcaacacaatgtcatcatattcatcccgatgcatcagacctacatcggacctgcatcgggatgcatcaggccaacttggaaaatttgaaatcttacccaaat

SEQ ID NO: 129413 - DNA, 815 bp, Cannabis sativa
gaatctggaattgtgtaaggcatgtcaattaggcaaaaaccatagactcccctatcccttatctacatcccgagccaagcagcctcttgctttggttcacacagatttatggggaccatctcatgtcccatccaaagaaaattacaaatactacattgtttttgttgatgattatagtcgtttttcttggatatttcctctcactatgaaatcccaagcttttgaaacctttattaggtttaaaagccttgtggaaaaacagtttaatttaccaattaaagctgttcaagctgatggtggaggggaatataggccttttgacaaattcttgagtgatcaaggcattgttttcaaacaaccttgtccccatagtcatgctcaaaatggacgagttgaaagaaaacatagacacataactgaaactggtttaactctattagctcaagctaatcttgacctttcctattggtggtatgcatttcagtgtgctactcattctattaatcgactgccaacccctgttcttgataatattagtccttatgaatgtctttttaatgagcaacctgattatactgtttttaaaccatttggttgtgcttgctatccacatttgagaccctataatcatcacaaacttgagtacaggtctgaagagtgtatttttctgggttattctccaaaacataaaggttacttatgtgaaaatgctgctggaagggtgttcattgccagaaatgttgtttttgatgaattgtcttttcctgctttcaagcctcctattacttcctcaaatgcaacttctgaagctccaa

SEQ ID NO: 129414 - DNA, 1193 bp, Cannabis sativa
gttggtgcgagaacggttccagagattttagattttgagttgtggcatcgtcgtctcaggcatccatccgatagagttgtcaaattagttcctgctatttcctccagtacttctcaaaagaaattgaataaagcatgtgatgtttgtcctcaagcaaaacaaaaacgtgatagttttcctgtaagtgatagtaaagcttgtcgaatttttgaacttattcattgtgatttatgggtccccaataagataccctcttcgtgtggagcacattattttttaactttggtggatgatttttcaagagctgtatgggtttatttattgcgttcaaaatcagaagtttatcaaactttttgttcattttttgctatgattgcccgtcaatttgaaacacatgtcaaattagtaagaagtgataatggtacggagtttaaatgcatgtttgattattttgacacaaatgacattatttttcaaacctcttatgttggcactcctcaacaaaatggttgagtggaacgaaaacatcatcatattcttaatgtgggtcgtgctttgatgtttcaaggaaatcttcctattactttttggggagaatgtgtgcttggtgcagtgtatctcattaatagaactccttctggtttactccaaaataaaactccatttgaaattctctttggccacacacctgcctttgatgaacttaaggtctttggttgtttagcttttgctcacaatcaaaatgctaaaggtaataaatttgctcctcgaagtaggaagtgtgtttttattggttacccatatgggaagaaaagatggaaattgtatgaccttcagactggtgacatctttgtttccagagatgttaagtttcatgaaaatgaatttccttacgcgactgcttctacttctcaagtgcccactccttccttgccgacacctgattctaatgtggggattaatgttgatttttcggatgacttggaaaatattttgtttgatgaccatgcaacccctacaattgggactgatgatgtgttggaacgcccatccccgatacctcttgcatctactgatgccttggggcgcgggttgcgggataagcgtccctccgttcttcttcgtgactttgttacccacattgtacgatcttcgagtccatctgagtgttcatcgtgttctaccagctcctc

SEQ ID NO: 129415 - DNA, 1326 bp, Cannabis sativa
  modified_base (1290)..(1292): a, c, t, g, unknown or other
ccatttaggcgagagtcaaagatatcattcattgaatagagcagtcagctcatctaaaatggacaccattctaacaaccttttattcgactaggatgagaatccgacgttgtcccatttaagcgagagtcaaggccattctatcttctgagcttccaccattatttcgtactttgtaagccctactcttagcagccactattggggtggacactactaagaataaaagacttacaataatacttgatacgcatttaccgttatacataagtaattggtattatataaataaataatagtaaacttgttgtggtaaatgatgcacatcaaatttttggcaccgttgccggaaactattgttttattttattattcatatttaatttttgtcttactaacttatttttactttggcaatcttaggtgtacatgtctagtgtagacgatactcaagagagactatcaagggtaaaacaatatcttgagtcagtgtctgcttctcggtcattgaagaatatcatcgataatcgactctttcaacctcttggtcctatgaaagagccacaatcaactgaccccgagtctgattcggacgactcggttaattctcacaggaccatggctcaaaataggacattaaaggagttggtcgcgttagatcttgaccaacaaccactgtgcatccattatccacctttggatgtcaactttgaactgaaattgggattcatccattctctgctagcttttcgtgggttgcctggtgaagacactaacaagcatttaaatgagtttcatattgtctgctctagtatgaaacctccttcagtgactgaagaacaaattaagatgcgttgaaggatgaagttaaagagtggtttactatctcccacctggtacgataacatggaatgacatgaaaactgtattcttagagcgttactttcttgaatctaaagttggaagtatccgaaaagaaatatgcgacatcagaccagtttcacgggagtccttgtatgaatattaggagcgtttcaagaggttgtgtgctagttgccctcatcatcagattagcgaacaactcctcatttaatacttttatgaaggtctcttaccatttgataggagtatgatagatgtagccagtggaagagcactagttgacaagactcctggagtagccagcagcttaattgctaatatggctgccaactcacaacaatttggcattcaccaagatgttatgccaccaaagaaagttaatgaagtgagtgttgggttttgtgccctnnntaaaacccattttaatataattagatttactaat

SEQ ID NO: 129416 - DNA, 1425 bp, Cannabis sativa
atgcaaccttcggctaaccacccagcaaccaccctgcaaccatcgtctgattgaaactttcctctgatgcaacaattgcgcaccacgcagcaaccaccctgtaaccatcgtctgattgtgtaagtggtattttggtaattaaaatcacataaaaggtataaatgttgtccttaccttatgaaagtatttttgttaataaagtatcaatttatatttttttatgtaataattctttaattgggaactaatacaatatcaatatcaaaatatatatttatgatcaatttagatctttttattttattttattcaccaaattcataattttaggtaataaatgcaatatctgataaaaaaaaataacttcagtaaaattaattacaaaataatataaataaattaaatttattggagaaacattaaaaataataatgatattttagtagaaaaaactcaattatttactgtactttttaatattcaatataaaaaatatgataaaataattattatatatttttactaaataaattagtaggtaaaaaataataattttttattaaatatgaatgagaaaagtgttaaataaaatttttatactagaaaaaataatagatgaccattagttgggggaagatatatttttctcctaaaaataatgtagcataatgggtatatctaacaatttatattttggtacaaaaaaaaaatggtagtaaaaaattggtagttgaaaatattattttgctgctaaatacaattggtaatgaaattggtagctaaaataaaagatcttttgctacttaaaaagttggtagtgaaattggtagctaaaagcaactattttgctaccaaaaattattggtagctaaaaaggacatttgccttctaaataatttggtagtagaaatatttggtgttatttgtttagaattggctactaagaacttacgctactaaaatttggtaacgaaaggttattttttgctaccaataatatttggtagctgaaagatatttttcttgtagtatataagcgtaccaccagttgttaaaaaagagcgtccaaggattaatggcatatcattgtcttcttccatgtctagttgattaatggtgaaaaatgcacaattatgggtcttaaaatttaaaataaattaagtttaaattaatattttcatgaaattaatgaaatatatttttatattcaaatattttatttgaatttaatttattgtcattttgtaggaattaaagtgttgttattgaaggaaaaggaaaaaagatgagaaagcaagtggcaaaattaaaaagaaagagagagaataaagtaaaaagaagaagaagcccatttacaaaagaagaaaaagaaaagggcccaatagaagagcccaaattagggctgccttctcttccatcagccca

SEQ ID NO: 129417 - DNA, 571 bp, Cannabis sativa
taaaggggcatcatcttgtgcagccctcgcggtcgttgcctcacactctagttttgcatttttttgattttatttagccagtcgctatcgaagtttcctatattctagttctaatagtagaacatatcttgtgggatcgtaagcatcctcgctttgcctctctgggatttcctccccagtttgttcaaattctctaccacttcttccagaatggagagttttaatggtattttccctatgagaagtttgatgctcttttccaggacgttgagttgtctctcctggctaattcacttcatttcaaggaatatcatctgccatgaatggacaatttgaatttgtttttaaggagtgtgttctttgagtttttattacaagactctcaatgaaagcaccaagctgttaatgtagattttcattagctaataaataaaccttttgtaataaatgaactccaaaattaattaagcaataattaataataatagtaataataaatgtgttatcccaaaattggcactctgacgtgccatcacaagaatggtgacacgtggcatctacttagagcacc

SEQ ID NO: 129418 - DNA, 875 bp, Cannabis sativa
tttcgggtttacgggtctaaatgttcaaccctaacgcatactgagtttaacttcgagttgcgtataaatacttagagaaatgttaaaagatatcactcatggtataacgtaatcttgaaagtaattgagattaaaaagttcgtgactaaatgcatattttaaattttagggaatatcgctaactgatcaaagagtgtcacctataaaaggtgttggcactaatggtgcccaatagcaatggtcaaatactttaatttaatttttctcgataataatttctaagtcataagtcaacattcacgtgtcattttttattggtatatttaaatgaatttttatataaaaaattgtaagaaccaagttttttatttgataaattatgtcagttatgtctagacatttgtgtttgttgtgattgttttaagtcttagtctcttgtcacgtcagatatatttacgtcatttcagtcatagtcttagtctcttacttttataaaatacatttagtcactaattttttaatcataatatataaatgatgattaaaataatttttttttaagtgtataaatattgaaatagaaggagatatgactgcaaattactctcatctaaataataatgtcaggggacatttgtaatatgtcaagcaaaaatgatcccaattatgtttatctttgagatttatgagaataattttagtgatgaagagattaaaccaaatacacccccaaagggtgaaacaacatatatgcagtattctacatttgtcgcatgaatgagctactaaaacataaacctaaattcataacaatgagactcttattgaaaagataaaagaaaaaaaaaaacaacaacaaaaaaccacaacagatc

SEQ ID NO: 129419 - DNA, 1207 bp, Cannabis sativa
cctcctcccccaaccgcaccccccacaccaacaggccccgaccctacagtagccactccctcacctccactagcaacaccaactgaaaaaccagacacaaccacacctcgactcccacaactgcctcccaacatcgccatctgaaactcatccaacgaagaagctgccaaaagctcaagcacatccaacctcgactgtgttttcccaaacataaccaaatttctatcaaaccaaatccaccaccacaccattgctaataaagcaaaatcctcacgcaaaatcttatggaaaagcataagaaatatctcggctaaaggctcaatttaaagctttgacaataaattccaacacttgaggcgacaccacaccgggattaatgtgctacaaaaaactaaagcatgctctgaagtttcctcaacctctccacatctctcgcacaccgcatgaacttgtatcttcgacttaatgagttgtattgccacaagaatagcttggttatacattcgctagatgaaaatcttgaccttttgaggcactttcaaactccataagtcgttccaccactcactcaaatctgacaacaaagcaggctatttcgtagtcactgggtcaagagacaaacagtacccattataaccgaataatagccatgcgaatcataatgccaacatcatgaatccatcgcagacctaaccgataaaggaatccccaaaatagctttcacatccagtggagaaactttgttctaggtttggtatacaccaagctccatcaccatctataaaatcatttaccatcgattcttccctaggccaacaagtaataggacgaaacgatcttagtttaggaatccacaggtctcgaaaagcctctatctggctcccatcacccactaccctacgcatacccttcttcagtaagtcaagcccccaaatcaaactagaccataaatgagaagacccagtctgtactccctgatacttaggcacactatagtgattttttaattacagtgctatctttgctaatcaaagaaattttcttgaaaatcgtgtcaaattaaaactttaaatttaattactaaactttataaacttttatttatttacaaataaaactggatcccataattaaactttttacagaatattcaaaatacatatagttaggtcgcacagcgacaacaaaataaaaccccaaatgtcct

SEQ ID NO: 129420 - DNA, 712 bp, Cannabis sativa
  modified_base (669)..(669): a, c, t, g, unknown or other
agctaaaacaaaattgaaaaatttactaggtctctaattgaattatgtgatcaatttgaattacgcttggccatttgagttaattcactcgtgttttgattttcgtatttagtatgaagaaacctcttttctgaaggaaagaaagaaattcatatccaaaaatacaaacttaaatatttaatcaattttatagaaacttgatcataaaatttgaagtataacttattacttctgataaatatacatcaatacaaaaaataatgaaaatgtctagggacctaaaaattagctagttaaatctcaattttcatttaaatattcaattttgttgttatagcaagtttctcacctttgcaaaatttaaaataatttatagtatttaaaataaaattgaaaatacctacacctataataatattattaatttacatagtacttatcaagtctaatcaaaatcattaaatttttattttttattaaaaaattaatttaaattaactaataaaaaattaacatataaataatactaaaaaaaatttaaaaatataatttaaatattactactatcaaaaattaaatattaaatatttatcaacactaaatatttataaaaagaagactaattagtaatttttcccccgaacttctctgaacttttttggccgttanaaattccccctaaactattaagattgttaaatttaaggacttt

SEQ ID NO: 129421 - DNA, 2236 bp, Cannabis sativa
  modified_base (1526)..(1529): a, c, t, g, unknown or other
  modified_base (2195)..(2197): a, c, t, g, unknown or other
ctaaatttggacggaagtgttaaattgctaacagtttcctggttttgggggtttacctacagaaatttgggttgtgggggtttagtgaaaccaaaacgaaagtattgggggttttactgtcatttaccctatatatatatattatatgtatattttttttttcaatttttacttatatacaaataaatttactatattacaaaaaatatgaaaaaaattataattataatattttattaattttataaatatttataaataataaaaataaatatagatatttataatttcttaacatattgattagttttgattgattttttaaagaataaatgtataaagttaaatacataatatataggttgtccctacattcaaagacattttgatttaattatgcattaatttatctttatcttttatttgataaagaagaaattcattaatcaacagaacaaatataattaaacaaggccacaacctaccaaccccaacccgaatacttactcaattaacaaattagtaattagatttctaacttctagacaaatctttttcctttgtaaactatacaatctatacttaattacaaatttaatctcatttacaatgtaagtaatagtatgcgaaaaatcctcttgtaaacaagtattcctattcttccacagactgtatatacaagctgtcaaaactgcataaaaagtcttcattctaggctaggactcttgatggatagccatctcttccaagcttcatagttcaaaggtcaagcttttactcccaaccaatcaaaaatcttagcgacaaccattctagagacaatacaatcaaaaataagtgttggtggctctccttattaatgttacaaactgggcaattcaacatgtttagctctatatgaaatcttaaatattaatccctagtcaataaatgagcattaaaagtttgccataaaaaaagaacttgtgtttaggaagattgagcctactaactgcatggttgtaggtaactattccctatttcaaaagacaattatacaacaatgaagctcgaaatttacctatctttccagctacaatcatgtcagttttgctaaattgaactcttaaacgatatagtttgtgccgataccagcttgtgtcattaataagagtgtagtcccaaaagttagcacccaaagtacatcacatttaccccacttgacccagagaaggtcatgtttttccatgacagtccaaacatacttcgagagacttttcctgttccaatcaacccattttaaaatccaagccctccatgggactttggtaaacacactttatccaaagaagccatatacaacttacctctattgcctttgacaccccaaaggatgttggaatatattttaccaggacctagatttacaagtatatttttaacatcctaaatatgaatttctaaaacaataaaacttaaatacatatagagtatgagaaaccttacattggttgcatcagaatataatgactccttccactcagatnnnnaacccttgttcctttctgtcgcagggtattatcaagatctgagcccaaatctccttcagtcgtttggattctacacagtcgtacatactatgattgaggacaaacttgctatgggtgggcatgcactcaatcactaaggctcgaaaatattttgtgaagaactctcttggatttcgaaattagaaagaaagaaagaagaagaagaagtcttaaactctctagttgtctgacgagatgtaaactaggtttagagtcattatttagattatgagattattcttttctttttatactaattcacttagggttaggattaaattatatggaatgaaaaataataaaataatagaaaaaataaggctatagtggccggccatatatgggcccaacactaattatatttttgctattttccttaaccatttatctcttatttcacaaatggcatattttccaattctaatcctataaatgtcaaaactatatatttaataattataattaattgtcaaataaaattgccatttatattatttattaattagactccacaaattctcttaattaacaaatgaaccctaaaatcctttttcttctcaatcaagccataacttagtaaaaattcacaaataagtcatagtttaatttagaattataattgattannnaaaatcaattaactgagtcttgcaagcagtattgtctca

SEQ ID NO: 129422 - DNA, 808 bp, Cannabis sativa
  modified_base (700)..(726): a, c, t, g, unknown or other
aataatttataaatatctatctatatttatatcaaagagatgtgagatatttgaaagaaacccattgtttgatgtatttttttttaatgtgggaatgtggtagttttctcagacttttagtgggtaatatgaatacatttataaacttgagtttcatattttctcataagtgattctcttgcacgtatttttatgcaaatcaaaacttataaaaaaaatacataaaaatacacaaacacactaagatttagactgatctactaatgattaaaacaagaggttcccttcaaatacccgtgcatgccaacacttaccctcataacaaacaccctaaggggctgtttggtatgcagtaatgggagaagtgggaatggaaatctaaaagtttactatgtttggttaggtttttaatattttaatgttggctaagtgaaagtggtgggctttagtttggttggtaagaaaaaccaatgaaaatgtggttttcactttccaatgctattggcaaacacaatcttttgtattttaaaattattttttcatacatatgaaaatatttaaaatataaagcaattcccctaaattaaaaaatgatatgtgaagtacttttcttatttttttatatattttattttataaaatatattatcaatttggacataaatttagtctttgtaattatttattattgttaattatnnnnnnnnnnnnnnnnnnnnnnnnnnnaataaaaattattttgaacacttagaaagaaaaaaaaatagggattttttttcatttgtacacttcaaaacagttttttttt

SEQ ID NO: 129423 - DNA, 999 bp, Cannabis sativa
tgaaccctcaaagtccatgacacatgctcgcagtaaatcttgtagtatctaaatagttctctctgattgcccataagtctgagggtgaaaagctatactaaagttcagcttggtacccatacccttttgaagacttacccaatatttcgatgtaaatttttgatccctatctgcaacaatgaatttaggagctccatggagatgaagtatctcctttacatacatttcaacaaattgatccgctgtgtaggtaattttgactggcagaaaatgagctgactttgtgaatccattaattatgacccatactgaatcatacattcccgtggttctaggcaaaccaaccacgaaatccattggaatgtcctcccacttccactcaggaagggctaatggttttaataactctgtcggcctctgatattcaaccttgattagctggcaggttaaacacttggtcacgtactctaccacatctattttcatcccatacaacaagaagtagggttttaaatcctcatacattttggtggttcccgaatgcagtgaataaggtgtggtgtgggccttatcgaggatttttatcttaagctcatcaatattaggaacacaaacccgagccatatacagtaacatttcattattcgagattgaaaagtctttaagctgaccagccatcacctcatctcgaatattgattagctcaggatcttccaattgcgcctttctgattctatcaagcaaatcagattggtgtgtcatgttatgcaactttccaactacaaactcaattcttacgttaaccatctctgaggccaattgaggagctatcataagagtggtgaaaatctgccagggacctcttctattcaatgcatctgccacaacattggctttccgagggtgatataaaatctcacaattgtaatccttaaccagttccaggcaccttctctgcctcatatttagatgtttctgggtgaaaaagtacttgagact

SEQ ID NO: 129424 - DNA, 774 bp, Cannabis sativa
gaagaagaatggtatatatattttttttggcatggtgattaaaataacttaaagagaattcacgatgaaaacataagaattttttggccaattatttacaattgtgctataatagataagatataaaataagtccaaattaattaattattttaacagtcattaatattcttttgagtttgtgttatatttacttactacttacaattgtgattcaatacatacaatgtaaaatatgtttaaaaaaaaattaattatattaatagtcatttaatattcttttgaaaatatacaaaataattttttgttgttgttttattgtttaaataatagtaatatagtaaataaataattttaagtttagtaaaagtcaataaatcgtaataattaataacattatattaaataaaaaaaatagtactttttatgaattaaatttgtacaaattttaacatatcttaaatttagtagactttttagaaccattaaaataataatttttcttaagtgtgcttaaaatataacaatatactattttttttagcactttagtactcttgctgaaccaaatttaatattttttttccaatttgtctcacaagttttattctctttttaatagaccctaaaaaatagtcattcattcaaaaaaaaatgaaaacaaaaagtttttatgtttatgtaaagtaaaagagaaatgcaccagccgggaatcgaacccgggtctgtaccgtggcagggtactattctaccactagaccactggtgcttcttg

SEQ ID NO: 129425 - DNA, 2122 bp, Cannabis sativa
  modified_base (1997)..(1998): a, c, t, g, unknown or other
ctaacacccttaaaatcacataaccattagtgttagtagtgtaaacatttaatacaagcatacatttacatatatattatttatgctattctacctcgtttccatgctcaggagtgtcgattagcctgagtggaattgtagctcgacgtttcacaagaccctaaatcatatcatttgtaattttggtgagagacacgataaaacacttcccggggcttaaatcaaactaggaataaccttatcaatgaaagataagaccatactctaaatatcaacaatttggggaaaactagggtttctgaaaaaaccccgaccgaaaaaccggtttcccaaccggttaactggtttactgggtttcctgaggacaaaaccggtttaccgatttctcaggttcccacaaaatcggttaatcgattttgtgcaaggaaacccaaaattgacccccacaccacaattcaacccaaagctttctaaaaacttccaatatacctgtttataccccaaccaacttatttcaagcatcaaactacaacaaacaactcaaattatgaaaacaccattaaagcttcaacttgagctcataagctccaatttgattcaaataacaagataatcatccaatttagcttaaaacaatataaataatcactacacaacttcaaaaaataacatcaagctaaacccatccacacagcccctatttcctagccaaacatgcatcaaccctaacttgagctaaagggaaaaaccaagaaagcaaagtgaagtgttataccttagattcaagcttcctatcctcctaaaactcactaaattgagctgagaaaaacccaatccccagctggcctcttggtggttcgaaagaaaagagagaaagagagagcttgatggtgaaagaaatagagttttctaggctttttgtatatttctctctaatattaaaacttattttaattactaaaaatcaaccctcatattcagcatataacttccataaaggacaaaagaaaaggggttccaacaaaagacccttttacccataaacaatttaattatttaaagctttccaaggacaatttagtcacttaccacttctgacaaatccctactaactttaaacgcctatacatggtactcgactattaacattctaaatcatatacgtgactctctaatggcccaacgtcgctttccactgctaccaaacacaatcacaggtaaacgagaaattcccatatagcgcatttaacatatattgtaattaaataaatcttcaccaatatgcaatattataattaataatcaattttataattaaaccttaattatttgataacccatcatatcaaattaggcggtcattacacaatctctattccattcctttatttggttgcatattaaaggttggaatgtcattccaatagaatgacctttccaccattttggtagaataacaattccattttgaaatagaaggaaagaccatttcaatgcaagatgagaataaatttaataattttttttatcaattattttatgtgttttaaattttattccattccattcctattctcattcccattctaattccctttcctatgttttcattcctctcaactaaattccacctaagtgttttaaggataaaatacattgaaggttggaacggtaaatttgttccgattctgtagatcatctatagagtatctttaactatttggattagaacgatgaataatttataccgtatctatatcttggtacatatacaaaattctatataattaagagtgtaattccaaatctatagtggcgcaaggaggaattattaagttagagaatttacttggtaaattctagttctacttattggaaacttgattatataggctcatggtcctcacactagttgagataataatacttacagactaagttaattggttttaattaaataattataattcaaaataagactatatcttatttatganntttcactaagcaggggcttaattgtgaaggaaagcagttttggggtttatttattaattaaaagaattgtatggtctaattaataaataagataaatggtaattattatttgataattaattat

SEQ ID NO: 129426 - DNA, 830 bp, Cannabis sativa
ggtaaaataaatatccaacatacagcttccctaagtctagccaacttgaggtcttctcctaggtccaggtgaggctcgccaattgttggctccccactccaagtcatgtttctccagcgtagaatcggatttgaggtccgattattgttccaggaggttgttgcccgtgggtccttccttcaatgggaggtgccaatggtgaatcagctgctggaggtgtgggtctaccacttggatccaccgggatgctcgcatcaggctagccagctgtggtggccagacttattgtgcctgttatggtgacgggattcaccacatatgcagtattcatggggatcctaattgtgactgggacccgagtgtggatctacaatctgtgggtgctgagggagacctgaagatgcagatggagtgacatgagttcttcttgtgttcaccaaggcatttgatcagatcacggtatccgcactctcaatgaaaggaccaaactgttgaccttgaaaattgatcaaccgacagtagggtcaacaaatttgatgtttgccacatgcgtgcacaaataagaataagaaacaatagacaatgagatttgtattgataccaagggaatgttcgacccccttatgatagcgggtaatgacctactccccttttagttgtattgataccaagggaatcactatccagatcactataggtgggatctactatagtgccctttggattataatgtatggattgatgcctggtagacttgagcgttggatagcctagagtgttgcatagcctatgcttgggcgtgtgagagagtgaggaagagagagagagag

SEQ ID NO: 129427 - DNA, 514 bp, Cannabis sativa
tattttattttgaaattagggtttgaaaattggaaaaattaaaaaaattggaaaaatcccacaaaattcgggtttttggggtgttgctgccaggaggctgcgtgtgcagctaaaagaggctacaaattgccctgggcgcgtgcggaagggaggacctgcaacctccctcggtcagctgcaggatttcgtgggcgcaagcagcagcatcacgtgggcatgcatggcttcatacagggttttgtcccctgtcaggctcgcgctaatcccaccttgtctgagatgctggtgcactcaatgcaccattgaaccccgaaatttcaaacctttataacttttttaatttttatcggaattgagttccgtaaaaatttttttcacaacaagaaggaatccaaaaaaaaaatattttcagaaagaaaataaaatctttccatggaaaaattttgtaattcacattcaatcatcaagtaacacataaaccaacatgaacacatccaaatcaacacaaaaacaa

SEQ ID NO: 129428 - DNA, 698 bp, Cannabis sativa
ttcgtgtaacaatgaaattataaatttaaaattccaataaattactctgataaattcgtgatggtaattatggtagaacttagtaatggcgcccttagcgtttctcattattattattattattattatgggagaccccacgtgcagaaaactgagctccaattaaaggtggggctagtgattaggaaatcctcatcatcaaaattataactgaaataaaccggccaatgtatatataccagaaaatatatatctacaaataatgcacattcgaaattatataccatatgatatataattaattttgtggttgagctattacacaaatgactagactacataaatatactgatctgaccacactgacatacacatgaaaatgatgataatttattaaattaattaatattattggtattggtaattaggtgtgcatgcctgcagcatcaaaatatggggtcgacattattttgaatgtctcaattaatttaataaacatatacaaacattatatagtgttgtaaatatatttatatatcataaatctaaatatatgacatgttgtacgcattaccaataaccactgagactagctcaagtggccataggtgggtgtgtgtcttgaaggtcctgggttcgacaccaagtaaaacatgtttgtaatatataaacacttaaataacaaaaaaaaaaaaaaa

SEQ ID NO: 129429 - DNA, 562 bp, Cannabis sativa
attagaataatataagttagctaaatatatggcctcttaacaatatattttgattttattattttttatactaggtaatagatattgctttcactgatattctttttatttgaatcaagggttcaaaatctacttatgaccccccttgaaagggatttgcttggtccttgaagactaaagtttactctggtggtaatattttttagataaaaactctcgagatgatactaataatttaattaaaattaactgatgtataagacttttatagctaacatataattctcattattaaaagtactaaataaataggaaaagatttgcctcacgtaatctccttttagataataaaaaaaatggctaattaggatttttgctcctcgaactttgatatgtaccaaatcatgctcattgaactttttttgtcgttaaaattctccctgattgagattgttagatttaaggacttttgtctaattttaataaaaataatttaacatggatgaaagttcagggggcatgatttagtacaaatcataatttgagggcatgatttgataga

SEQ ID NO: 129430 - DNA, 1695 bp, Cannabis sativa
  modified_base (653)..(659): a, c, t, g, unknown or other
gcgacctgagtttgaacaagggtactattatataactttgaagacctaaatttgcctcaaacttcagtggccataacagagctcttgctaaaaaccttcctcaaattacacaacttcttccaataccagcttgaatcttgctttaaccggaactcctaaaagtccccctactttaaatagacagaactgatccacttaaccaaaggaacatcagtctttttagttaaagcccatatgtacttggccaatatggctctattctaatctgaccttttcttgatcccaatgccactgtaagacatgtttttattagaaccccaacttggaaagtgaagtttagacatgtttttattagaaccccataagaaaagtttgcacacttcttcacttcgttagtcacactctgcgtaaaccaaaaatattcatccaatagtttaaattatattagtggagaaaacacgtgctaggaaaaaagacttaaatttttgtaaaaataatattaaactaaactaaattatttttttatatatatatattttgtaaaattgtaccctacaataattattgtaaaaataactgaattatctattaattaagtactacacacatattaactttttctagtaccacaaaaaaatttacttttagtcacnnnnnnntttgtgactaaaagtaaaaaaatgtgactaattataaaacattattcttatgttgtgactaaaaggttcgtggttaaaagtattagtcacaaaaattacaatctgttgtgactaaatatgtttttagtcacaatacttattgtggctaataaaattaaattagtgacaacttgtaattaaatgttatgttttagtcacaaataacattttattgtgattaaaagtcatatttagtcgcaaaacatttatattgtgactaaagagttatcactaacagtagttatttttgtagtggttgtaaaagctttatgaaattatatgtaaattaacttttataaattaattttagtaattattctcaaactaattttatattattatacttttaaatttttaaataatttggtaatgtaataatgtacgtgtctgttagaaatatttctagatttatttttcatttttaaaaaaagtacattacatcattttgaaaaatatttaataagttaagtcaaagataaattaatttaattaatttgttctattaatggggtgcctaaaaactactaaattggtgtaaaatttaatttgtaagaaaaaaaaaatatttgctgatatgtaaattacttaatagtttaaatgcaatgttgtagactactaattaattttgctacaaattaaattttaaaataaaattaaattgcataacttataaaaaacttaaagatttgaataatttatatcatgtttttattatcatagttaaaataatattccaaaatgatattattcaacaaaaaaaattgaaaatgataatagtaaaaatgtagctctctaagtctctaatctatgccatctggtcacaatgatcatttctttgtataaacaactcatattagaaaaactatcattattcatgtcatataaaaggatttttatggtaattaatatgaagaccaatgatattttcgtaatttattatagaaaggccgaaaagagtattctctctttttatatagttatagatatatatatatat

SEQ ID NO: 129431 - DNA, 2359 bp, Cannabis sativa
aattagcattaattatcgatatttttataattatttgtgaatttatttaattgtgagccccattatcaaaagtaggcattagagttataatttctcaattccggagactttattaaactctaggagtattatttgtattatatatgaattatgttatttttacaatttttgctcgacgacaacggaaaatgcgatggatggctattttaatcacatgggtaaatctagaacctttttcttagtgggatatatattggaggaaatagaataacgggtttgaagcagggttatggtttttgaccattttacccttagactttacattacttaagtttaggcttgaggggtattttagtaattttgataagacagtttaggtggctgcatgggtgaatgggagctgtctttttaattcatttttagccaaatccaagggtaattgatcaattatccatttcgagaaataagaaaataagaaaaaaaaataaaaaataacagaaattccatttctctttctctctctttgtttggccaacccaaaccaaaggaaactagccccaagttcttttgttttttgagttttgaagcaaggatgcaagtgactttgaggttaaggtaacccctagaacacttactctttgtttttgaagctttagttttggtttggatgtgtgattttgagatataggggctattagggtttgttggtgttataatttgattattaagtttaaattgaacttgaattaggttgttgctgctggttttgttgtatgtggtggtggatgaccaagtttgagtttgaaaactcaaacttgagtcatcaatgggatgttttgattcagggtgtttttttggtttttattgattgaaatatattgtggaaagttattatacatgttctaaaaagcttgctagaatttggacaagttttgagcaagtttggaattgtttgtggagacctagtgcaaaccagttaatcggtttgctaggacctataaaattgattaatcagttttggcagattccccaaacaatttgttttctcaatttatgtccacagtagtgccttggttgggtgatttcctatttcctagggtattgtggttccatttagtattaacaaaaccttaggttggacgttcgagttttcgaaattagggtttttggcttgttatttacccagttttaatatgtgattagagcatccatccaacacgagaattttcgttcaggtcagccatctcacgtgaattcaggaaagaggtaagaacatcatataatatgtgatataaatatgcgaatgtatgtatgcgctaaatgtatatgcatgcttgttatggatggtacgctaccaacacttgtacggaaatggtatagagtgcattggtatagtgtatattgtttaaagagtacatttaggtgttaccagcacaagtacagggtgtgtgtggtatatcacttagtggtacttagggtacaaaataaaccctaccatcactcgtacaatgttggtacaaagtatatgtggtatagtgggtgtaccctagtatggaatgttcttactcatttgttaagccttgtaaataggtgtatgggtgcctagatacaagtcgatattatatgatatgttatatgctttttttactgagtctgttgactcacagtgctagtttcatgtgtaggtaaaggaaaggtgaaggctgaacaggagtgagcttgagctaggatgaggttgtacatgtcatggcggcgcgacctggagtgttcgatctcgggacatctgggctttccattttgtactatttggaatattttgtaaaaattttaaataacgggatcccgaaacttgtaaaaaaaaattttaaagcttataaagtttcatagttaatactaaaagtaataatttgatacgattttcgagaaaattctttgattagcaaagaaagcattttaattgaaaaatcattgtagtgtgccttagcatttaggcgttagatccttggtgttgaaagcttgcccacacatatcaaagcaatacttagcatagtgaggaagactatgatgaacacaattgaaggagccgaagattcaggttcatatcttgataatgctctgctatacacaagaatcaagggctagagatctgaatggaaggattcatattattccgttgccaccactgtaaagatttcttaatccctaatgtttttatttattgttcttaggaatttaaatttataatgttagataatagaattatattcaacatacatgttagtaaatctagatcctgataaaataagtttacgacagaaaattcatttagacttgcagcaaaaggtagaggaagctgaga

SEQ ID NO: 129432 - DNA, 875 bp, Cannabis sativa
gagagagagagagagaggagggtgatcaaacctccagaaagatttggttttgctaattgcactgcatttacccttgcttctgtagaagaattagaatgctcagttcctagcacttactatgaagttgtcaattgcaagaacaatgacaaatgacttgctattattaatgaagaaatgacatcactcaagaaaaataaaacatggaagactgttactaggccaacaggatagaagctaattgattgcaaatggatttttaaggaaaaggaaagactgctaggtgaagagatcaggtacaagacaagattagtagcggaaggtttcagtcaaagggaaggtatagattttaatgacatattctctccaatggcaaaatagacctcaattaggatcatgacaaaatttgacttagaaatggaccaaatggatgtaaagacatccttcttgcatggaaagcttgaagaagaaatctacatggctaaaccagatggctacaagagtagcaaaccaaaccaagcttgcctccttaagaagtctctatatgggcttaagcaagctcctagacaatggaatttaagattccatgaattcatgacaaaaactggttacataaggagcaactatgatccttgtgtgcactacaatagcatacgaatttggctactgctatatgttgatgacattctcatcattgggaaggaaagactagagatcaacaaattgaaatagtagctcagtacagaattcgaaatgaaagatatggggtaggctaaaagaatcctagtgattgatatcaaaagagagagaccctaacagtatatccctgtcacaaagcaactgtgttcaaaagatattagacaagttctgcatgagtg

SEQ ID NO: 129433 - DNA, 1000 bp, Cannabis sativa
aatgattaaaatgtatggcttcatgtaataagttttcaaaatgtataagtttttaaaataattttttttgcacattttttgtaattatgttgtttttgttgtacatttatgaaaaaaaaccctatttatatcagggtcggatatagtacagatagtattattcccgtccacgcctcatccctacttcgggtactaaaattgttccctaccaccgtctcattaaccaccaaaacaaggaatctccaccccattaagagcggcgccccgagttccccatggcagatataaatttccatctctatctatcattcaacaattcccaattacatatactattcgtttggaatacacatgttttatattgatgtagacaatgtatatattaagtgatttttaaaacacgaacaacacactacaaaggttcatgcacaaccattttcttttcataactttgaagttatatagctacacaaataaaagaagaaacaaaataataaataaaaaaagggaaatacatatagtaattagaaggaaatagacaaacttttgtctcaccagtcaccacaatacttagtactctttttttttttttcttttctttttctcttttctcttctatgtttttttcttttaggattttttggaaggaaaatctctacaattctctatttcccagcacttccatagccatatatgaacttagctgaaccttcagtgtaaatgtgagtctcattgaaaagcctgcaaaaattcccatcactcatttaatattttacttcatttatagccataaaatttagaagcataaattgaaatattatttatttattatgtcacttacgattttcgaacagctttgctcaaagtagatgcagaagtaaaagtttttccatcaaaatatctgttctctcctttgatcctctgcttgattcttatgtctaactcatcagcattaagcacaaaaggcttatccgaagcctgtttcaattcatttgacaaa

SEQ ID NO: 129434 - DNA, 795 bp, Cannabis sativa
tgaatgctattttcttctctaatgagaacaacacttacaataaattttgtgactgccaagtatatgtcaaattcttcattattcaaaggtttggataagataagatgttgagctaattgttgctttagctcttggaaggtcgcttcacactcctctatctattcaatttttttgtttcccctaagtatgttgaagaaaaggacacactgtctgtggcctttgacacaaatatgcttagagctactatgcggccagttaaactttgcacttattttatctctgtgaaagacttcatgtccaaaatggcttcgatcttctctgggtttgcctctattccttggacattcactatgaagccaaggaacttgcctgagcctactctgaaagaacacttgatggggttaagttccatgttgtactctcagaggatcttgaaacattcatttatatcctctacatgcccccaacctttttggacttgataagcatgtcgtctacatagacttccatgttctaacaaattaggtttttaaaaattttgtttacaagcctttgataggtagcccatgtattttttagttcgaagggcatgactttatagtagtacaggcctacatctgtcaagaagcttgtatgttcttggtctggtagatgcattttgatttggttctcataataattttcatatatactgcattcgttcacttatttatggtaatttaattttgcatctctcttattattattattttttttttttgaaacaagtagcatttagtttttaatattaagaat

SEQ ID NO: 129435 - DNA, 892 bp, Cannabis sativa
ttaattatcttaattttatatctgttttttttgaagaaattaattatatactttccttgactctcttattattacataggaaaattattgtagtttttatattttgcaatatataacagatatatatagcatagttattacaaattttacatttaattaattataacatattagatatatgtttagtattacacagaatcagattgaaattacaaaatagtgtctaatactactattaaacaatataaataatataattactattttcttcatccaccatattgtccaatattatttctaatttttccaaaatcctatacacaagtgaaaaaacgaaaaatacagttgcagtacttattttgggcatgacgtaaagataagacaaagacaataacacagcaaatttgagaaaaaaaataatgaaaattaaatgtgttttagaagttgagaaaaacaaaatatttgtttaacttggcacacacatgtacaaaaaataatgagagttgaatagtgttctgctactctttaattattagtttattatcaatatgaaataattcaatttttgttttggatataataatcagtgttttattttggccagttaaaagaagaaaaacaaagtggagtgtaatatatacacaccgtctagcttttatttccttcctatcaagtcataatttatatatgggatattggcggataaaccacctgagttttacggtttgtaacacttaaccacaaaaaccgaatttttggcggctaaactacttaaactctggttccattttgttctgcacactttcgtccaaaaatcacagttaattgtcaaggtgaactgttcacgtgtacacacttgtacacgtgacaagtttttagtagtctacgtaat

SEQ ID NO: 129436 - DNA, 816 bp, Cannabis sativa
gaatattctctattttcatcaacaactaagatatgggtgctttttggaaacaaacgaagccatctgggagccaaaactgggaccccgtgcctaggttgacctggtgctaggtccagcactcaggttgacatattgtcaacctaggccatttccaaacgtttttcctaagaagtcttctgggcatattattttttttcaccaacaattaacgagtgtttacaagagtcaaatgaaagcatctggtggtcaaagttgggaccaagcgcctaggttgagttggtgcctgctcccagcgcccaagttgacattttttcaacctaagcctgttccaagtattcgggcattttttctattttcagaaataatgaagatataattattcctaggaagtaaacaagatcaattgagggctaaaacaaggccctagtgcccatgttggcatgggtgttgggccctgcacccaggtttatgtacagcctggttcgcatgttttcgctcttcaaacaaaaattatgtgttaggaattatttatattttggttaaaattgggtaggaaacctcgttcgtaatctcaaattccatagaagtatcaaaacgaatctcaggaagctcttcgaagagcaccctacgcccaagttgacgtatagtctggtgcatcaggttttgcttttccaattctagtttcgtctcgagcatctaactatttttccgtagaaaatgagagctaccacttgttacaagtcaaatcacactttgacatttcaccttttcgacaaagtgggatattgacaaattagtcgtaaatcaagaagtttt

SEQ ID NO: 129437 - DNA, 944 bp, Cannabis sativa
aaccatgcaacataaaataatttttggtctttattaattagtaaatttgattatattgaaatagattttatttagggcacaaaacccaacaaggagctcttcaatacttaactttaaccagaccaaatctcgcttattcagtcaacaagctcaatcaataccttgaagctccaactattaatcactagaatgcctgcaaaaggatcctcatgtatatcaaaggcactcctcacattagtcttcatttaaaatcatccacattgtttgctcttgaagcctattcagatgctgactgggcctctagtttggatgatagaaaatctaccagtggattctgcatttttctaggggtaaccttgttaattgaagttccaagaagtaaaaagcagtggctcgatctagcacagaatctgagtatcgagcccttgcctcaacagccactgaactggtatggatgcactctttacttactgaacttggcatcaagttgcacaaaataccaccaatcttatgatgtgacgatcagagtgctcaagccttagccttgaattcagtttttcacacaaggacaaagcatattgaacttgatgtacactacatcaaagatcaaattgtagaaaataagcttgaaatttgttacatccctactcaagatcaaactacgacctatttactaagccattaccttctccaaggtttcagtttgtatgtaacaagctgaatttggaatactctaaatacagcttgaggggggtattagtgaagagagttagatttagttagttataattatatccagttgtagttagttaagtgagtttgttacactcacagttggtgttaacttctctaaatatttttcagttatattgtattcttgctttctgcactctatatatatatatatatatatatataaatgaatatcaaaaattgtgttaatt

SEQ ID NO: 129438 - DNA, 868 bp, Cannabis sativa
ttttattaaatataaataaaaaatcacacccatgaatttctcataaaccaagaatttagttatataggcacactttatatagaatagatatataaaaagtagaaagaatataaatagaaacactcactcacaaccttgagtgtagattagtagagatcaccatgacttgaacaagatattacatttttatccaaaagcttattatttgtccttatctctaagcactaaggaactctctaaaaaatagttttgaaaattatcaaatcttgtgttttctagcaagtacttcttgataaaatactgattgtcacaaaatgagtactttaaacttctatttaaagtgtttgaggattactttagaaaattaaattctcttcacctcatggttgttgccaacatttcaattggtgtttaataggataaaaatgctaggaaaaaaagctgaaaacgtgctcaataaatccatgtacatccaccggcgttattttaaaattctaagtgattacaattataaaacaacacgttatcagccataaaataatagttttcaaaaaactcaaatttgagttttgtaactcttctctgagctatattaattttttttttgaaaaagagaaaagatcattttgtcttcaacaggatcctccccgataaatattaaaagcctcccttgtggtggaagaaaaccatggttacaaataataacaaaacaaaaattttaaggcaagagtactcccccactttgcctcagaagaaaaaaaaggagataaatacaaccacctactgcccctatacaaatgttttccattctctacacaaatctaaaaaggataggtcctcaaaatgtttagttctaaagacccaagta

SEQ ID NO: 129439 - DNA, 2152 bp, Cannabis sativa
  modified_base (2100)..(2103): a, c, t, g, unknown or other
atagtatataaaataatttttttaatattataatttttatataatcttataattttgtctggagccacttcggttcccatttaggcgagaatcaagaaggattcttaaaagttggggtaaaaagtgacaacgaattattaactttttaaacaaacctattaatgctacagaatagattataataagaaattttagttcttattattattatgattattattagaataattagtaatttcattcactgaattttcgataatattaattttttcccctaaaatatatggcatgttaagaatcttctaaacttttatatttacagaaatttagttcttctgttacgtttggtcctattattttatttaaatgttgatgtgtctttataaattaataactttgtcccttaaactttgacaactattaaatcgtaccctttcagaataaaaatgagaaagattcaatatttttttttaaaataaatcttaaaaaattatgtagatcttaagaaaaaaaatatttttggatgattaaataaattaaaatagtaaaactcattaagcgatttaaaaactatttattttttattaaaaagttcatttaaatattaaaaaaatattaaatttcaattttataaaaactaaattttacatgaacaaacttgagtatattttatttttctcaaaaaatgcagatttgtttaagataacataacttttttttagtttaatttataatttttttgcaaaataattttatattttttattgaatttgtttgttaagatatgagttaataaatataaataagtttgatttttttttcaaaaaatcttagtttatttaaattactgattagattcttaattattttggtttaatttattaaaatacgtgtttataaataaaataaaatttgaaaatatattttaggaataatttaatttttttaaataaaattaatatttttaattaatttaatattttgatcaattttttaaaaattttttattattttttcagaattaatagaatattataattacttaaaaaatagaatattataatttttaaaattattttttaataaaaattggaaaaaatttatatttgttaaagttgagggggtaaaataataatttttaacggtatataacagaacttaacagaaatggcataattatgtaactattatattttaggaaaaaattttaataagccgtatattttagaggacaaattaagtagtgttgaaagttcaaagaacaaaaatgcttataattcttattattattgcatattttaaataaatatgagataattattgctttttatgagtaaatttttatattatccactgaacaatttaaaaatattaaatataatcatgatataattaacttatttacatcataagttgagaataagttttattttaaatgcacatatcaaatttaaccaagtatatatattttaaaaatgtgtatatatatattaagttcgacaattaatccgtttgaatggaaagaattttcccagactctccaacctttctaggtagtttgttttttcttgagtgtttgaaaaataaaaactaatgatatatatatatatatatgagtacatacaagtgatgggacaagacaataactagcccaacggtaaggtataggcatacgtacattcattcaagattttttcataaagttgaaaatgatatcaaattagaacaacccaatggggcaacttgtactgtagtagtaattaaatttaatagtactcttagtaggatggataatactcaaattaaaaggggggttgtatttaattatatgggaggcgtgtcccaaaacgtttaaagaggttcaagtgggttgagaacatcaactgacaaatttttggttgtcatataccttacaattatttgtgttcaatgtccctttcaaataaaattcacgtggcgccatattatgctaattaggatttttttctttaaactttgacatgtaccaaatcatgttctcttaacttttaaggtggttaaaaataccttctaagctatagagattgttagatttaaggattttttttccaattttagtannnnagtctaacatggatgaaaattcagcgggcataatttaatacatgtcaaa

SEQ ID NO: 129440 - DNA, 647 bp, Cannabis sativa
tactaatacaatacaatacaacacaacacaacccaatacaatacaatacaatacaatacggcgtagcaaacgatccctttagctttaattttaactttttcatgacgataaccattcgaattttctatttctagttgcaataaagttgtatactagttgaataaaagttgtgcttctgtaatattataatttaaaaaaatcatggctcaaaattggaaaaacacgactcgtacagagaaagctcaataatggtaagttttgtttgtattacataggggcattagtaattgttttaaggtttaatattagcttcctcacaacaaatataatggttgcattataatttcttgatagctatcccatagttgacttacaatgcataaatttttaaactgtcagtttagaaacgcaattttgtttctcatattttgtaatggacagtttgatcatggacgaattatgtaaattatgaagctattggccaatacatttcaatagattacaaatatcaagaactagtacacaagatgaaacatgtgctagaatgcaacaaaaaaaatacgcaactgcaactgaaataccaagtgaaagaagaataccatccattgaggataaaggacgatccaagcctattcttctacatacaa

SEQ ID NO: 129441 - DNA, 1620 bp, Cannabis sativa
  modified_base (1552)..(1595): a, c, t, g, unknown or other
caaaaataattaaaagcttactaagttaattaaaaacttaagaactaagcaaattttagttaaaaaaaatataaaaataactctaattcctagagttatcaccagatgagcccaagtcaatatgtcatttgtatttgccctattagtgggaaaagtgggaggaataagaaccctaacactataaatataacaacatccattcaagaaaaatatcattcctcattttctaaggaaaaatttagggttcacacacttgtataaatcataaagcttttctaatgttatcgtgaactaagacttgttagcacccgaaccaatagtaaaaactctattgttattttctttattattcatcaatttctttaagcttgcacatatagtttattggtttccaaaaatctcgataaatattttggttttcttattaagagctgaagaaagcagtgatacatcaaaggttgtatactacaaccatggtactcacctgaaacaaaattggcagtcgcaatggaaacactcctctggacgacgtagatcctacagttcaagcaaagataggagtcgatggagatctaataaaagcaaccagtagtaatttacgagatgagatattcaaagatctcgtgaatcgttgactctcccacacaagcagggtgaaaataacaatactcaattgcctcgcgttttacacaacatagtaggcatctcgcatcatcaatacaatagaggggtacgtcgagatgaaatacttctacacttagaatatttttcctatttaagatggataagaaagataactcatatttgacgagatgcaaccttcttagtcagtataaccatctaaagaataaagacaaggagcaattaggtagttattagatattatcccatgtgtatataagttaaatgtgggaaatgtcaacgtttcaccaatagttgtaaatgaatcaattccaataaaaataattgcaaagctataacctataaatagagacataatccatgggaaaaggaacggcaaacagagagagaaaattctattattttgtatatagagatttgtactctaaattcaaataaatatctctaataatacagactcgtgaagtatgtagattttaactataaaactacgtaaaatatctggtgtttattatctttattataaaattctatggtgcatttattacgtaaaaggctatatatttggttaacaaaaatatgcgttaacagttaatgttatgaatatgccatgatgtagttataatcgcacaaaaccaacaaaactgcatgcacaatacttggaaattttaaataaaattatcttcaaaggatatattgttcaaatattgcaaagagtaaaatgcaaaaggtggaggacacttttttttttttaaattttgattacaaaatgcgattacccatgtatagctattaaaagttcaaataaaagatttttttctaagggatatgggcattggtgttctccgcgaccttctcagtggcatccacgacttcagctctagcagtggctgttgggttttatgccctnnnnnnnnnnnnnnnnnnnnnnnnnnnnnnnnnnnnnnnnnnnnatcagaaataacattttatgtttca

SEQ ID NO: 129442 - DNA, 1141 bp, Cannabis sativa
atttatgtatcactttaaaattaattgaagcaaaataccctttttgtagtagtggtagtttgttgaaaggcttccacttttgccatcagataataaacgaatttgatcaacatcatcactctggctaacagaatcgtcagaatgatcttttccttttttggtggtagactttcgtggtcgagcgtcagatttgtctttctatgtaccactctacctctagaattagtctgtttaccttgctctaaggcactggttcctttttttttcttaggaggttgactggaagacttagttttcttttgctggccagaaggagtagctttctttgaagtctcacgtaccttccatttccctttgtccttgtgaggatcattagttccatgtttttcttgcgttattatccaatggattagtatcattaggaatattattatcgggaaatttatttcctgctgctgcaattaatgcttccaatcttgctactttcacatgcatcagtagagaaaagtcttcttgagccgctaactttagttcaattagtctcaattttttgtagtctcaattttttggccatgaggaccacaagatctgtcttgtcagactcactttccttattagcattgtcatcttcaggatctataggatcggaatcctcaaactcgtcttcttctttgcctacatcgatgggatcatcatgaagacctcgctcatcatgttgatctttttctttttggcgactggtcgcatcagtgggatcttcattggtccttgtcttggcattacgatcaggatcaaccgtcaaagtgttgtggaagtgaataccagatttggtttgagtgagtaccataattacagtatttaatcgtcgatcgtattactgctttcttcagcactcaatgaaaacaccaaaatatttaccgagttattcagagatcaataatttgaatatgaaagccaaagaaatataattcagagagaataaaataaggacactcaaagatttttacgtggttaggaagttaatgagccttagtctaccaatatattaagtatgaaggatccgtatagtatttatagtacatagatattatactaattaccctttttcttctaatgaggagtttacaaataatacattgat

SEQ ID NO: 129443 - DNA, 1198 bp, Cannabis sativa
taatagaatacactaataaacttttcaataatcttccaaaaaaatataacaatgaatagacataattttttcttattttatggcgttttctttttaataaatttcatcattaataataatatataattagatgatataattttaatattattatacattaaaataattttcaaattattatttattatattaataataattatttgttattataatactaaaaagatgaaagatgaaaatagccgcgcgaataaccactatattacctagttgtatatgatatgagagtgtatatgtagatattcattattattatttgtagtgttgggagttatgaatttctttgtgtatatatattatataaattatatattaatattatgtatactatttttatgcatgcacagattttgaaactttttgtactctctttatttctttcatattaatttaaattcaattagtaatttacagtataaatattttaatttaattttcggttacaaataaatacttaaatttaatttttatcagtaataatatctaagttatatatatttcctaactaataagtattaagtcattatctatttatgtaatattcttattagtatatttaaattaatttttaaatataaaataaaaatttaatagcgtagaccagagattgtcacgtagctattgacttgatactttatggccagatacttatagaagttccaaaaatgatacttaagtattattaccgctaaaaaataaatttaagtattaatctacaattaagagttaaatttaggtatttacgtcgcaaataactcttcaattaattagtctttaacaaaaagaaagacaaattcaattaattagtttctccaagtacttgaaattaataagttcttgtgtaaaaataaattattactaatattcacaaaaaaagttatattttttttgaaggttaaatgaaaatctctattaatagataaatcagatatattatattacatgtaaatattgtttatcgagcagaatcaacaataatagactaaccaaaccgtttacaataaacaggaaaaaaccttgacagaattaattttcaactaaatgacccataaatcgtcagttgtacgaaacatcgaaagaatgcgaagaacactaaattttcatcccaaatgaatatgtgacagatcacacctatcaa

SEQ ID NO: 129444 - DNA, 1455 bp, Cannabis sativa
  modified_base (112)..(120): a, c, t, g, unknown or other
  modified_base (872)..(872): a, c, t, g, unknown or other
gatctgaattcaatatattaagaaaaacttaattcaagacccagacccaaaacctgggacccaaatcaggacccgggatcccaacccggactcgaacccagacctaaactcnnnnnnnnnactcgggacctagacccatacctggacccgaacccggactcggacctaaacccagacttgaacccaaactcagacccgaacttgggatccgaacccgaacatgggacccagactcaaacttgagacccgaatccaaacctaagacccagacccgaactcaggatttagacccagatccgagacctggatgtgactcatagttggtgttgtgggtcgagtttattgaaaatatattacaactttacacaatctattaatacaagtcaataccaaacatactattgtattaaataatactaatacaaaattaaaatgaatataaaattaaaattcttaaaaaaaaaaaagataagtcgagtcaaatttgatccaatctaagtatttatcacacagtcatttcgattggataatccataagaaaattaattacaattaattgtgataatctatactatatatatgtatatgttatgttaataatatgatttgattaacttagtggagtattttttttttttttttggcttcatcaaaatatataatttcttcaattttaagactgtgtcggtgttatgtaacagttgatatattataaagtttttcatttattttttaaaaaaaaaacacaattttgtatgttccatacgagacaaaaaaaaatcaagtttagtatatttaattatataatctaatttaatacaatatataatatcatttatcaaacgaactaaaaataaataaatatatatatntatatatatatatataacaaataagtgctttttacgtaaactataggtgacattattatttagtaacaacactaattttattatatacgaaaaaaatgtcttatatatatagagaggaaaatatacatatatattttcaaataaacgtgtattgctcttctgtaataacacatgctcatttttccatataaaaaagaaagagagatcgaacattaatttaaaaatctaatcatattttgtattacatatataactacacatgcatgcttttatttacatatggtgcatatattatatatatatacatattaatttgttggggtggtgcatataatgagttcaaagtatattattattaatttatggccactgatcacatgctcaaatatctaaataaaatgtatagatttctcccatctatgctgtctttgtcaattgatcaataataatatagtcacatgcacatgcactaattatacgagtttaattatatatataaatatattatatatatcttaaatttaggacgaacagaaagaggacccatatgttagagatttataacaatggaagaaaatcaaga

SEQ ID NO: 129445 - DNA, 608 bp, Cannabis sativa
tatataaggtctcatgttttagaagaaaaatactgaaaaatagaaccctaaaactaaagaaggcggcaaagaaagtaattgtggcgacccgaagcaagatcaccaactaactttttctattcccttgtttatttctttatgtcaatttctatttcaattattataggatttgattatgaacttcccaatttagggatacatgaatgttagatgacatttcttcaatttagttaatgtgattgttgatttttttttctttcctatattgggtgattcgtttctatttatttaattacatagtttagactggacatctttaatgtgattcatgatcctaatatgaaatctgagaagtgaatataaggaatgctctgatagaacaaacataagttttgatgtaaaatgagagtatttacatagcttatgtgatttttagattatgaatttaatgcaagttatatgttaatttactttagagatgcaagtaaataaaatatatgagattttttaggaccttaatgatttgagaagagttaaggttaatttgataatccgccatcaccaaaaaggagagaattaataattaacattaaaaattgggaaactga

SEQ ID NO: 129446 - DNA, 1129 bp, Cannabis sativa
atagcacccaaaaattcttcggatatatacttcaattgtcaaccataaaaaaataaattcatatatactaatacttaccccaataggacactatcgaagcgaaggtactttcaaatttcaatcaagaaccagaacacacaacccaagcatcaccttatcatttttaattttttatcattatcaaaaataaaataaaataaaaaaaaacatcatttatcatttattggacgctagtgtaagtgcaccaacttactgtgtacccgtttacacattaatccctttacccatgagactttgaggcttgttgtatacgccatccatcccttccgtagtttcaaatcaaaacacagtgcgactcttgccttgccatatgacccattgactcttcctattcacctcttaccaaagtaaatgacgacgagcctcccatcggagatcatcgccgacatacttattcggctccccgtcaaggacctcctccgctacaggtgcgtatccaagccatggtgctccttaatcgacagccctgatttcatcaagcggcacctcaaccactccaaggaaacctactccaacgccggcttggttcttaactggagcgacatatactgggtcgaccttgataatcttaactccgttgtggaactcaatcacccaatcgattttgagggcggtaccgaagttttgggctcttgcaatggcttacttgttctgtttaattcgtatgatgatgtggctttgtggaacccattcactaaaaggtacaggaacttaccaaatactgagcttgaatttgccggcaaaagatttttgtatttgtcaatatataatttacggatttgggtatgaccccattcacgatgattacaagttaatacggttggtacagtatattggggatgaagatgactcttttgactctgaggttaaagtttatagcctaaaaaccaaatcatggaagaggatcaaggactttccttattacctttgctataaaaatgcgtatggtgttcttgttgataatgctttacattgggttgtatctaggagaccagaatctgatgtttccaacttaattggtgcttttgatattgtgagtgaggagtactatgtggtgcctcaacctgat

SEQ ID NO: 129447 - DNA, 643 bp, Cannabis sativa
ccccaccactgcaaatgaccgaagccaattgaatccatctcatagtcgctacaatcgaagccccaatcgccacacctccaatcttagtccatgatagtggtttgaaaccccagcgacacccaattgccacaactagtttgaaacctagtggaacgacgaaccaaagctgtaaacatgtcaaagatgagttttttttctttttttctttttccctttttttcattttggaattttttgtgttaggtattgtttagtttagaaatgtctctttttgacttatggttgaatgtaggtttttggttagtgtgtttgcttattttttgtattttttttttagaaaaattttactatttttttgtttctgccttagctctaggggtgttcaaaaaaatttacaaatcaccccacccgaataaactgtccaagctaaactgaataaaacaacaaaaaatacaatccggaataataaaataaaaatctaaattgccagatgaatatattggatggtttacaaattattctaaaccgtccaattaaccctaataaatcgaattaaactgatttatatattttataataaacgtgtatatattatattacataaattacatttattagttaaagtatgttgtatttaaagttt

SEQ ID NO: 129448 - DNA, 1130 bp, Cannabis sativa
  modified_base (1069)..(1071): a, c, t, g, unknown or other
catagcattaaacagtaaggaagtttctaattaagatagtctcaactatagaatgttgtgattagaaaacaaatcaaactaaattacattactcacttcattgtttaggagatctatgtttcaccccctccctccctccctccccccaaaaaaatagaatagtcgcaatatctagtttacttttcttaatgtgctattaaaaatgtaaaatccatatagagattttagccaacataaacaaacaacatatttcaacttgaattacctatttcaacatatttcaacatatagatatctctttttagggttggagatttgggaatagtaaattggagatttgcgattactttccaaatcttttttttttttcttttaattaataatgtggatggtagatgaagactaacagaaaatttatggtaaatcacaacataccttcagtgtaaaaaatcctaccagttcccttttcctcaatgtcatccttaacataatgcaataattataaaatatatggtaaatcacacaatttcaatttataaaattcacttgtaactgaatgaaaatatattgtaaacttataaattcacttattcataatttaataaataaattattttttaaaaaaaatcaacttaaaaaatcattttaaatataaataagtttttaaaaaataataaatctaattgactgttatattaaaaaaaaaatcaaaacaaccttgagcataacactgttgccataacgattgcaataaacatatactcaaaaatataacctcaaaaaacgagatttgatctatattttaccttgtcagtcagcaaaattttagaacttccaaaaattattttagaatctccaaatgccaaggaacctataggacaaataaaaatagatttcatcatataagaccgaagagctatatgttcattgtcattgtgtatcaaatgacaatcacaatttattataaccaaaatgaattccctaacataggaaacgtctattacaatttaaagtgaacaacataataaaatttgaatatatgaacagtaaagaccgcttagtttaattnnnaaattagcagttaattaagatttaattatgaaaattatttatagatatttaaataataa

SEQ ID NO: 129449 - DNA, 717 bp, Cannabis sativa
tgatcacaggccaatccttttagacaccaatgtcggggttaattgtaggggtcggctgttcaaatacgagaatatgtaggcgagggacatacactgtttttgggtggtgaaagaggcatgggccaagagacttcacttgcatcccatgatcaatttccatcgtaaagtaagacacacttgccgcaagctgagtagttggaacaagaaacaatttagaaagctaagtgttcaagtccatgaggccaccgtagagttggaagaagtggagacaaacagactggatgattataaggcgatagaaacagctcaaagtaacctcaacgaggctctgatcaaagaggaaatacattggaaacagaaatcacgagtgcaatggcttcaagagggagacatgtgttcgaaattctttatggcctcaacgataatcagaagaagaagaaattacatacaatgcataaagaaatctcccgaagacagctggatccgagattaagatgagattgctaagtgttttcttgacaacttcaaagaattatacaaagggcaatcaacccatacgaagcctgtactaaatgaagtgtttcacaagcagcttgacgaaaatgacaacctcttcctcaacaccatctcggatgccttagaagtaaaggcggcaatttcgaaatgggcaaggacaaggcttcgggacccgatgggctgcctccaagcttttacacg

SEQ ID NO: 129450 - DNA, 620 bp, Cannabis sativa
tttgtaaaatgatgcagagaattcataatagaaaattagctctgttttccctctgctattttctttcttctcataaaacatgacaatcacataaaaaaaaaacataaaccacaatacagaaagttaaagaaagcaaaaacatagagattcgccctaagaattagaattacatccccgttgagctcgctataagaatgggtctgctcttacactatagtcaatcttgaattacaagtatatatgttatggaaatttcaagtcacattgattagtaatttcaagatcattattttctcccaatctgactgtttcaatttttcctctcacttgagaattctactttttctctagctctcttggaacaaaatcttgctcaaactgcgattctcctactgagttgagtagctctattatttatagcaaatttggtagttgatgaagtcggttaaattggttataaacagatgcaactaacacaataaggcagatgaatctagcttcaaaagtacatatgtgtgtactaagcttaatataaattaaattctacatatgcatgtatatatatatatattgttatattattttataatataataaagtatagattaaaatgtgataaa

SEQ ID NO: 129451 - DNA, 1184 bp, Cannabis sativa
tgtgccatggggcagcatgccacattctcccccacttaattgttcggcgtcctcgacaaacctgctgcatgatcttcagtcttctgcataaactcttgcaagtcctctaccttctccgagctgatctcgtcatcagtgaggcccttccatttgaccaggtactcttttctcttctttctcttcacatgaacagttctttcggcaaggatatcttctagttttatgctgctgcatcgttgaatcttgatgttgtccttggtagattggttgtgcgctggatcctctagatcttcttgatatgacttgaggttgttgacgtgaaggaccgggtgtatcttcatccaagaaggtagttcaactttgtatgatgctaggccaacttttgagatgactggaatagggccctcatatttgcgcacgagtctgatgtccttgtcccctcagaatctcaaatgttctggccgcagtttgatcaaaactaagtcacctgctttgaacttcagcggttggcatttttgatctgcccacttcttcattcttcgtgaggctttctctaagtatgcttgggtaatctctgtattcttcttccagtcttttgtaaaattgaaggcccgtagattttgtttgtggtattcatccactgtgcggggtaacagtggttgctattcattcacaactttaaaagggctcttatttgatgaagaactcttatgagagttaaaataaaattgagctacgtctagtagttgcggccaattcttctggttggcgttgataaagtgccgtaaatactcctccaacatcccgttgaatctttctgtctgcccatctatctgtggatggtagctcgaggagatgttcatttgtgacccaagaagcttaaatagttcaaactagaaggtccccgtgaattttcaatctcagtcacttactatatttctggggtactccccagtactttactatatgcctaaagaaaagttgagctgtctcttctgtcggacactacttcgacactgggatgaaggttgcatactttgaaaatctgtccacgatcaccaagatccaattcaagtctccagtcttcggcagacttgtaatgaaatcaagcgagacactctcccatggtctgcttgggaccaacaaaggctctaacaaccctggcatcttgtgcctctccactt

SEQ ID NO: 129452 - DNA, 1202 bp, Cannabis sativa
tattaaataaaaaatatgataaactattctattatatatttatgatatataattgattatataagatatattattttattttatttataatttaattatttttttattttttactgcaaatcatccatttttatttatttattattatatattttaatttaatattatatatttttatttttgtttaagtttttcttaaaaagaaaataaataaaatagttcagcctattcttaaaccaaacacagaattactttcagcataatccaatcttgtccagtccagtccaatctttttcagtccaatgtagtccaatcatgtgtaccaaacgggcccatagtgtttagggttcttattcgttaatattttcccactgatggggtcattacaagtaacatattgactagggcttatctaatgaagcttggtccatgaggcgcttggtgtctgctaatgtggataccacatcattttgacagttgccaaaaatcgtgtcctatcttcgtggagaattaaagacacattaaatgtttgattgctaattactctctttccatatttaggatgacatgatattcggatgagatctttaagagttaatttttgatatctcgagatctcataattaatgagaataattctgagctggacatctagattctcgttgtttacttctcttagatgtgctgtctaatatcttccaaacgtatgccatgcttgataggtttctcgcctgaacaagtcttctacttatccgaaaggactaactgcttatgagtttcatccaatatttcatttggggctgttattgggcatagagtatacccatccagaaacacaaataacaacctcgaattatattcaaatccaattacagggtgactttccaaacactcttaaaattactttttctactaatctataagaggcttaacatatttgaccaaattcaaaattgcatggatcaagttacttcattagtaaaaatgaaaagtaagaatttaacaatcaagttatttcttgttgaaaatctgttaaggctcaacatatttgaccgaaattgaaatttgcagatgcctaattacttcattaagcataatgacatacgatgtaacgccctaaataattaggcacgctacccaaaatacttatgaaaccctaatcccctaaacgggattattaatcaaaatagcgcagaatttaa

SEQ ID NO: 129453 - DNA, 666 bp, Cannabis sativa
  modified_base (627)..(627): a, c, t, g, unknown or other
atctcaaactcaaaactaattgtaattggaattggtaataataagtggagtagcccatgttcttatatatagctcaatacttttacatttaatccatgtgggataatgttctccaataccatctatgtaaggaatcctaaactatatatgtgttatatgtcgttttatgaaatttatattttaggatgttagattatttatgtaataatcaaacatacatgttagtaaattaagatcctagtaaaacatgttccaacaggggcagcgacagcaagacaagggttgcacgcccctttgggaaaacccacgccccctccccaccccccttaaatgtcaacagaactccttgagctcaagagagccttcatgcacgggagccaaaacgccaaacaagaaccaccgataaccaaccaaaaaagggagacaacgagacatcccaagctccgccctccatcaaagactgtccatcatcaaaactaaaccaccagaccgtgactagaggggaggaaagatcgaaaccaccaccactaacccctaatcatccactaagaacccaaatgttgacagccactgcctcttccaacaccaacccttgccaagaccagaagttgttgggttttatgcccnaaataaaactcatttcatataattagatttacttattaa

SEQ ID NO: 129454 - DNA, 644 bp, Cannabis sativa
  modified_base (43)..(50): a, c, t, g, unknown or other
  modified_base (613)..(618): a, c, t, g, unknown or other
agaagttcatgtttaggatgttaagaacatacttgttagtaannnnnnnncctagtaaaatatattccaacagatccaaccaaagccattgcataggaagaaaccttgacccttaaatgaaggaggagatcgcaagcactctcaaggaatctccaaacatctttgcctgatgtcataaggatatgataggaattgacccgaaatttttcatgtattgacgtgaatccagatatgcctgtcatgcaacaaaaagacgtttattagatcccgtgaaggtagaggctttgaagaaagaagtagaaaagatgttagaatttttttcttttgggatgtgtattacctgaagtggttggcaaacccagtccttgtcccaaaacccaatgggaactggcaaatttgcatagactttactgatttaaaataagcttaccccaaagaccgatttcccttaccaaggattgacaaaatagttgatgcgacatccgaccacgagttgatgtctttcatggatgcctattcttgctgcaactagatgaaagtgcatgttgcaaattaagaatacacaagtttttgcaccgaaaaggaggtatattgtgttaggttttatgccctnnnnnnaactccatttcaatgtaatctatttt

SEQ ID NO: 129455 - DNA, 668 bp, Cannabis sativa
tccagctcaaaacattcataatgcttggcggttctggaaaccagaacccgccccaaataagttttttggactatcctccccttgaccatccatagccacatcctcttcacccttttgattagtgccattttgttgttttttgtaaattgtctaaactaggttcatccaatttattaaggtccggcccaatagtaatataattacccagcccatccaaagtccttctccttttagaatccaataccagcaaagaatcaatcccactattctctccaatcaaatctccttccacgtatacctttgacttcccatacagcttatccccaatcccaggcgaatgcattatctctttctccattaacggctcttgattctggataagtgcagatctccctaaatcagtggagatatgattcctctgcacattaactccattaaatgtaccatgcgacgccgcctgagtgttgaccggagttccaggagcaggttgtttcagcgccgcacctgatcgtaaccattgtgctcccatggtgtgttgtcgacgtcgtgggggctgccttcaaagaaaaatcgtattcgttgattatcaattccggaggcgtatcaaaaagcttctcacagaagcgttcagagtggccaagaacaccacaaatgaagcagaaggtagg

SEQ ID NO: 129456 - DNA, 710 bp, Cannabis sativa
ttaaccactaaaagagtagatccggagactcttgcatttggcaatagtttgtgtttggaacaacaagttaatttgattcgccatttttacaaaaaagatgttaaaaaagccttgtgcagtattcatagctctaaaagcccaggatttgatagattttgctcaggcttcttcaaaggtctttggaatgagacaggggatgatctcagcaatgttatattggatttttttttttccaaaatggcactttgcctaaggatatgaatgaaatggtgattgctctagttcctaagtctgaagatccgatgaatgcgaaggactataggctgattgcttgttgtaataccatatacaaatgcatctataagatgctctgctccagaatgtctaaaattttaccttggcttgttaatgagaaccaaggggcctttgtgaagaacatgttactagcacacaacttgctcctctttcaaaatctgttaaagggccatacaaggaagaacatatctgcttgttgtattattaaaattgaccttagcaaggcctatgaaaatgttgactaccagtttgttgaagatttgctaacgggtctctactttcctgcaaggttcattaaatgggttatggttagcctcaagggtacaaactataatctgcttctcaatggaagaatccaaggttctttcaaaggagagaaaggcttgagacaaggt

SEQ ID NO: 129457 - DNA, 686 bp, Cannabis sativa
ccctggtaaggccaacgtggttgccgatgccttgagtagaaaaggctagagtcagataaatacagtgaagtaaatctcccagcagttagcaaatgaaatgacctgagctagaatggagtttgttgtggggcaattggctaatattaccctgcaatctggtctttaggaccaaatcaaagaagcacatttgcaagatccagagtaagtgaaattccgagatagggttttagctgagaagactgatgactttatagaggatgacacaggaatgctatgatttaggaatcgtgtttgtgtggcaatggatgatgatattaaaagagagatcatgaatgagtctcatatgactccttactcagttcatccagggtcaacgaagatgtctcaagacctcaaggccatgtttaggtggtcaggtatgaagattgatattgttgagtatgttggtaaatgtcttacttgcaagcaagtgaaagctgaacatcagaggccagcagggttactgcagccactaaatattctagagttgaaatgtgaaaacattgctatggactttgtggtaggattgcctaaaaccacgggatagtacgaatttgtgtgggtcatagtggacaggtttacaagtcagtgcacttcttacctgttcagacgaacttctccattgattagtatgctgagttatatgt

SEQ ID NO: 129458 - DNA, 1273 bp, Cannabis sativa
  modified_base (824)..(824): a, c, t, g, unknown or other
gcttgggaccaaacgttgtcgttttatttgtcaaacacaagacggtagtttgtttttagattaacgacgccgtttcgcctctcactgccttcagtcaaacaattacaaaagtctagatcacagccaattatattcttgccttcaaaacttggttttattcctttattcttctgcctattttcggtactctcttattcggataaccttttttatttgtttgctggattcacattctgtaataaattttgtaaaattatgaaacaaagaaaggggataggattggtttaacaattttttttttctttttttcagaaagactcttcaaaatgttgtttgagaaatataattcattcagattattgagtaaaattattaatgagaaatcaagacaaaaaccacacaaactcatttgcggaataagagaaaagaagaaatttacttatacggaatatataagttgggatcgggtttgatctcgttataacaaaacacggattgttacccaattgtactgtagttgctggattgaaggattgaataattgaattaatctaagggttaagattaaatttggtgaaatttgtaaagtataaggatattatggggtgtttctataatacaccctattaatattgatgtattgatgcaaccctaactgtttcggtatctataagaattttttagcctaaattttttcatagtcgtgtacattatagttatttatgatatcttgcaaaattttgagaaattttgaataatttataatataaaaattaatgtttaaatcgtctatttcacactcgtataaaataaaaaagtcatgngtgcaacagactctttgaacactgttttctacgtgttaaattttttcaaattttttcaaatttttcaaaattttgttagatgtcttaaataagtataatgtatacgatcataaaaaaatttagacaaaataagtttttagataccgaaataaataagggtacatatatacactcatttatttaaagaaatatattatagaattttccgatattatgtaggctaaaaaattgtaatcggttgaatttttacaatataaaacaatggaaaattctacaatcttacaatgaatttattgatgcacctttatctgttttagcatccaaaataattttttagtcatatcttttctcatggtcaagtacattatagtagttatttaagacatcttgcaaaattttaaaaaatttgaaaaaagtttaacacactaaaaactacgttcaaacagtgt

SEQ ID NO: 129459 - DNA, 551 bp, Cannabis sativa
ttactatttgccagatagaagctttagattctatgtttatgttagcgctcccactcaattgcataacagtgatatgagatgtcttcccactgaaaatgagcttatgtgtttggatgaagatcaacccattcttcatctttaaaaacccaatcaatctatgagtagattcttactctattctgatgtttatttatccatgtgtaatgagatctatttcacttcatctcatctgcgaggcccaaagccatccagtacttattgccttcaaaaatttccccaaatgatactggtttccctctaattctatcaccgtgatgaaacagagtgttaaagtgcccaaaaattagccaaagtttcagtggcatatgtaaatcagctaacctttaccaaagatattctctttaagttatcatactgctcccataaacaacagtgaaatagtaatcttcattagtgttgggttttatgccctaaataaaactaatttcaatataatcagatttattagttaataaagatcagaaataacaatttaatgttgcatggttcac

SEQ ID NO: 129460 - DNA, 1137 bp, Cannabis sativa
ataccataagaaaatgacacgtggataatgatttaacatttaacttacctacagagttccaaaaatataacttaagtattattacagcaaaaaattaaaaacttaaatatttatttgtaagcatgagttaaacttaagtattaatacaacaaattactctatttaaaattatttaggtcactattgattcaaggatactattattaacctaactaaccttaaccctaattctcatattctcgaaatgaatactcaaaacattatttccctatagagtagcaacaaaagtgacactatctattgttatgaaatattatcataacttaatagtggttttatttttttaagcataatgtgcaaattagaagagaaatatagaaactcatacctgaggcgatggccatagcgggttccactattattatcacaccgttgatgtagcttattggatcttaataaacttggtacaataaacgtacgcagagtatttaagtaacttatgtcactcgaaacagatctttgttgaacaaaaatattattgttgacactgaaaaataacaatgttgtcaccaacataaatatagttggaattccaaacttaagtttccaattttgacctaacgcagaaactatatacaccccaactactcgaacccctatcagtgcaactatgttgaagaaacgtaaccaatatttagatgttgttgagtgttcattatgatcaacttcctcaataagctcttctaaagactttaatttatgaaaagacatacccacaatcaattgaggtaatgcaagaaaaaacaagaatgtgtatcttcttgtaaaactactacatgagttatcctcctccactttatggcagttatccattgttgctgataatgacaaaagccccagtccctgaagtccaaccattgacaaataaaatacatgagttaagcttttagagggcatatatatactttatctatttcggcatctcagaataattatttagtttatttgtttttatgatcttacttttaatagtcacaacaaaatttgtgattaataataaaaaagttgtgactaatcataattattatttgtgactaaaaaatttgtagctaaatatattagtcacaaaaattacaa

SEQ ID NO: 129461 - DNA, 1007 bp, Cannabis sativa
acgcatacctaattattatatattattattgtgttttatgttatatacaaattgatcttgagtttattattaatttatctaacatgtggcatcagattacctattgtatatgatatagaacgtataatttgtataataattaatatgtatatgtaaattatctattattacatattaatttccttcttattttatgttgaattttttgttgtttaattttaaaactttaagagttttattctatgttaaattctctttctgttgatatattacatgcttaaaattattgaataagtttggagaattttatgattaaactctattaattatgaaattcaatttggattttttcattagattaattattgactgaaattgattatgaatatctcattaacaattgttttatcatgtttctaccaatttaatttttgaatggatgagatataataacaaaaatgagctaaaatggtaaaaaaaaatggtgaaatggggtgatttttcgtggtggttggcagagagggtttgaggtttctctgatttggggatttctgggttggctgatcgaatgaggaagatgaagggatgggctagggttataaacccttttggcgtcaaattcccttccaaaaatttttaaccctatggcgtcggttattaattattatgctgaaaaaagcgcatctaaaggtttattttgtagtagtgttagttcttagtttttagattgagtttcatggagatctatcaatttttttgatgttgctactccaaattaaatgcatgactctattagaattagagtcatgttcaaaaccactcaaattccattcaaaatcgtgcattttttggccgaaaaactacctccgacccgatcggatttgaaccgggtcatgtgacccgttttccatctgctggaggttgaagaaggtgtttgggattaaagcccactcgcggttgccggagagtgagagagagtgaggtagtttcgtgactccgttttcgac

SEQ ID NO: 129462 - DNA, 574 bp, Cannabis sativa
  modified_base (513)..(543): a, c, t, g, unknown or other
gggcacaaaacccaacaggtgattgggcctcaaatcctgattgtcgaaggtctataagtggctattgtgttcttcttggcactaatattgtggcctggaaatcaaagaaataacaaaccatctcacgatcttcaactaaggctgaacttcaaagccttgttgttgatgtcacaaaggtcacatggcttcaatccttactatctaagttatgcatatcatccagttttgtccctaaaatatggtgtgacaatcttagcacagtaataatggctgcaaatccaatcttgcacgctagaacaaaacatatcgagatagatctatactatgtaaaggataatttcaaggtcggttacaaatgctccatgtccctgcctaagatcaacttgttgactgtctcaccaaggctatttcaagctcaagatttcttattctaaaagacaaactcagtgttgtttcagcttccacacttagtttgaagagggttgttagatgatagtgttggaatttattttnnnnnnnnnnnnnnnnnnnnnnnnnnnnnnnttattaacatcctaaataagaactttctaaa

SEQ ID NO: 129463 - DNA, 1028 bp, Cannabis sativa
ttaatataatagcttttagaaagtttcgctagtcaatcgcaacgtgacatgtcgagaaggtgctaggcaccaccggtgcctaatagcaatactcatatatttttgttacattaggagaggaaggatttgaacttgacacgtggacatttaatagaccgggttcagatataatccgatttagcacaaaacttgattcagatttaatatttttgaaaacccaaaatccattcgaaatcagagaataacatttctcttaacttctttttatgtatccatattatatagttacattatatatatgtttttttttcattgtaaatttgtgagtgtgttaaattgttaatatgttatagttatgtagggatacgattttgtctcgtgatatactttcataaaatgtattccgtgatgtacggcagtcgctagatgggggagttatttgatctgagggttgtggttgatataggggtaattagggttgaaaatggtaacgtaccctgagacccatctattgtattatgagactcatctagtataccacgaaatacattccgtgaaagtacatcacgggataaaatcgtgtcccaatttatgtaatatgtatatataattatatatatgtatttttttaaaaaaaagtaaaaaaaaaaaaaatcaaattgtctataattaatatatttttgtaaaataaaaaattgataataatatattgtattattgtgtattgtgtttgcgtatatatatcatgtaattttctttgttaaaaaagttatacatattattacaaaaaaaacatagcccaacccacccgaatctgatccacccgggtccaaaattaaaaaaatctgtttttcataagggcaggttcggtcccaagatttcaaaacccgaacttaaaaaactcaaactcgaaaacttagagcatgtttggtattgttttttgtttccaaaaaattgtttttaaaaatgagaacaaaaaatagtttttcaagtttttaaaaacaagttatgtttggttagtgtttttt

SEQ ID NO: 129464 - DNA, 977 bp, Cannabis sativa
taaaactaatttgattctagaactcaaaagcttagttgcaatcttataaatgacattgcaacaagcaataggtctaaaatctttaacagtattaggacatcttaccttggggaccagtgtaatcacagttgagttgatttccttaagaatcatgccattctcaaggaaagaagcgacagcttggaaaaatggtttcccagttatcttggagaaaataactagagtacccaacagggctaggagactttgatcaaggaatgtcaaaaaggactttcttcacttcctctattgtgattttcctcataagcaactctgagtgttcttgagataccataggactccttctcaaaatgcctttgaccattgatttcctattttccattctagttcccaatagacttttgtagtaatctagaaaagcctcctgcaccataatcgggtcattaaccctctctctattttgttgctcaatggagaagatcctattttgcctcaatctttgttttatgctagcatgaaacaaagctgtgttgttatctccatcatgtatccatgccacttttgctttttgtttcaggagagatacataatcctgctgtacctttacatatctttctcgagcctccttctcttcattatgcaacttgttatcctaaatttgacactctgacgtggcatcacaagaatggcgacacgtggattccacttggagcattttctcggaacgatatgccgagcaggatgcctcgctggcacgtctagaataaaatattcaacgagccgtgcagaatgatcaacacttagcgaatttagcttaacgcatcatgagtcaccagctcaatccctacaactcagggatcaacttacggggatgtgtcacgcacacgatcccactatcggtgtgttcagcgtcaatcccacgatccttgcattcagcattgatcacacgatctttttgtttatgcgcattgtaacga

SEQ ID NO: 129465 - DNA, 1313 bp, Cannabis sativa
tatggggtgccaagctacctctagcacctagatcatgctctggaaaagcgacatctggtcccaatgggacaactttgtacaccaggccattagagcctataaataccccacatctcagatgtgaaagagggggaatcatttggtgtaacttagatattgaattcaatgtagagaggaatattcagacatcttttcaccttcatctttatcttatctttatcacatttcttggtaaccttgcattatctgaccactaacttagttgacgagttttcaccatcaacagtttggcatcgtgtgtgagaaggacaagattaagccaagttgtttctttacacacaatcgatacaaaatgcctagacgctctcatcgccttcaggatgtggagatcttccttgacaacaaccagttagtcattttgaagcaagacctccctctacccgccatcaaagaagaaggtgctaatggtcactggccttaagtaagagaagaaaatgataacgttgtccagcctcaagtaagaggacaaggcgtaagcaggagggaatctcaagcaagacaaggagattgtcatcgcgaaagaccctagtggacgagcagcacaacggagttactacctccatcacgaccaaaggtaaaggtgtgacacgaaagaaagagatctcgtcatcacctaggcatcctccaccaccaacactgcgagatcccagtacctcgcgacatcatcctggaaaggaaaagatagttaactctatgagcccaaaatcccaaactcgccactatgaagatgaaataaaaaatctctagtggaagagccgaagggtagaaactacagtggctggcatgcaaaaagtaccgagtgccattcttgaaggcaaaactcaaaattcacactttcagtacaaaggtcaccgacaagagtgcagaatgtcatctgttcacaatggaaggaagagctccatgccatcaacgggtggcaccgcaaaggtgagagaggaaggggcctatcgcaaaatgagaacccaagaggtcaccaagagcaacatgaatctatctgctggggtaagaccgcaatgggagaaacatcatatattcttatgaaggggcttcagccaaagaatctcatgcaaggggacactgcactggcaccccacccctcacaagagcaaagcaagcagaaggtatctcccctcaatcatgatggagagccacactatgatgggatgagaggagtactgtaacgtccccgctccaagcctccattgggctcttatacacgagtacgccattctagctgcttcctggattgatga

SEQ ID NO: 129466 - DNA, 1411 bp, Cannabis sativa
tttctaatttaaaaaacaaaaaactgattaaaaaagtgttactaaatgcacccaaagaaattcctaagaaatttttgtttcacactagttttgtatcctgtaccactttttgaaaaaacatattttttactcccaaacattatttcaaaattctctgaaccttttgtaatttttgtaaactaccttgtttaaatcatcaattttagctttcaagtttacaagctcttttttaaataaggaacaattttttgcattgggtttcaatcaagaatttttcttttacttttaaaaaatttactttttcaagctataaacttattttctttatttgagttgagtttttagcaagcaatttttttttttaaattaacaaaaaaatcattaaaagattttgataattcatcataagatatatcaagcatatcatcatcactttcactttcaaaatcaattatttggttagaaatacatactttgtcatcaactgccatgtagcacgtgtgagctaccttttgttgtccatctttggaactttcttcctcactttcactccaagtagccatcactgctattcttttatttctctttctcaaaggacaatctatttttacatgttcgggctttttgcattcatagaaaataatttgatcatctttcttgagctctctcttgagttaccccttttgtcaaatttatttgcattcttcttaaacttcaaaaacttttaaagttctttgagagtagggctatatcatccatttcactatcactaccttcactatcttcactatcatcatgtgaagtggatttaaatgaaattgtgttcttcttcttttatcaacttcctcttcttcttgagcactcgtgaaaatctcataattcatgagagaaccaatgagctcttccaatggtagagttgagaggtccttggcttcttggatggcaactacattgccttggtaggctttggtgagactcctcaaaatcttcgtcaccatatccttttgtgtaagtaccttgccaagagagttcaaactattattaataattttgaaacgagtatacatgttagcaatggtctcatgttgtagcatcttaaaattttcatattgtgtgaaatagatttgaattttcatagcattagttccttgatgagttatgttaggtttatttttatgcagttttagagtttattttagtgtgtgttttagtatttttgttactttattgtggagatttatgcttagtttttgttgttgttcatttttcaggagaaatgtttggagatctctatttttgataattttggtgttcttcaagcctttttgagaaaaaaatgagaaattataagggagaaagtgttggatattattttaccaggatcttggatctactcacaagtatgttgttt

SEQ ID NO: 129467 - DNA, 849 bp, Cannabis sativa
  modified_base (817)..(823): a, c, t, g, unknown or other
agggtccaatctgtaacttttgcaaaatacagggtctaaaatagtatttacccaacttataacaaatatgataataaaaagtaacttacgaatttataaattgatataatacttctaaaattgtatactttaacaattaagattctgttaattggcagttaatattcttattaggtgctatcattttatttttttaattttttcgttattagacatatttttttaagaattatgtaataaaaaatcgattgatacgtactggttggatgagaaatctctattttactttgtgactatttgttcttatttgtgagcatcacacacttactatattagtctcattcttcctcaattattacaaatattaattacaagattttttaaaaattaaaatgagaattttaaaaaaattatcattgcattcttttataaaatataacatcaaaatatcaatttatattcaaataaaaaaaaaaatactttgtattgattaagtcaaaaaattcaataaaccgtgactagatattaatatatataaaataatttttttttaaaaaaataaaataaaaatttaagctaagaaagaatgattatgtagagttagaataattaaaaatagtaaataaaataattataatataaaaataatatatattaatgatttactttaaaaaatattagaaatccctacacataagttaataaaatgaaaatgtggctttatttaataaaaacttaaaaatatgaaaatatttttccacacaactaacttaaattgcaaaaaagccataagttaaggtggcgtttggtaacactnnnnnnntcagttttctgtttttaaaagtagaa

SEQ ID NO: 129468 - DNA, 1685 bp, Cannabis sativa
tattgagaagataactctggtgtgacagatctaatcaataaaaacaaaagtagacatagcctcattactatcgtgacatggggggtgaactactataaatctctagtattcaatttatctattgcgattttattagtcaaaattaattcattacatcctctatatttttacgagcttcttagatcagttgacaaaaactgtgtcaacagtgtaaaaagaagtcactaaatagtgaattggtctcattatttacaggaaagagtgaataattaaattacccaaaaaataggagatgaataaaggagggtttgaatgtgaatcctacaattttttctatctattagatcaaattccatgaaaatagggatactaattggcccattcttgtggaattacttaaacatatcttcagtgaatacccctggtcagccgctcggtatcatttagcttggttggaataaactacagttataatcctcccagggtcaatttattaggattttatgtcctaaataaaacttaattttgttataatattatttactttcaataaagatcagaaaacatatcttaactttgtcatatgctttgttcacatgtttatgcataattgtaggtttaatatataagttctaataaatcctgaacatatagttattcacaattacaacaatgttatcacattggataataattgtgattgtatgcttaaaattatttagtcccacgatttttcagtgcacttaatttacactgttgtgataataaatgataaggtttacttggacttagctaagtagaatatcttttccaatgcattagtaaagtaaactaagattaaatgtatcaaatatacatcagactggaccgatattgacagtggaaaatctatcataaacttactgttatatcctttctaagtcaacatatcacttagttgatcatagattatttatctcaattctaagatggttaaactctggtttaaatgtattgcacgagttttttgatttgttcgttaccagcttaccatagaaccagctcaatacttacatcttgagaactcgatagtacgattgagtaggagtgttgatcgtagatatgaacatctacaacttttatgtttattagaagtaaaacaatagtttcttagagcttaatttaacgcgataaataataaagcactcattttggtaattatattagtttctagaaatcgaaatattatttacaagtagctaagtattttaaggatagaatacattgaagaataaaatggtaattttgttcatactcaatgtagaccgtctatagaggatcaatgattattgtaattgaaatcgtagattaattcatagcgtatctatacttggtgtatagagcgttctatgttatcaagagtgtaattctgaatctatagtagagttatgaaaatttaataagttaggaagcttagttacataggccatggtccccacattaactgagataatggtattttgtagtctcaattaattgatttatcaattaggatgactgtgtcttatttatgaattttactaagaaatgacatatttgagatgaaaagagaatttatgggttattttttttagagtaatttgcggcaaaaccccctcaactatcaatttacttgcaaaaaaccatccaacctcatattttggtgg

SEQ ID NO: 129469 - DNA, 618 bp, Cannabis sativa
cacgaaaaggaaaagggaaacagagagatggtgacagaagaagaagaagaagaagatcgcttggatttaggtctcgctgaaggaaattgaagaaggattttggtcgagatttgcaggttgaagaagaagaaaaaagtaaaagaaagaaaaatgaaatgaaaaaaaaaagtaagcaaaatttatttatttattgttttatttttaattaatttttataatattttaatgaataatattacgtgaaccactaaaaatttgacacatatatacatggtaatccaccatggcacttacttgagacttttggatggagtgtaaatatcaaaatggaatgaaaattcagtaagttttgcggtcaaaaaatgagtttatagagttaagtattacaaatcataaaattcaattagttttactgccaatacccctattataactaagaggttatgactaaataaaagtacatacaagaaaataaatattaaacaccaaaaagtatcaaatgtaacaacaataacaaaatatgatccttaatattatatcataataaaattatttttaaataaatataatatttatacatgtattataatttaatataaaattattaattttacataa

SEQ ID NO: 129470 - DNA, 1192 bp, Cannabis sativa
  modified_base (120)..(138): a, c, t, g, unknown or other
caaatgaacctaattaaaaaaaaaactatacgtgcattacacggaacattaatataaatgtataaatttaaatgtcataatgcatactaatagccgaattaataataataataataatannnnnnnnnnnnnnnnnnntaataataataataataagttgatttctattgagaaaatgacctaaaccaaacactaggtacaatcttattcttaccctctattttgattatgacttcacccacttagatataaactatattgaaatgaagcctaaactattggagataaataataacctatcactaaattaaatttaaaagcaactcatcaacaaaaataaatattgatatatttcttatttaacattattaactaccaccagggtcgtgtcatttttattatttatatatttacatgtcagataatttgttgtgtgatgtgattaaagaaatagaaattcgatcatggaaagaaaaagccaataatatatataagctttgttggattctaaccagaaaagctgtgagaatcatacatgagatgagtgatcagagtgagagagatatgtctatatctatatctgtagagaaatgctaaaaggtattattagtgtctaatacattttcatttgtcaataaaactattagtgtaattaagtatcagatcccatataatttaatataatagcttttaaaccacttgagactaggctagctcaagtagctagagggtgcgtgtgttggaagtcctgggtttgaatttcaaattatacaatgtaatatataaacacttaaatcaaaaagaaaaaaataatttttatagagaataactctaagcaatcataaaataacacgtctagaaagtgctaaagacgattggtgcccaataacaatgctcatgtgtataaacagagagttttgttggttgatttgtgagtggatgtgtatatctatgaatgcgtcccatttctgtagagctagatagctatagagaaagcgtgacaaagtaatattgcagtgtctcaaaaattacttgtaatgccaaattggaaatatatataatttaattttttatttttttttaaaaaaatatagataataattaaaaaaatttgaatttatatgcttaaataattaaaaaaatttattattataccaaaaatttacactataaaaaaactatactttttttt

SEQ ID NO: 129471 - DNA, 3439 bp, Cannabis sativa
tagattgaatagattatcttttaatcaaaattatttttcatatatatatataaaaaaaaaaactgctataaattaattaatcattttgttgttttatttttttgtttagagaaaacaattttttaataattaagaaagaaagtaggcaaaatataggaggtgtaatgtacggatatgataaatcgtccacgttcgactactaatagatgtgtctagattcaatgaatatacacacattgattgccaattagtcacgagaataatgaagaaaaaactttcagattaattcaattgatttgaaaagataaaaaaatatgagtgttcattacaaatgaaaaatgttagattttttttgtttatttatttttaatttcaagttttgttcatgaaaacttgaagggctgatcaggcaaacatgaccatgtgtgaccaataattattccttcttagtttatatgaataaaagaaaactattttaggcttctaaatcaagttgacaaaagaatacgatttaagctttttgcttgcaagtcgtgcctagtttccgtgtatatatagtttcccataagcatataattaagtggtgttcatctaatctgtactattttgtttatagtgtatctgacttgcactaagtgaaaatttcaaactccactagctcaaatccaattcaatccacaaaagtgtggattgaatcggttattttaaattagttactttcaatattatgttatttaatatttatgaaaaaaaatattttttttttacataattaacaacaaaatataacaaattatttttattttatatgtccaacaataaattaaaataaataaaataataaacaacaaatttaaaagaaaaaaaaaatatgtattaaaaaatatttaattttgttttaaattgtatgtaaaatatatatatatttataagaatggaatatatatttgatttattaaattttaaaatatatttgtattatatgtattaaatttttaaattactattttctttacattaaaatgttaattgtatatataatttttcaaacaatcttataaatatttgtggattagattagatcggttacttttacatgtcaatcaacatccaatctgcataagtgcggattttaaatttttcaatccaattcaatccgtacaagagtacggatatctgcactttgtggatcggattggattaaatcatgtggatcagattcgattggatcgactattttatgaacactcatacatataatatgaaactaagactatataaaaatactaggttgatgttacgtgcaatgcacgtataattaattttttcttaattaggtttaattaagtgatgttaagtgtaaatacatgtatgttaaatttttttaattaggtaatgcattttttcttttttaatttttaaaatagctaggctttaagattttgatctttgggaattttttttagttattgtggtcacattggtgtgctctttagatgtaattatgtatatatattttatatatacaataaaagaatgaattttattggtatacatattttatacgtattttatattaatctctatatgtataagaattatattagaaaatattttgacaaaatttaaatttaattagagaattaattactttcaaaatatatttatatattatgtctaaacgtatataataaagtgtataaattattagaagcatatatatatcattaattatttttaaaacaaaaggtatcatgaaattaaggtttaaatatataaattttatatatagatgtaattatatatagacataatttttatttttaaatatataattaaattaaaaaaaatttatataaaatatctatataatttttatttttaaatacatataataatattataaaactaataaagaatattctctaagtaattgggatattttgttaaagttaacgcacaaaacaaataaactaagaatttcgttacatgcccacactttatatagaatagtttacacatatatataaggaatacttctcaatggttagaatttcgttacatacccacactttatattaattttaaaaatattaaaccatcaaattttaatctaatgacgaataataaaagagaaagttaaatttccatgtttagttttttacactatatctaaaatatattcatataaaaatatttaagtcaaactcaaattttactctttattttttgctaaaaatatttttatttataatttttttcaaccgatggaacaatctcagctcatatgatgtaaaagtgagacatttttctaattagatagaaaaattaagcatgaaaactcaaatttttctaattttaccaattcatgtaaaaaataattatgagaactgatttttttaaaacaaataacatttagtttttgatattaattaagaatattaaattttaaaataaaataaataaatgtaagacatctgggtcatccacgtgtccatatttatgagttaacggaagtggcggtaacggatgtaagaaaattgtaacattaggtatttttacctccaaaaataaaaatgaggtattaaagtgtataaaatctgaaacattaggtatttatgctgcaatttatcctaactttaatacaactctaaaaaaatatgcattgcatgtttggttagatttattacttaattattaatttaaataataataataaaaattatatttaatgcaattcaattatatttttttcaataaataaaatttagtttagttttaaatttatttataagaaaatatgtcttaagtttagatatttttaataatataattaacaaatttattctaaagtatgattaattaattgaactaaagtttaattcaaatttaaattaagacttatatatataaaaaaaaatatctaattttattaatatttttaaataattatctaagttatattttactaagtaattaaaatttagatatttaaatttttattaaaaaactaaataaataattgattgatttaacggtgttaatttattaaactaataatttttgttaaataatcatatttaatataaaagagatatatttaggtggtgtttggtaacaattttgttttttaatttttaatcacaaaactaaaagtaatttttttttttaattttgattttaaaaaataaaaatgtgtcatatagccacttttgtttttcaattttaaaaacaaaaaataaaagtttcattttcatttgttaattttatttaagtcgggtctggagtcaggtccaaggtctggactggaggtgggtccaagtccaagggttggggtcgggtcgggtttctaaggtctaagttttggagttcaaaacattaattaaaaaaaaaaaaaactgtttaaaaaaatgtgaaaagtgatttttttttttttgtt

SEQ ID NO: 129472 - DNA, 1208 bp, Cannabis sativa
aaaaaccacaaaaataaccatagaaaaagaagaagaaatgtatttatagcctccatcttcctaaggacagatctaccaccacaacatgagaacgcccagaaaataactattattttcagcgagatagagcaagaataatgaaatcggcatcaaataaatcaatcatgacaaaacaagcgtaaaataacagtaaaataaaaaaaacaaaacaaaacaaaagaaaaaaggataaaaaaaaacaacatgttctgcacaacctcaacaccagatgcaatatatgttatatttgcaagtctagttctgcaaaaatcagaataaaaaaaccacactcttatttttctcaaaagcgtgactgaaaatttaaaaaactaaagagaaaaaataaaaacaagatgaagaagaagaactgcataagaaataaaataaaaaataagtgttaatggaaagatagagagaatttgagaaagaagatagtaaaaaaaaatataacttacggattttgaaacacgacataaaaactccaacaagatgaacaatgagagagaatgatgagaagtatgatgatgaaagtatataagaatgtgtaaagtacataaatagtatgatattttatcataaaattaaattaaaagaataaagatgaagaagtgacacaaatttcacaacaccaagtcaaatcacaactttattaaagatataatgggctgccacgtgtgttaaaaatagaacaataaatttttttcataaaaaaatagtacattaatataaaaatagaaaagtcaaaatataataaatatggaataatagtaaaattgaaataaaattgaaaaaaaacagtataggatgtaaattttacaaaatttacagttgattgagttattatatggttggtgaattgttattttattggtgtaatactaaaactagaataagatatactgttcacttgatcttctcattaataaatatgaattctcaaagaatttctttaataatgataataatttacattgtcatctgcatataggtaggttatagacaatataaatttgaggaaattagactctatatcttttttatattgttctcttttatttttacttaaaaaaaggtctattatttttacctctttttttaaacattgtactaattttgtccctgtcacttcaagatattctccatgtgactctcttatgttaagatatttt

SEQ ID NO: 129473 - DNA, 508 bp, Cannabis sativa
aaaaaaaatacacaaatattgcctaattataaataagtttagaaaattgtacagtgccctaaaatgagtgtactgatataccattatttgttttggtatttggaatgattgttttgtaaaatctttttatagtcgttttaaaattttagaacattcgcgtataaatttaacattgatttttatattataaattatttcaaattacttaaaatgttagagaatgtcttaaataactataaagtacacaactttaagaaaaaattagactaaatttttttttcctagataccaaaataaatagggatacatgtgcatcctttttaggagtgcatataagtcaaaggaaaaaaaaaacctttgccaagtggagagtttgttaaattggaaaattgatgcactaataaatttttatccgttttagtatccgaattttttctcatgatcatgtaaattatagttatttaagacatcttgtaaaattttaagaaattaagaaatatttaacacg

SEQ ID NO: 129474 - DNA, 725 bp, Cannabis sativa
ggggggccaaccacctgctcagagctttctttggttcggtcttctcagtacaaagtgagatgttgtggttgttactaggcgggtagttgttcagaacccactcaataagccgagccccttctaacacagggaggttgttccaatgtttgtttctgttctcccatatggcccaaaaaattttaatcacttcctcaaactccactttggacagcttatgacggatctccataagcaaatcaaacatggaatggctgtggcaatctttaatcagcttataataaggcatacatttccaaattagtttaaccttagtacaagaccataaagcgtgagggagagattccacatatctaccacattgattgcaaaggggatcaattgacatgcccctatgaaccaagttcagtttagccggaagccaattatggcaaagcttccaaccaaaaagcttaatccgggggggtgttgaagttgccaccacattttccaccacgtatggatgggctccatgtttgaacaacgagtcgggtggagatttctttcccgagctactctataaccactctttactaagtaatttccattcggggagaaaggccatatcatggtatcttccacttgcgtatctatgggcgttcccaatatccaggggatgtcttcggagtggaaatagatgaggatcttctctttattccgatcttcttcctcattcaaaagggtatgaa

SEQ ID NO: 129475 - DNA, 892 bp, Cannabis sativa
ttatgctgaaacttcaagtgttcaaactctctttgatctacttgaagagtgcttacttcctttcgagggaagacttgaaacactttctcccaaaagcttgaaaaatcttctctgaaaggtttatacttttgttcttcttctttattgactgattacagactcaagacaataaaaaatacataaacacagaagaagagacgaacaccctctcctgtacacaacaaagatactctatcttacacaatataaatgaaatagaaagatgtgaagagatacaaaacctagctactatacgtgtatttataatcaatatatgccttatagacagctcacacaaggtctaaacatgatcacaactcacaagaaactttctttaaaaatattttcaatcaacctagaaattttttcttctgtacagacagaatcgtgagcagtaactgtggatttctttttatagaaaataaaagtcttaattcaattttcttcaaccaagatctaatcaaatcaattagaaaatgaatattaaatcaaaataaattgagaaatacgatcggaaagataaaccccaataaagaattgatattttcattataactttccaatcgtatccaactttcctattttaaaaaagttataacattaattcgcttttaatggaataaatcaataaaagatatacataataaataacacaacaacttagccaaattatatagaaataaaataaaataaaattattttgacaattaaatttgcaaaaatggatttaacatacaataaaaattgtcactaagataaataagttgtggctagatggttgtgactaattgtagtgacattaatagttattagtcacaaagattagtggtgactatagaagtaatttttcgtg

SEQ ID NO: 129476 - DNA, 878 bp, Cannabis sativa
ctgacggctgtcgtacatcacggattgcaatccgtgaaagtacatatccctatatatgtatatgtacatacatataaccagggacaactttattcagtcatatatttatattttttattaaattactcaggtccattaatcaagtttatgtgaaattgattgataatgttatattttatatgcatatccaaaacgaacgacgaattcaaagtacaatcaatttaccattcaaattgttgagtcgatggaagattaggataaagttctactatgctttgttttatttttcataggatattctatatattaagactttatttaataattcttgtcttctattttaaggtgatacttttttttttttaaaaaaaaaaaaaaatcactacataatgttttctttaaattttacaaaacacatatattgctttttgaattttcctgaaacaaagaataaatgttaaagtcatatgttgttatgacttatcataaattatttcttcacattaagtatgtgtatattgatattaatatacttttattattaataacaatgtacatatcataagtttgtaaacacgactatgttttacttaccaaatacacagacacaatttacttttataaaacaaatcattcaaataagcataccactttaattaccaaaatctaaaataaaatcaaaattttaaataaaactaatatttacatggctcggcacgtaacatctgtctaatatatataaatatatgtaacactcttgaagaagaacaactctttttctttattatttttttttcacatcataccttgagtatacaaccaaggagctcttttagattcatcacaccccaagaactcacaaccaattggcgcacaat

SEQ ID NO: 129477 - DNA, 1625 bp, Cannabis sativa
aaaatccacgcttataaagtttcaacacgacaatgaaaataaataaactaattaattaatattggatgagaaatcaatcaacggcttgaacaacgtccattttattattttattcaattaatattgtttatacatataaattatatatatacacataacatatatatgatatatctataatgatattattggaacacatgtgatgtgagaaacgtttttcctctaactttttcattgttatgatgatatatatacatattattttcttattctaaatataaatatataattgtactagctagagcttaccattcaagattaattcatgaaatgtactatattataattaactcgaacacgtcaattttttactatgtataggaagaataatgaaatattattattgtgtatattttttttaatatatatctataacactcatggagatatgatatatatattgtccatgaaagtaataaataatggtaatatatatcaaagcagtaaaaatatacataattatatggttcaataattcgtctaattaagtaactgatattattaaattaagtaaaaaatatacaaaatacaaacataaatttcttattaattaattaataatacttctcaagtgtttcgaaaagtattctcctaagctcataaaatactcacacttagtgagtattttctctctttcaaagtttgactatacgaatgttctctctctctctcagattttccacaaccttgaaccgattacaaatgctcttcaaagagtttcatatttattgaagaaaaaattcatctcccaatcatgtgtaattaatgagatgtagcttatttcccaaccgtatgtaattaatgagagagtataagtcaatagatattgcatagcatcattgactaaataataggattcaaatctcttgattattgaaccatatatttgaaacttaaaaaatttcacttttgagccaaattcaacaatctctaccttggagaaaaaaccataagcgcagggacggagctaatttagctccaaattttatttttttcaaaaaattatgtatttggcctcctttaattacttttttttttatcttttggccccctttattcttaacttctacctctgtccctgcataagtgatgcctccacatgcgccctaggcactctaagttcgagagatgttgatcaagtttaagtagtgttgaaacttaatctctatttaaccacttttgtaagcatatctgcaaggttatctacagtctcaaatttttagagtataacattcccttcatcgataatttaatgaacaaaataaaatcaaacatcaatgtgcttattgtgaccatgataggtgtggtgaatgctcactctcaaaaataggttgttacgggagttacaatatttaagaatgcactaacttaactaaaactaatcacaatatcaaaactagaacttaattgaaatggacaagaataaacttagctcgagaatgaatcatggatatttattgcttgaatagtcaatagtacataattgaatatatctaagaataaaactcaacacaatgaataattacaaagaaatatctcacattgagggaaatcacttcaagagt

SEQ ID NO: 129478 - DNA, 519 bp, Cannabis sativa
gtagatggcattagaatcacgaaaaacttcaaaacccaggaagtaatgaaccgatcctagaattttgagtgaaaacttgttatgtaatgctgtaatgacattgtttatttgtgttggacagtcccctgtaactaagatatcgtccacataaaccaacaccaaaaccatcttgctatctttcttggagaaaaataaacttgtgtcagaggtggagttgtgaaagccccattgcagtaaagttgttttgagagtatcgaaccaggcccggggggcttgctttagcccatatatagctttgtttaacttgcatacatgagtgggaaattcagggtctacaaagccttgaggttgttgcataaacacatcttctttgaggtctccatttagaaaggcattatttatgtttatctgttgattatcccagccataagtagcagcaagagagaagataatgctgatagtacagggctttatcacagggctgaatgtctcaataaagtctagacctggtgtttgttg

SEQ ID NO: 129479 - DNA, 1124 bp, Cannabis sativa
cacaggatttgcagcaagagcacttgcactgagattgtcacaccaaataattggaactgatggcaattcgaacttcatttcacataacagaccttgaatccaggagatttctgctgcaagttgagccaaagctctgtattcggattctgtgctggatctagcaactacagtttgctttttagaggaccatgaaatcaaagaatccccaagataaacacagtaccctgctaccgatttcctgtcatcagggcagcatgcccaatcggcatctgaaaaacctaccagatgaagattgtgactcggagatatgtgcagtccatggtgtgctgtacccttaagatatctgagaatccgtttaactgcaatccagtgaacatcagttggtttcttgagaaattgactcagtttgttaactgagtaagctatatctggtcttgagtgactcagatactgtagagctccaagaatacttctgtaaaatgaaggattctccatcggttttccatcattgatggaaagtggcttaccagcagtcatgggggtagcacatggtttcaagtgctccatttttgccttctgcaacaactcatttatgtacttggactgtgacaaatggattccagtggagtctctgaacacctcaacaccaagaaagtagtgcaatgctcccaagtccttaagagagaacattttgtttaacctgttaatgaatgagttgagaacttcagagttgttaccagtaacaattatatcgtccacatacaccagcaacatgattgtaacttgctgctctttaagaatgaaaaatgaagaatcagctttggagttttcgaatttccagcttaatagagcagatttcagttgatcataccaggctctaggagcctgtttcaatccataaatggatttgtgaagtttacatacatgatcaggtttttgtggatcttcaaaaccttcaggctgtgacatgtaaacatcttcatcaagaatgccattgagaaaggcattattgatatctatctgtctaacttcccaatcaaatgaaacagccaaggcaagaacaattctgatggttgcagcttttacaacagggctaaatgtttccccaaaatcaacaccaggtc

SEQ ID NO: 129480 - DNA, 965 bp, Cannabis sativa
gagagagagagagagagaattgctcaatctcaaaagattggcaggaagctttatttatagtatgaattacaaaggaatacaactaaatgatgcagcggaaagttgctacaaatcagctgaacaagaaaccaactaaaacagaattaactaactgctgtctaactgattaaaccgaatgttattgtaactgtattggtcttcttgtattccaacaataataatacatataattacacagaaagaccaaaaaactttcctgatagtaaactcaatgatgaaacacagagagacctcgtcccattccgttggtaccagatccataattccaacaaagaaagaataaaagttgaattctaggaaacaatccaacagtgcaaaagaacaatcccatcttaaaaatatagagctgtacctctctctagtctttgagatgaaaaggtgaattacctaaaatcctcttaatggactggtgaggatcaacttcaatactgaaacaaatctccaaaagatttttcaaactcaaaagatggcacattcatagcctctgatcgagaatatatcctatgagaaaacttgagtatgtaagtttgcctcaaaaacacttcacctcttatcaacttctgattagttgcactaattatttgaataaaatagattgtatttatctatttatataaataataatagaaagtgttagctcagattttgttaatgataaataaattagtataaatgttatgacattaaaattttaataaatattttttcttgcattgttaagactttatacattaatttttaaattttaattataatattcgatataaaaatagtataaatctcttaaaccataccgtaccacatcgtatttttacaatttttgttagagatattattacaatggaataaaatcaagatgtattacaacgctatttcaatataatacaaggacaaacaaagagatt

SEQ ID NO: 129481 - DNA, 523 bp, Cannabis sativa
aaaacaaataatatataaaataattctctaaaaaaaaatatatatatttttaagaatttattgtttattatatttcttttacacattttttattttttttttattttccaaaaaagacattgttttgaagttgcagaaaaggaatataacaacaatgttatttcctttataaatatacaattgtggtaaaaataaaaaaaaaaatcataaagaagttttaaaaaaaattgtgattttatgtaatttaataaaaattaaccaagtcaacttgtaattattaattattatttttttgtttggaaaaaaatattaaattttgggaaaatattaacaggaattgtagcaaataatggtactggagaggtttcagtagaccaatatcaccgttacaaagtaagtcttttacattttctttttggatttttaattttatttttgaggaattattgtgattggggatttaaattggaaaatttacatggtatactaacttttgtcctttttttacaaaaatactatcagg

SEQ ID NO: 129482 - DNA, 609 bp, Cannabis sativa
attttgagaaattaagaataatttttaatacagagggtttaaacaatttcttcgacatgcgtattgtttgcagagattttcagaaaactaattatttaatatttaagctaaaaagacaattaaatgatcgataaattaagaagacactcagaatttttatgtggttagagcgttaataagccttagtctacaggtcagtattattattatcagataggctaaaaaatcctaaagtattacaatgagtatgagcactctattctcttcttgagcatgtcagttaagaatttcaaaccctttgcatgaacaattcagtatgtatttatagaataatagaggtcatacatagttaccatttttctctaattgggaatttatgacgaatacataaatttgggcttatctggtaaagcccagcccacaagacaatgcatgtatgctgatgtggagactttatcacaataatagttgttcattcgatgtcccttgattgtgaataattaatgtcacattaattattagatcttcaatttattttggtggtgtttggtaacacttttttaatcagttttctgtttttaaaagtagaaaagtgaaaatatttttcaa

SEQ ID NO: 129483 - DNA, 1014 bp, Cannabis sativa
gactcgttttgacacagacgaaggaggtgacgacagagaaggactaaccttattagacaggggaggagccttcccttgaaacgtacgaggtttttgactgactggagtcggagacggagacaggggaggtgaaggcggagacggagtggactcaggactcgagttacgagcagaaccaccaacctctgactggtagaggacaatgtcacgacagggattagacattgcagacacgactgtaggttcgactggagggtcaacagtagttgccactgttggaacaaacatagcaacagggggtacatcagtgggagtggtattctccatttgagagagaaaggtgtgaatgttacaggacttagggaatctgagagaaaagtgaaagagtgagactaaacactttccttaggccttaagtataggctccctgacacagctgagcaggcaaaaaataatgatgatttttttttttaaattttatctttgccaaagaaagtgtacacgcccaaattgaatatttgccaccacataatatggcacacaaaacgaaacaaaccaacgtcatcaggaaatgagagaaatatagagacctgagatatttcaaatatgccagcaatatttgcacacaacccacacttgacaaatcagataaaaaaaagacacttagagatactcaaaattttagaaaataaaaatagtatcgaccgatcaatgagtatgaattagagcctttgagtaaaaaaaaaacaccttgagcaatagatcaatgtatcgcacccatctacaatgatactcatgggatcactaaaacttgaatctctatacgtgtgtgagcagtgaactcatgtggtccaagaagagaggggatcagctggaccactctctcaagaatgactaagaatgattttttttattatataaagcctctttttttttatataaacattctggctctttctttagtacccagacatggctttcactctcttccagagatgtagccgtcctctttga

SEQ ID NO: 129484 - DNA, 994 bp, Cannabis sativa
taacactatttttataataaaaatggggcgtgttccttcgttcttatcttcattaattattttaatatttgtttctatcttcatttctacatatcaccattgagagcggaacgaaaaatcctcattggtgcatgtaatactcatgaaagatttatttatttaaaaataaataaaattataaataaaaaatacaaactacacaaaaattaaaatattatatatattcttaatttaaaatatttaaaaatttacaaataaaattgttatccctatttccgaataggttcaacacggaagtagtaagagggggccacgtcggatagtttggaaacatcccggattccccaaagttttaagataaaattagggaaggcctcagggtatccggaagagcgcatcctttgtaaaagaggaatcaatccttgaagttgtaatttgacacttctaatacgcggaagcatatgcaaagcccaagccttcagggagctctcatgaattgggtatttcaggaggtcccaagttgcacttccaggaagcaccttgtggcctaacccggaggcacatttgacggttacacctcatctaacaccaagtcaaatcttgtcccctgcatcaaaccatagttgtacgcgtacgtgcccctgtagtgcttattgtccaacagcttgtctgggatattgcttttaaaggagagatctttgaacgacacgtgtttgtgtcctcacgtgataacctgcatcaattaagcatcgcacgatggaagagtcacctaccaaatcaatggtcagatggtcttgtagtattgcacagcctcatttgcatgctcagtaaggaaccctagtggggtaagagggtatgctctcgcctacctacgggcctataaatacctcccatttttatgtacaaaggaagaacaatttttacttgcaaaaactctgctaaaattcctagagagctttcttcttagagaaaaacaaaaggaatgcaaagattg

SEQ ID NO: 129485 - DNA, 746 bp, Cannabis sativa
  modified_base (117)..(117): a, c, t, g, unknown or other
gttctggatttaacagaaattgtagattaaaccataaacataaaaaatacatgtaaacatgaatgacttctaatcttctattgataacaaataagattatattaaaatgagttttanttagggcataaaatctcaacaatgctacccaaacactctaattctaggtaattaagttcagtaccttcaacaccttccatagaaggagaacttgaaactagtaaagatttgacaaaacaaggggcaatgcttgaagaaagagagtcaaatatttgagaaggaatgtccgaattgtctatgttttccataatttactaaaaaacaataaaaaagagaaaattttcttttaaaaaaacttgagtaaaaattgtaggtttgagataaggatacaatcaacaaaagcccatttcctagtaagattaaccaaaaggaaaaagaaaaagatatcaacccaaagaatagccttataaaattggaacctagaatttttcaggaaaagacacaaaagtaaagcgcacacaaacaaactaataatgtgaattggaagagaaagggagaaaggcgagtagatatatacctgaaataatgttaagcaaagagaagaccagaacaattcaggagcgagaagtcgaagcgaacatctgaaagaagatatttcaatttttttcttaaattagaaattttatattgtaatatccagtttaaaatagtatttaatttttttcatttggatattaattgtgcgagga

SEQ ID NO: 129486 - DNA, 841 bp, Cannabis sativa
tttttgccagtatagtttgcgaaatgcgctggtggtaaaagtgacatttcttgtattgtgtgaaggtttagtttctcctattttggttgtgagattttgattacagactcagtatctcattttgttctgacttatagtcttaatttgtttgctcctttaccccatttgttgtttgagttactttggttggacgaacaaaatatttgtaatggcttttggaagatcagttcttgtttcttcgaataaatatgtcaaatgcttatagtatcaagagtctcttaagtttttatcttcttctatcactactattgatgattcaagtaaaccaaatttgtgcctccttttctcatcttccgaataggtcattgattttggtgctacaaaccatatgacaagtagttctagcttcttttctaatctttaacctcacgcttctatttctactgttaccttagtcgatggatcaccatctcgtgctcttagatttggtccaattactcctactcgaattctttctttgttgttggttttacatttacttaatttttcttttaatttgatctctgccagtcaacttactcaggatcttaactgttgtatctctttctttttatcattgcttttttcagaatattatgatgaagtaaattattggtaaagaacatgaattcgaaggcctatacattcttgatacactaatacttaaaatcagttgcttgttccgatgtataatcccttcaaggcacattgtaggttgggtcacacatctcttcctttgcttaaaaagttttgtccacgatatagtaagttgtctttgttggaatttattttacaaggatct

SEQ ID NO: 129487 - DNA, 1286 bp, Cannabis sativa
atgaagtccgctagcgcttgtccttttatggaagtgcgtggtatacagtgtagatcaaactggcttaattccatagcccatttgaggagtctcctggatgcctccggtttctgtaggacttgccggattggatggttagtcaacaccttgatcgggtgagcctaaaagtagggtcttaactttcctgaggctatcaggaggcaaaaaactagtttttcgatcactggataccgtgtttccgcccctatcatgcgtttgatgacatagtacacggggtgctgagttttttcctcttcccggactagggctgcactaaccgcattctcggagacgactaagtatagtaacaagtcttctccgagaacgggttttgacaggattggaggtttagtcatgtgctcttttaattttttgaatgcctcctcgcattcttcggtccattcgaatttttggcatttcttcaagatgttgaagaagggaatgcatttgtctgtggctcgggaaataaaccggctcagggatttctctctgtttgctactctgattgaagatcaggaattggtgtttgtaagcaacattttaatagtggaaatactccttgggggagagctggaataggactcacattgagatccgaaccaggataaaattccttgtctcactctttatttttctctgttttctgcattgatttttgtcttgtttatgtttgattcttttctggttttagtatctagtttatgagcattgttgtgcatgtgtgtgtgatgactttgtgttgtaggaatttacaacatttataatgacaattttatcttttaaaagatgtcttacaaaataactgctatacactatagttaactcaaaagggtaatttagtcaatttaagtattttgattacgtatcttgataaattaaacaagataaatcattatcattctactttcaagaaattttagtaaacaacatattacaaatattgattttgattattcttcatttattccgttatatttctcaattattttatttctattctgaaaattgtgtagtaaacgtttagaattgacttatatgtaaataagtaaatgaaaaaaattattttaactttattttctttcaaaaatatacatgagacacttttttgtcatgctacaaaaaatgaaatttgctcgactgaagtaccattatttatttatttttttttttttgaaacagaggatgctttaaaacctgagaaaagagtacaacataacaagaatcctcaggtaagccaggaaggcaaa

SEQ ID NO: 129488 - DNA, 864 bp, Cannabis sativa
  modified_base (51)..(65): a, c, t, g, unknown or other
tataacaatataaaatctaattattcatctaaactaaatgaaaatactaannnnnnnnnnnnnnngttggatgtattggatttttagacaccccatccaccattcgattagatccaattggatatttaaaaataacatccaatctgatccgatcacaattggatatccaatatttaacggtcggttgtaattggatcggtcgatttatgcacacccctacttttaacttcatatgacccttaagcaaaaaaaaacttcatattctctctctttttctctctctaaacttataatatgtatctatcaaactttagtaattaatatgtaaggtctatttatagtaccaaatatttacttaatattggaaagctacagattatataaaaatatattaggacacatggttgcgtatgatgataacttaatttaattaaagaaatcatttaaaataatactccatgattgagagaacacaaagatttgtgaattaaaaaataatgaagccacgagtctcatatttataggtacataatgggtcgtgaccctttaaccatgtagatgtagttaacacattttaaaccatcgttacaattatagtaaaatatttaaattacaattacaagtagttgctcacttaacatgtgtagctgagcaatgactaatttcaaacataagtaacaattgccacatgcatgcatacattttaggaataacttttactaaattatatggtgtgatcaacacagaaccctgtgaaaactaatcaagattatatgattaaatataattttcttataatttatcaatacacagggtttaactgataggataatctacaatgtaatttacttgcaccttggataa

SEQ ID NO: 129489 - DNA, 821 bp, Cannabis sativa
tagacccataaagacagtcttgttagtgtacagcttagcaacaactgatttctcgatggcctccaccccaagctcatgatctgcttctaaagagatcttgaaatcctccaacccacagagctccacctgttccacctgtgtctcctcagatttgttctccatcactagaaagatctccccagaaaacaaaagaaacacagacagaaagcagataaccagtaataaccagaaaacaccccttaaacagcaaagagagcagcgagagagcaaagaacccgagaaaaaacctttcctttttgcagcaaaacccagagcgaaaacccagagatactgaaggatgtcaagagaaaccctagatcacaccaaggatcagaaggaatttcgcatataacgacaaaagttacactgaaattcctgtacggaaataccaattccctcttaaatcaaaattgaaattcccaatcgtacggagagcattttccccaattcctttttgatagagtgcttgttgctcttggtgtttggtggttgataatttttcctaaaattaaaaaatttgcttctcgaaattatgattactatcatattttgctctcaatttttattactgccaaactgcaactcttaaataaaaaaaaaagtatggcagtagtaaaagttcaagagatagaatatgatagtaatcatatttcatggataaagttgctaattacttatcaaaaatcttatgaagtctaacatgggcttcacagaatcatattttattaagaaataattacataagacacaattttttctaaaatatttatatttttacgttc

SEQ ID NO: 129490 - DNA, 1897 bp, Cannabis sativa
aaactaagaaaaagaggaatattaattacaattaatggtaataaataaaatatttagacatccacataattattaatatttataataataattaattaatacaaaaactataaatcaaaagatttaaattagagtactattattatagagtacaaatagtaactatcaataacctataaatacttaattattggtaataatactagacaccattattttaagttatttgtattttgtaatgaaaaagaattacagaatgattattttgttgcgataattaattaaggactgaaaactctctatatatatgtatatatatatttatataactaagttttggcccaccccacaatatagtgatgaatatagcaattaatgagttggtgggtactctaatcgtaattgacaatttcaatgtgtacactgtacatgcacctatttaatgagagatatccttctagtaatttcgcaaccactgctttcgccctaatatgttggattttttttccatcacatattatataacatacgatacaaattacatactactgtgctcagctcttctacaattaaaactcactatgtttgcgagattcaacaatattatttatcttcataatatttaacttattatgtatggataaacactacaaattataattagacaaaagttcttaaatctaaaaatatcaatagttcaggagaatttttaacagcaaaaaaagttcaaaaaatatgatttagtatatgtcaaaatagttcgggaaaaaaattgctaattagtctaatattatttatcttcataattaacttattttgaatgaacattttgaataatgataaagaaatacaaaaaaaaaaagttattcaatttatgtatagatagacagtacaaattacaattatgataatcatgatactcagttactcgactactattactgttcatatgtgttctataacatttcataattaaaataataatataaaagatttgagtaatttatcacataaattttactcttagttgtaaatatctatatttaagtttaaattttggaggtaataatatctaactcgttttttggaactactctgtaaaatatcaagtgattatcacgtgttattttcttattggtatatttaaattattttttttttaaaaaaataaaaatgtaatgatatggaccaatcagtggcaatttataacagtcatgtacctacaaaaattcaagaattataacttaagtattataactgttaaaaattaaatttaggttttgcaaactaaatttaaacttaaatatttatgccttaaattactcaaaaaaaatttacctcttaaaaagctaaacttatgacactactaaatgatgctcaaaatatatttgctggttaaaaatactctccaaaatacatattactaataggtattcctttatatttatttatttaatttaggaaacgaaaaacttgattaaataatagagaaaaaaaaaatactttcccaccaattttctaaggatttagtatacatgattgtattggattggattagaaaagattattggactggatcaaactagataggattatgttgaatccagtaatgtgtttggttatgagttggattggattttttatgggattttttacataaaatgccatttttttttcactctttaaacatttatacagttctatactttcacttttcatttttaccatttttttaaacaaatatacggttattatttaaaatgttacaacaaatacggttttgcttatgtcacttaactgcctacacgtttctctctattctgtcaaatatcaatcacttctcttgccagttatcactctctaacgcactctctctttattcttttttttttttttt

SEQ ID NO: 129491 - DNA, 713 bp, Cannabis sativa
  modified_base (665)..(675): a, c, t, g, unknown or other
ccttccagccaagtcaataaaaaaaaaattcaaagctcctaaaaaggtttgttctttctctcctatacacacgatggtgtttcctactatctcagcagcctttgtcgatattgcttttccatctgtagtggtggttccctctccggccacgaaaggttcatctcgcattgctgtttttttgtttttactaagaccactagtatttttttttgtcttggtcctattgtctttctttgtttttttactctacatgtttactttgcatattaattggagtttttttatttaatattctaatatgtttctctttctttattattttttgtcttgatttttttttatataaaaaaaggatcattctttaaggaatttgtttactaatttcttcttcttctctcgtgatacattattttaattttgattcatttgtttcttctctaagtttattcaggaacaatggtgatgagttgtacttgtgttggttccttttctttccacatgatggtatttaaatagataaatgtgatattgaaataaattaattagataaatagtaaaataagaaaaagagataagtgtttctttaaatgaatcaaaatagaaaaaaattgaagtccttgggcttaaggagatttcggccgggataagttgaaaaataccacttnnnnnnnnnnnttaatcaaatttacctttaattttatatttaattgaaa

SEQ ID NO: 129492 - DNA, 933 bp, Cannabis sativa
gatatagagcccaattaaatggactgggctgattgtggtagggcttgggccttaaataattgggtttaagtttaagtaaattgaagcccctccccatcatcgtcttcttcgaaagaagatccccacttcgcagctcttctcttcgagatggtgtcttcaatggctgaacctcaggcgactcttccagcgaccacgtctccctcttcttcgtctccggcgacgacttccacggtcggttcggctccgtcaccgccagcaacgtgatcgacctcggcaccagcgatgaaacccacccaaacgacaccaccagcgggtcttcctcctccaacgttatcgctgacagcatcttcgtcatctcctcctcgtccgacaccatcttcaacaccaccttcttctccggcgatgttgcccgctgtgggttcttctccactgaaaatttcattccaaaatcttggcaactcaatgctgattctgtttgttgatctactgagatctgaatttttttctgtgagagttcctcaacagcaatcggtggttttgcttgaatagatcgcacatcatttttaacctcagtatccatggaactctccgattgtaaaatctccgcatcactagcaacattcatcacatccaacacacgtgaattccactccgtcattccaggaaacggtggtgcagcagtgacagtctccctgaagctgtcgagtctagcgaacgctcgtttgtgttctcttattgccctgtccatctcttcatcgcttttaacatccttctcttcattaatcttagccacaatatcctttaggagatctgatttcacaagatctttgtcatcttcaaccttaaaccttcgatgatacactgaaccttcgtgcgtggattggggactgaatctgcgaatcagtagggatttcagttcattccacgtttgaa

SEQ ID NO: 129493 - DNA, 1565 bp, Cannabis sativa
gggcgggttgcacttaaattttagcaacctgaactttagattgggttagaaaatatataggataaaccacccaaaccgaccgatgtacagccctataacacactgtttgaaaaagtaaaacccaaggacaacgatgtggcattaaacaaggtaaagaatcaaaatttgtgtaagaatcattttttggatgacgagaaagggtatcttattacttccactcccaacatcaccgatgatgccaagctacaaattgtgcacatctcacccaaaaatgctacaacaacatctacttaattgattacaattatataaaattaatacatctttatacatatatgtataaataatgcatctttatacattttttaaacaatttattgcatgtgagaattaattgattataataatcgattagttgtatgagaaatataatggagctaactgactataaaaagcaaaaattaagaaataaaaatggcaaacaactaaaaaattaataacaataacaaaaatgaaaatttaagaactaacatacttaaaatactaaatatttctttaaaaaatactaaatattaatactacaattggattccatgatagacttgtttaaatgggacatcttgaatcccttaataaatattaataattagataaataaaactgcttttgatttaaagatcaagggaagaagacttagttaataatattgcactattagcactaattgctatagattaattaggtatgtatacctaattattatctattattgtgttctagattatatacaaattagtatcttaggttatttgatatttctaacatgtagaattagattgtgaattgtatataatttaaaacctataatttgtgtaacaattaatatgtatatgttaattatccttaattttatattaatttcgttattattttatgttgaattttttgttgtttaatcttaaaactttaagagttttattcctcgttaaattctctttctgttgatatattgtatgtatgaaatcattgagtaaattgagaaaattttaagtttaaaaatttagggtttatgtaattgaattttgaaattaattttgttgttaatatttcttcattgatcatgtataaaatttctcaattattttaagatatcataaaacataaaattttgaattagatcaatttaaattgattgattctaatttttttcattcttcatattttcgggttggatcaatcagatttaccttattttagccgtttataatcaaaattgataccgaaaatctattataaatccaattccaaacaaaacccctcgagatctactgatcttactaatatcaacgctgttgcccagaaaagtcttcatgcacaataggaaaagtcaaacaacttagcttcattgctatgaaaagatctattcatgaacatctattgaagtattgagtggttttccagacaccacaaatgctaaagaatttttcaatactgtctaaaatctatatgacaccagtgaaaatgctaaagctggacattttatggatgaaatgacaaccattaag

SEQ ID NO: 129494 - DNA, 870 bp, Cannabis sativa
tcaacattcttagacacaacaaaaaatttgagtggacaaaggaatgtgaaactacattccacgtgttaaagaaacaattggcttagcaactagtgttgcccaaacccttagacaatgaagaactatatgtgtacttagcagtcacagagcatgctgtgagtgctatcctcacaagagaagaaggcggtgtacaacaacctgtatactacattagtaaaagactaatcgatgttggaagtaagtaccgactcatggagaaactgacttgcagcttgctcttggcttccaaaaactaaggccatacttctaggaacaccctataaaggtgtacaccgatcaaccattgcggtaggcttaacaaaaacctaaagcatcaagctgaccactcaagtgaaccactaagactcgccaatataaggccacctgtcaatcgagcatggccaacaaaggccaagctcttgcaaacttcatggctaatcaaagaagcatatcccccctaatctcttaaagtttaggagaaaagaaggagccagagaagaagcgagagtagagtaaaacaacttaacccaaaaggtgcattgaacacctgcccgatgcaggcatggcccctagggcacctgaggggcaatggatgcataaggcaacaaggtcactttcaaagcttctaacaacgaggcttaacatgaagctccaaatgctagcctcaagctagcacacgaagcgcgggctgaccaactagacatacaccatgaggttatttcctaggtgaatatacagcgcaatataagatgatgatggcctactcatttcaatataatcagatttacttatcaatatagatcagaaattacatttaatgttgcatggttc

SEQ ID NO: 129495 - DNA, 810 bp, Cannabis sativa
aaaaaagtattatcaaatgccacctaaataaatgtatatatttacattactctaagtaaatatattacacaaatattataaaattactctaagtgtttaagagttatttatacatataaaaatttaaaaaattcacagtattatacaagtgttctagtcatcaccgtgaatcacctcaagtaatttttctatccactcttgctgtaacggtaacaaatcattttctgcatcgtatcaagcctttcccccaaactataaaaaagaacaagtaaatgtctccagcccattaccacctgccatcagaatagtacatggtccccatagggactacctacaactcatttataaacaatgccaatagaggccaacaataaccacccctctaatccattagagaggtgttttggaaccttgtaattttaagagaccatttttaaattacaaagcattttacatcttctctcttacccacattctcttatattgttacattaagataactacaccaattttatcaatcattactcaaggttaccaaccataatattgtgaacgagttcttactgtcaaaaatttcgaacggtctgtgggaaaaaaaaagttcaagctccatttttcctaggaagatcaatcaaccttttgaaattctaagtcattcccggcatctagaagatgccaaactttgtctcgacaactatcgaacagttctcatgagaaaactcagacgtagacatccaattgttgggttttatgccttaaataaaactccatttcaatgtaatctttatcttttaaatatcaataaagaaa

SEQ ID NO: 129496 - DNA, 840 bp, Cannabis sativa
ctagagcttccatttgttatcctggtcgtatgttcagtttggggaatgtcccaactgttgtgctacctcatttggtagctgattttgaaggttaataaagttgattttcttttaaaaaaaaatctcaatcatttaattaaaagtgatatggtccaacttaaaaatataaatggttaatatttgttacaaatcactctgcgtaataaatgtgtatctactcaaaatatatatagtataatattttttttagggaattaatgggttaaagataatctaaactattatattattatgtcagctaataaataaataaaataaactctgtataaatttaaagtaatccataattataactatgtacatattatgttcttggggatataattttgttccgtgatgtactttcacggaatgtattccgtgctacattagataggtttcaaggtacattagatgagtgtcagtgtacgttactattttttaaccctaatgacccctagatcaatctcagccctcagatcaaataactctctcatctaccggctgtcgtacatcacggaatacattctgtgaaaatacaatcatgggacaaaatcatatccctatgttcttatatgtatgtaaaacattatagtttttaaaataaccgaattgagactgagtcgagaataaaacccaacacctcaaagttcctaacatctatatattctcttacgtgttgttattttggggaattactctatatactatttttttaactttttttttaatttacggtttgaatttctaaagtagttgcagcgctagttgcaataggagtttctatacgattttttttta

SEQ ID NO: 129497 - DNA, 868 bp, Cannabis sativa
  modified_base (38)..(39): a, c, t, g, unknown or other
ggtgttaatcaacatacatgtgagtagatctaagatcnnggtaaaataatttccaacactcgcacaggtgtttgtgtttttcttggcgattctctcgtgtcttggaagaggaagaaacaacacattgtgtctagatcttctgcataggcttaatatagggcgatggccaatactacttgtgagttggtttggttgctatctttactcaaggagttggggattgagcatgaaagccctgccatattgcactgtgataataaagcagcgcaacaaatagcagccaatcccgttttccacgagcgtaccaagcatatcaaaatcgattgtcatattgttaggcaaaaggttcaagaggggatcatcaaggcatctcacacttccagcaaagagaaaattgctgatatctgcactaacgcattgctgccttctcaatttcaagctctcaaagataaaatggggttgtatgacatctacactccaccttaagggggtgtcttaaagtgtaagatgtagtgtacacgtgtcatgttagttagagggctgttatttctgttggaattagttagagtgtcctaaccgactctgttctgttatttgttctgtgagtctgtatatatatatatcctctcttgtaattctctcccaattcaatgaaatacaattctttcttctttatcttcttattgctaaaatatacctcttacttttagtaaatgtgttaaaatttcattgcacgtactagtaagaatttggtaacatagcttagctttttaaacactcaatgacaagtatgctctaataagttgttaaagtaatattggtttaccatattcccagatctctctcactcttgattcttccaacacca

SEQ ID NO: 129498 - DNA, 755 bp, Cannabis sativa
ttaaattatattacaaaataactcgaaatatacttttaaaaaaagacttatgtgattccttgataagggaatgagagtgaggtacgtcgaaaagacataacattactaactaaaagcataaaatccaacacaaattggcacatcacaacaacgaccgtacctcaaatcaaccaagcaaggtgctaatcccgcatatttagcattaaattaataaataggcatattataaattaataaaaaaaaatacctacttaaacctaataaatatataaattaaaagcttccaagtaataactataatttcatacagctaaaattaaaattaaaaatgctatgtgaaaaataaataaaaagaaaataacataattgttgtacctaaaagtaagtattttaatatttatacttgcagatgcactaattattttagaatataatgttcatgtaagtacgaggtcgaattcatgagagttgactaatattaaaagaaactatttcaaacaaagcaaaactattcaaacttagttctaaatatttgatgagattttgttgtagaaaaataaaagataattaatatataaaaaaaaaacaaaaagaaaaggtttaggacttgtgtaaagagtaggttaggttacaaaaatttcctaagtagctttatataatgagcaatttgcggcgaaactcccttatgttttgatttttatacacttaacccccttatctttatttttggtggcaaaacccccttatgttttagt

SEQ ID NO: 129499 - DNA, 781 bp, Cannabis sativa
  modified_base (53)..(62): a, c, t, g, unknown or other
gaccccgaacctagactcgacgtaaataaaatcaataaatgaaaatgaaaatnnnnnnnnnngaacacacttatgttttctgttttgaaaattaaaaaaacaaaaatacaaaagtggttgcagaacgcatttttgtttttcaaaagtaaaatttttaaaaacaaaagttttactttcattttgtgattaaaaaattagaaaataaaactgttaccaaactgcacctaaatagacttaaattttttttaataacaattaagcccccacataataaaaattatgggtcaatcactaaacctaagtggtctaataaaaaacattagtgagtatatcttagagaaccttttactcaaaattttggaagtggggtattgttgtcttttcatagtttatttagcgacttactttaagattgagtttagggaacgaaactcaaatctcagtctgaaacgaattacaccctttccaatggcaacagtgttcgtcgaatccaagcagccagaggcgatgatgccggaggagacttgctcctccatcgcagcaaagcaaggggaaggtcttaaacagtactacctccaacatatccatgatctacagctccaggtccgcctgaaaacccacaatcttaatcgtcttgaagctcagcgtaacgagctcaactctagaggttcgttatttacctaacactaatcaaggttataaattgttgagtttcttaagggcaggttgaatttttgtttagttacacttttggatttctgggttgttttttttttttttt

SEQ ID NO: 129500 - DNA, 523 bp, Cannabis sativa
ttttttttttttttttatgtgtatctacattttatttattaaaaaaacaaatagtataaggttcaaactagattcaaacttatgaccactagaataggaggatgttttcacttaaatttagctagttatttattattttggattatattaaatgtataactaagcccactctaaaatttaatcctaagtctgccactgaccgcgacagagtctagtcgcattattacgcctcacgtaatataaagtaaaagcaggaccaagacagaagtatacaagtcgcacatatattgagatatatgcaatgactaaatagtcttctcttgcgacttagtatatcgatcatttctttacataaagaattggtccaaatgacccatcgtacacgatgacttgatgaggactcgcatatcctatattatcggcgtttataaggtatctacatacgcgactcgattaggacgcagatgttgggattttacgccctaaataaaacccattataatctaatatgatttgttatcaa

SEQ ID NO: 129501 - DNA, 1043 bp, Cannabis sativa
taagtaaaaattttattgaaaggaaagcaaactacaacatcctcaaagctaccggagctatgtcccttagcaaacctcgagtgcaggacatggcacagctcgcccatcccgcaaccgcatcagccacacagctatctccttgttttaatttgtttatatgaatatagatatgacattgtacgatagaatgacataaaagaaaaacatgattcaagtttgttgatggtggaattagaaattgttgtgggaaaatcaagaactaataagtgagaaattactcaagagaggtaccttaaatggtaagacatataatttcctcctacaaggtgtgaagttagagtccctctttgttaagggtatatggttgttataccgttagtgacagttgtaacagtttgtctgttagttttgtgtcagctgtaactaattctctcattcattgtattgatctcagtcactatataaaccatatgtacaattaacactaaatgaataagattgctctttgtttcatcaatcttcctttactttctttctgccttttctttatgcttttctttcagtctttctatcttttgttcttgctctattttctctgcttctcagttcagtcatggcgaagaggttcaacatggtatctgagccttttcctccattgacaacaaacatagtgagcacaagaattgttaacaatggcaatcagatcaactccaacaccaacagatctcagaaccaacaaaatagagcctttgctttcaatcgaccaagaaacaactcaaatgaacctattcctgtgtatttcaatcacaatatgtctattagactaaatgatcacaattatctttcgtgaaaacaacaggtgcttgctgcgattcgtggaaaatagactgatcaaatacattcaggatcgtgctccaccacctcagttcttgagcgatgttatttgtttggttttgtgccttaaataaaacccattacaatctgatagttatcaatttaagagttttgaagtgattatgtttacatgtattttacatgcttat

SEQ ID NO: 129502 - DNA, 1005 bp, Cannabis sativa
aatagcttcgttgaggatcctccacaatagaaccgccaatctagggtaaacttttccattccagagccactcccaaatatttcttgtgtggccaaatctcaaattttgatcaacacaatacgcgctccttatgaaaaattctccattcaaattatccttccaaataagagggcaaacttgttatcacatttaagactctcaaatgagccataatattcgaactgactcacaatattactttgaagtaagtattttgtcactaaacgctcactcaataataaattattttaaatatttaattgttaagaaatggtaagataatagtaatgtctctaacatattttttttgtatacttaaataataaacttaacatgatttctcctttgtatttcagtatcaacaattaagtttgacttttgacgtattaataaaggtgttaccatattgttgcattaatatcataacacactatcatcaattatttttaatgtacattattatcaattattttaatataaatgtgatatgataatgtgttctatgaaatataaaaggtataaactttcaaaaatgtctgtatccattgtctttgatgggttggtagtttcgtttactttcaaaatgaattttgtcattttatatttcgtaaaaaaaaaaaaagtttagtggctcattttatttttattttgataaatttattagatttagaattagatgcatttatttaggtagctcattttattctagtcttatagatgagtatttatgtgctaaatgagaagttgttgttcactaaactactaataaaaataaaagaattaagaacgatattatcgaatgaaaattttagattgacttacacactaagtcgttctttttcagacgttcgcgatactgtttatgaatgtgcaagtagttaaaatttaccgatcattcccaggataaaatagtccagttatattgtatcgaaattgtaacgccctaatgctaaggcacgctacagt

SEQ ID NO: 129503 - DNA, 700 bp, Cannabis sativa
  modified_base (62)..(62): a, c, t, g, unknown or other
tacttctatttctttattgatgttgaataaaattgattacattgaaatgaagttttatttanggcataaaacccaacaccaacaactcaggaggaggaagaggttcaagaaataatcgtggtagaggaagattgggagaggtaacaacttcaaacctacatgctagatctgtgggcaatatggtcatcttgcaaccaactataataggcaagatgatgcttatatgggacagccccctggacaagacgatagccaacaccagcagcaacatcaagctcttatggcaacaccaagtcttgtcaaggatgacaactggtacattgatagtagggccaataatcatttgacactagatggagacaaactgagaaacaaaactgagtattgtgataaggaaataataaattttttgaaatggcagtaagttacaaatcaaatatgtttgtagtggcagtttaaaacctaccagttcaacacctttaatactgaataatatgttgcatgttcctctaattgcaaacaacttagtcagtgttgggagcaggtaataaggaaggaggtgttatacgggacacttagagtgttgggctttgtgccatagataaaactctatttcaatgtaatcctttctattcaattatcaataaagaaatagatttattttcattacttatttagtgtgttattttgttcatgtgat

SEQ ID NO: 129504 - DNA, 1483 bp, Cannabis sativa
acagtatttttgaaaacttttttccgtgtgatagtatttttgtaaaagttaactcaaattctaatatttttgtaaattttccttaattatatgatcattgaatggtattatagggaacatatatagtgtccaaaatcattgtgagtattgtacgaaatcaaatctgataatgatttgcaccaataacaatatgctacatcttatgatgcttgacactataaagtgccccttaacattttcaacttaattatataccttagaaaatgaaaaaagatctatttccaaaaataataaaaaaaaaaaaatcaaagaaaattttatggtacatccctaaaaattggtatacgcacaacttttttttttatatatatttaaatcattttaatctttttttttatgctaatatatgtacatataatatttatttaaggggtaaacactcattttgatatcttatgttttgctaaaattaatttttcatatcttatgttttgaataataataaattagtaccttttgtagtttttaccaagtatggatttggacaaaaatattaggagtttttttaattttactttaaaataatttttttttcgtacttttaagaatttcacacagaaattcatatagcaactaatggagcaatttaaatcttaattaaaatctgtatagcaactcacatataaattattggagaaactatcagagtaacccaaactgtaattttttttaaaaacaataaaaaaataatatataaaataattttctaaaatattatatttagtatgtcaaagcaagattaattcaaacagttagcatgtttttcatttttttttattctgtacctataactgtttgagcctaatttatggatataattataaattttttaaaatatactttatacatacttattttgtgccacagttgtatatactcaatcatcatatacattactttgttatttaaaaatcaatagaatataccttattattcatgggaatatgcctaataatagtatgatcacctgagatccgatcatttaaactatttcaaattacagaggtgatttttattgaaaaccaataaatatatatatatataaaatattccctataaatattaaaaataaaataatccgataatatggcttatagtatgtataatttatattgatcactatatattttattaacttcatcaatattgatattgctgtagctgcaatttcatatatggtgtaataatttagaagtgagcatccgattcaatttaacttttttttcattatctgattcaatttatttagtaattggatttaaaaatttattatccgatccaatctaattagacctcaaaatctaattcagaatctgtttttaaattagatattcaattacacacttaaattttaatattaaattaaaaatatataaaaaaaaaaacgtaaaaactaaatatcaccctttatttaaatttaata

SEQ ID NO: 129505 - DNA, 551 bp, Cannabis sativa
tgagttccgtgccttggcaaacacaacagcttaacttaaatggtttcattctctttttactgagttgcaggtgacattagctgatgttcccatcatatgggttgacaatcaaggggctgctgctcttgcaaccaaccctgtatttaacgctcgctgtaaacatattgaaattgatcaacattttgtgcgtgatcaaattctcaataatgaagtctcggttagatatgttccttccgtcgatcaagttgctgatattctgaccaagtctttgccaaaagacagatttcactatttgagaactaaactcaaagttgtgtcttccccttttcgtttgaagggggatgttaactaactaactaactgtcttgacagttggttagtgttagttaagttcgttattttgttgttagcttcttggttgttttatttgtaatagttttgtattttcaacgtgtatataaactcttaattggtcattaataatatagaactttttctgcatttctctctggtttttgaacatactctgttcttcccttttctcttttctg

SEQ ID NO: 129506 - DNA, 724 bp, Cannabis sativa
  modified_base (27)..(34): a, c, t, g, unknown or other
aaaatagattacattgaaatggagttnnnnnnnnggcataaaacccaacagtgcactccctccccgaagggagcgagccacctaaaggccaatattcaaccaactaggaccgagaacaggtggaaacacccaaaacaacaatttaagaagtgagactgatcactttaggtatatagatccacctaactctagcaactggtgtgatctacctcctgtcaacacactaacaacatcaaccaactagggaatcatgggcaaccaggccctacctagtacagggctagccaaccatggatagctacctaatataggcttggctaaccagaattaacgcccgtacctaggagtggtcaaccaaggccaacaaaatagtacagggccgaccaacctccactatacactctcccagagtatggccggccagaccttcgcacattcgagcctgcagcccctccaaggagggccagccagtcaagtctctacggcaacagatacttctatacaagaatagttagaccaaatgagggacatgatcaagctcctagcttgtctgaaatcttcaaaccgtgagatagaccagtcaaggggatcaccattcttggcatacataaatgccttagccttgcccaagttcaagatgccagtatgtaagatgtgttgggatttgtgccctaaataaaagccactacaatctgattagttatcaatacaagaaatttgaagt

SEQ ID NO: 129507 - DNA, 787 bp, Cannabis sativa
tggaggtggacagtcaagctggataatttttctttccatactattataatcaggaacctgtaacaaatagtaagactcaatattaaattacactattaataacatatataatctatatttattgtgttggatatctttaagttaacttatgggcattaattgctatgggacaaaagacatcgagaattgctaaaaaaatacgactggtgcctagcattctcctcagtgttataccactattgttgtaattaagtatcagatctcatataacttaacaaaataatttttaaaaaatattgctaactaatcgtgcggtgctacctatagaagctgctggacaccactgatgcccaatagcaatgctcctaagatgcctggcacctagggccggtcctgagttaaaataggtcatagaaaaaaaaaatttggcccttactataaagattatgaatggtatttttaaaaattattaaaaaaatatgtatacttttaaaaaaaaagtatttgggcccttaaaatgggtgagccctagtcgcgggcctagcttacttatgcctaaggctgaccttactagcaccactatgaggtgctgccctataattagttaacgattttctataatttttattaagataaaataaataggaccccgatattaagttacaccagtagtgatattacacctcaaaagatgtaaggcatttaagtgccctttagcatttctcgttctttgtttttttggtgtgtaattaataagcaaaccaaggcaacaataattaaaagtcaa

SEQ ID NO: 129508 - DNA, 799 bp, Cannabis sativa
cgtatggcgggattacctacgggttcgggtacgaattaacatcgattgcccattgaaaaggaagaaaaaagtggagaagcaaggaggggtgttctgttatgctaattttaaatatgaaggactgcctacattttgctttatatgtggcgttcttggtcactcggaaaggttttgcgagcaattgtttcatactcccatggagcagataaagaagccattctcgctggaactgaaggcagcgccgaggagaaggaattacgcttctggagagaggtggttaagatccggggtggccacaaaacatggaggtgttgctttctcagaacacacggcggcaggggagaataacagagttcacaaagggagtccgatgatgcaagtgcctgaaaattctttccaacagaatcaatcagttactacaattgtgggatcatcttccaatcagccaattatggggagtaatgacaagaataaaatggtaattgatttggtggaaggatcaaaacaaagagctgttccaattgactattctgtagtagaggagataaatgtggaaaatatggttggaaaggaaagtgctattattaaggaaaaaagtatcttaataattgatactaaaaggagacgtacagaaggggaggggaatgtggagagtgtgattgataatgaagtgggccgatgggccgaaggggtattgggaagtgatgttactaatgggccgaatcagtgtgtggtggatgttatggactaggggtgttcgcggtgcgggtggtgcggtttttaaccattttttcaaacc

SEQ ID NO: 129509 - DNA, 518 bp, Cannabis sativa
atattatctatacctatttatatgtattaatttagatttagaatttgttaataaataatttattatatgttaaataagtataaataatgtatattaaaataattagcagaatagagaaaatacactaatttaaagacaacagattttctttcattgaagatgcccctagcaaaaaattgagttggaactataagggctaatgtggcattgccatgtcatctctacttgtataaatacaattaaaaattaattataaatttaataattattaaaaagttcaataaactaaaagtaattaaaaataacaaattaattaataatattatttaactgaattacacacatgatatgacctgacatgccacatcagtaccaataaataccaaataaatagtttttaagagtatctccaataatagcatttttgaaaatgttatatatctacacatcattcaaatatataatattttattttattttcttttacatcatttttggcacctttatttttaaaaaca

SEQ ID NO: 129510 - DNA, 1272 bp, Cannabis sativa
cataagaacttttaaaatcacatactaagtgtaatttcctctttttcttttgaaatctgcagcagctgccacggtccatatttttgaaccaacaaaatatatatggggcttttacaaaatactagattttaaacaaaaatttataatttactgtcacacaaaattttttataaaaatactttttttttttttttataaaataactgtaaaacactaaacaaaacaattaaaaataacagtggaacagctaaaaaataacagtaaaatatgaaacttaacacaaaacatagtatttttgaaaaaaaaaattaaaaatttaagtgtatagtgtaaaaatctcaatatatattttgcaacaataacatatactccactcttctcacctcaacggtaccttcattattctttatatttctttgtagaaacccaccaaccaaggtcgccgttaggaatgtaatggggtaaggtcgaccccgctctgtcccgccaccaacctgttgagattaacggggcgggttagccccaatccaattgaactgagtcagatttgaccgtcctaattacatttttaactaaaaatatacattgatgatttgtgacaatctcaaactagtttcctcttctttttcttttattttcttaattatgttgatgtctaatattgttaacccatgataagttttcaagggggataaattagaaagttaaactaattaataaatttaaaaatctcaaagacaatttatgcaaatattcaaattcaatgcaatcacatagataaacacaactatagacaaataataagtttaaaatgtaaagagtttagggatagaaatcgcaaactcttaatttttacaaggttcagtagaactaagtcacctacgtccttggtcttcaaagctatgaacctaactttgagttcaactatcgagtcaagttaacatgcttaacaagcccttacaaccgatgaatttttcaccaagaattttcccaaacctctcacaatagttttcttccaaggactatcaacctcaccagattgttaaagtgtcaatctcactaactgagttgttttttctaccgatgccaactttacctcaaccaatagttttccgaaaaactatcaacctattcagatttttggaatgtcaatcttactctcagattgtcgtagtggcaatctcactcttctcgggttgtttacaaaattggtttcaacctcacctacaaccgagtaatttttctaccgatgccaacctcacctctcaatac

SEQ ID NO: 129511 - DNA, 1005 bp, Cannabis sativa
ttttgttaattttttataaaaagggtcatttattaacttaattgttagatttatagccattttgcatcttggccctaagaaaaataataatttgggcccttatttaaaataaatgtggtatttttaaaattagtaaaagagtgtgcaatttaaaataagaattttttttagtcgcataagttgagccctagacacttagccagcctatctcgggtctggttagatttaacaacacctattctaagttgccttggctttctttttcctcaaaaggcaggaagagccgtttggttcaccatcgagccccaaatgggattcgacaaagaaagagaagcctaaagaacaacaacgatcattagaacaagagatgtggacgatggatttagggtgagatcaagctaggaagctttgagatgaggtcaaggaggtcgttggcacaacttttaagtaaaatgtacttttttttttccttaactttttactttatatagtattcctccacacgctcaaaagtgtagtagcctgcaattaaaagaactcttcaagctaaaattcataaggtataaaattttccgacaattattatgttttcatataaaggtaacataagtaaagcttatggtttggctatatataataataaagatcatatctttttcctatctctcgtgaactttgcccatatttcttaatggaaacccttttttttaatagccatatacaaatatatgtataaaaggccacaactttaatactttaatagtaaaaagaaaaaaaataagagttcatgttcatgcagcgtgtatcgtttacctaaggaaggacttcaagtctcgaaagacttctaagtcaaaacttcccatcaaattccattacttctctctcttatttttttttttaataaacattattaatgataagaagtggaatgttggcaaaaaaaaaaaaaaaaaaaaaaaaaaaaacgggtttttgtcaactattaaaattttttttttttttttt

SEQ ID NO: 129512 - DNA, 1262 bp, Cannabis sativa
aagattaaacataaaactaaatatcaatattatttttactaaatagtaatacatagaaagagcatgactaaatgtatattttttaccattaatcaatattcatatataattactacttcttgtccaagcacacattatatattttaaaatatagttaaactactatcaggtcttctagtaattactccgtgatttctaaacacaccttttgctaacatacatttttggtcttaatgtggtttaaattaattatatgatgaccacttaatttggaatacacttggtgacgttcagttggaggtaataaaatggaatggaatggaaaaaaaaaaaaaacttctattccataacatatagttattcacatttatagtgatttcatcacaattattaatatttttgattatacgatttaaattattaatctcttgatttatcagtacatcagatttacactaacatgataatcagcaatatggtctatttacacttaggcaatatgttatgtcttttccaaggcattgaaaaaatagacttgtatcagatatattggtatatatatatatatcaaactagaccaatattgatagaagaattgatcttatcgttatatttattcttagtcaatattacttagtttatcatagatcaatttgaccttaatcctgacatgattaagctttaagctaattgtgttatttgagttctttgacttgttcatttccaccttaccctaaggactagcccatacatacatcttacaaactcggtagcacgattgagtgggagtgttaaccatatatatagacatctatagtatatatgttagaagtaaaacgataatttcctttaagctaagttgaagtagttaatgataaagtactcatttaagtaattatattagtctattgaaatatcattaagtgaactaagtcttttaaggataaaatataattaaagtgtaaaatgataattttagtccctactaattataaattatctatagatgatcattgattgatatgatagaaataatggataattttgtagcgtatctatttttgatctatacagcatttcgtgaaatcaggagtgcaatttcgaatctatagtggagtcatgaggaactaataagttaagaaatttatttgttaatagtaggttacaataattaattatttaatcaattaatattcacattattattttgtcaattttgagaatattccactaaatggtaaaaataaagaagaaaagatatg

SEQ ID NO: 129513 - DNA, 976 bp, Cannabis sativa
aaagaagcccaaaacccaatgtagttagttgtactttcctgcaaatcctttattagtttagtctaactaacctaacatttcttcttttctcttttaaatgagtagtagagtcacactctgatgatctgaatctgatctggtccattaaaagttaaaaaacccaactcacctaatgggccatgggcccattatagggcccacaccacaccacaccaccctccatccaccaccgccgccactaccaccaccaccaccttcctcatccactcccattcccaactaacacaactcttttcctttatataaaaaccttttcttttttaggtttttctcaaatcccaaatctgaaactccttccattaatggcgactgcaacaacaacaacaacaactcctcctccaccaacacccggcaagaagccccaaccaatcccatggacacaccaagagacggtccacctaatccaagcctacgaggagaaatggtactcgctcaaacgaggacctctaaaatcaagccaatgggaggaagtcgcggtcaccgtcgccgccagatgcggttacgattacactgaaccttccaaaactgctatacagtgccgacataagatggagaagcttcgacagagataccgatctgaaaagaatcgtgtcaatctcgttggagtctccgtttggccctattttgacctaatggatcggttggaacgtggtcctttgcctatctcagctcagccaatgatcgctattccttatcgccgcgatcgagatctggatgatgaagacgaagacgacgacgacgacgacgacgaagaaagtgtaattcgtaccaagtctcggagtatcgattacattctgaaacgacctgcgatcgtgaataggttcgctggcgatggagaaagagaaagaggaagcgttaatggcttttctagggtttggggtgaaccagtaacgaagaggccaagggagacagtggt

SEQ ID NO: 129514 - DNA, 1376 bp, Cannabis sativa
cgtcgcctatacaagcatcattaatactaggtagaataggagatggttaaaaatatttgggagaatagtatgggcaacggtttaaatttgttgcttatagtgaacactataggcgatggttaagaaccgtaacctatagtataggacacagtttaaaactctagcttacactataggccatagttataagccacggtttaaaaccgtagcctatagtataggccacaattttaaaccaacacctatagtggtataggtagggccggccctgaaacaaagtgggctacaggaaaaaattttatttttgggtccttatgttagaaaaaatgtggtatttttcaaagtcaataaaaatatacaattttaaaaggggaaaaaaatttgggcccctggactaggtgggccctagtcataggcctagctcgcctatgcccaaggccgggcctgagtataggcaaggttttaaatcgtcgcatatagtcaagttgtttgacataaatgagactagaatggatagttatggtgttttcactagcatttctgtcaaccgggaattgtatcaaaataaatcgttcatactttcatctcacactaagttgatatatcacatccctgatcttaagaatggtaaagactgtatgcttgtcaatgattacatcttgcaaaatgtgtgagatttccccaacgatgatggggatacatgtattatctaggaaaataactctaccggaactaagttagttgtacaacttccacagttggatgatgttgactatgtccatcatgatgttgacccaattgaagttcaaaacatccaatgtgttaatcctcaaactcaaggtttagattatttcattgtcgatgacgaagaagaggaatttccaagagaaaaatgatgagtgcttaaaattagaaagtgatagtgatgataatgttgtatcaatagctgatgatgattatgaattgtaattataataatgttcaaatattaaataataattcacaaatattttgttatataatatgtgatgaatatgattattaaatttaaatttaaaaataagttcgttatttataatatgtctgtaacaggtggaagctctgataaaaagaaaagtgtaagaggtaaatataagggtacaaatattaaggaagaaattttcaaagggcttgagcccaaacatcacattacacttcatgaggagacgggcactccatgcaagaaaaatggagaaaattctaacaacatgtgtagactttatgtccgccacaccatccctgtaaagtcctttttggcaagatagttgacaaaataatttttccatttatggtaagattgctatgcattcatattcaatttcttgccttataaattc

SEQ ID NO: 129515 - DNA, 623 bp, Cannabis sativa
tcgattcatcaagttctgaacatcaggggtgcagtggttagtcgctcctgagtcagggtaccagttcgaatcttgagtattggcattctgagctacattagcttgaggttgagtctgttgtgtggaactggaagtctcacctgtgaagctcttatcaaagcgatagtaacagtctataactgtgtgaccaaggcgatggcacaactgacattgaactctcgaaggtggagaaaggaaccttccacctctgcttgtgaaaggtggtccacggttgtgttgattttgatgagactgagctccgagttcacgagtgtaatttccagtataacctcctcttgtgttcctgaagttgctgtggtttggtgctggatatcgcgagttgcgattatactgagctatattcgcctcaaagttcagatctggatcaatagagtaatcaacttcagttttggccatgtttgcactgatttcatgttcttggtcagtcttttcaattcttgattcagatgcaagaagtaaagcttcgatctcggcgacagtgtagccttctattcttgtgttagaggagatgatgaacgtgttggaaattattttaccaggatctaagatctactcacaagtat

SEQ ID NO: 129516 - DNA, 555 bp, Cannabis sativa
agatcgtggtaaaataaattccaacaacaactacccaacaagaaggccaagtcatctactcagtacttcaaccaacaagaagtctgaatacttaagcaggataaaaagagtgataaactagtcacctcaaggggcctggccggccaccccttgtcggccctatagccaacataggctagccaggttctgggcatctcatggcaaccagcatgcatcctgtaggtgcatggccgaccagcctttggcctgacaggacattggttcgcagcttcatacgtggactgtaaggcagacaacagattgggctttaacagatcacgaaaatagagggaaaatatctatttttgaggggtattttagtctttagtattttattaatataatatgtaaataataacttattttacctatttctaagggatttgaagggtgaaagctctcctatataaggagctgtaacatccccgtttcaagcctccattaggcccttacacccacggactaatggctcttatacacgagtaccccacgctggctgcttcttggattgatgac

SEQ ID NO: 129517 - DNA, 731 bp, Cannabis sativa
gtactaaaaaatatgtcaattttgacaatgctaaaaattgtgctaaatttggtacaatatatagtattgtatcaaatttagtccacaataagttttatattttttatttactatggtaccactacgattcattgtcatttacataactttatcttctttatttattatattattattatttaagtaataaaaataaaaaataatgatatttgtatgtcttcaataaaatatcaaatgatgattaataataataataataataatatttttttacatttttatattggagcacaattataaataatgagctaaatataacacaaatttatttttgtgccaaacttaacaccaatttatatttttcattagagataatcttcgagcaaaattataaataataggccaaatataacataaacttattttttgtgctaaatttagtacaattttacatcttacattacaactcctctcataaaacaagaaaaatatttttcttcctgtttattttttttagtctattccctgcagttctgatattaattgatgacattgtgtgagagatcaattactgcactatatggtgccttgtaagttgtgaaaaggttttttatgttattttcgctaattgccacttagcatttttctcactttattggctatagttctgataaaagagtgacaaactttgagtgtagagaaataaccaaaagaagaaaaaaaaaaaaaaa

SEQ ID NO: 129518 - DNA, 1970 bp, Cannabis sativa
taaaagtttaaattctgagctattttgattagtaatcctatttagggattaggatttcataaatactttgggtagcgtgcctgattatttagggtgttacatgaatagtgagtggtatgagcttcctcgagaatctcatttctaagttccattttatttggaacacaaactcgagttttatatagtagcttcccattaccttctagtaagaaatctttagcttggccagctaaaacttcttcttgagtcttaactaattcttaattcactaacttcttatccactaactgggcatctctaatttaatctaacaaatctaaatgcaatgtcaaattattaatgtttcccacagcaaactcaatacttgatctgatcatgttatctcccaactgagatgaaatcataaccatgttggatacttgtccgggacccttcctacttagggcatctgcatttcattggccttcctaggatgataaaatatttcaatcataatccttaactaaattcaaccaccgcctttgtcgcatattcaaatctttctgagtgaagaaatatttcaggctcttgtgattagtgtaaatctcccacttctccctatagagagagtatcgcaagatcttcaaggcaaacaccacagcagcaagctacaggtcattagttgggtatcatttgtaaagaccgcttagcttaaatttggaaattacctaataattagggtttaattataaaaattatttattaacactaaattattaatttatagtgatttattttcattcagaatgcattttatatgtcatatagagaaatttcatatttttgcatgttcggtgcccggcaacattggaacacggtgtttggctattaatctcacatcctagtattttagcatagcggggcggtattgttagacattgggaatgtcgggattagtccagattgtagaattttccaaattaccctttagtgacctttagtggctattagtatggaagggaaaaattgtcattttgcaaagccttagtttgtctttttgtgggattatgctaagtttttaattttaattttatttaaatattttgctgattattttaaatacaacaaacattttctttaattcaatttattacaaatcaaagatagacaagaattgcatttcgtctcaaactctctctttcgcccctagagcaactagggttggctatttttctgtcaaattcaagctagtttctcaaagtttggtggtctcaaactctaggtaaggttttaagcaacttccctttagtttcttgattttaaagaaatggaattatgcatgctcttgatgttttgcttgctgttcttgtgattgttgttagattatgttttcagtagttaaattatggttagaaatgttaatttgagcaggttttgtcaactagttagtgggatgagcaagttttggctcatcaatggtgatttttgtatttgtgcataaagctgtgttttgttgctttgaaattaatctttgggatgcttagaacaggtttgaaaggtttcatgtggattgcggtttatttggttgagatatgaaaatttttgtcattcctccactgaaccggaattccggttcagaggggcctgtaggagccgaaattcttgttggctcccaggaattttcccagaaccagaattccggttggggaaccggtctaccggttggggcaattttgggaaccctagtttttcccattttgtgttatttagggtatttccatgatattcatcgatagggaaccctaggctttcaggttgaccggcacacctgaattcggaatcgaggtaagattagtataatgtcatgcatatgcttgtacatgtttagcgtacatgttagtttccatcagaataacatattatatatgtgttaggaaaattttatatagccatcagattcgtatatgagggcaacagtgaggtgtacatag

SEQ ID NO: 129519 - DNA, 1032 bp, Cannabis sativa
aagaaatgaaggagatgaaactggcaaaaccagaagacaactgaaggaaacagttaaaaaccataagaggattataaactgccacagagcaaaatatggcagatgctcgagtttgtttcaaatattgtgacggttgagcaccctaatattaaaaataaataaacttataataattttaaaaaaaccactaaaaagattttttttttcaaaaattctctttttaatattattttatgtaatttcaatacttattttaattttattaaaaaaaaattacgtataattttttaataaaatttcatacaatttttttgtcataatatttaatacataattttttttatttaaaaggtatatttttgtaagaatttgataatgaagtaatttttttttttaaaaattattataaattaaagatatatcttatataaagtaaaaattatagaaatggggtgcatgtaacgccctaacaattaggcatgctacgacaaccgatatgaaaccctaatcccactaatccgggattactagaaagataagcacgcgtaagtataaactttattaacaacggaatgaaaatgtaacttgtaataatagttttttaaaactttacaatgaaccaaaagatacaagtttcgggatcccataaatatttttacaaaatattacaagtttacttcatgtgtcgacctaagcggcaaatcaaaaatttcaaaaaaaaaaaaaatataatcattggtagaccccaattaacttggtctagtgtggcttgaacatgtacaagcactgccaagctctcgcactcatagctgatcacagactgatttaccatttcctgcacaatactgtacccgtgagccaagctcagcaagacagtaaagatatcaataattacaaataacataccacatatataataatgccaatttacttattgtctatttaatatagacatgcgtgttatgctcacatatccatttacgtctatgtggcatagacccacgtgttacgctcacacgtctatttacaata

SEQ ID NO: 129520 - DNA, 955 bp, Cannabis sativa
ggacatttcagcttcccttggaaatctgaatatacgtgtcctttaaataggagtcttgtctcgagattctaggtgagagaaatctcactataacaatctcggcccaataaaggcagtatattcacagctgtgtgagaacctcatttatttggccttatttgtaatcaaatcccacaattttagggataacggctgtaaatgaattttggccagctttgtaattgactaccactatgcaattataaatagttgcagacaggatcaaagaggggggatgaaaaaatctcttacgcgaaaggccctaaaataaacatacacagaaatctgaataagattgactcgaggactataaagaattttaactgctaaaccacgtaaaaaaccatggtgttcattttttattattctatagctttattttttttgtgttgaattatcatcgtaaggctcaaatttggtgaacgaaaatctacgttaacaactatctagaatatatctcattaactaagtgtttttctaaatttaactttaaaataaaccaaagaaaaataaatttcatatattttaaagataattatgtcgctaatacaattttaattaggttagactaatataattagtctaataaaattatttaaataaggaaaaatgggatttcacaattggggtggttcgtgtgagggaggactgagttcagtatgtcgtacccattactaagggccccctaactctcacacaaggcccgaaggagaggaatttaaccattaaataaacaattgttattcattgaaagagtccaatactaattgggcctaaataaaattattttatgtgaaaatttcttttagtaatctagtacatttaattaaaaaaaaaaaaaaaactcaaatgggcttcctataagcatcttagcccaaaagcaaacatataggctcacacaggtcaagtgatttgg

SEQ ID NO: 129521 - DNA, 779 bp, Cannabis sativa
ggttcgggataggggcccgagctagggttgggtctgagtctggattcaggtttggatctgggtctgagttcggagttgggtccggggtcagggtccgtggtcgaggttcaagtccgcattcgggtctgtgtccgaggctaatttagggtttgggtctggaattttggtccaggtgtcaatgtccaagttggggtcgaagtccaaaatattgatttagaaaaaaaaaattgtttaataaaattttgaaagtgatttttttgttttttaatttttttttattctcaattaaaaaatgaaaacaattttacataacatatttttagaaatattttcacttttctaattaaaaaaatattacgaaatgtaccctaaatgggaaagaaaatgtataaaaaataattaactaatcaaaaaatatatttcacgcaacaataaacatttaatatattattaaattttctacattttcactctactttttcaaagttctatgaataaagaaacctacatcagaaggaaataaatgaagtaactgttaggatattttttttttcttcaatattttgtcttttagtgttttgtagttaaatttaatattttgaatttattttaggaaataattacataaggcaccattttttgtaaaatatttacatttttacgttcaaataatatttttttacattttaacggttctccaaaaaataacacaaaaacaacataaagtcaacaagaaaactacataaaagtaatatgaaaataacatacagataacaaaa

SEQ ID NO: 129522 - DNA, 1031 bp, Cannabis sativa
gctttttgtttaactattttttttatttcaaaatttgaaaccaaccgccatgtcaaaaaaactataaccgaaactgaccgccaaatttggtgatgacatgaaaccgaaaattcagttgcggtctagttgatttgatggtcagatttgatttttttagtttttatgaacacccttacttaggtcgaaggaattgactacactaaaattttctcacttgtggtaaagtacaagacaataagattgatgttgtctttggtagcttaaatagagtttgaagttgaacaacttgatgttaagactgcttttctgaatagattcttggatgaaaagatctacatgaagcaaccacctgggtttcaggtggaagggaaaggagttgagttggtatgcaagcttaatagatctttatatggtttgaaatagtccccaaggcaatggaattaaaaatttgatacttatatgcaacaaatcaggtttaaacaatttgcatacaatcattgcttatatttcaagaatctggagcaatctacagttgtgttcctattactctatgtggatgatatgctcatcatgggcaaggataaatctgtgatcaaaactattaaagacaaactcaaaagagaatttgagatgaaggagcttggaccagtttaaaagatacttggcactaaagtctcaaggaatcggaaggaatcagactattatcctaaagtagtctgggtacatcaagaaagttattcaaaagttcaacataaaagacgcaaagagtacatctatctcattagggggtaatttattttttcgaaggaatagtgtctgaacagttcgaatgagaaagaggaaatgaaggatgtaccctatgctatggtcttaggatgtttaatgtatgtgatggtgagcactaaaccggacattgctcacgctctaagcatcttaagctggctcatgtccaattcgggcatttaacattgaaaggccctcaaatggttattaaggtacttgaagggcacttgagattatggtctgaccta

SEQ ID NO: 129523 - DNA, 1125 bp, Cannabis sativa
gcttttctagtcaaataacattgactcgtggattagagtttgttaacactcgaaccacgtaaaaatccttgttttagtctctatatttgatttatttctttagcttttattttatttgaatcagtttccaaaagactcggtaaatattttagtgctttcattaagagttgaagaaatatttgatactaacgttgtatactgcaacaatggtagccactagaaccactgtcaccaaacctgctgctcgtgataaggacacagtcatggatgatgttaatctgcctcccactatacgcaccaagacatgtactgtttgggacggagagagacatcgaaagtgagcagtcgccctggcaaaagaaccaacaaggtgaactactccgactgccagactaggcgatccgtatcctctagactcgctccacctacagtggacggtcatgttgcaaccatttttggaggtccacatatcgccgaaagcacaagaaatgcccagaagaggtacctcaatgaactaaaccaataaggagaaatatgtgcccttgtacaaacactaggtcagcatccacgaatgatgaatctgccaatcaattttacagaagaagacaccaagcatgtacatttccctcataatgatccattgatgattgacacccagattgccaacaaaagagtgtccaaggtactggtgggaaatgaaagctcagtcaatatcatgttcaaggttgccttccaagcaataattaggttaattgaagataatttgatgtcatgtcgtatccagctacagagttttaatggagattccttactacctatgggaagattcaactcccagttatgttgaacggaggtgtagttggaagcaacacaacctccgcatttaattatttcatgttcgtagtggtggactgtcccatagcatacaacactattctaggataaccaatcctagtcaattttggagctgtaactttcgttcgatatttgtacatgaagtttccaagcgacaatggaagcattggtgcagtaaaaggaaattataatgtctcggccaagtcagtttttatggttagagtagggctgcacatttagacccgcaaacccgaaaaacctgaccacccg

SEQ ID NO: 129524 - DNA, 2069 bp, Cannabis sativa
gcaaaacgttgttatagtagcaagtgttgccaatattctccagggcaaagtctaacaatggaaaatataaaataacatatacagagagaaagagattcagcttactgaaatgatggctgtgtaaaattcaatcccgatacttaacttcagcttacccaaatgatgatgtactctgaaacctagagcgagtggaaggctgtgaagcaggaggcttgagtttaaatgcgtatcaatttctagaggaaacgtagaggggacgaccgtttcttaaaagcatgtgaagattagaaaggcagttagaggaaatcacaaattccaattcaatgtggaaatacaatacaagtataatcctagcaagtagcaagtatcaagtagcaagcagctaaaaaggaaggggcttcattcggcttcttatgttggttctctgtactgacgagagatagagaaagaaaggctgctttgacagagacaaacaaagctgatggctggaaatggtccactgggcttaaacctctaaaatttataatttattctttcttaataaattataaatttttttaaaaaaattatattatacttcgtgtattatgagtatagcactaatatattatccaatccatcaacaatatctacacatatactatcaacaatatcagaaattctctaacatttgaatggaaacagcaattgaatatcaaaacaagacgacgagttaataaagtaaaaaagagaacatagatggccaaaatagtaagccatcatttgatttaaagagcaatgtcccattccatgtcatagtcagctctgccatacacaaatgaaatgagatgatgaaatcatagttgtaaatgaataaactgtgtattatgcactctaccaagtgccagaaatatttcaatttgtaattaattacttgttcacatgtctaagttttccacaatactgaacatactcatcataattcactacccaaaagatatgcaaggcaatgcgccactaccaaagacctctacaacaatgactagagccaagcgcatgttctaaatatcaagaacatccatagccaaaactctaaataaatgtgaaatgaaaaaaaaaaaaaaaaaaaagaagaaaagaaaaccattctattttataaaaatacattgtataatacagagttcagcaaacaattaagcctctgcataacagcttcgatccttacaagtctcttcgcttcttttgtcaagtaaacattaggtcatttttgcctccaaggtgaggacgaaagcaaacacgaatctcgtgctcttcaggctctgatcgaagttttggcaccacaatctcgagtacagatcctggcccgtcgtagtaagcttctatgttagcatcctcaaggattcgggttgaaagtggtatttctctaacaaactctcctggtgggcagtgctcagatgacggatctgtaagcctaaaaaccctatcatgtctcttaatatatggcgtgcgagatgtactagcacaggacaccttgatgataccatgtgtgagcgtatttctccatgaaacttttaccctttgaagatcaacacaaggcaagctaataataatcaaatagctttcatcatcctcataaattgttttcgccccagtaacaggcccatacacatccttcatcaccccactaaagtcattcaaccagtttggtccatttgggtgaatttctgcatctgggataccattagatggagggttaatcgccaaacagcactcgtcactgtttccatttggaaaaaaacccttccttcttttgctgctgacaggtgaaagatctaccacatcagaactattgtggttggatggatgtgttgacaaattcagcccagacccgttaagcagtttcattggatgtgaatttgaggtgttttttatgggggaaggcagcctttcaagctcaaagtcagtgtttggaaggtttctccatgaactgaaatcacttgcttcatgaggtattgtgaaattccaatccctaccagtaagctccacccaccgtttctgctcttcctcactgaaaccagtgagattggggg

SEQ ID NO: 129525 - DNA, 783 bp, Cannabis sativa
gtaatctttccctgtagatttgccttcaaaaatgtgttctattaaaatgggacttttggcgaaattcgccactgactcgcttgctacatttattttaatacatatatattatagggttttttttttcaataatatacacaattaacaatctatttacataaatgactttatacaaataattagtaaatattaacgttcatgttagtaataaataccgtaactcatattatactttttttttttaaaaccaaaataatttttttcctttaaaaataatattcatttctctcttttaatagtttttttaaaataaaaaaaaattcaattgtagttattttgactaaaaaaaatgtcattgtaactaactgacttacacaatatttattataataaaaagttccaaaaattattcataacgttttattttttcagatctaaaaattataatataatatttaaataagtttatttttatagtattttagataaattattaaaatataacttataaagaacttaccacataatttattagcaaaatttataagcatattaatttaacattagttgcttataatgtcaataatataccaatgagttatcttttataaaaaaaaaaaaaaaattactattgtgcgtaaaaaggaaacccctcagttatttaagagattaataagataccaataagctacatttttataaatattatatttaagataatatattatattatattattgtgttatttaaaaaaaaaaaaaaaatcacattatttttaaattt

SEQ ID NO: 129526 - DNA, 568 bp, Cannabis sativa
aaaatgataaaattataatttgacaactaaataacataaaaaatatctcattaaaacgagaaattactaaagagcacacatagtacctagtacccttgtaagataatatagttatcggtgcaacttaatatcaatcttacttattttactttaataaatatatagaatatcctcaactaattatgattaagtgcaggcaccatagatactctttaacatttctcataacaaccgagtaaaactaagtaggtagtcgcatatataagggtatgtaattaggaattgagagagaatcccacactgaaaaagcactagaagagcacatccatttctttgtcatgttgggaaaatgcctatcaatcacatcttttaaggactcagttttgttaacccattcaaacccttcttttgtgtatgtttccatgttgaaatttgatgtgaaaaaacgatcagcctctaacctcctaattaaacatgcaaattaaacattattatacacaacatgatctcaaatggaatatgagttataatttagggtaaataccattttggatcctgtgttttgcaa

SEQ ID NO: 129527 - DNA, 926 bp, Cannabis sativa
agacttttccaagtttcatttcggaagggagtgagcatatatcttcaggagaagatttgttcaagccttacttcgggaggaagtacgtacacatcaatagctgaagggatcagttcactacttggtgtgttttagagatcagattaggaaggtagattacaaagagttgcagcaaatcactagaggccctaccataatatcaccctatatttatatatatatcaataatataactccaaagttcaagttgctatgacagaaaattatgagatagtcattcctcagggaactaccatttagcagaaaaatatgtaatacataaacggataatgtagttatttaagattgctgaatatatagtttactgaacaaaacactcttttacagaatttactatatataaacttagcctataatacaagttattattttataacacagttgttaggccacctttgggaagatctttataactttatgctggttggccttttctattcagagagtttccatatatctagtaatgataaaaacctgtcgaaggtgtgtgtagtagctatagtgggtttctttgttgctttatgtgtttggctcttttattacataaagtgattccacccctctctattattaattcatcacttcttaatcttattacctattattattattattcaggcaacggcggagaagacgagataataatatatattaatatttatttggtgaaattagttttcatatggtatatgcttttttgctaagagatgtacactacgtgatttgatatggtgccataaattcaatgacttgcgtgttcagtaattatctaagattacaaaagatttttttgtttgaaaaagaaataacaagaggaagaaattaaaaaaaaaaaaaaaaaaagagagagagagaaaagaaaagac

SEQ ID NO: 129528 - DNA, 1219 bp, Cannabis sativa
  modified_base (1163)..(1173): a, c, t, g, unknown or other
gtaccttcagtatggagtctgttcctactgatttgttaccttgtttggtgacggagtttgttggttaatgaagttttacattttccattcaaaaaaaaaaaaaaaaactagatatatgaattattcattttcaccactttctagctagtttcttaagaaaaaaagtctctatttgttactaattcactttgttttcattgctcgataatcttcttcttttattttctcctatctatatttatatataaattataaatctcatgtatatttatattaacatctaatttatgtttgaaattctaaacctcaaccaacctgcctacttttcacttttgaggaatattgttatttatatattataaactattatttattatgttaaatatatatttttttaaaaaaaattgataaattatacaattacttaaaaaaaataaataattaatttttttgctcaaatagtagtttcgaatcaaaccaatcaatttttaatagtttggtttagtttgatttgagaaatttatcggcctagatttccaatatttaaaaaaccattataatggtttggtttgaaaaatataaaaattcagaccaaaccaatccgtgaacacctctaaagtaaactaattgtaaggaatgatcgattcctatacaatcaaataccttgatccaagaacactacaaagtacaaaccatgcttgaataaagaatgaaaaataatcttgagcagtcttgctcttttattgattatagtagtaatatttacagttttggtgcctaaactgtgttctctaattacaatgaatgatacaaagttatttatagctttgtcttaagtgtctaataagtaactaactaatctaacatgctgttaagagaaacttaatagaattaccgaccacaactaacaatttctaccttggttggaattctgttaaggccattatagattacagacataaacacaaaaagaaagaatgtcaaactagacaacagacactatcaaggattactgtgattcattggtaatccagagaagattaaaacaatgtctgaacttttcaattggaagggccttgttcagcatgtctgaggcattttcttctgttgacactttcaccagtttgtgttagattttgtgccctaaataaaactcattttannnnnnnnnnntttactaattaataaagattagatatcattttatgttgcatggttc

SEQ ID NO: 129529 - DNA, 1190 bp, Cannabis sativa
gtccaggtcaaacccagtcaaaatgttcagtcctactctcggttgatatgtgaatcaaattggccgagtttaatggcccacttgagtagttggccaaatgctttaggtttttgcaaaacttgctgcattaggtggtcgatgtacacccttattgggtgagcttggaagtacgaccttagctttcttaaagctaagaacaagctgtatgtcagcttctccatgaagtggtatcgattttcagcattgatcagtctcaaactgatgtagtataatggatgttgcatgccgtcttcttctcttattaaggttgcactcacaacatgttctatgacagtcaagtacacgcctagctcttcattgtctaaaggttttgacaggacaggaggttgagccaattgttttttcagctcttggaatgctttttcacactcccctatccactcaaattttttgtttcctctgagaatgttgaataagggcaggcatttgtccatggatttggatacaaatctacttagtgcagcaatgtatcctgtcacgcttggtacttctttgatggttgtgggctaataattctcatgtccaaaagagcttggatcttgttcgggtttgattctattcccctggctttaattatgaagccaaggaattttcctgagcctactttgaaagaacatttgagagggttgagcttcatgttgtactcttgaagtatcttgaagcattcatctagatcctccacatgcccccaacctttttggacttgattagtgtgtcgtccacatacacctccatattgcggccaatgaatatttgaatattttgttcacaagcctctgataggtggcccctgtatttttcagcctgaagggcatgactttgtagtagtataggccttggtccgtcatgaagcttgtatgctcttgatctggtgggtgcatcttgatttggttgtaacctgaataagcatccatggagcttaggatctcatggccagctatatcatctaccagctggttgatccttagaagcgaaaagcagtcctttggacatgctttgtttaggtcagtgaaatctatgcacaccctccacttgttttttggtttgggcaccaacacggggttggttacccatagtggatagaatgccttggggataaagtcatgggcactcaccctttcgacttcata

SEQ ID NO: 129530 - DNA, 904 bp, Cannabis sativa
  modified_base (574)..(577): a, c, t, g, unknown or other
ggccgtcagaccctgctcgaagtcaacagctccaaccagagtgagtcgagccaagtcgttctcgtatgttctgacacaagggagactattctcaccggaatccaccacttgtcggaggacctcctgctcggtgcccgggatggcatttgatgaagcatgagcaaggacaggaacgtaatttcggacgcttcggagaggaaaatttggaaatattgactggggattagggtaaagaaaaacgcaacggggtcggacaggaaggagaggagtatggagggtgagagtgtaaagaaacgccatcgccggagaactctctggtctctaaaactgggatgaagggaagtatttgttctttttcttttttcatattgaaaaaaaaaataaataaataaaatcttttcttttagggcaggtttgtaatcaggattggactgcattggactaaaaagaattagattgactggacaagattgaattatgttaaaagtaatcccgtatttaatttaagaatagaatggactaaaacttttaaaataaaaatatgtaatcataaattaaaattaaaatatataannnnaaataaataaaaataaataattcacagcaaaaaaaaaattaaaataaatatataataaaatatttcatcatatttttatttaataaataattaaaataataaaataaaaatacttgaataatataaaattatattttaaacactaatttaatataaatattaatttttcaaaatatttatagaaattttctagtaatttaaaagtaatatataattttattgccgtattatttttcttcgaaacaatttaattaagtaactattatttaattaataatattataaattttgaaaacttatgtataataattcaaaattatacatttt

SEQ ID NO: 129531 - DNA, 766 bp, Cannabis sativa
agagttcttgaatccccatcatcaagaaaataaggtttcaaaggttttgatgcaaaattggaagatcataccaatcaaagatcgattctatggactccggtacccttccactattccttaattttattgtttgattctcttaaattaattagggctatatacagatttacagtatttctaacagttattggtaatagacatgtataaatatctcaattacatttacaactaaactttcatatatgacttaagacagaaattgtgaactttaaatgcttataatgtctgttgcaaatttgtctagaaatactaagggaaccaaataacacggtgatatattgctattttagtacaattcaacattaggttacatgtatttttatttaataaataatataaaaaattattaaccactcataacacactcctttaaagtacctaatagtaggcccggctaggcggactaggcctgtgactagggtccacctagcctaggagtccaaatttttttttttccttcttataaaattatatatttttattactaattttcaaaaataccatatttttttttaatataagggtccaaaaataattctttttttggcccatttcatggcacctacctaacagtaatgctgaaatttgtcaaaccttatcagatggaaattggtcggttaatgtacggggaatgaaatccccgctacctatttatacccccatccccgccccatccccatccaataaccaacggatttggggtagg

SEQ ID NO: 129532 - DNA, 537 bp, Cannabis sativa
ttgttaaatttaagaatttttatcaaagcttaattttattaatgtggcagttgtctatatatgaaatcatattttttgaactttaatgtgtatcaaattgtacactcttaattaaaaattaattattttccaaataatgttacttctacacaacactttttattaggtgtgtcccattcttctatattttcagtatttgaaaagttatatttatagttttcttttttatatgacagatttacattgttgataattaggatgaaaattttgaaataatttataatgttaaaaatattaaagttcaataaattgtattatatttgctaaaaaaaatgtattatacagatgtaaaatagaatgttttaagtttttaactctatttcctgtattttagattattttattttttcttcaaaaacacttaaataattataatattgtatacaatcatataaaaattgaattaaaactataccgtttactatttattagttaacatgatatatgtaactggcaaatggtttttttttttttttt

SEQ ID NO: 129533 - DNA, 677 bp, Cannabis sativa
atcttcatatatttatttcatttaattattaccttttttttttgtatggatttaattattattaccttttaaaaaaggagattttacaaaaaaaatatatatatatatatttatatttaataaagtatctatttttatatttgagagaaaaataaaattattattaatagataaattagaggaaatttattatatctgatatcgtttatcaagcaaaatcaatcaaattaatgtcatttacaataattaaaaagaaaaccctattaatactttcaacttaaaaatcaataagccatcatgaagcttcaaaaatgtgggaagaatgctaaatttctaattcgaatgaatatgtgacaaatcagaccaaaccaatcaaagattttctaataaataaagtatctattttggacaacaagttttgcacatttacgtatttttctcctttttatgctatcaatgggctgcattgtagacttttgggcatagtttttgaggaaattatactacataccttttttaacttgatgcatttgatttttactttttttttttcaaaatctattatatatgttaccttttttttataaccattctaccaattttactcctattacttcacatacaaatctattatgtttgaaattatgtcttagtgttagaatgtgggaataagatga

SEQ ID NO: 129534 - DNA, 3753 bp, Cannabis sativa
aagtccccgttaccgagacattttagccctccctcaacggaagtttcctcaagttatccaacttgattagagtttcattttgtggtattttatatatatatattgtacttattttaaaactcatctaatatgggtgttggacaactttttgttatgtcatttaatgagattcaagaactttgctctatcattttactattacgtcaatgtaaatgtttgtatagtagtataatataagaagtctattttcattttgaacagacttcttatattatactactatacaaacatttacattgacgtaatagtaaaacgatagagcaaatatcttaaatctcattaactggcataacaaaaagttgtccaacagccatattagatgagttttaaaataagaacaatatatatatatatgtatatatatatataaaataccacgaaatgaaactcaacggatgttcaatcaagttgtataacttgagggaacttccgttgagttggagggctaatgtctcggtacggggacttgggtcacaaaggacctcctcccttggagtattgtttgatggttcttcttttggatagattgggtaatggggtatggagacctcggtgtagtcgagaatgtcgtccatgatattttccaatttttctcttaaagtgttggcatattgcaatgcttgggcggaatggtagaggtgctccgccaattttaatgactcctgcttagcctctgtgtgccttccttatgagtttttcgtgctcgtgcaaaacaccctcgagcctagcacagttgacacatcctaaaactgaagctgaacgaagtctaggactccttgaaggtgtacctatggatcgttttgaagaatatggataaggtggggactttttaggacttgagtcgaaatggttgaatttcgggtaagggtccatgtttagtaggtaattctaatacggggctacaataaatgggttgttgtaaaatccaaacctttacttatatagtggttgggtgggttgatatacacgtaatgaaaatcatgtacacgtaataataatttttttttaatttgaccattttataattaaacaatgtgtgtaatagaaataaattccgttgttaatatcttatttataaaagaaattatgatgtgacatatataattaaaacagctcgaagtacgttattttaataacataatattttgcatattaaaaataaaaattaatgcatttaaaattatgatgtgagggatgagatacaacggggtaagtataaattatgagaggacaacaggtcactttataattcacccaattaattaaaaattgtgaaaatattcgatgtggtgagaaaattaacctttttgtggtacatacaaaatgtattatttagtatttacaacttcttcaccaaaccttcacagtggttgttaaataaatgtgtccacatagtttggttaatcttttttcagactatgtgtaaatttaaaataaaatcacacaatatttggaggtcattatttagtaaaattgatttgacctaagactgtaaaaatgctgacgtactttactgaaaatttacccaattaataaattgtatttaataataccattttttacaagaaccagctcagttaataatgggtacgtgtaagaaattagtacaagttgtgagaaaataattgttgttagtttttattggaatattaatgtctaataatcaattgacatcggtaggatgtactaccttgtttaaaaatataaaaatacaaatttagggataatattataacataaacctgtgaagtaaatatgaaagaaaataatgttttaatttaaaatcaaatctcataatatccaagtatgtagtaaagaggtgacgcctgaccgaaagtttgatgggaagtacactgtataaacattgaagtacgttagtgtaagtctttaacgtgttaaaatagggaaggtccactttataacttaccctgcaatcggttctttggaaaaataaatatacattttgactgggttaatatcaatgaaacttaaattaccaatatttattttttgttttttgttaataaaaactcctacactatatatgatgtgacatatatatatttaaaactcagcgaagtacgtgtttataataaaataataatttgtacatttaaagtaaaaaataaatcctttaaagtataatcaataaaatccattgatttgacaccgctggaaaaaaatctttcattacagtattgaaataattattatgatatgacatccacttaatgtattagggaattatttaataaaatttgacattgcaattgttgttggtaacttattcgaaatagtgaaactcaatgccacatattcggttaacatagtttgtttaatgccattggataatatacgttcacaaccaaattaatttttacaataaaaatggagtaatatctaaatattcggttatgaggtgataccatactgtatttatgatgtgacgtagtctgtacaactattaatgtacttcattttcaaactttaacttattgaaatatgtaagttacagcttgtgatatctaaatattcgcaatgaaaaacacctctaaagaccttccgtttccaataaagggtttaaacaatgcagctgatagtgtttgtggtttaacattttgataatattttcctatcaattcacatattgactcaaataattaagttgtactatctatttccataacctaaaaatagaattacgttgttttcaaagaaaaccctaaagaacgattttaaataaatgaccaagaccttttttgttttttaaaataataaatattttattaatattttcccatcaatccatatacgatcaaatcagtaggttgtactatctacttgaataacctaaaaaaaatacttacgtagaaatatgtcattactataaagagaccttaattatttgttaattaattatgataaaccattttttaaatgatacaggtatattttttgtgtacagatgagtgcaaagttacgtgatgtttgatttgaggtatttaattaggatgctttatttgacaaagtaaatatagattgtagtgagatgaatttgtatgtatactataatattgacactgttattacatgatgctttatttgacctaagactgtaaaaacgctgacgatttcttccagcgtctcgattttgttccagtgtctagcgcacccgtgattgagtgtgtcaaatatcaaaaccctcatcccgcaatggccttgtggactgcgagaagtagaggctcagttggatggcacatttggcggtgttggaagtagttccatccagcctaatccaccaattcgaagcctttgtcaacatttcctgaatatacatatagtacatacataaaatttttaagaaacaatttgtaataatatatcattgatataaatagacataaagagttgagttattactcgaattttttatgagatatgagctctctaacgcatcagaaaattaaagtactaaatgtacctttccagttgtgtgaccaccgtggtctcaaatccacttgtacactgatttgcattgttttgtggtccaaaagtcaattagagccacagtgtgatccacgtgactagcactccagtcaacatgcgtcaaatataccagctgccaccaaacaaaaatacatacatctattagcaccgcagtacacgagagaataaaattactaccatcacaat

SEQ ID NO: 129535 - DNA, 2676 bp, Cannabis sativa
  modified_base (2607)..(2612): a, c, t, g, unknown or other
tctgtccttaggtttttaatcctttggttagtaagattttcaacaagtattttcctatgtttaaacctttgaaaagcctcatttttattcttaagtaaaaagatccatacttttctagaaaaatcatcaattatagacataaaataaatgttacctccatgagttggtgtcttttcagggccccataaatctgattgtatataatccaatatacctttagatttatgtatccctattttgaacttcagtctatgatgttttccaagtatgcaatgctcacaaaattccaccttgctgattttatcttttcctagcaattgttgttcattaacaatttgtaaccctttgctgtgtccaagtctgttgtgccacaaaatagctttagcatcttctggactttgcaaaatgttgttttgtccaacagtgttgttgcttctagctataggttctcctatcatgtagtataggccttccttcttaactactttgattgtagtcacagatcctttgcatattttcatttgtccatctttgattttgctttttattttcaaatcatcaagcacacttagtacaataagatttctagacagatcaggaacatatcttacccccgttagtgatctagttaccccatcatgcattttaaatgctattgtccctgctcccttgatttcacagctttggtcattccctagaatcacttttcctttagtagagtccctgacatcagtcaaaatagatctattattagtcatatgaaaagtacaaccagagtcaagtatccaatcatctttaaaagatgatcctgcaacataaacttccccatcttaataacagtcacttaaatttgcattttggtgatctgttctatgtttagggtttatggattctaaattatagtcacatatttgcccattgaatttgttctttctgtttttcttcaagaaataacagtctttcttgaagtgtccaggcttcccacaattgtaacacccctctgtgtcttgtggccctttagagttaggtcttcctttgttgctttgccctttgtttggtcctctgctatgattttgattccttcctttcccatgccaaggcttcctttgagtaggtcttcctctactcagatttagttccccattagagccaccatttctttctgtcttcatctctaagtcctttgattttaagccagagatgacctcatcaagagtgatagaggttcttccatacttaattgttgtttttacttatctataagtttctggcaatgaattaagtatgatgatggcttggttctcatcactaagtgcctcattttcccctgagtttgcaagttcaatatacattctcaagaattcatcaagattctgatttaaggttttggattggttcatcttgaaaccaaaaatcctttccttgagataaatcttgtttgtcaaagatttctgttgaaactgctcttctagctttctccaaatctttgatggagtttcttccttgtctacaattctgattattgcatcttacagattgaatatcaagattcctgtagcagtttccaagtattcttcctgctgaatctttgaggttccttctagccattcaataggttcatctatcacccttagcaatttttgttgagctaggagagacctaattttctttctccagattctgtagtcacctgtaccattaaatttatcaatatcaacttttatgttactcatattaataaaattgaaatcagatagagttttagaaatctcagtatgtttattattttatgatgtttctgcttctgtttctggatctgaatttgattaagaactattttcttctttctcaggatcaatttttgattcagaactttaatcctcttccaggtttgagtgtgttcttgattggtaatctttctttcaagattccttgccagattccttcctgataattccttctttagtttttgttgatcttctttagccaaaccaggctctgataccactgtaggatttttaccactttaacctacaccaacaaaataaaatattatcagtatcaaggtcaattttgacctttactttgtctaagtgtgttttagacaaaatggcagtgtttaaccccctacgacaccaaaccttgtgtcgttggacccccttggcttaaagactctcaaagaagagtctagaaaccctaacacacactcagcctctcagatctgaaaactcgaaaccctagcagagcaagttcttctcaagaacttgctcgattctaagcacgaaacccagaatcccacccacacacatagatttagttttagcaaatgaaaaacaagagtaaggtagagaaagcaccagaaaatattttaagttcatcctaaaaattagggctatgtctccgtcaagctcatctcagagatctaccttaatatccactatcaacaatgtcgatttacaatattttggagcttcctatcacagaaaacgatcaggtaagactcgattttctctttgtacactttttgattttgttcttctctgttttgttctcgatctaacttagttttctgttgttatgcatgtactgttggaattattttaccannnnnnatttactatcatgtatgtttgattaatatcctaatacgaattttaaaataatgaaataaacaca

SEQ ID NO: 129536 - DNA, 1081 bp, Cannabis sativa
  modified_base (304)..(311): a, c, t, g, unknown or other
tgtttctcgattttttttttcaggggccgactgtcccacctcgcctttatgtgggtttgcccctgctcctatttgtttcggtatttgacaaactttattagtctaattttttaatctatagatatgttgtaactagctaaaatgcatatatacttttttctcgatttttttttcagtgggcgactgtcccccctcgcctttatgtgggtccgcccctgctcctatttgtttcgatatttgacaaactttattagtctaattttttaatctatagatagtcatgtatattatagttatttaagannnnnnnnaaaattttaaaaaatttagaaaaacttaacacgccaaaaataatgtacctttttaaaagtggtgcactcatatactcctatatgtttcggcattcgagagacttttttagtctatttttaatggtcgtttacattatagttatttaaggcatccttcaaaatttcgaaaaaatttcatacaccaaaaataaaattcaaattttctgttacacacgtgactaagagggctacattgtaaaagtactttattatattattatttttattaaaaaaataaatataataataaggaattttttttagtataaattttggtgttatgaatagaagtggaaatattaatctaacgatagtataacacatatgtgcttcgagatgctcttaaaaaattttcctatacagtacacaataatgaggtttaaaaacaacaacatccctccctccgttgttgcattcattggaaacttaaataaatgtgtcttaacgtggcagacactttcatttcttctttcctcttgtttcattggaacagagagaagttttcatagggaaatttgaaaaactatactttaaaaattctaatattttattcttaaactaatacatttcaaactaaaacatatacgacacttttatcaaaaactaaaaataaccctcacataactcaaccccattttttcccaacccgcacatgcacggaccccccatcgggccccatcggacctatcggacccccagcttgcaagcatcggaccccatcggaccccaac

SEQ ID NO: 129537 - DNA, 1037 bp, Cannabis sativa
aatcacaaatttaaatttctatgcttaatttaattacttaattaaaaaaaattaaaaaatatatctttttacactatatcaaaaatatgttaatatatatatgtaccttcggaggaggagtgaggaccgcacgcggtggtggtaggtgtggagggaggagcccgcggtggccagtggtggtttcgtgataggagagagagagagagatggtggtttgtgatagaagagagagagatagagagataaatgagatataagagagagagggagagagagagagatggtaagctggttttagggttaggctagagaatggtggttgtggaggcacgcaagagctagataattgtgaaggaggaggcctggttgtgttttggggttagttttgcgtggatctgggttagggtacgagagagaggaaggaggcgcagttgtgttggtgtgtgaagttaggtctgaagttattaggtgggtgtacatgtgaaataatgggccaaattggggcattatacccgacggtttaaaacagtcgagtataggagaatatatttagttaaaactgttgcctatttttgtaatgagtgttctaagtcgtcgagaatacccaattttttctgacggttataaacagttgcttaattattttagcaacgattcccaaaaaaaagtgtttttaggactatcgctaatatccctttttgtaatagtggtttgtgtaaaaaatatttcattggatgcttgtactcatccaaccaagtatgcagacagtagcgtacttggattccagacatggcgaagtagcggaagatttaaaattcatcattaccacgtaagttcgataatcaacatcacaatatataactgtgtttgatattttacatgctaactttattttttgtgtaggtcactcaacatgtataatacatgttatattatttattatataatataatgtttaagattaaaattgtaatatgttatatatattattacatataatataattgggaattacatgcatgtaataatcacaatat

SEQ ID NO: 129538 - DNA, 2085 bp, Cannabis sativa
tcaccgagcaaaaatcataaaaattacataattcatatttagcataaataatactcttagagtttaataaaatctccaaaattgagaaattataactttaatgcccgtttttaaaaatagggcccacaacaatatataatcatgcatatttataaaatacaaataattaatgctaattgccattacttatctataatctaatatgcggtcattacaattattcccctattaaaaggattttgtcctcgaaatctaacttgaataattttgggtattaagccttcatgttggactctaattcccaggtggcttcttctaccttactgttcctccagagtaccttgaccaaaactatggtcttgtttcgaagaactttttctttactatcaaggatttgaactgaccgttcctcataagacaagtctggctatagttctagggcttcgtaactcaagacatgagttgggtctaaaacattttccttagcattgaaatatgaaatacattatgaacagccgataacgctggtggtatggctagcctatacgctacctgcccgaccttctcaagtatctcaaatggccttataaacttagggcttaacttgcccctctttccaaattggtgcaacttgcaggaaaatatgttctcctacttgaaatgcaatgtctctgcgcttcagatcagcgtaacttttctgcctagtttgtaaagcaaacatccgagccttgatcttgtctattgcttcattggtcctttaaactaactaaggacccagatacttcttttctcctattttgtcccaatgaattggagaacgacacttcctaccgtacatcatttaatagggagccattcctattatactttggtagttgttgtaggaagattctatcaaaggtaagtattttctccatgaaccctcaaagtccatgacacaggctcgtggtaagtcttctaatatttgaattattctctctgattgcccatcagtctgagggtgaaaagttgtactgaattttagctttgtgcccatagctctccgaagatttacccagaatttcaatataaactttggatccctgtctgaaacaatggattttggagctatatggaggtgaactatctctttcacatacaactctgcatactgatccaccgtataggttgctttttactggcagaaaatgtgttgacttcatgaaacattccactatgacccatattgagtcatacatttcagtgattctgagcgaacccacaatgtccattgtaatatcctcccacttccattcaggagtgctaatggttgtagtaaccctgtcagcgtctagttctcaggttgatatgatgacatgttagacatttagacacgtaatccactacatctttcttcattcaacaccaccaataaaagggtttcaaatcctgatacatttttgtggttcttgagtgcaacgaataggtatagtatgagcttcatcaagtatttctattctgagctcaaccctatcttgaacacaaactcgagctttgtaaagtaacattctgttattcgagactgaaaagtccttaggtcgacaggccaatacctcatctcaaattttaactaactcagcatcttccaattgtgtttttctgatcctttccaacaaatctgattgaagtatcatgttatgtaacttttcaaccacaaattcaatttcagacttaaccatttctgaggctaactaaggagctatcattacagtatttaagacatgtccgagactttttctgttcaaagcattcgcccaacattgaccttcctgagatgatttagaatctcacaataataatccttgactaattccagccaccgcctctaactcatattcaaatccttttgagtgaagaaatacttgagactcttgtgatccgtgtaaatctcacatttttctccatacaagtagtgtcgccatatctttagagtgaatactaaagtagcaagctctaaattatgcgttgggtaatgttgttcatattcctttagtggccaggaagaatatgctataagcatgtcagcttgcatcagaacacatccca

SEQ ID NO: 129539 - DNA, 790 bp, Cannabis sativa
gggggttgtgttgtcagactttattgcgtgtggcagttccaacacgcctcctcccatgcggcattaaatgcgagatgactgctcagagaaaacctgacaccactcggaaatgctttgatgctatcttgctctccgggagcatatgagaccttgcatgccttctccgggagtcatatctaaagtaatgttttgctttatacagacttagctatttaatttaagtgctaaaccctttgtgtccacgtgtccttgtttggttggtctacgtacattggacaaaatcagagacaacaatacccttataaaaaagtgatttgacatcaattaactaagattatatattaaaaaaaatatatttttattattaactagaatatttaatttaattttttaaaaaagaaaagcatattttatcattgattttttttgaaggaatatcattgaataatttagtcacaacaatcttaattttaatattattatcctcctagtgttttaagtgataatgtgaagatgttcaataatagcaaattaaatagttcaaaaaataaagtagatacaatatgtataaatatttgtgtgtggtttagaattaaaatgaaatatttgtaaaaaagaattaaaagaagatatatggggctataatactactatgcattgtctctttaatcgattgagtgtgaatgtaagataaaaactacaatataacttctatttaagaatactttattaaagaataatctctaatttgttataaaaaaaaattaagtcccaacttgggccaattata

SEQ ID NO: 129540 - DNA, 788 bp, Cannabis sativa
tccgtgggtgtaagggcccaatggaggcttgaagcggggacgtttcatattgtaaattaatacaacctagtacgaaaaatatgagcttaataagtaaacacagtatgataaatttgaaagcacaacatgtaagcatgcacaattacactaacccaaaagtacgagacattcaaaagttttataatttgaaaataataattaatatttatttattaactttaattaaattaattaagatcatagtaaatatttaaatttgtaattgaagttctaaaaaaagtatagtttagttgttagctcgttaattgtaataaaaatgtagagcacgaatttaaatttgtatgagtaaaagggctggtctggttgagaaaaattagttagatcggtaaacatgctgctttgtttgagaaaaaaatagttaagttgagtaaaattaacacgatacaaattcaagtatgtacaatatgaaaaatactagcctaccattgtttgtacagcataacatggcctattttttcatagccggtaccaatgactcatatttttgccggctttccaaaatgtggaccaagctagctaaacacgcatatatttgcagatttgatcatatgaccgccttatactaaaatttaccgtttagttgaatatttttgctctttcaatattctccccaaagatcaagatatgaagtaattaaaaatgtttactatataaatatagggtttatctatagtaggcccatttgtttctacctcatcacatgaggaaattttttgggccaataaaaa

SEQ ID NO: 129541 - DNA, 752 bp, Cannabis sativa
ctggtttctatttttaaatttattaatttacgcataatattataatttaaaaatgaaaaatagtattagaatgtgaacccaagcaagcaaccaattaaggtgaacatcaactagcgaaaaaaaaggaaataaaaaatacaagtacaaaacgacacacaaatgaaattaaggaaggtctccactcctactcaaataattgtttgagactataagaccctgacccattattaagctttccattccacgcttctgtggcaaattgttcgttgaatctctctgttgaatgaccaaagtcaaagaagacatggtcgttcacattttcacacagttcatactctttctctcctctcctacctccacaactaggacgtcctctgtacggaccacttccacaacatgccactttctcttcattgaaaccatattttgaagggtgatttaatctttcttccgtgaatgtgtactggtcaacaaatgagtatttgaatcctttgagctttgtttgcagcttttttagcactatggaaagttgtgtgttgtgtgattttataaagggtatgaatttatcgaagcaggccccatcatctcccccttgaagcactctaccgtatggagcgcacccaaaatgatccaagttcaaaaatcccattttccttcctccaatgttgtaaatttcctgactcacataacataacagtatttagacgaaaaatatatcatcccattttgaaaaatatatcatcccattttga

SEQ ID NO: 129542 - DNA, 781 bp, Cannabis sativa
  modified_base (31)..(31): a, c, t, g, unknown or other
aaatctgaatatattgaaatgagttttattnagggcataaaacccaacaggcaccactatcagcaaaccatgcatcattatccaccacttcaggcgtggctatgaaggcatttgggggttgtttcaactggttttgtccctgttcttgtcctgtgaagctttcatcatatcgactgtaacatatggctgcagagtggccatatttaccacagatctggcaactcggtttggttccattgttgttatatcttcctcttcctctagatcttcctccattgtttcctctgccaccagtgaagcgaccaccactgttttgattcgaatatgatccacggcctctgctgtaagactgcggtttggtggccatgttagcttgcggattcgacacagatccaaggatcttactgttattggtgagagtttgaagcctctcaatcttgctatcaaagctgaggagagtgtcttggagttcttgccatgttgttttggcccttgcttcgatttgaacaacaatggatatgtattcagcatcaagaccagatagcacgtttgcaacaagatgtgcttctggatacgggtctcctgcgagagccagaatatcagaccaatttttcttttgtctgagatattcggccattgttgtcgagcccttcctggttgtttgtatgagggttctgatttcatccatcctagctcttgaataagctccatagagactttccaaggcttgccaaagaccagctgctgtagttgctcccataacttcagtagctattgattc

SEQ ID NO: 129543 - DNA, 553 bp, Cannabis sativa
gtacgaatgttgcaagaagccaagtgttctacactaccatcttcaaagacttccattagaatctcattattcttccaaaacggtagtaagttattgtaatacttctctagtggtccaacctgctcatatttggtccaaccacctgctacacctttatccatggtgaagatcaagaggatgctctcatcatgataggggtcatcatgcttccatgtgaaattgggggtcaaagacatcacaacagaatcattccacactgcaaggcatagtatataattatcagaccaatcttcaatgtcaaaaagagaatctcgtggcaagtctatcatacgaaattcctcactactcatatcaaaactgaggatcttttcaattccaagttggctaatacaccagtaacaaacacctccaaaacatacaccattgcatagttcagttacttcagcctgcgctatataatccattacgtcttgagacatgttgatctctctccaagaatcagaacccaatgtgtatacctcaactttacattcttcttcatcaccgagccaaa

SEQ ID NO: 129544 - DNA, 1534 bp, Cannabis sativa
  modified_base (1490)..(1494): a, c, t, g, unknown or other
tgcctgactctttattgtttgttatttaatgtactgtataatatatatttaaaataatatatttataagattcatattatttgtgtatgtttacagtattagagcacgactattgttaaaggtatttataagattcatattatttaagtatgtatataaataatatgtttataagattcacattatttagttataatcgttatgttatttaaataatgtatagtagtttgatattatttaaattaataagtagattatagtttatgtgacatgatttgaccgagaagataatagttaaatacttgactgttgggtctatatggtagatagggggtcatttagtagtggatacaattttattagaacccaaccctctgccatttagttcaatagctcgggtttatttgccaaagtcagactctggtataattatttttatgtgattagcttagaaactagttattagttactagtgataaaattaagtttatgtcttgctatttgtctgaatatgtgcatgtacgttttagtcgtgttttatttttatttatgtgtgactactcgacacacattttcttattgagtttagtagctcacccttatcaaattaccatctgcagacaaaggtaaataaaagtttagaataaggtcggtggcgagtgggactttgaacgctgtgtgtgaactcgctgagggccatataactgcaggcggtatagggcgctctgtttattttatctacgttattaaattaaagtcccaattattttttattatttattatgttttttttttgtatgaaaactagctagttgtgaacattttcaagtattaataaaaaggtgacagtatgatttttcgcatttaacgcttgtaaataaaattaatatttttataaaagtaagggtgttacagtaaaattgcacaaaacaaaattataacttattaaaaatactttgaaaacctacttaaaaataacacaaattaagccctaacagaaaaattttaaaaattaaatatcaaatctcaaaattctctcagtcgcatacaattaatccaacaaagatagggattctaattaggccatagtcgtggacatatttaagaaaaacatctagatcttcaatcatcgtacacttctgtccggagaatggcaccttcctaagcatatctgatatgctaggaacattatatcgcatgagacttgtctggatggtatttgttgaaagattagtcttaactgatttggttatgagttatcttagacagaattataaatgggtatactccgtccaagcccaaaaatgtacaacacgtgtcaccctgttgagtgtcacgtcaccttgtgcaaaaattgagataacacctacgtatataaaaaaaaatatcgagaaatgctcaaagatacaattggtgtctaatacttttttcggtgccatatcattatttggtagtatatatatatgtatatatgggtgactattcaatgnnnnnatttttattgtaactatatggttacatttttctttaacct

SEQ ID NO: 129545 - DNA, 3460 bp, Cannabis sativa
tatgttagttagggtgttacagcggtactccaaacgcttgagaagatgatgagagactttttatgggaagatggagatatctcaggaggggaacatttggttgctttggaggaagtgtgtagacaaagagagaaagggggcctgggaattagacgcctagacatgcaaaataagagtctgttgatgaaatggctatggagattccctctagaaacagacacgctttggcatagagttataaaaagtccatacggaatgtcagacaacttctgggatactaaaacagggaaaagaatgtcctctcgaggaacttggaaaggaattgcaagcctatatggtgaatatttgattttggtttcatttcaattagggaatggggagaaaatttgatttggggaagatgtgtggatgggacagaattctctgttgacctcctacccagatttagccattttggctagatctaagaataagtgcatcaaagacatggcaataattgaggaaggtggtttcagggtgtctacttgggactttaatttcagaaggaatctgttaaaaagggaagtcccaagtttaatggagctggtgcatcgattggaacatgtgaacatagcccattcctcgattgatagtacgggttggaaaccagagtacggaggctctttctcctgcaaatctgcctttctttggttcacctcaagtcacggatcatcggacttcgaatggaccaaaactctatggaaatgtagcgcttcggtaaaagtaaaagtttttggatggttagtggctctaaggaaagtaaatgtgcacgaggtaataaaaaagagaaggccttacatggacatatctccgagatggtgtatttgctgcaagtccagtaatgaaacgaccgagcatctgttcctctattgcacatacactcaaaaaatttggtcattactttataaagaacatagtcttgactgggttatgccttgtttggtgacacagaccctaatcagtaaaccggtggaaagtaaaagaaaagttaagctttggagaactacaacgttaccactgttatgggcggtgtggaatgagaaaaatagcagaattttcgaagggcaagagagatcagcaaactttgtctgggagaggataaaattttggacaaccacatggatttttaaaaccaaacattttgaggctttttcttttcttgacttaagccgggtttggagtgttttgttgtaaaacccaggttttctctcttttgttttcattgtgataattcattgtattcttacaattatgtaccatggttttcctccaccacaagtgaggctttaatattatagggggagaccggccatatggcctccttctcttttttcaaaaaaaatatttttacaaaaaaaaaaaatactttcgcttaaatgatattttaaagatttaataattacttattaatttttgttactttcttttttaattatatattcaccctatttgaatgagcaattttgtacaaatgaccaaaataactttataatattttgggttgagaaaattattacatgcacaaaataaaagaataaggtgcaaaaatatatatactgatattatctaaaagttgatttcactttttcaatatgaagaaaatttggtgcaccatccttgatttgtaactaatttcacttgattaaatgaaactcccggtatggactattaattcactattttttttttaaaagaaagtgttcattaataaaaattaggattaaacctcatggtcattataaataatatttgtcaggatggctaacacctcaatgataccaataagatttctggtgaaagttcatcaaccaacattataagcagcaaaattacaaagcctaaaaatcttcttatggatgtaattaactcggtttgattaataaaattatctttcttgattaaaaatattaataatattttaaataaaaatattaaagcaaattaattaaaagataattatggtaaaactatgtatgtaaacaaatgcaaatgtacttaagtaagtaattttattatagttaattattaatataaaaaaaaattaataacaaagttcgtaagtaaaattatttttttgagataaatatttatagaaaaataatttaaattaattttagaaaaaaaattaataatccaaattaaaaattaataatttttttaattattaatattatttaatttttataaattttatattattaaatattattataatatgtataaagttttaattgtatacaagtagacatatcataaaagtatacaccttacgttataataaccacatgatctaagatcaatggttaaaaaaagtaccctaccggtaggaaacttgaactcggtcctaccatagtcttgcccatataactaatacatttatatatatatagggcaagattatggtaggacctagcaaaagttccctactggtaggaaatttttttcgacctttgattttagatcatgtggttattatgatgtaatgtatatactcttacggtaagattgcttgtatacaattaaaattgtatacatattataataatttttaatgatatttattttttaaaaaaataaaatgatattaataattaaaaattttattaatttctattttgaattatcatttatctttttattaagtttatttgaattatttttatattggtatttatttttaaaaaataattgcttctcctaaactcatttttttattttggctttttataaaccttaaaagcatatgaaagcaaactataattgtagtatgcttgtagtattaattaattaagtcggttatattttattttttctgccaaaaaaaaaaataagtttaagaaaagcaagttggtacggtaccaattaaaaagcatctaaaataatttttataaaacacataattgaaaattttgaaagtaaataaattactttgaaaattcatttaaataatttttttaatcacaatctattttgtttactttcttttatcaaaattcatttcatttatctcttcactttctttctctctcattttctatcacattatttttactattttcacttacagaaaaactaaaacgtaaaataaaagttataagcaaatttttatttgataaatttacacaatacactaagatcaaatttatatctattctatataaaatatcgctatataacagaatttttagtttaacggtggtatttcatttctctgttaatttttaactgaatattctataatttaacagaatattttaaataaaaaaactatgggtgattctacaatgcacccccttaaaacagatgtattgatacacccctgatttgttttggcatctagaagaattttttagtctaattttttttcatattcgtgtacgttatagctatttaagaaaacctacaaaattttgagaaattc

SEQ ID NO: 129546 - DNA, 986 bp, Cannabis sativa
  modified_base (921)..(937): a, c, t, g, unknown or other
tgaaagaaagcatagacatatagttgaaaatggcttgacacttcttgctcatgcatctatgccacttaaattctgggatgaggcttttcaaactgctgtgtacattcacaacaggttacctactcctgttcttgacaacaaatctcccatagaggtcttgttcaacataaaaccagactatctaagtctcaaaacccttgattgcacctgttttcctaacatccgaccttacaataggcacaaattggagtttagatctactccttgtacctttgttggttacagcctgaaccacaaaggctacaagtgccttgatgcctctgggagattatacatctcaagggatgttgcgtttgatgaacacagcttccctcatgctcaacaatctgttcccagcataccatcttctaacccaaatacatgtctcacatctggtgacatacctcattctgatagcacttcatttgatatcacagaacaccctcctcccagacttgttccttctgtcccacaatctcctcccaacctcatgacagaacagggcactgcaaccttcactgaatcccctggtgtctcagctgagaatatgtctcagtctgaatctcatgtgcctagtccatcaccagagattcttccttaatctcaatctgttgcaccaaccagtgattccaccacatctgatgcttgtccaagtaataatcatccaatgaaaaccagatctaaatctggtatttctaaaccaaaaacctacatggtgtgcagagaacctcttaccttgaaagaagctttgcaaaacaagcattggaacaaggctatgggtacagaaatagttgctttaaaaagaaatggtacctataccttggttccattacctgcagggagaacactagtggggtgcaaattgttggaaattattttacnnnnnnnnnnnnnnnnnaccaagtatgttttattaacatcctaatatgaactctaaaacaatgaaa

SEQ ID NO: 129547 - DNA, 1276 bp, Cannabis sativa
  modified_base (26)..(54): a, c, t, g, unknown or other
aagttcttatttaggatgttaataannnnnnnnnnnnnnnnnnnnnnnnnnnnngtaaaataaattccaacaattgttgccttgaaaagaaatggtacctacacacttgtaccattaccagctggaagaacccatgttgggtgcaaatgggtgtacagagttaaagaaaactctgatggctctgttaacaagttcaaagccaggttggctgccaaaggatttcaccaacaacgtggttttgacttcacagagacttttagccctgttgcgaagccagttaccatcaaagttgttctcacattggctcttgctcacaattggacagtaaggcaaatcaatgtggacaatgccttcctcaatggttatttgcaagaggaagtttacatgattaaaccacttggatttgaagagaaatgacttcaaatttaattgaatgaagaaataaaatagactattatatagaatattgttctgcaccacatctagtttgcaagcttcacaaagctttatatgggctaaagcaggcccctagggcctggtttgagaaacttcaacagttcttattgtcacttggctttacttcatgcaaggctgatcattcattgttcattcaacacacaaattcatctataacactaattctttaattctcttaaacaccttggccaactaaattacttccttggaattgaagtttctcacacaccagagggaatgcatttatgtcagaccaaatatgccaagaatctactatgcaaagccaagatgtagggtgttaaatcctccttcactcctattatcccaatttttcaactttgacgtggcatcacatgaatggtgacacgtggaatccacttggaatatctacccgggaagcatagtccgagcaaaacatatcgctggcacgcttagagcaaagtattcaacaatccgtgcagagcaatcaacacttagcgaattcagctttcacatcataaattatcagcacaatccctataactcaaggatcaatttacgtggatatggcatacacacgatcccgctatcattgtctatcattgtattcattgtattcagcctcaatcccacgatccttgtatttagcattgatctcaagatctttctatttatacgcattgtaacgagaggggaaactcttcctctcgaaacgtcctagccctataaatagtgatgtatgttcactgggaaaaagatcggtcgaaaagtagttaagctaagactatactattatctaagaattatatatccagagata

SEQ ID NO: 129548 - DNA, 1168 bp, Cannabis sativa
  modified_base (593)..(605): a, c, t, g, unknown or other
ctattttgattagtaatcccgattaggggattagattttcataagtattttgggtagagtgcctaattatttagggcgttacacggccaaacctctataacaaattctcttgtctattttttttattcttatttgtgcatacatgtggcaagcatcagatccgtcgacttcgctgtcagttgatcacttttcgaggtcaataggtaacttgaccaaaactaattacagatcaacacatggacggctaatcaccaaaatttattataccaatggacactgtagtaaaaatcaataaatgtaattctataattactaagagttcaattccataattctagttgggtaatcatggaattaataaaaaacaaattgtttggttaataagacttgataaataatttagtttattagagcttagaattataagtccatggtccccgaattacaaccttcaaacactgtaaagggaagggataaagagttgtataatgttgtttggaaaaatatattttgaattggcaaaatagtaattatttattttttagaataaataaattatttttcaaagtaattaaataggaaaaagacaaaannnnnnnnnnnnnaatttgtcaagacaatatttgttgagacaaaagttgtcacgacaaaagataccatcatcgtcctaaataatacaaggtaggtgtctaccctatattagggtgtcccgattggttttttattttggggttaattaattatttaattagtcaattagataaatatttgaatttgaaaagtggttaaagatatttcaagttggttgagatattctctcatctgaaatatcagtaaatgaatttagtaatagatatttatttaaataattaaatatgatttaattaatggagatttaactactacaaatagaagtctgatttgagaaattagaataaagctttctcatatgttataggagaaaaagaaaattattttctctctaaaatttttcttgctcatgtgttgagaattatacagaacaaattatcgactttatcctaatagcccacaatattccttgtgcatggtagatcaatttggaagactacgttttgagtttctgatcaaccaaaaagatacaacatatgagaagtttcgaggataccctaaagatcggaagagcggt

SEQ ID NO: 129549 - DNA, 847 bp, Cannabis sativa
cattgcttggtgttcagtcttatagaggaaatgcactaaatatggaaatgaaagatatatttatgtgaaaacggttgaaccatattgacaggccactatgtgattctttaaaggttgatgaatatatctattttggattttttttattttggaaggtagattctattacatagacctggattcctttgagagatctgaatcatgggcattccttcattttgagctgagtgttaataaccattggcatcttctactttgcagcatcttcttagagtagttccagtcattggcatacttaatgacaaggaatcattcaagcctgctcccaatcctgatgaagtagaggctgtatttgatgccccattggaaatgtttatcaaggttccctgtcattctatatttcacttttgtcaaatcatgtctaaaatggatctttaatagaaacctttatatttttgctttgtcccaggatgagaacagaagagtagaagagagagagtggatggggaacaagtaccttattcatttctttgactatgaaacagagaataagaagttcttgatatggggtttgactgctgggatcttgattaaagcagcatcagttgtataccaacggccaccaccttttccagagcaaaatcctatcttcaaaattcttgaaaatgtagaaaaggataccgcattgccctagttataagaagaaaaataattctttggagtgtaataatgtgagtgtgttatttcacctaattttgaatctgcagtttatataaacatcttcagttttgaagctttaaccctctcctattatttatttatttttttttgacaatgaactttcatt

SEQ ID NO: 129550 - DNA, 794 bp, Cannabis sativa
aatcaataacttttgtgaaataaataatctaaaatggtatttatcattatttaaaaataaatatgtacgtttgataaattaaactttaaagaatatatatatgtaccatgtattaattttttaaattattaatttaaacattagttatacaatgtatttatattacttttgcgagtgaattaacatctaatttttacaagggcagattttaaaaaattttaatccaatctaatttatataattacaaatatttatactttagtaattaaattagatcatacaaaatgaattagatcgagtattttataaacactataagtaatttggtgtattagagaagataaataaaagaggggaacaaatttgaaagtatgatataaatctataatctataaccttaataaaagtgtaaaaagtttcggcctcccttaattaaattaccttaatatcctttagttattcaatttttaaagaaaatatcagtctcttacatgaatatatatatcttttacatctataaccttaataaatctataaagcttaataaaaatgagaatgtttatgggcctctattactgaattaccaaaataacctttaattaattatgaaattacaaaaagaaatatctttcatttagaagcaaatatgtatattcaataccttgtatgttttttttttttggagaaaagaaaaagtcattatttattagtgataaataattttaatatctttgaattgttattttctaattttgattctttttattttctaaacttaatagttatataaagta

SEQ ID NO: 129551 - DNA, 1046 bp, Cannabis sativa
tgtgtgtcactaaaaatatgagggaccactaatgagtaatacccataattaaaaaatattaatctatagtgacacgccaagcgcgtgtgcgtaaacgcgtcactatatcattttacttttttcaactttaattaatattttttagaaattttttttaattatacataaatataattagatattttatttattaaataaataaataacatatttctataaaaaaaaaacctattcaaatctctttctaactctctctcttcctctgttaaagaaaaactctctctcttccttcataaatctttttttcctgtcgtgtaaatggacttagggccggcgccacccctagcattttctttgaaggttcccagctgctgccatggccgaccgacatttttgatgatttgaaacccaaacgaccaaacccaggtacttttttttcctcatctgcttctttttctttgagatcgacgatctctttctcttcttcttctactgagatcgtcgatctcgatctcatcctcttcctcttattttttttcttgtcatcttttatcacagatctgtgggagttcgatgtaaaatggttcagtgacacgtgtgaagtgtcactaaaaattgtctttctagtcaccctcattagtaatgcgcgttgaagtgtcactaaaaagttttagagttactcaatgtgggtcactaaaatttatttttctagtagtgtccttcaattaattgtattcagttgactcaatttacaaaatgggaaacaagagattaaataggctgaaaaactgagtttttgcaaatattaataattattacagaaatataataaatatttaactgtaatagtcttctgcagcagaatctaattctattactgcataaaataattttgcagaaacaaatcagaaccagcaaaaataaaaagaattgtagaaaaataaaattatttgacacaagagatttgtacgtggtatcggtgttctttcaaacactcctagtccacgaggccacacccagagaaaaaaatcaattaataaagtatc

SEQ ID NO: 129552 - DNA, 1103 bp, Cannabis sativa
ttatctacgagaaatgctaaagagtactagtagtacttaataccctcctatatgtcaatattactattggtcaaactaagtatcggttcctatagttttatataataacttttagaaagtattgctagacaattgcaatgcgatataatgccttattctactaaaaactaataaaaaaggtcaatttggtcattacacaaacccagggagagaatcgcaagaaaaaaggcagaggtctttatattaaaaaataaaaataaataaaggcataggcaggcgcagacaaaattcagagaatcaaaaaaattaaaataaataaattcaaaaataaaaataaaaataaaaattgaaattgaaataaataaataaaaaaattggtattgtttttggagggagagatagctgagctgagagagaagaagactgtttcttcttcttcccaaaacccttctctttctctctcttctctctctctctacccatgttcggagctaccacctcttcctcctccaggtcccaaaggccttcctccaccaccactactgctacctcaacctttcgctcctcccgcaaatcaccggcgccgacctcaaaacccgccggacgtccgactactccttctacctcgtctaagcagccttctcctcctattccgtctcggctttctgtttcacccacggcctcggcttctgctcatactcctactgctccgatccacgccattgaccgacctgatgttagtaaggctaaggagaatgttaccgttactgttcggtttcgacctcttaggtaaactctgtttggatttttgtactggaaactgttggttgagtagttgtttagttggtgtgatgaatgtgattgttcttttttgattttgtgtaaatgtgattggttgaacagtgctcgggagattaataaaggagatgagattgcttggtatgcagatggggataatacagtgaggaatgagtataatccttctattgcttatggatttggttagtctttttcttatgctgaaatatataattttatgggtttttgattaagacagtcagataaagtttataacttttttttttttttttccattactgaga

SEQ ID NO: 129553 - DNA, 841 bp, Cannabis sativa
agcgacaaaacacgatgcaacagctgcctagaacctttgcaggatcctccattgacaggaaaattagcctgggtccgggaaccattcttgatgatccacaaacacttcaggaggcatggaagataaggcaatttctccaaccacctcagtcaaccgcgcccattttgcaacattatgagccataaagttctgctctctgccgatctttgacagctgaacactctgcaattggagagaagtagatctgaacttagccgctgcacccgctaagttgagatggatattatgcgaatttgtttccgagaaattagacaccacctctgcattatcacagaagaaaccaattctctgaaactgattttgcactgctacctggctcgccattgccagagtaagagcctccaccagagccggctcagtagccgtaaaacaagcagaataaacaccacaaatcggaaaacagcagctcctaccgagagatttgtatcaatggatacattagtacaacatgtcatccatcccggaggaggggtaagattgagttcagtcttcgatctagggggcatgatgcaagattggtgatctctgtatcgaactcgaatagcccggattgccacagagatctgagtatggtgccctccgtgcctaacatcattccgcactttccatatactctcaaagatacacaacgcaccagtgatgaactccgcaaaagatagagcaacaggtctattccttctgtcattgaaccaatctatccattcactccagtttccaatttccattcactaagctcctaacgctaacttttttttttttttttgaaatgaaatagcaactt

SEQ ID NO: 129554 - DNA, 680 bp, Cannabis sativa
gtgcatcaatatattcattttaaggaggtgctcgtagaattttcctaagttgtatttgtgaaactataaataagtgtaattttgataaataaattattaccgtaaaaaattaaatttaaatatttattttggatatttgtttttaaaaaatatttattcaaatttaaatttaaaatttcaaaaacttatttgtttactatttaaattattattatttataaatattgaaataatgttacaaaaaaaaacatgttatgttagtttgtggaccttgcataattatggttttgctcgatagaattatttttaattttcaaatttctaaaatcatattcataacctaaattgagcaaatatatacactttttctaatggcatatagattgaataaagattttttagttgaaactttttatatttgacatcgatattattagtcaagtccattcaaaaataaaaaataaaaaattatattaattacatataaatatactttcttttaagttaggatttgaaattataatatgaggactaatccttttttttgacggattaattaataaaattagggctcgtttgaaacgccgtattagctcgtatcgtattgtattgtattatattgaattgtattttatgcaatatttttatgtaaaactatatgtggtattaacttttatgga

SEQ ID NO: 129555 - DNA, 513 bp, Cannabis sativa
  modified_base (100)..(110): a, c, t, g, unknown or other
aatactatgttaaactttaatttacattaaaatattatatatttatgtgtccataaaagttaataccacatatagttttacataaaatacaatttaatannnnnnnnnnnaatacaatacggtgtaatacgacacatcaaatgaaccctaagagtattatttaagctaaatataaattatgcaatgtttataattttgtgctcggctacaataaaaaatgtgatagatagccattagagtcacgtgggtaactttaaaacttctttcttggcgagacaaatataagagatacttggaataccgagtttaagcggagttatggttttgaaccattttacccctaggcttataattacttaacttagaagtcaaaggatattttaggtattttgctttagggattaggtggcatgtccctaagttggcatctggccatttaataaataaaggggagttttatttacaccccacaaaatgataagtacaccccattattaaaaaaaatataaactt

SEQ ID NO: 129556 - DNA, 1512 bp, Cannabis sativa
  modified_base (976)..(982): a, c, t, g, unknown or other
  modified_base (1144)..(1150): a, c, t, g, unknown or other
  modified_base (1217)..(1226): a, c, t, g, unknown or other
aacataggtaagtgacacgctaaatcactttccggggacttaaacttgaaactaaaagtttccttatcgatgaataacatggcaatactctaaataacttaaaaatgagaaaaactaggatttccaaaactgctccaaccggtagatcggttcccaactggaattccaattctgcggggtttcctggggaccaaccggaattctggttcctacaggtccccctgaattggaattccggttcagtgcaggaaaatatcaaaacttcatatctcaactaaatcaaccccaaatcataccaaacctttcagacctgctcaatatatctcaaagaacataaataaggcaacaatacacctcaacatgcacagagacaagtttcaccatgtgagaccgaagttagagctcttaagctcaaaccttgaacaaaccttctaaaccaccaccaaaccagctctaaacatcaattctaaccataatttaacttcagaaacaacatcaaacaagagcagcaactacagtacctagtactcacaatttcaagcaaaattcttaactttaaacttacgaaacaataaaagatgaactagaaagcttaccaaagcttgaaaccttaacaaagatgctatctaaacccagaattgttgaagaaaccccaaagttcttgctagtttctagggctcacgaaagagagaagagagagagagtcatttcatgacttttctatatttggataaaatgaaataaaagaaaggttttgattaattaacttaagttaatatcaatctaacaatcagaatgttaactgttttatagtccactaaaggacaaaaactaatgagacaaaataaccattttgcccattccaaactaaataccataaaaggtcacttaggggtattttggtaacttcaaaattctcaactatttctgaaattcccaatgtctaactagactgccccgctatactaaaatactnnnnnnngattctaatagccaaacaccgcattctaatgttgtcgggcactgaatatgcaaaattatgaaatttctatatatgacataaaaatgcattccgaattcaaataattcatcataaattaataattcaatattaataatcaaatttcataattaaaccctaatnnnnnnntaatttctaaattaaagctaagcgttcgttacaactatccccccttaaaaggattttgtcctcgaannnnnnnnnnaataactctggatattgggctctcatgtctgattctaactccgaggtggcttcctccacctagctatttctccagagtactttgaccaaagctatggtcttattccggaagactttatcctttttgtcatggatctgaactggctgttcttcatatgaaatgttttgttgcagctcaagatattcatagctaagtacatgagcagggtctgaaacgtattttctcaacacagagacatgaaatacgttatgaactgttgaaagagctggaggcaaagctaaccgat

SEQ ID NO: 129557 - DNA, 1438 bp, Cannabis sativa
agttcttggaggcctcttgagatcaacggataatgctgagaaatggaaacaaatagccaatagtaatctttgggagctccaagataaaaggagcaggagtcttcgtgctgcattagaagtaagctacttttatcttcctccacacttgaaaggttgttttgcttattgttcaatattcccaaaaggctatggatttaaaagagatgagttggtgttaatgtggatggccgaaagtcttgtgcaatattccaagaggaataggagaatcgaagaagtttgttgtgagtattttgatgatttagtatctttttcatttttgcaaccgagtaaatggggggtgtcttgttttgttatgcatgatcttatagttgatttggctagaactatttctggaaaatacagttgtttgttggagcaaaccgacagcattgataggcttgaggagaagacacgtcaccttggatgtgttagggaactttataatgataataagatagctagctatgattttggagctacacgtttgcgaacctttgtaacaatattaggttcaagttcatccaaaatcggtttttccaaggcagcaatgcagaattttctatctatgttgaaatgtttgagagttctatcttttcgtggtctttatatgtttgagttccctgattcaattggtgaattaaaacatcttcgctatttagatctttctcagactggaattgtgattttacccgaatttgtaactaaattgtacaatttgcaaacattgaaattaggatattatgattgtcttcaaactctgcctaaagatatgcatcacctcattaatttgagacatcttattattggtggagataacctagttgagatgccatgtcaaataagtaaattgacgaatctccaatggttgacaacttttgttgtggggaaggatagtggcgctaaaatagaagaattggcagaacttcaaagtctacatggagagctttccataaagaagttagaaaatgtggcaaacattacaaaagcactggatcaagttattgtactagagaagaagcaacttgagaaattgcagttggaatggagtgataatgatgttgttgttgatccaaaacatggagagggtgtgcttgaaatgctttcaccaaacacaatgttgaaggagctcaagattaatttctatccagggacaaaatttccaaattgggttgggaatgattcatttagcaacattgctaaagtaactcttgataggtgtaagcgttgctcctatttgccaccctttgggcaacttcctttgctaaaagatctttcaatctttggatgcagttcggtagtgacggtgggtgctgagttttacgggaattgttctgggagaaagccattttcatcattggaaacattaaggttcagggagatgtcatcatgggagcaatgg

SEQ ID NO: 129558 - DNA, 770 bp, Cannabis sativa
  modified_base (682)..(686): a, c, t, g, unknown or other
taggggacccccattccccttttcaatttagggtttgatgagggggctaactgctgggtttgtaatctttcagatgagtaaagttctctaggaccttcataaacacggtttctttaggtttgacgaagaaattcttgagttccattcctttaactccatgtcaaactacaatgcctccagtgccaaatgctctaccaaggcaacgaagaagctttccatgctagaagatatcttgtagggcctagtcctttacaagaaatattcatgttgttccaatggttgggagatcgatgaactccattaaaccctgacctgtgctcacaagctatataagatagtggctgtgaatgggatcatgctgtttggttatggagtttaccatcgccttcctagtcatgaggagatgccaaaccataactacaatagttttggtgcctggagctagacccatcttatgttaggagtcatgctgcctctactagactatttcataaacttcctagtttttgttggacatgtctcgtatcaactaattccccaagcttaccacatgctttcgggcctttttattttttattctgctaggggttggcccgcccctagccctacaaaaattttagaacatgtttggtattgtttttgttttttgttttaaataattgtttttagaaatgagaacaannnnnagtttttgaagtttttaaaacacaagtcatgtttggttagtgacttttaaaaacaatattgaccaaaagtaaattggtttttaa

SEQ ID NO: 129559 - DNA, 1429 bp, Cannabis sativa
cagggtgacccgttatccccctaccttttcatctgcgcagcggaagtgttatctaggcttttggaagaagagcttgggaagggatttattaaagggataaagctaagtaggggggcctggtgctcacccatattttctttgctgatgacctcatattggttggacgggctaacataaatgaagctaaatcgttttggaattgtcttgagaagttctgttcgtggtctgggcagaaggtcaataaacttaaaacgtcaatattctttagcaaaaatacctctcctggtatgagaagagaaattaaagaagctttgggtatagatactcctgagggggttattaagtacttggggttgcctctcttcagatctagacaaaaagatgctgactttaatttcattcttgaaaatcttatgtctaaactttaggggtggaaggctaaaactttgtcaaaagcaggcagggctacccttattaagtctgtagggctatctttgcccatctatgctatgcagactaccaaattttctaaccgccttgtgaataggattgatggtatgatccgcgacttctggtggggctttgagaacgggaaccatggtctttatctcagagcctgggataaactttgcctccctaaatctctgggaggactgggctttcggaaaacaaaggaaatgaaccttgcctttttggctaagtggggttagaatttaatgaccgggagtcagtcgttatgttgtaaggtcctggaggctaaatacctaaggggaaaggattttcttactgcaattataaagattctgattcctggttttggaagaatgccgttaaagccagtgcaatcctccgaaaaggggcttgtaagagggtggctgatggaagagacactagcatctggagggacccctggatccctcacttgaaaggtttcattccgaaaccgaatggaagtataggtacggataataactgtgtggctgatctcttatctccttagggtgggtgggatattcctaagctaaaaagtctctttaatcatgagacggttttagctattctgaaagatggtacccccccgggaattggaaaaaacagttggatatggacgttggagagtaatgggcgtttctcttgtaagttggcatatctggctcaggctttggagagagctccccaatgtaatgtcaccccagctctttggaataaactttggaataacaacattatggagcgtcataaggttctttggtggtgcatcctctctcaagctctccccgttcgagcagtgattaaaagaagaattcagattgaggacattaactgtccgttttgtggtttgggtgaggaaactatggaacatctgtttcttacctgtgatgtggcgatgcacttgtggcgttcgtcaccgtggggaatctttcctgtg

SEQ ID NO: 129560 - DNA, 593 bp, Cannabis sativa
acaaaacctttgtttaaactaattataacgctatgttacggtgtgcaatgtttttgtgtaatttgtttaaataaataataaattatactatatatatttttttcaaaattatttaaacaataataaattaaaaatatatttaataaaatatctcaattttttttttcacaagtttacctatcattatattttagtagctctcaagagaatgtttttgaaacattttacacaatttctttacgtacaaaaattgaggaaattgctgctgcaggtggagaaaaatttaatgtgagcaagttgtgcaggcagctcaatccaagcttctgacaagggatatgttgagccgattgaacatccccatccccaacaaaaattgtgtggtgtgtgatagtgaagccgagagccaccaccacctctttctcagatgcatcttttcccaacaggtgttgtctatgctctttaattggttggggtttgatggttggtaaagggattttgatagctggacggtttggttgggcaatgcaaggtcaaacatcgtggataatgtgagaactcttttattggcaaccgtggtttaccacttatggagc

SEQ ID NO: 129561 - DNA, 544 bp, Cannabis sativa
ccctaattattatatagaattctgtagaaaatattaaaaaatttaaagtgtaaaaatttaaaaaaaaaaaaaatctctaatatttaatagaatgcccaattgattattgcgtaccaaattaatgttgatagccgtataggaaagaaccctaacccatcaatattggaggtctcgttttattcatataaccaattcttgtatacagagtcattgtggacgcattatcgttttgcactttctatatatttaattactaatatttaaatgtcccaacacttaagtttagatagctgtggttctaataatattctatgagggaacgtactcatgtgtaaagctaaacaaataatgggaaatcttttattcattaatgatcatcgtgtaataatatctaccgttcgatgtacgtaatacacaaaataaaaaatgatagaattaaatagcacaacacagtaaattacattatatgtgtaacgggactttcttaatatattgtttgtatacatactgtctacatacgtatataattgtgtgcaacatgaga

SEQ ID NO: 129562 - DNA, 686 bp, Cannabis sativa
aaaaaaacagctttataaaagcttcaataaacaaaaaagaaaaaaaaaaaagaaaagacaaaaatgaaatagtataaatgtaaaatttctacgtcacaatataatgtaaagtttagataaaagttagtgttttaagttaatttttttacataaaactgcacctcatctcgccccattatccattaaggtaggtaattctcgcccgccccatttaggttgggtaccttacaagtcaaatttccatcactacttgtagtgttactacttacaagagtatttgcttacaaagtagaaataaccattaagttgtactttatattgttgtaaatcaaccattttctttgactatatatgttgctttttctttacaagagtatttgcttttagtttatcatgttgtgtcttaatgcctgcctatgaattgagtaatagtttgttaattataatgcttttaaattattgttgtctttttttttaatgtatgtgatttgatgatatctttaactatatatgttgccttttctttaataatttttttatcaaaaagaaaaaacttcattaatcgaacaaacaaaatacaccatcaagcacttttctgaaaaaaaaaagaaagctcaaccttactatactttttggatcctttcttatctttaagcatatacaacctatatttaacatctctttta

SEQ ID NO: 129563 - DNA, 1232 bp, Cannabis sativa
agccctacgggcaaggagatccgctagaccattagcattgcgattgatacagataaaaactactaattcaaactgttttgtcatagaaatacattccttaaaaactgaataactaccccacctagctgggaactgatctgtctgtaacccacgtattgcctcagcacaatccgattcaatagcaatctttgaccatccttgagatgctgcagtagagagagccagtgagatggctgctaactccccttccaccacactgtggacttgcctgaaatcaagggccactatagaattgttccagttatcttcatgtttttcaatcgcagcaatgcctgctacagagtcgctcactgatgcgtcaacttggaacaccggtatgtcgtgatttcccatttgagggagtgttgagattgaagaaggaggattgtaatctgtctcctgttcccttagagagaattcttgcgctctgtaatgacactcctttgtcagcatagggatatcccagggagtgtattcatgtacaatcttgttacgccaaaaccacagcacttccacgatgcacacagcaaacacctttaaatcatggtcctccagatccacccaccatttcacaaagtccatgatgcttatccagcccatctggtctacccgcattccccatttacttttgaaccagattccgcgagtaatgttacatttagcaattagatgcatcatatcttctgtttcttcctggcagaaaacacaggctctgttatggttcttgagaaatctgagtctaccaaaggttgggacgcagtctgccatcactttccatatgagaagtaagaggcgcggatgaatcttcgatttccaaatttgcatccaaatcggattggtccccaagaacctatcatgttgatataaccaataggcacttttgacagaaaacttcccagacttagccgctttccaaaacaacatgtcatttccttcccgaagtggtttaatgttgagtatagtcactgccatatcatgatcaaaacatgttcttataagttcttcattccactgccttgtgccttccatgaatagattagaaaccttatggaaagcatgaattctgttgtagctgaaactatccttaacttcttgattagtcttccatggcacccaaggtttgttccagaggtcagaatcgccacttgctacgattatcccagccccttttagacaaattggtcgagtagaga

SEQ ID NO: 129564 - DNA, 571 bp, Cannabis sativa
tacccactatgactaacctttgagagatttgctcaacgtagcgtagactatattatcttctgacaatgtaacagcatctaatctaactaagctcttggtgctcaataccgtaaaaaatttctattgaaaacttttatttctcatgaaaacatagaacaattaatcatattaaactaaataattagggggacactatgaaaataagcgcaaaagccttgaaaggcatcaaagccaacaaaattgtggcgcaataaatcatcacattgtataaaatattaattcgctaactatttgactaataataattgtttataaaaaataataatagaaataaaatataaaaactattataacttaatgcaaaactaccctgtcacaaagagacttcttggaactgggaagtatctaggaaggaaggatacatggaggcctacttatactcgccttaacttcccaaacgtggaaggtgagatgtctctcccaaacccagaagggtctaagaagggaatttcactgaaaccaaatcttgatgggtactcgaaaggtttaacgcgtatgtctaccatcctga

SEQ ID NO: 129565 - DNA, 942 bp, Cannabis sativa
ttgtattattagggtcaaaaattgaaatttccctttgcttattgtgatttgtgtcaatttaatttaacaagtacatttaaattatttgtaacatatatgttctcagaacaaatattattttattttacatgtaccactaaaaaaaaaatttagtgacaactttttagtcaaattataaatttttgtgacaattttttagttataatataaatttttgtgactaaatatgatttttagtcgcaaaataaagtcacttgtgactgaaaataatattcaaatacaagttatcactattagttttagccacagtaaatattatgactaaaaatacatttagttacaataaattgtgatttttgcgactaatatatttagtcagtaattttttaatcacagtataaaaataataatttataattagtcacaattttataaatttttataatggtacgttaataatcactccacgtttacatgtgtagaaaaattaaacaccacaactaattgattttgtggtttaatgaaataatcctttattatgcaccacacatgtacatacaaatcttcattaacacaattttaacatgtttcatatgatatgatgaggacacaattttagcatgtttgtcttattaatctaatggataatagtggtgatgctatttttgtggtgatggtgttccttttatcatctcccactcatcatgataaggtatcaaattaacatgtgtaaataggaaataagaaaagaaacaaaaagttgaaaccacaacaataagactttatcttaagaaaaactaacaagtagttgagaaataagaactaaattatatattttttttttttttttgaaggaaaatggtaaactttattagaatgaactttcaaccattacaatagataaaagatcagcaggagcagtactctcactgaaaatacgat

SEQ ID NO: 129566 - DNA, 870 bp, Cannabis sativa
tttgatgctctaaataaatattaatcttggttgatgattatgagtaataaagattagcatttaatgtgttttgttagctcataatctgtagaaagtttaacaattacctattaattttagtgatacatataagtgatgtcaaataaaggctaatgtgttttgaaggtggcatagacagaaacattgattagaagtatcaataagacatatatgaaaacagaactcaaatgagtaatctctctctctctctctaaaatctctttataggaaagtgtttagttttagttttagtaccttaaacatgaagttttggaaagtgtgtatctgaagctcatttttccatgtagaagttattgtttcactcaagtcatttggcttagagaacacattttgtagtcctttgccttgagagtttagataaacccttctaatttgtagttatgatttttttagaaaaattccaactaatttagttatatttatccacttgaattagtataccagttaaagatcagggaaatgaaagctgagcactatcaaagaaagtaacagtgccttcgtttttgcagcaattattgtttgtgattcacaaatattattaatgttgaagttgattttaagttcttttcaaataaagggcagtgatgagctttgaagttaggaaaagacagaaaagagaacaagtgttgatcaaatgagtcatttctatttactatttggggtgaagtatatgatgtacaaaattgttttatgtgaatctagctatgtcagtggtacaaattacaattatcaattcaactgggaagtgatatcaatgaagatgtcttctctgcatggaattgtgagtccgcccatgggatgctcatatcc

SEQ ID NO: 129567 - DNA, 547 bp, Cannabis sativa
gagagagaggattgaattgtaccccttcgccgcgaacgtagccaccagcaatctgtttgttacaatgaacggccttaataaacctttctccaatggcgcatccagatttctccaaatgctccaatagaaacttcaccatcggagctgcaccacccaagagtataaatcatacaatcacacactttgataacaccacccataatcctaaaaccctagttcgtctttttacacaatttattgggaagaaagagaagaaaataaaagaaggaagttaagagagattactccgtagacttctgcgaatcatatcttggcattcgtcaatggttttcccaccattggaggcggaggtggaggtagaagtgctggttgtcccgggattctgggcgggtttttctgccatggttggtctccgccgagttgtttgttggtttacttgggttggcgctatcaaagtgtagacggctctcttctcatttcatgtacacacccctttctaacttttttttttttttaattcttgctagctttcattacaaaactagat

SEQ ID NO: 129568 - DNA, 1219 bp, Cannabis sativa
ggctactttgtgatcgcatatgtttctgcatatacgcgccttgtatgaattcctctcagtcctgcttatcttacactatgtaaggcgtagtatgcgactagactctatctgggccgcatcgtctcgtaagtttggttcaagtgaggttaacttttgaggagttcttgattaacagctcatccatccgttaaggattggatccacgtgtcaattttataggagactgatctcaagtttctaggttattaaaattcgcattgtaacacatgcccctagtttcgcgattgacagttgtgtcattatggaaattattagagagaggcaagcgagtttttgtcacgagatggtgactcttggctttcctatccagggtttcaatagacagttgtaattattattttatttctctgagatgccacatcatcaagatcctttgaggtatgtgcaggcgtgctctttggaggtcgttggattgagagaccttagacattcttttaccacgtgtctgcatcccaatgactgaggaggattagtattcaactcctatagatataaatcaatccttactcatttttcctctcactacaagaatgccgacttttgccggtgctatttagtacttgcgccggcatatatccacttatgccggcgcaagtcaacaactacgccggcaaaggaggtcaactttgttttcccacctccaccttttaccaacgcttaaaatcgccggcaataggcaataatgccggtgaattccattaattgccccagcaaaagttggcaccaaaccgtaaaaaggtgggaattgttggccaacttttgccggcgcaattacctgcgccgacaaaactattatttatttttttaattattatttacttttgccggcgtgaaactgcgccggcaaaagtcgaggaaaagagggcagtcaattttccctcgcagtgaaaaaatgtgcgcgtaaaagtaggtgggatttttgccggcgcatgtgcgccagcaaaactatgaaccgtttgaccattggacacgttgcatcagggtttaccctagaaaattttggcggtcaacatcccgcgcaaaggaaaacttgcgtgaaaattaagtgggaaacttttgctggcgcaatgaggtgcgccggcaaaagtcccaacttaaatgaaacgcagcgtttggtacgttttcatttaggaaagacttttgccggcgcacctaattg

SEQ ID NO: 129569 - DNA, 536 bp, Cannabis sativa
attaggcttattaggatattacaaatagtatcaatctacaaggattgctgataccacgtacaaaatattgtgtgtcattttaatttctgcagtgtaatcctgatctatcaggtttggtttttgataaagcagattttaattctgttcaaacaattttataacagtttcgcattaattaaattatttgttaattttgcttggtaatactaaaaatataatttcaaataataaaacctttattatatctttcttttatattttcaccaacggtggactattctcaaaattgacaaaataataatatgaatattaatttattaaataataaattattataatctaatatttgacattatgttagagactacagagaccatgggctcccaataagatatatcaattatagatacgttataagattatccaagatttctctctaatttataatattactgttttactctttaattatattttatccttaaaacactttgttgatctcgcttttagccaacgacagtgagtcttatttagta

SEQ ID NO: 129570 - DNA, 764 bp, Cannabis sativa
atctataacttttgcaaaacacatggtccaaaatggtatttacccttatttaatttatttattattattattataaaatgttttggaaaaaataattgacacagtaggaaaaaaaaacagtataaatgtcacaataaacgtgtcacagtataaaagtaataaaatgaaaaaagttagtaatgtgtgtaaattttcattttttacttgcataccaaatatttaacatttttatggagattaaatttttcaaattatattttttacggaacatggagataacataggataaatattttggaaaatttacactatacaccaaaagaatagatttttttacatttttatagactttttttctattttacagaccttttcttttacttacatttttatggaactacggtttttaaaaaaaaaaaaaaaacactgtattttttgttaaaaaactgtaaaatgttaaaaaaaaataaaaataaataataaactgtaaaaatgtaaaaaaaattgttatttttgtacatttatgaaataatctcattttatgtgaaacaaccctccctaattttgtttgaaaaaaacaaaaaaaaaaatgtatagttacacaaggtaccatttttttgtaagaaaattacctttttatgtttaaagaattttgttttacatttttactgttttccatagaattaacatgaaaacaataagaaaactacataatagtaacatgaaaataatatttaaatacatcaaaataataacaaaaaata

SEQ ID NO: 129571 - DNA, 1317 bp, Cannabis sativa
tcgatccttattcatagtgtatatatgtttatttattccgcatgttatatacacatacctatatttcagtttatacatataaatttctaacataatatagatttttacatttgtttaagatacaggatataagatttttaatgtaagtttcctagtatacatgtaactgattcttaattttacaatcataaatgattaatgacctcacaatttaataaaatgataagggttgtaatttcaattagaatctaaaaataatttataattttttcatactattagttgtaatcattatttttagaggatttttcatgaatatgggattttttgttgccatttacttttttatggtagaaaaaaataaatgaaaaagatatggaaaaaaaattaattaaatggaaaaatatgggaatccaaaaaacatataaatatgcttaaaatggaaaaacccatactttccaaattgaaaacataacagaaaccattcacttcgatctctctctccctaatctctacgcttttctctctgatcatctcgttcggaattgaacaatcaccagccgcgattgatcactgcaattcgatctgcaaaccgaactcaaacgcaaagatcagtcgcctccgatcgtcttctccaaaaccagcaacgatcgccgcctctgatcgtcttctccagctccggacagttcttcaacacattctaatcatctcaaatgcaagcaacatgcgcagaaagtccatctcaaaaccaaatattgtcatcgactgaagacagagcttcaacaacgatcatcgacctccgatcgtcttctacagctccgatcctcttcaggtaagttcttcaactgcttttgatcctcttccttatctttataacctgaaaaatcaatgctaattaaaattgaaaacgaaaaactgaaaaaacaaaccaaattatacaaagaatcaaaacgggaattacaattgtcaataatacacattacaagtatataagcattaatggtacataaatattacacgacattttaatgaacaaatataaaaaataaataaccggttaaaacaataaacaaaatcaaggtcaaccgtatgaaacacatacataacaggcaaaataaatatataccagaactaaaataaccaattaaaaacagtaaaaaaataatgaaagtcacatataacaaaacataacaggaaaaaaaatcgattaaaaaaacaatcaaaaacgtgaaaaatagttaaaaacatataacaaaacatacaatcaaaaaataaaaaaaaaataaaaaatcagttaaaaaaattaattttaaaaaa

SEQ ID NO: 129572 - DNA, 534 bp, Cannabis sativa
aagagttagagaaaataatggcttctttggacatatcaaatggcaaactaaagctgaaagaagaacttgttgctgcagccatggctgctcaggctgcagcagagaagtccttacaactagctgacagcagatctgcagggctccgtgagaggatagaagagttgtccaggaaactagaagaagtagaaagtcgagagcggcatagttttattatgtcagtacctcattttataattgatgataaatgttacaaatacttttattagatttattagacattgcatgagcttttatcatgttattttgtacttagattttataaaattgtaatgacattattgggatatagaatatgtattataaattttaataatttcactccaacagtgttataaaaactacaacaaaaataacatgaacaaagtattatataacatattaaaattgtaatgaaaaattacatgattacattttaaaagtgttattaaatgaatataacataggagaaatgataacattaaaaaatagttatta

SEQ ID NO: 129573 - DNA, 1264 bp, Cannabis sativa
tgagatcgattgtaatggtgagggtgtcctctttgtggtggctcaaaccaactctatggttgatgattttggtgactttaagccttcaccaaagcttagggctttggctcccattgttgactactctattgatatttcttcatatccccttttgcttttacaggtaaatatattataatacatatataattttattcactttcatactatatatataaaaaaaattgttattcggcactagtactacttactaccacgtgtattacgattggttaacaatattttttaaaaattattaaacctaaattatatgagatccgatggacttaattacactaataacgatataacacctaagagaatactaatttgtaaaataatcttccaaagcacgcacttgatattataaaattcttgatatggggttattttgcaagaaaaaacaaagtaagattgtattttaaattaaaaaggattttattagaccattttgcaacaataaagaagaaaaatatataaaagatggaattttgtttacattaatattgttaaaattattttgtaatttttccttgtttaattatttacaaaattatttttcgatcttcactttagctagctggtcgagaaaaattacatgtgtcaaatttttagacaggtattattatttttgtaatatcaactgtaacactattatgagtttaaaagaattagttggaagaattactctatatattatttatttatttattttttcaatttactgttgggttgcttcgtgaggttgcaatgtagatttgtattgcgatttaagttgttctgtgtatttctgtataaatacaaaaaaaaaaaaaataaagtgtataaattaaaaaatctcttaattgttttttctttttaatatgttaaataattattttttaaaattttataaaattacaaattccttctgattggaaatttacataaactacgtactaactttgacaattttttttttcacatttatatttaaagattttttttttttttttttacatttttacgacgtttatataaaaaataacaccaaaacaacaagaaaatcatatgaaagtaacagaaaacaacattcaaattaataacaccattaagtaatacacaaataacaaaattaaactaatagccaaataataaaaaatacaatataaaaatactgtattttatgtaaataaaatcttaaaatctataaaaaatatttaaaattccgtacaaccgtattttt

SEQ ID NO: 129574 - DNA, 819 bp, Cannabis sativa
  modified_base (773)..(793): a, c, t, g, unknown or other
ttctggctttgaattcgaatccaactttaaataaaattaacaaataaaaataaaaattaaatttacagaactcatttttattttttatttttaaaattaaaaaagaaaataattataaaacgtatttttgctttccaaaattaaaattttatttttatttttataattaaaaaatttaaaaacaaaaattaccgaaggctagctaattaaatcatatttaattaattgctacaaaaaaaaaatcatatttaattaattttttttttctttctacgttttcttcttcattttttatctttttattcatcatcttctgtcaaaattacacagagtgggcttcgacaaggcaggtggaggctttgttggaaagaaagccaaatctgttgcttcaatgtcgccaatagataatcactctctctattctctatcgtaggtactttcttctttgccgatttctgaactattcgttgcttttgattcaaagcccaaaaggaattgagaagaaagacaaagaggcggaagacgatatggctggtggtgggttgtctacaggggaatctgggcttcgttcctttgctttgttgttttgacagtattcaacgagataagctttgtcaaacttggtgttgatgctttcgtttcggatctcagatgggtgtgaggctcgacaacgtcaggggatcaacgacggcgtgaactcgacggtgagatctcgtggttgggctatggttgttggggtgttgagaatcatggggttccatctcaaaatcaannnnnnnnnnnnnnnnnnnnncatgttcttatatatggctcaattct

SEQ ID NO: 129575 - DNA, 1823 bp, Cannabis sativa
  modified_base (817)..(818): a, c, t, g, unknown or other
  modified_base (1723)..(1726): a, c, t, g, unknown or other
tcataggtcaaattttaatgaaaatttgcgttaacaaatattatattattatattattgtaattattatttatataaacgaaacatatcagttttgtttgattatatatatatatatatattaatttttacatataacagtaaagaatgaacgaatcaaccctcgttaactccccttcgacaaaaccttctccccttatatcaattttcttcgattttcaccacaaaacctagcgatctaagctccagtagtagcagaatagtaaatccttgaagagaaaacgcttaaggtatggtttaattttattttaactgtaaaaacaattggtttcgtataggggttttgtgaattagaagtgttatgaaggttctaactttataggattgttctcgggtagtcatgtgactagtttcgatgttttcttgttgaaactgaggtgattttaggttagaattgagtttgaaactttttaaggcttagttcgaatgttactagcaatattcatttaagggctaaattttaatttttgctacgtaaggatggtaaaatttatggtatatatgtgtcatgtgatgtttggagtgatttggataagttttggtagtgtttcggtgagtgcaaaatttgagatatttgtattttataatttttgaaaataaaattcttaggataggagatagatcaggatcagaaagaaatcataatcatatttttatcataacttttgactcgggtgtctggtttggacgttctatatattgttttgaaggttgcaacgagatctaatatatgatgtatgttttagagccaaaatatnngttattttagtgtatttataccacagcgttttgtaaaaaaaccctagattttcttatgtgaatattaagtagtgttttaggataaacacttataaacacttattagtacttattagtttttattagtttatattagtttaccattgtttaccattgtaccattgttgtgacatagggccgagatcatcgagtatagttctccacttgtattgctgacatgtaggaacctagattaaaggtaagaaaagcatattgtactacatagtacgttctatgcaatataattagtattgttatgaattggttaatattgagatgtagttaatattgttatataatgaaaatattgattggttgaatatcgataatgtgatgatattatgcatgtgatatatgggctcacctgattaggtgatgcaatatactttgtgacgtaccgggcgtaggtacgggcgtcaatgatgtatgatgagtaccgagcgtaggtacgggctcacatgatttaattgatgtgattttactagcgacataccgggcataggtatagttgttagtgatatatgatcagtaccatgtttaggtacgggctcacttaattaggtgatgaaattttcgtagtgacgtacagggcgtaggtacagaggttagttatatatgatgattaccgagcgtaggtacgggctcacttgattaggtgatgcaatttcttggtgacatatcgggtgtagctacgggcatcaatgacatatgataagtactgggcgtaggtacgaggtcatttgattagacaatgcaatatatttgtgtcatgttgtggcacatgctcacctgatttggtgatgtaattaggtaatgtatgagtgcatgcttttaggatgggctcacctgttggaatttattttacnnnnatcttagatctactcacaactatgctgattaacaacctaaatatgaacttctaaaacgataacaataaaacacatataaagtaaagaaaatcttaca

SEQ ID NO: 129576 - DNA, 1050 bp, Cannabis sativa
  modified_base (456)..(483): a, c, t, g, unknown or other
tttgtaatgatgaactatcaattaatgcatatgtataatttttgttcattaagaagaacacatacatttattttttagaaattttgagggggccaaggccaccctaactacacacctatgtccgcccctgcttatcgtctaactaagggtgtttgcggtgtgagtagtgaggtttttgactatttttttaaatcaacctgcacatgcagtttttttaattcctaatttgcactcgcatcgcgaaactaaaaaactgcgaaaatcgcaccgcaaaaaatggtgcggtgcagtgcgatttttgtgatttggattattaccaataattaaactatcacaaatacaacaaagcttgagcaacacttgtcaaaaataccataagatttgaaaataaatatgaaaaaaaaattaagtttcaataatataataattagtggactttgggttggacattcacannnnnnnnnnnnnnnnnnnnnnnnnnnngtatttttataatgtgcggtgcaatgcagtttgaaccgcataataacaattcaaaatcgtaaatcgcacccttattttttacggtgcgggcggtttaagcggattgataaacacccttttgtctaattgtcctatataggtcccaaatcaatcgctggcgcttttcttttggttgaacgacctcattcctaatttgccttcacctaatgcccgagcctgtacacctcaaaaactatagagaaatgttgattgtggactaagccgaaagcaagacgcaaaatcgctcggacaaatcaggaatctagaagctagaaagaatctctaggtcggatgcttattctcgttccaccaatcattccctatctttctagtcaagggccaattaaacttctaaagctatggttttaaatttcttatatttttgtacaaattttagtttaaatcataattttgtaagtgaaaattttcgtaatttttaaaatggggtaagttgaaaaatgtctcttttattcatcaattaatcaaatttacctctaattctatatttatttgaaacatacctctttt

SEQ ID NO: 129577 - DNA, 1167 bp, Cannabis sativa
  modified_base (942)..(945): a, c, t, g, unknown or other
tgatgtgatttctcatataatcatttttcaggaagactacaactgtagaaataaatatcttcttattctcatgattatccacttcgagtttcttctaaatatagtccacaaatatgcacacttatgaccaaggagcaagattttctctctttagatctttaaacatgagtaggacaaccctaaatataaaaatatttcaaattcgattttgttccattccatatttctcttagagtcttgcttttactctttgagggaactacattaagaatgtaagtagctgcttgaagcgtgtatctgttgaagttgagtggtagtgataagtaacttaacatagacttgaccatgtctaacaaggttaagttttttctctctgaaacatcattctgttgaggcattcttagtgatgtgtattgggatagggtcgcatgctctagcaggtagtctttgaattcacaatccaaatagtctccacctcgatcttatcaaagtatctttaaagatttacctaattgcttttcatctagcacttaaagtatttgaactttctaaaagttttagattttttggccattaggtaagtatgagcatattttgattaatcgtcaataaaagtaacaaagcattcgtgaccacctcgagcttgtacattgattggttactagctcaagttgttcttgggctccgttgcctttcgcagtaaaaggtctttttgttggttttatggtactaaattaggtacacagcggaagagcttcgtattatctgattatcattgtaccatagcccctaggacctccatatgtgtgtacattaaatcaaaacaataaaaataataagtttagagtatatctcttgaagtctattagggtattttcgaaacttttcgtatgttgtatctcttaatctagttgataaggaattagcaatttggactcacannnntgtcttccaaatcgatccaccacataaggaatagtgtgggctataaagataaagtgtgtaactttgttcttgtcgagttctcaatacatgagcaagaataactaagaaaaaaatcaatttcttttttctctctacaggttccaaaatttactgtgtaaaagtgatgttcttacttctcaaattaggttcctatttatggtagttaaatctctttaattaaat

SEQ ID NO: 129578 - DNA, 1582 bp, Cannabis sativa
gatgccattcgtggcttctatttggctgtggatggacggagacaatcctctggcgttgggccgagctaaacgcagagagataaagaaagaaagaaaccggatggtggtttggggttggctgtggatggacggagacaatcagatgggtagctttgctgtgcgataatgaacagggagagggtgggagatgcgtgagggccatgtggtgtgataatattagggtttttttttttagtttttaattaaattatgtttttctttcaacaaaaaaaaaaattaattatgttttaaattttatttatttcaaattttcttttttcccaatttcaaattatttttaatttttttattttttttaaataataatttatgtggaccaataaaattgtgacacgtgtacattgtgtacacgtagacattccaacatggcatttaacagccaaaaatggacggaaagggataattgctaacagaatatcaattcaggaggttttaccaccaaaattttagaattgggggttagttgcaaacacctgaccactttaggaggttatgccgcaaataactatgtaattttctcaaaaaaaagccaagtcgtggcatggaatagagcatgttgcggcctccctcactttagcaagaaaaaaaaaacttttaaacctagttgcaaattttaaaaggagacttgaagggtgacgacttgggggaggccaaaaacacatgcgaagcatcccaattcactctcaagaatttttcttcttattttttttttttactttcgaatgctatgtttattttcattatgagatgataattgtgaactaaatcactttttataagattgttatgagaattacttgaatttcttttatgaattaattcaattttttaatttcttcttcttttcttattttaattctatgcaatttgatttaactttgcaattatttattgaccatctataattattttttatgaattcaaatcaaaactctgaaaagtgggagatttgattatgctttgattattttggatgcgatttaatttagaacgaaagtatctaagttgattgtatgacttttatgagttgttatgttcattcttttccttgtgttttggctttatcatagaaatatagagagttatcacttagattgaatttgtaagtcttaatgagattatgaactattgatccacaactacaaagtataattctcgtcagtttttaagtgtcatttaaagaatttatgtcggttaataaaaccgacgtatatactatagtcgcaaatatttttttattagcgttatttttaaaataacgcaaaaaacaattatctacatttaaaaactgactcaaaaaatgtactcttctattttattttttgcgtcgatttcgaaacgacgcaaagtcattaatggcattttcaaaccgtcacgaccaacttattacgtcggttcaaaaataccatatcaattgctaaatttttttttttacctattgcgtcggttataaaatgaagcacaaatataggtaagggaaaattacaaattttcatgcaatttttcccacctgtattatcaa

SEQ ID NO: 129579 - DNA, 984 bp, Cannabis sativa
  modified_base (883)..(901): a, c, t, g, unknown or other
actcaaataaattcccataattgtgttattattaataataataaaatctcatacataaaccttaattatttaataattcaaggtattaatcatatgcggtctttacataaagtctgtatcttctacttattttattttaatttaaaataatgtatatataatattctatatatatattgtatgagcatattgtatcaatactatagtgtacatattctttatttagttttatattgtattaccatattttcaatttatcaattaataattaataatgatttatttgcaaaattattaataacgtttttaataaatacattaaaatattaataatatattataatttttttttgtgtgtatgattatgagtattattttttacaaaatcttgtataagtactattattatatataattttattcattcatgtattatttgtttaaaatagtacatatattacattttttaaaaaaaaaaataaaataaaaagagaattattacttttgctcaactttgggagtaggggtatttatcaaactattcacactgcacaaaccgttcgcaccgcaccacaccggataaaatatacgctttgaaatcttttgcggtgcagttgtggtttgtatttttgtcaagcagtgcagtgcagtttacggttttgaatttaataattgcagttcaaaccgcaccacactatatataacaaaattaccaatttttttaatatgatttttattctttttttcatataagaacaaatatatgtaatatatgtgtgtattacattattttttagagacaatccaatataatgatttgatgattagtatacatgttatgatactataaaaaaaacaaccacttttagtgacaactttttannnnnnnnnnnnnnnnnnngtgactaaatatgatttttagtcacaacaaaaagttacttatgactaaaatatagtatttagctacaagttgtcactaattta

SEQ ID NO: 129580 - DNA, 572 bp, Cannabis sativa
ctctcccttttactatttgtaggagtttaattaattagaaaaacctcaagttggtttatcactttcactattatgaattttaatataagtgtttgatatcatggcttaatttaagttataaatatatatatatatttatttttataattttatatctcaatttaggtataatatatatatatatatatttcaatttttaactatttttttttagattaggtaatggtaatataagttaagttttctattaactatttcttagattcagaattatattgtgagttcgaagcaaagcgtatgacgacaaatgagatacgataatgatgatagcggattttgaatgtaatagtgactacaaatacgatgcagtgatgacaatagtcttaaaatcacatgataaattttttctttaaaatctatattttgtacgagaattatcatcgtatgatgaatttttatgcaagtaaaaagtgaaagtttagcaaaatagttacttatattattaaaaatatacatatgtatatgtaaaatattaaaatttgaaattctatacagttttataacttaattat

SEQ ID NO: 129581 - DNA, 650 bp, Cannabis sativa
agtagtatttagataaatcacaggagaccaaaatggtattattccttttataaataaagagtcaatgtaaacatttctatataatttttgcctagtttcttataatcattttctttacatagtatttcctctaattgagaggagtacattatttaattatttatttattttttttatattttatattttttattttttttaaaaaaatttatcatctttattaatttcaatccatagtgattacatgattaaaatttaaagtaacatccctactcctaataacacgatcaacaactaaatatatgctcgagctcagggccgaccctaagttgaaatggatcataggcaaaaaaaattttttgagcccttactataaagataaatggtatttttaaattttttttaaaaaaatatgtatattttttaaaatatatttttttatttgggccattaaaatgaatgggtcctaggcgcggacctagccgacctatgcttagggctggccctgctcaagctaaaaaatgagcaatattatttagaggaaattacgtagaatattgcattttttccttaaatttcatagatatggaaaaattagagatttacttaacttatggtttttttacaatttaagttagttgtatggaaaa

SEQ ID NO: 129582 - DNA, 676 bp, Cannabis sativa
tacctcacaaaagataaatgtatcatccgcatacatgagatgcaaaatagagaagctattcatgtgagatctaaaactatcaatcaactctcttttatttgcatttgctaacaatttggagagcacctcactatacaagatgaaaacatatggggagaaagggatatccttgtctaaggcctgtcttcgagtgaatttgttttaagggacctccattcaaaagaatagaagaaaaagattgaagaaacacatttagccactaggcatcgaaattgatcacagaactcgaaagcctcaagcgttttgtccaagaagccccactcgatatgatcataagccttagacatgtccaatttaagaccaatgaacccttacagaccttcaacttttaaaaggaatccataacctcatgggaaataatgtcattctcaacaatccatctatctaggccaaaagtaaattgaattggtgacataagtctaggcagcagcagtttaatcatattcacaagaagcttagagatgactttataggaaaaattacaagggctaatgagtctaaagtcatcaaagcattaggcattaccccttttcggaatgaggataatgaaggtctgtgtaacgtcctcgctttaagcctccattgggtccttacacccatagaatgatggctctta

SEQ ID NO: 129583 - DNA, 808 bp, Cannabis sativa
aaaaaaaaaaaaaaaaaaaaattgtacaagaagcgcacatttaagaattttttttttttttcatcttctctgttctaacaattcattttttaaaattgaacttcaaaagaaaaacaaaatatatatttattaaaataataaaataaataaaataatttcctacaatagagtttattatattacagtgaaactcaaagtcactacttcataattggttaaaaaaaattccttataagggtaaaaacaagctgtcacaccatagataatccctatatatatatatatatatatttatcatcactacgtaccaaacaaaaaaaaattaaaactaaatatcatttttattatgatataaaagttacttctcactaaaaaaaattgatgacatagaaaaataatttatgtttagttacattttttttactgttagtcataaattttatcgtgactaataataagatatattttatagtgtgtgtatatatatacatataatgataaattatatacaaaaggaaataaaattcaccttatattgagttgaaagagattgaataaaatcaaaagaccaaatgggaggtccatagttggccgatcttcgatcactattattaataatcgtagaactagggttatcaatcacaatacattgtatggggtaacaagtacttgatcttgatctcgatctcaatttcgatctcgatttcaagtttgattttggttttgattttggttttgaaatagaagtaataatagaagtttttggtgtaaaacgattattaactctactccaaatagggagggatga

SEQ ID NO: 129584 - DNA, 537 bp, Cannabis sativa
aaaaaaaaaacaaacaaacaaactcggttgctaaaattttcattcttcccggcaaaccccaaaatttttccctctatatttttagttccccctatttactttagcactctctcaaacccttattcctaaatcatacagagaaacctctgctccctaaattctattgcattaatgaaagttttttttctttatacttttacatttctcacctaaatctatcaccattggcatctcgtcaattgttcatgggttaatgcagtttaccactatggcgttaaggtaataaattaacttataaataataaactgtataaatataattaatttaatttttttatctgatatataatttagtttgtacatgtgttttgtagctttcctttacaaatttgaagctataacagtaataggataatttgtgctagatagttacttttgcgaaggctactttaggggcacaatagtttatgcataatatatacaaataaagccatatatttggttgttaaatcgtaaacagattgacactggtgtttg

SEQ ID NO: 129585 - DNA, 1250 bp, Cannabis sativa
  modified_base (1211)..(1220): a, c, t, g, unknown or other
gttatttaagcatggaaattcaaatttccctaatacaaatacaaaatataattcactttgttaaaattctactccaatagtgtgttaaattatgatgcaaatatgtcatgtaacaagaagtaatttaaatttagattacaacatagcatgatgcaaaatttgtattataataaatgctatacttttatatttactaatatgtcatttttaatattttattattaattttagttaacaaactcttttacattaaatgacttgcattattattattaaattttatatttatctttgtattattagtattattttatatttttttaataaattattaagtgggcattaaatgatatagtaaattttacatcaagatttacaattatgcattaaacataatagtaaaagttgatgtaaaaatgtcacaaaacaactttttgtatcaaatatatcttaatttttatgtctctcattgaaaataggtttagtaataaatatttaagagataaaaatactaattattctccgtatatataatattattcttttacttttattttgatttcaatatattttaaacaataaaagttaaagtagtctaattttttctttaacaaatatttattgaacacacttcaatgacaattttattgctaagtaaaaataatatatatttgtattttttttttaatttataataaatactatataaaatattcagaaaaaaaactaaaaaatgtaatattgttttatcaaaattaattttatgttcatgactattttgtagtattttttttttatgtttacgagtattttgtactatttggtaaaacgccctcaacaaataatataagcgtattgaagtagtgcttcattctttgttgagagtgggggtttaatttgatattgttgaaaccatacgatagcagggttttgaggaacagaatcgggtaacgagattgttataaatggttgtatctaatattaggtaaaattaattatttaattttgaaatttaaaatgtaaaattatttatttttaagaaattacattatatactattttttaactttttttttttcaaatttacagtttgagttgcttcggtagtttctccggtaatttttatatggtttgttatatggattttaattgtgatgttagttgttatagggtttctgtgtggaactttataaaaatgcaaaaaaaaaaannnnnnnnnnaaaaaaaaaaactattttaaagtgaaaaaa

SEQ ID NO: 129586 - DNA, 507 bp, Cannabis sativa
ctttcgaagaactggttctctccatcacagacctaatgtacttgccaaacattagtacagagcaaaatgggttagcacaacacaagaccctaggactcttactctccatgatagagaccgcaggcatggtgccaatattcctagggcaaacagtcacacgcaacatgcacaactccctaagaactttacaacaagtaaacagtgaagaaaacttaccagtttttaagaggaaatgaggtaggtgatcctagtgttgtgttgctggcagaatgtgtgcctgagaatggagttgctaaagaggtcttgcaaggtagaggaagggatgaaaccaaatggtatgaactttggtacgacaagaagaaaaaatgtaaagtgtaaaatggatgttgaaagcatttattgggtaccaagaagaggcaccttccacgagaagcaaatggttcgactcgttcgcctaagagacgtctgatgattgaatgagtgggaagctaagaaggtgtatggcct

SEQ ID NO: 129587 - DNA, 685 bp, Cannabis sativa
gactgtaagaaaatttccttgcggtcatatatttcaccctgagtgcatgcaagatatattaaatagtagacttaagaagtgtcctaattgtagatttatgttcgcttagtacttatttcatttgagtttttaaaataaatgtaatttggttcaaattaataatataatagcgtatgattttttcttcccgaatagtataattattttagctaggtttctttttttaatttttttactatatatgctttcaactattatctgatttgttttagttttattttttaaatttattaattagttttgttttaatgaattaggtgaagaaaatagttaagacagtacactactataatgtaataaactatattaatacaacaattattaaaaattaggtacttaataacaataaaatgaacaaaattgatatttttctgcaaattttcttaaataaataaataaataaaagagatatttttagcatagtatttaattgtacagctaaacctaatgttactataataaagttttcgctctctttcttggttgtccttcttctcctccgaggtttagtcacggttaataattgagttcgaagttaaaggggacttttgagtttaatttactcgatcctaacttgtttctcttttttaagttcgttctcgacgatgatcgttttcgtgttctt

SEQ ID NO: 129588 - DNA, 800 bp, Cannabis sativa
  modified_base (733)..(737): a, c, t, g, unknown or other
gtacacccaaatgttcttaagtgcgttaggtttggggtcttgttgtaccacatttcatcaggggttttcaagcctatgacttagtttgggcttctatttataaggtaggttgcattttctagagttttctctgagaaatagtttttctaatccagaactgaactgtaaacatctaactttctttaatagggtatggttcatctaactttgtctagtgataccaaattcttgacagatcttgtcaaattcagagttaataaactctaaccccttatccatcctaaggttcttaattttaagatctgtttggtttttcacctgagttttctaatttctaaactgttccagacactcatccttatttgctaactagtaggtccaaacacacctactataatcgtcaactatttaaagaaaatattgcttaccggagtgggtaggcaccttgtatggtccccaaagatcaacatgcatatatttgagtatctttttagtcgtgtgccttaccatagtgaattttagcttatgttgtttccgtaaaacacatgcttcataaaatgataaggcacaagaatttaaattttcaattatatcttatttgtgcagttcttcgaggccttattcactgatatatccaagtctgtgatgccataacttcatctccaattctagcccttccaccatacttgcctctccagctggacggtttctgttaggaatattttaccaggannnnnatttactaacaagtatgtttcaataacatcctaatatgattttctaaaacaatgaaataaaca

SEQ ID NO: 129589 - DNA, 628 bp, Cannabis sativa
aaagagtgaaaactaaccgaaaatatgacccgaaacttagactaattttagcctaacattttcttgcacaattttctctatttcatatatcatctttttgtgatttttttttatcttctttccatcttattctattgtgacattttgcacacacaagtccttataaggatcaaagtttgcatattttaatttcactagtaattatatcaaaaaacatttaacttttataaatttactagattgaaggaaatatagttgagagtctcatattactaatgtgcaaaaaaaaaaatattatatataagatgtgtacatcattcttcttagtatttgatcaaaatctaatatagctggtctaaacaaattcaaaagagtcatttgtgatccagagatagtgagccaaagaaagtccttgtgagccaaaagtagtgccacattgtgatcgaatcgtccaagtttagagagccaaaaatagttaccatatcttaaggaggatgctagaaagttccatattactaatgtcactacaaaaatctattacctttagcgataactttttagtcgaaatataattttttctgactaaatgtgacttttagttacaaaaaaatattacttgtgactaaaa

SEQ ID NO: 129590 - DNA, 1097 bp, Cannabis sativa
  modified_base (1040)..(1046): a, c, t, g, unknown or other
tcgacaatcttggtgaatattgaaagtaaaaattgtattctatctacttgtgtactggagggtaaaatatttatatatatatatattgagataggctatggctggggtgggaccacggtaagatatgatgaagaggttagatcttaggcatgtgaaaactattccagttacagaaaccaatggagtttggatcgaggctctaatgtatgtttgttcttttgttgtaacccgtgacacatgttttggaatttacctacctatatatgcctactcaaagctatcttccaaactaggctttatgcaacactctgcttcaaattttacaccatcatactcacgaaggaaattccttaactttggataccaactttaacaaaaacttacaaaataaattcatatatattgatggataaatatggatagatatatacgtcataatattctttatattttcattttcatatacttacaaacttctctaatagcgtctagcagcacttaattatttccgaatttgttattcactataacttttaacaaaacatatattaaattaaactatcataatatgatattttataagaaaaataattacttaaaaataaactaattaccaaagcgaaaacgaagatattgtataaagtatttaatgaagaaataaaggatcttgtttgtatggttgtgttttttagaattgtattattaaaagtaagaatagaaaataatttttttattattttaaacatttaataatggtgtggcacaaattttttaaaataatttttagattttttcttactaaaaaaaattaatattttaacaccataccatgacattaactcaattttttaaaaactgtttttaaatttttttaccaaacgacccttattggttttcaaaaactgttttcaattttaaaaaaccgaaaataattttcaagttatgaagtcaaatagcctcaaagactctaaatttagtttagtgggtaggactaggatatatatatttagggatacgattttgtcccgtgatgtactttnnnnnnntgtattccgtggtacattagatgggtctcagggtacattaaatgagtgtta

SEQ ID NO: 129591 - DNA, 661 bp, Cannabis sativa
ttttatcttatactctgttcatctcgagatggacatattacctcgtcaattatattagtttaatagttattattcgtatctcacatgtgattaggtagtcagcgagtttgaacatttctatcaactctagataattggtttgaattatttaaatcgcatttgataatgcaatttaattgcatttcttcaatctctgatgaatagtcgaattttaggcataacaattgcccctaaaaagtacttgtgctttttaattaaaaagaactttttaaatgctcttaggggtataatcgtatttaacatgttttgaaaaattgcatgctttgagttttggcagttcagaattttgagacacatcattacccttttaatgttctgatcgttccattctcacatagttcctacccgttagatcagatttcctttgatcgaacagtgatcacttattaggtataaaattgaagttgcacatcatttttgccattttcagctatcataccttcgagcttttcgccaaactctcaaccactttcttcccaatcttgcatgtcctcactatctcttacatttttcctgcgcatttcatctgattacacttcttgttctagaaatcatccagacccagttttacaaccttcagaacttcaatcgcaaagtttcc

SEQ ID NO: 129592 - DNA, 1421 bp, Cannabis sativa
  modified_base (38)..(50): a, c, t, g, unknown or other
tttttgaaaaacccgaaaaaataaaaaaaaaaaaaaannnnnnnnnnnnnaaagtgtaaaaatgaaaaagcccccaaaaaatttattcttcatcaactgaaaattgatccttagattaaaattggtactgagcataaaagattgtacttttaattcaacttaatagattagatatactactcttttcaataccttaagatgtaaataattcagcaaaaaaaatagaaattgtaagagcaatactgtcaaaagaagacacaacacttccatcatctaattttatttctctaatagtattaactttattcctataagtagcattcttatgattttttttttttttttgtaagtattgcaatggaatgaagatggtgaaatagaattgaatggtaataaaacaatgtttaatattttgtttagttgtattgtaaaatattgaaatgtcattttaataggataagctgcaaccaagagcattgaagtgtatgttttttggttatcctgatggagtcaaaagctataaattatggtgtttggaacttggtttcaagaagtgcatcataagtagagatgttgtcttcaaagaggatgaaatggcaatgaaaaccaaagctctcaatgatatacaacctgctgtaccagttcaaagtctacaactggaggtggaccaacctgacactcaaattgtagaagagaattctaaaaccagtgcataaactgatacacatgaacgtgcaactgatttgagaacctaccaacttgctagagacagggtgagaagagaaaccagaccaccaagcaagcttggatatgttgatttcatagcatatgcattgctcactggagaggagttagaatcttcagaaccaactagcttccttaaggctactacaggcagaaacaggttgaaatggctgaaagctattgatgaagagatgacttcacttaagaagaataagacatggataatgatcaagaaacctgaaggaaagaaattggtaggctacaaatggatttttaaagagtaggaaggcattcttggtgttgaaccagtcaagttcaaggcaagactagtagcaaaagggttcactcagcaggaaggagtggatttcaatgagattttttctccagttgtgaagcaaacttcaattagggtaatgatagaaaaagatgctaaagaagaactgcatattgagcaaatggatgtaaggacgtttgctttcttacatgggaatcttgatgagaaaatatacatgaaacttccataagggtatgaaagcaaggaccctaatcaggtttgtttacttaataaatctctctatggtttaaagcaagcacctaggcaatggaatttaagatttgatgaatacatgaagaaaatagggtatgtgaaaagcaactatgatccatgcatctatcac

SEQ ID NO: 129593 - DNA, 1176 bp, Cannabis sativa
cccatgccaccgcagccgcagcctatgtcaagacgtttcatcctaattggtctcctgctgctatcaagtctgctatgatgaccactggtaagattaatcaccaaaatcatatcatgcgactagctatgctctttcatttcattctaacacatttttgtttgtccttttgtttcagctacaccaatgaaaatcaaggacaaaacagctgagttaggctctggtgcagggcagatagaccctgtccaggcagttgatcctggcctagtctatgacttgtccatgagctcttacattcggttcttgtgcaaagaaggctacaatggcaccaccatcgctctgctctttggggggaagaggaggtacaactgctcggactttaggcctgcgagaggcacagacggtctcaactaccccaccatgcaactccacctacagaatcctaactctactgtctctgctatcttccaccggacggtgactcatgtcggccagggaagtgcagtgtacaaggtgaatgtggtctcaccaaaaggtctttctgtgagagttaatccaagtagtttgagtttcagtgcaccacaacagaagaggtcttttagtgttgtgatcaagggcaagtcgttgcctaaggggacacagttcctatccgctttgctcgagtggaatgattttcaaaagcatagtgttaggagcaatattctcgtgtataagcctgacattttgccgtattgatatgcttttctgtagtccataagaatgattttgagctgagtaatgaagagtcatttaccttcttttattatatgtgtgatttgtgacttttcttttgcttctttttttgaacgtttacttcaaatttccttcattgaatcgaaacacttctgaatagggttgaacatttctagcgggttcaactcgaacccgtaccagtgaacccgcaattttttttaaaaaaaaaatgttcaggcaagttgggttcaacctggtacccatcggtggggttcacaggttgagtttttaggagtactgggcttcgggttgaacctgccaacccgtccgccaacccgcaatttaaatatattatatatatttttatttttttattacaatttatatatatatattaaattattaattaaaaaataaaaaattctaaaattttttaaaaaatttaaa

SEQ ID NO: 129594 - DNA, 714 bp, Cannabis sativa
tttaaaaaattattgtattaaacgaaatcgaatacttaattacacgaatagagatacgacaataaaaaaagttctataagtatatcactagtgtcttcagtaatttttttcggagaaatgctacaagcagtcttatgagatataatattaatatgagtataatttaatatcgagttccactattttattttaataaaaattataaaaaaaattcttaccaattataaaataatactttataataatgctaaacaccaattatactctataacaatgctcaatatataatttgtgtattgatagatatatatatacttgcccacctattcaaatgatcttatattatattgtactgcagaattgtactttgtcaaaaatgtcaaaaattgagatttttttagttgtaatagttattcttaattcctttttaaaggcaaactgtaattttttaatataatagttatataatataaataagtcagataattaggcaactaacaaaactgttaaactacttcagctaaacaaagttcactaatatctctctactgtagtcaaaacaataaatttaaacgtaatcctcaagagactgactttaacataataaccaaccaaccacaatattactataaatacttaaagtaagcaatccttatttttaagtgatcatttcttcaaaataaatatatatacatatatagagatagagagaat

SEQ ID NO: 129595 - DNA, 826 bp, Cannabis sativa
tggtaaaatatattccaacactaaactcatccatttcaaccaaattcacaaccaaaacttaaatccatcaaatagattttctaaaaattaaacaaatagcttaaaacacaattcatgcattaaaaatccaatggtaaaaaacccccaaaattcagattatacaacattcaaagaaaagctcaaaacttgagcataaacaaccaaaacttcaagctcaagaacttgaacttcaacaattaatttcaaagttcaataacataataaaaacactaataaagttccttttaaattctctctaaacctaacccaacataaactcaaaagatccaagtacaaacatgctcatatcaacaagaaaacaccaacatgcatctcaagaccatcccaacctatttcatgcttttcaaccatcaaatcacagtaggaaatttattaaatttcagcaatgaaaaactacctcaagcttcaatgcaatgatcaagccacaactcctcaaaatcaagcataacccaacacaattctcaagtaattcttcaatttaggaataggttagagagagagagagaacttcgagtttgagggggaggaaacttgaaaataatttcaatttttactaaaaatgatttttgatgaaagcaatccatttatgcctaaattacaaaaatgccattaagccacataactctcatataaacatttcaagagtaaaatagtcatttccaacataaatctccttaaataaattcagattattcgcttataaatataatgccaataatttatcctaaaattgtcagaacttttggaaatattttactaggatcta

SEQ ID NO: 129596 - DNA, 659 bp, Cannabis sativa
gattgagtacttcacttgctatgtacgggcatggtactcgcactatagatttgaatatggcgaagaatgaaggaggtgaaatcagtattcagagagatattcaagttttactgagacaacttatatagaaaatatgaaaaaaaaaacaatttacgacaaatatcgtagaaatactaatttttgacatatataaattcttattcagtaaaacttttcttcataagaattatggaaaatttaataagctttctataggcaccaagattgtgagaatcatataagtatttaaagagatatgacagttttactgagacatatttcattctaaaaaaaataagaaaatgagacctacgaatattctactattgtgattaataaatgagtaaatttagagtttcgtacctcaaatacttcaagctacttggatcaataaacatgagatgatggtgataaaagatgagagtgaagagtgctataaatttggctaaggatgttatggaaagatgatttgaaaacttttatggttaatcttgctcacatgggtggaaagaatagaatgatataattttagggttgaatgaaacttatactatactgagtcctactagctttagttttatgaataataataacaataacaataataataataatattaa

SEQ ID NO: 129597 - DNA, 961 bp, Cannabis sativa
gttgtggagtcacggttcctttccacaattttttcaaagcaatcctgatccactataatgtttctccatgccaactaactcccaatagctatagaatcgtccttgtattctttatgatgtacaaagagtacgcacaaggagagcccactgtcaaggattttagctgtttctacgacattaaaatgtttgtcacagcaataatttttattatttcagcaattgggccagttcttagggctataggattgaaggtgttgtttcaaatatgggctattagaaattaaagtgattttatacattcacgctaccaaggattaggatagactttaatcgacgtggaagtatgttgtgcaattctatatttgtattattttttcatattgtaaattctaacattattaattctagcagcgcggtaagtttgatcaaaactcactagaactaggttggagattgtggatgtactaagtatcttgcctaccaaggattgcgattgcaaaattttgtgcatgacgaccaaattgcgagagcacgacctggcgagggctaactcaagcgagaaccaaaatacaaagagttctctgataaacagagagtgaaagagagtgaagattgagaagcatttagcacaaaacgaaaaaaaaaaacataacagaatgcaattctcgcaacataacagaacaaacaaaaaagaaaacatatataatgtaaatttgaattcatgatatatattttgttagtatatatgtataaaataattaacctatatattaatcgcataagcttataaatatatgtacataatcacatatagcagatttttttttttttaaaaaaaaacaattatttatatatgttcagtcgcagaaaatatataatcatgtaaagtccttttttggcaagttaggtgacaaaataatttttcctttttatggtaagattgctatgcattcattttcga

SEQ ID NO: 129598 - DNA, 786 bp, Cannabis sativa
gttaaaccaagaaatgccgttagatagacacttttaatatataaagatatacgaattgtgcaccttgtatggctaaagcttttgtttcgcattgtttattaccacgcctaattcttatgcatgggagatcataacattaatttaattttgaattgatgtggtagacatttccagtcatctgtcggcttttaaaattccataattatatatataaaaaagcacatgacaaataaattggattatacgtaaactatggagaattatgatgaaaaatatcattgatcagcaaaaaaaaaagataatcaagaatgaatataacatacatacataaaaactcttaattatatatcttttttacttttctgatttaaaagtaacatgtatatattttaaagtcaggatttagactcttatctttatgtactcaccatctttttttatttttactcaatgtggaattttgaattacacactcaacaatccttttcttgaataaatgactatgttggaatataacaattagttaattattctgttatcagttactttgtaatcttgatttaatatgttgtactgaaactaatataaataaaggcacactcaatctatgttttagattgaactttcattttccattcaattcacttccatattttcctctatttcttttttgttctttgctcaaagtctgaactccatatttgagagttcttacatggtatcggagccatgtcaaaccaagaagacaatggcgataatggcaatggtcctggagttcaaatcgat

SEQ ID NO: 129599 - DNA, 1696 bp, Cannabis sativa
  modified_base (76)..(80): a, c, t, g, unknown or other
aacaaaaaatcgtacagaaaccccctattgcaactagcgctgcaatcactttaaaaacccaaaccgtaaatttgannnnnaaaaaaaagttaaaaaaaataatacatagggtaattctcctttcttatattattaatttattaaataaaattatgtgaaaaccgatattattttgcaccatcacaacatgccccttatatgtgcttgacataaattaattaaagcattcgataaactaaagaaggcacactaaataaaaatattttctgagcaagaaaagaaaatatcaaatgatcatttatccaccattcaaacaaaaaaaggtatatataatcaattatcctttaataatcacaattaattttggttacaattagacaaatcaactgaatttttttcacatatagaactagaaaaaataaatgaaagaataatttttttttcatggtatgtacatgaaaaaagaaaaaaaaaaagcacttaagcaagacagaactctgcccttcttaattaacccaattttattaggttaatttatgaggatattaattaattccttcatgatggaaaatgacctaatctataataaattcctttgttcaaaattattttaatattgaacatgtaaacttagttatgcgaaagctgagctcggtgcaggtggtggtggtggtggtggagaatgtacgagtagtttactgctcgtacttccagcaaagtttctctcatcgaaagatgcaggtttagttggattaggcgaaggtggtttattacctcctctctctaaagacgaaatcaataaattatttaaatctcgcttttgattcaaaactcgaccaccttcaattgtaacaatacataataagttaataatggccaaaaccaccatcacttttctcatcaccatcatcaatatagctaaaacaaaaattgtatattaggttgccagagatgtgtacgtagttgaaaaatattatatatgtttatatatagagagagaataataattaatatttgttgatgagtttatattaaggatggaggtaaatgagaggtttttatagtgtttgtttgtgtgcgcgtaataacatattttgtaagactaattggttgtggggtttgtatagtataatatatacttgttcaatattaactttggttgaccgttgactctatttaattatacactcagttcttttgaactggtcatacacgtaccaatggtactataaacccaacactttacaactttatatactcggtttgtaattaatactaacgtatgtatacttaaatcaactacgaaaatttatttttataaatttatgtgtgattaaattaattgagtattagggactacctaaaattttagtcttcaagaaagatttttttattattttatttttgctcaacatcaaaatagtatttttacttattacttaggaccagggacggagggacttaggcctatatgtaggcttaagccctcacttaaatatatacatcaaatttttcatatatacatatattaattcactcactcaatttattaaagcccaatccacaaaagccctcactcaatatcttaattataattcataaacctactctcattctaatcaagtacattttaaaagtagcccaatacaaataataaaaaaaataacacttaattaaaaaataaaataatattatt

SEQ ID NO: 129600 - DNA, 605 bp, Cannabis sativa
attgctgcaacaactgcctcagcttctgcaatgaccgccgggcaaatagaagggagaaaaagcctcccagccgagagggtagttcaagtccaatctctccaaataaatcccagcccaactccctcctttcctgaaatcacagcagcgtcacaattgacacaaaaagtaccttcaggggggggggcaaccagctcccattataaggaaggctaggagtaatcttgcaatctttctccttgacagtagttggattagggtagctattgaacacccactcaattaatcttgctccattcatgacatgcttttggtttccaatgtctatttctattctcccaaatagcccaaagaaccttaattacctcctcaaactctgctctagacagcttattcatgaattccatgagcagctcaaatacggtgcgacctttgctatcccgaatgaggttgtagtgaggcagaagcttccacacctgtttatccttagcacaagtccacaaagcatgagtgagagactccacatacctgccacacatattgcaaattgggtcaatcgtcatgcccctatgaatcaaattaagtttagccggaagccaattattgca

SEQ ID NO: 129601 - DNA, 701 bp, Cannabis sativa
atatacttttaccaaattatatgagaactcttgatcttattcgaaacccattaaaagaattttaaaaacttgagaaattagaggatttaaaatgtgtgtagagatagtactatgtgaaaaaatttactaaataagtgagtaatattgtaatttttggtgtaaaaaattaggtgtgcaaatactatttttatgacaataattataaccataaactttcttttttgtatatttattttaatttaattttggattgatataattttagaccgtggagattttaattgtgaagaatgtttcaacttgtaaagcctagaatggttgtgagtacttacctattccttagtgttataagattttatttagtggaagaaagaaattttttttaactaaatattaaaattacacttaaaacttactttaaaattatttaaccaacatatctataacagaatgactaaaatataaaaataattacattaagagaattattacatatactatttttaaatttttttattctaatttacagggattgttttgatagtttttatatggttgttatgtgaattttaattgcgatttaatttattatattgttgttataggacttctctaatgggatactaaaagggcattttacaaaaatactgcatttggggtaattgttttcaattttactgccacacggcagaattaacatt

SEQ ID NO: 129602 - DNA, 1184 bp, Cannabis sativa
  modified_base (377)..(391): a, c, t, g, unknown or other
aaaatttatcatgttaaatggtctgctaaaaaagccacacattgtctagctcgtgactcttgttattattggtctgaccgtatcttctttggaagcaatgttccttctgctcttcagactattgtaatagcggatataactatttaataaaatatctacttttattaaaaaaaaaagatatatacttattaattttttttataatattttatttattttttaaattttaatcgtctgaatttatagccagttattataaattattttactttcagtcacaataaaatttgtgactaaaagtaagaattaaagttgtgattaattataaattcaatcctatgttgtgtctaaaaagtccgtagctaaaagtattagtnnnnnnnnnnnnnnnttattgtgactaaatgtattttttagtcacaatacttgttgtaactaaagctaaattagtaacaatttgtagctaaatattatgtttagtcacaaataacttttttattgtgattaaaagtgacatttagcacaattttttttattgtgactaaaatattgtcactaaaaaaacttttttggtagtgagtatacaatcatattataataactaataacaatattttaaaataaaataacaaacatatatattttaaatatacttatttattacttgtattttgtatttaatttaaataaatatattttatttataattatattataataaataatcaacatttatacgtaataaattggggtgttcatcaaaccatacacactatacaaattgcccgtaccacatgcaccacactgcataaaaatatggtttgaaatcttttgggttacaattgttgtttgcattttagctaaaccgcgcagtttagtttgatttgcaccatactactacaaaaataatttttgcgtcggtcaacgctacgggtcgacaaccatgaccgatgcaaaaagtaaaggcagaacttttacttcagctatcaactaatgcaaaaaaaggtaatattttgcgtcagtggctacttcgacattaatttgaaaaccgacgccaaaaaattattcttttataaaataaatttatattatgcatcagttattattagacgctaacattgttagcataagccgacgctaacaatgttagcgtctgatagtaaccgaagctaaatcctttaaat

SEQ ID NO: 129603 - DNA, 564 bp, Cannabis sativa
aaaaaaaaaaagaaatctcctcaatcttattaagctaagttttacctttttttttttttgtgaaaagtcattttctttacttggtatcagataaaaattgctcacacagccatatttcactaggaccaatattcactcgaccaacgtaccagcatcaggagcagtgcaaagggaccagtaggtaccttctgatgtcagtaattttaggacaaaaaagactcagaactacgtccaaagtagctctccaccaggcttcaatggagcctcgtagttagagtttcagaatggatttggtagttttacaagcacactattttgtaatacactatttcaacaatttactttgaaattagatcgtaataactatgctttgtgaaaaacaatggtcaccacaatcataagaagccaccgattgaatggtgttcgtttcagcagggattggtactcgtgatagccaaccaacactacaaaaaatttctacattttgtactaaatatgacttttagtcacaacaaaatattactttgtgactaaaacatagtatttagttaaaagttgtcacta

SEQ ID NO: 129604 - DNA, 1047 bp, Cannabis sativa
ttaatctctttgttggtccttgtattatattgcaatagagttataatatcttgattatcttccattgttataaaatctctaatagattcaagaggttgtttgaaatagttgtcttccaaattaaggtattttatgtattttgtaatttgtacttaatatttttaatgaagttacagttttaatttttttttttttaaaaaaaaaagctctgacttatattagttgtatcaatatctattgatggttggttattttttgtaaacaacatcaataattatatgttaattttttttactcctattaaattttaagattaagattctctttatttttaataatttatatttattttatgtctagccaaacacaatttaataaagagaaatactaaagggtattattggtgcttagcacccttctaagtggagtatggttaattaattgcaagatggtacatctagaaagtgcaccactaatacccaataacaatattttttaataaatacaatttcaagagcgggtaaggaaattcttattaagtcggtggctcaatctcttcctagctatgccatgagtgtgtttttacttccttttgagatctctcgtgacattgagcagttgatgacaagtttctggtggcaatcctctaacaaaacaagtaaaggcattcattggatgtcttgggatagattaagtcgttccaagcgtagtggaggtatgagttttcgaaacttgagggatttcaacttagctcttttgggtaaacaaggttggaggctcttaactcggggtaattctcttgctggccgtgtctttaaagcaagatactacccccatgcagtggcggactcagaatttaaagtgaggggggcataaataaattgaaaaagaaaaatataaagtgtagttagtgggatttgaaccattaccctctaacatatgtgcatctacctcaaccattacaccaagcttacttttatgtctataattgtcattttttaatacaaatatatattgtaactaattaaaatacatatacattttttt

SEQ ID NO: 129605 - DNA, 1053 bp, Cannabis sativa
caaatctaaaagtgggataaaaagttgtaacatatcttttatcccactttttatttttgttaaggataaaagtgggataaaaggtctcctttcttgtagtggcatttgactgcagatggtcgtggttcttatttagtctagtctcggttgttctgtttctgtttctttctgtattagtttttagttgcttgttttttcttttggccttgtttctcagtttggttggcagtttcctgccgtttggccttgtgcctgttgttgttgttttggcttctggagccgttaatcaaaaaaaaaaaaaaataaaaaaaaataataccttgatcagatgttaaaggatcaaaaaagtagtggtcaattggaaattatataaagtaccttatatattttattattgagaaaaaaaagagtgtataaactgtattagattcgattgatggaatattaaaggagttgcagagaataatggaagcatatatatatatatatatatgtacgaaatgaatagggcctataggaagaacttaaagtttaggcataatatggtattttttgtagaatatacgtgcgtgtaacttgaatactcgtgggtttcatgatgaactatagaatactcgcatctttatgatattcccttttacatactcgcaattgtttaacccaacataactttttggccttattttttgagctttgactcttaagtcatatgtaattagttatgatatgggttttaatcctatgcacgttagatggacgagatggcatactacaccatcatcatgtacctgtccaatggagttagaagaaagctaatccaagaaaagaccgcaaaaggattgtgaaacaaactagagcatctgtacatggcaccatcaatatcgagcaagattaatcttcttgaaagattatacgggtttagaatgaattcttctctttccttagatgaaaacattgataaatttgatgaaataattgttagattagctaacattgatcacaaggtagatgaagaaagtcaagcaatcacattgctcagatcattaccaatag

SEQ ID NO: 129606 - DNA, 1431 bp, Cannabis sativa
taacaatttcaatagttcgggggtaatttttaacaaccaaaaaaattcaggggcacgattcagtacatgtcaaagttcgggggaaaaattactaattatccatgatattaagaaatttgtcctctctccttaatgcttttatgtctcatgttcgacgagatgctaaccaagctgctcacagcttgactaaacaagttttagtgctggataataattgtatgtggtttgagaaaattccatcaatcatttattctgttgttgtaaatgacgctcttaatttataataacaatctttttctcaagaaaaaaaatatatttcaaatattataaatattatgataaaaaattaaaataaaaaattatgtaaaattttctttgaaaaaaacataatttaaaaaaatatataaaaataaaattaaaataaatattaaaattaacataaaataatataaaagaattttttttaaaaaaaaatatttagtgtaatttttaaaaattatttaaattttttttaataataatgtttaattattattttctagggtataaataaaagtctccaagaaaaataatttatgtttggcgccaaattgaatggattgaaagaaatactctcatgaatttacacatattttataagagcatctttaataagagacaatatctagttgttaaaaagtaacacatcatcctaaaatatatttttttattttatttatcatccatataatatttgatacttttattttttacaaaagttactaatagttaataattctaaaagttgtcaacttatagtcccacatattaaatttaaaatattaaattaatgtagtttcttgataaaaataatttttttttctaaaaaaaaaaaaatgacatggctattgtccctttttagcaacactaagcatctatattctcaaaatttattttgaaaatgaaccacattgtatatgtggtatgctcactataatagttaacctgattttctaaactaatatctctaaaactacacgtatttaaccaatttatttagttttttttcaatgataaaagtgcaattcaatgagttaaaagttttatataattttttagataaatttcaatcacatagcatttatctaataagttttacagaatttacttgtggtattataattagtaatattttatttttataataattattaaattaaattatgcaagaacactaatacttaattataggtacccttttagaattactatttaatttactttaataccttttagcattctctctactattaataccttttaacatttgaggtcgtactggctaatagcaatgctgatttcttaactaatcaaaactacaaacactttgttggttaataaatcactgcaaaagaaatccttggacgcctttgaaactcaacttgattacaa

SEQ ID NO: 129607 - DNA, 930 bp, Cannabis sativa
tgagaagtaaagagagtactataaaaattaagaaaatgcctactgatatctacaggattatcaatatgttcaccactatcaagaacaaagcttcagataaggttatttttgtgccgagaggaggctttagagtgaaaatatttagtgtttttatcaccaactctgagccaactgactctcgaacactgcttccaaaagatctcctctttaaaaagaagagagtcaatctgggactgaagatctttggcttttttattgttcaaatcagaaaaaggttggcaagacaaaacttgatcaaggctacgttgaagcaaattaattctatgcttaaaattatttttattagtaccccatttcttaacagacctaagacaggactcttgcctaagcatgaaagtacgaagaggatctgaagggcaaaaattagacaaggtgtccttccatccatcctccacaacagaaagaaagtctggttcagaaaaccagaagttctcacacataaaatgatgactacgagtatgcttatgatgaggatcactaagtaaaattttaagagcccgatggtcagaaccaaaaaaccctaaatggtggagggaagcaaaagggaaaagattgaaccaagaatcgttagctatgcaccaatcaagcctttcaaaagatttaccatgcttccaaataaacttattaccaatacaaggcataggagaaaggttagatttagaaataaaactctgaaaattatgtatggcatacacaggaggattattagtactagatttatcattaacagtgagataatcatttaagtcaccaagaataagccaaggcatactaggtgcaatatcatacaaacgatgcaaaagagtccaagtatgaggtttttccgaaacataaggagaaccataaaaacaagaaacatgagttgatata

SEQ ID NO: 129608 - DNA, 1135 bp, Cannabis sativa
tcattcaacctactatctatatatagatctactattttaattttttctgaccttttaagaataaagtataattacatatattaaataataattaatagaatgttgctgctttgtttaagtacgtgtgggtcatcgccaacaaagaagacaacctttgggtccgttggattcacaatgtttatctcaaagaggaagattggtggagcttcaaagctccaatcctagggagctggtattggaaacaaattgtcgctgcaaaagatcaactcaaagaactaattgacactcaacaattcacatccaataggtacactatctctctcggttataaattgctctgcccaccacaaactaaagtcgcttggagtaatgaagtgtgggggagatttaacaaccctaaacacagtttcatcacttggctttcagttcaaaaccgattaaaaacaaaagatagattgcataaacttcatatagcagttgatgcaaactgcagcttatgcactcaccatgaagaatcggtcaggcatttgtttttcaattgccagttagctcaggagtgtttgaagcggattaaaagctggctgtcctggggtactctttccaatgacctcgacaagctccttcggtggataaacagtgcaaagattagcaccttcaagaaaagagttcttgcagcggctataacagggttagtgtactcaatatggtatactaaaaatgacaaaatatggaatgataagattgataatgtagatacaattgtaaagaaagttcagcttacagttaaacataaaattgattccctttagccaaaaaaagtgagtcaaaatgatagagagtggtagcaaactttgtaatagcttagaaatatttttgagatctccattttcatgaaatgctcttactttgtaaatattttgtggattaatacatttctgatttataaaaaaataataattaataattaatatattaaaattcataatagttactatatgtttttaaacctgatgcgttttaaagtttctataataaagtgtaattatattaatagttattgatatatattacattaaattgttttcatattatgtaaaatatatgtaatatagattcattgtattaagattggaac

SEQ ID NO: 129609 - DNA, 804 bp, Cannabis sativa
gtttggggtatgactagttgatcatggaatcaaattgcttcacgattattactactatcaataaatgtattattgaccaatcgtatttagaatgcattgttagagatttattgattattgtaataagtttgtttttttatttttttttcgcatttttagattggttaatagtgtgattcaaagtaggtgtgtcaaaaagattcatttagttggagcgggttggagctacgacccgacggatcacctctaattcgaaatattcgaatacttattggatcttggatcagatgtgctacgccccgcctaatttttttctggatcggatctgatccgacccgatttcaatttttttttaaaaaaaaacttaattcaagactcggatcccttgggacctagactcggacccggacccagacccagacccggaccctgacgcaagaccgaacccgaacccagacccgggacccggacctagaccgggaccaggacaagaaacccgggacccgaacccgacctcaggacccggactcggacccgggacctgcacctgaacccagacttagacccaaacccgagacccggaccccagaccaagacccagacccggacccgaactaggacccgggacccagactcggacccaggaacgggacctgaacgcggacccgaacctgggactaggacctagatcgggattcgaacccgagactcggacccagacccgggacccaaacccggacctagacccgaacccgaacccgaacccagacccggacctgcgacccagacccggacccggacccg

SEQ ID NO: 129610 - DNA, 793 bp, Cannabis sativa
tacagggtccattttgttattttaacaaaacaaagggttcaattgataacttttacaaaacacaggttccaaaatggtatttaccctatttttttttaaattattttatagataatttatagttgtcgtaaagttgatttctcgttgttttttaattattttcttcttttttgctgagcaaagtgtatttttgtaattttaaaatatcataagaatatttttataaattaaaactaaaggctgtaaaattgtaaataaaatatagaaaaatggtacttttgaaaattttccaaataataacaaaaaagaaagagaaaaaatgtatttttccagaaaaaaaaaatgaggaaatacaaagttttttctttttttactataaaactcaaagaaaacacaacatttcagatataaatatatttttttacaatatatatatatatatatataaataaataaagccatagttttaccaatcacaactttatataaaagccgtaaaattgataatttccataaataagtcacatctttttcattcatgttagtcttttactaaccaaacccaaaaggagcttattctatttgaattggacttgagcccacttaatgtagttagtctagttctggagtccaagaagaaaggccttggacaattatgtcatttctcaaacatacaaattagttatgtccttttgtattaggggtaagttgaaaaatatcacttttaataatcaattaatcaaatttacctctaattttatatttcattgaaatatacctctttttatatgta

SEQ ID NO: 129611 - DNA, 810 bp, Cannabis sativa
tttgtgttaattttgtccaaatcaatgacttattggtcttctgtcttctatcgaatccggaataaatatttatatgtttgctctttttatagtacaaatttttgtataaggtgtattgagaactaactttctgaatatatagttgttgactaagaaattttgccaactcgctcctatatatagacgagatgaaaattataactaagcaaaatagagagtacacacaagaatttatagtagtcaactctctgtgtcatgacagtaatagaattgcgtctgcttcaagtttttattctcacaagaatgattacaagaaaaataactaagtctaaaagctctaatttggagagagtgaaattagagagagatgctctactttatgggtctttttttaaatgtgaaaaataaattagaggagctctccttttatagggaaggaggttctattaaaataataataaaatattgaaaaaaaatatatttaagctattttgaccattgtttatgatataacggtgaaactgacttcggaggtcggtcatcaattttcagaacttgagtcgcatctgggggacatacttcgagtaagttgtaattgaaattcataactctcttgaagacaaaatttgaacttgataaattcaaaattacaatactttatatatagtgcaagttgaatcacgtcattcaaataaatactaaatgagttatgatcattttattgaagggtgctctgataccaacgcacaggttgacatgtgatattaacctggacgttgggccaaggaaaaatcgtgctgaaaatgtatt

SEQ ID NO: 129612 - DNA, 504 bp, Cannabis sativa
cacaagaaaacgcagcgaatcccaacaaaaacacgatcgaattggtcgaattcacccttcccatgaagggactacgttcccagtttgtttcgtctgctccgtaacaaacgggatactatactttgttgatttcaaagccttagtagtatttcaaggtcttaataataataaaaaattgtcaagataataataaataaattaaatattttttaaaaataaaatatttatacaatatatattataacttaattattcgtattaaagtgtttgttaggatattaaagttcttttttaacggtactatattaataatgtggccatagacataatctaataatttcatactttacaaagaagagatcttatatacgttcgattctcccatctcttaatgtaagagaaaaaaagatactactaatgataaataaaatgtatatttattatacacgtatttttttaaatacaaatgttagcatatgttaaaaaaatatgtataatttctaa

SEQ ID NO: 129613 - DNA, 1255 bp, Cannabis sativa
atgtaaatcgatctcaatgtgtttagatctagcgtgaaagacaggattggcagcaagtgcagtggcactttggttgtctccccaaatgacaggacagtgagctaatggaacttgaagttcagcaaggagagatcgaatccatttaatttctgctgcagcatttgccaaagcacgaaattcactttcagtgctcgaacttactaaatttccaaagcaacaacttgttgctttttggtagaccaacttattaaatttcctcctaagaataccaagtaaccaccagttgatcttcgatcatctatacaactcccccaatatgcatcggagtaagcatgaagggtagtggtagcagctggtttaaaccatattcattccttgatagtaccttttagatacctaagcagcctcttacaggcctcccagtgtagagtagtaggagcttgcaaaaattgacttagtttgttgataataaatgcaacatccggacgagtaagagataggtattgaagtgccccaatggtacttcgatacagagcaatgtcatggaatggttctccctcttttaatgataatttggtattggcactagcaggatttggacatgacttggcaccctccatatgaactttttgtaacaaatcagtgatatacttagtttgactcaagtacatccctgtgttgtccttgtagatctctactctaagaaaataatgaaaatgaccaaggtattttagggaaaaactcttgtttagatcagaaacaagctttgtaattagtttggcatttggtccagtgaccaagatgtcatcaacatagactaagaaaatcaccaaattatttcctgaaccatatacaaatagagagctgtctgaccgtgatctaaggaaaccctagttgagtagagtttgtcttaacatgttattccaagcacggggtgcttgtttgagaccatatagagctttgtgcaattcgcacacatgtgttggatagttcttgtcttcgaaaccaggcagttgtttcatgtaaataacttcagttaatggaccattgagaaaagcatttgcaacatcgagttgagatacctgccagttgtttgaaacagctaaagacagaacagtacgaacagttgtgggcttcactacagggctgaatgtctcctcaaaatagatgcctgcctcttgaagatatcccttagctaccaatcgagatttgtatctatcaagtgacccatctttgttcattttgacacgatgaa

SEQ ID NO: 129614 - DNA, 797 bp, Cannabis sativa
taaagatgctttattttattatgtttcctttgtataaaatatatacttttaatttatatttatttcttttctctttctttaaacattctaaaaagttacatacataaaaaaaaaaaaaattaaaaagacaaatttttacactaaaattacaaaataatttttttattacatatatactcacacacgcgtgtagttacttttttacactttaagttttattatttacaatattaccacttacacacacaatattactctttacatgcagcctaagtgtcttcacacgtcaggtgattgacccttattgatctaagtttttcctctctttttttcttttctttttcattttcatttcagttttgtttctgtttttttttttttttgtaaaaataattctctataactgatcttcttccttacacacgattaaaatctatttttccctacccaattttctgctttttttttttcaatttccataaccatttgtactctattttttggtgtgaactgttgggattaaattcacttaacctgtcaagccagtatacccatctatttgctcatcagatgaatctggagaaaactggtgttatttataacagttggctttaataccaacttaaaggggaccccactaacaactataaataggttttcctctattctcaaaaggagggttctgagttctaatcttaaaagctcatactttagattcagttgagagagagagagagagagtccaagatcatagtgagtgagtgtggagggatgtaaaagggagtatcactcttgaa

SEQ ID NO: 129615 - DNA, 876 bp, Cannabis sativa
atcaaaacaataacaaaaaatcaaaataaattaacaagagtacaacataaaaatactatattttctatgaataaaatcaaaaaaatcgtaaaaatatttaaaattctgttaaatcatatattagtaatttttttaaatatttttgtgtatttgtaaaataattggttattttaattcaactccaccaatcacacatacaaattatccaattaaaaataaaatttttactattcatccaataattccaagagctaccgtctaaactaatattagatatttttctaacttgtagctagaatttttatttcataaaataacgatgattttgcaaacaagaaaatgataatacaaaacttacaaatatttttgttattaaaattaatttgagatatgacttaaaaaaaaaaatgggtgatatcatatttgaatcgcctcctctctctctcgcttgttttattggctgtccaccatctctcccattcaagaattcatgcacacacaatctaaattgaagagtttttcggcaagcctgaggtaatagtatagacaataaacttaaggacaagatattaccaaaggagaagattattgtattgatcttcttgattgatgccaaagtttttctcattcccacatcaacgtctttttctgtgaggggttcaagagcagtcgtctaagagtggttcggttcggctcaacgacgtcctccgttttagatttttgttttcatttattaatttactattattagtttaattctaattaatttttttatgaggttagaattaaaaagagttcattccttaattaattttagagtattttgcggcataaatacctaagttttactccgagtagcagataagtccctaagtc

SEQ ID NO: 129616 - DNA, 1767 bp, Cannabis sativa
  modified_base (716)..(716): a, c, t, g, unknown or other
caataactaatggtgaccaataactaaaatgccgctgggtatgattcagatgaggagccagagccttactctcccagaatattttcattaacatatctgcaagggtttaagatgctgaccacaaccaagtacgataggagtacggatcctagagtacacataagtgatttcgacacacttatgcctgcccaccaagtagttaataacttgagatgtgtgttatttcctgtaacacttactggagtagccaagacttggttcaagaaatttaagaggcactccattacctcatgggacaaactctcacgcgacttgaagaaggaattacgcggctcaaaggctagaaaattaaaatgttcatgccttaccaatgtgaagcaacaaccgggtgagagcttgaaagcttatatcaaccattttaatgtcgaggctgccaaggccaaagacgttgatgataatagaagacttatggcgctgggggtaggaattactaatgggtcacaattttgggatagtttgcaaggaaagggagcacgcactatagatgagttcatgaaaagagcacaaacatacattaatagggaagaggcaaggttggccaataacctccctcttgtatctggagcaatagaagctactcccacttcaacaaacaataatccctccaatgcgaacacttccaataagaggaaaaatgtaacaccctactagtttangcgtgttatcgtgattttaacttaattgtgtaactagttgctaatcaacgagtttattaaaatttatgaataattaaaactttattttattacttataaataccaaaataataacatatacatatatataactgggattccgtttacaaaatatttacaaatgtttcatagtgcacaatacaaaagttttcgtctagcgactagacaaaatacaaccagttgtcccaaagatcgtacgcaccaagtctaactgccccgacatgtacaattcactgtgtaagttatctttgtcggcaaaaagtgtgttgattttgtgaaactatctactataaccaagaccaaatcatacattctcgtggttgtaggtaaaccaaccacgatgtccattgtaaaatcttcccactttcactcaaaagtgttaatggctattgtaactctttcagtttctaatgctcggctttaatttattaacaagtcaagcacttggacacatagtcaaccagatctttctttattttgcaccaccagtagtagggtttcaaatcttagtacattttagtggtacccgggtgcaataaataaggtgcaatatgaacttcatccaatacttctttcctgagctcatcactactctaacacaaacccaagttttaaaaagtaacattccattgttagagattgagaagtccttatcctgaccagctaatacctcttctcgaatcttgattaactcagaatcttccaactatgcacctctaattctttcgaataagtttgactgaagcattaggttataaagtttacaaactataaattgaatacaagccttaaccatccttgctaatagttgaggatagatcattatggtacgaaaaatctatcagggaccttttttgctcaaagcgtctaccacaacattagctttctcggggtgatacaaaatctcacagtcataatctttgactaactccaatcaccgtctttttctcatgtttaaaaccttctaagtaaagaagtacttgaaactcttgtggtcagtatagatctcaca

SEQ ID NO: 129617 - DNA, 574 bp, Cannabis sativa
gataaggatgatttgattctgttggatcgcaagaagaagaataaggctggtgactccacatcttcaaagaaacttaaggtagccaagactccttctcagagtggtaaagattcaggaatcccttttgaagctcacaggcatcccatctattctgctaactcctgtccatccagatgaggctcatcaatagctcatgattgttaaataaaactatgttggtgatgaacaaaccaaagggaatgccgaggtggaggctctacgaaaacggttgattgagaaccaggctggtccactccgaggggagtactgtggccaggttcgggaccttaatatgaactcgatgattggctggttcttgggatcttccctagctgcgttggcttttgagatggtgggtcatttgattttttaatttttccataaataggacttattatttattctgtcaataaataataattaattaatttggattaatctcttattttacgagaattaaaataaatattatttttctaaaataacaattaatatatttctctctttaatattatttaagaataatattatattt

SEQ ID NO: 129618 - DNA, 669 bp, Cannabis sativa
tcaaaattccaatttgtaatttttctaaaatgaataaaagagagataactctactttattgagcaaggaattaaatttaaaaagttaatatctcactaaaaacaaaacaaggtaaattactaatttatctcttgctttaccaacaaataaacttatcacctaaaggtattttggtcaaatttaaaaatcccgaataatctcgacattcacaatgtgtatctaactcactctgctatttctaaaattactaaatcataagaaaacgtgactctactatctaaatattgcgttctactcttaccagacataaaatatgaaaaacgtgaaatttcacgtataatataattagcacacctagaatttaaatatatctccacatttagataaataataattaaaaatctaaattttaaattaaactccaattatctactcattctcatttaaaagctaagctgtcattacatataataagaagcttattaatggtgaaaacccatttcgagtccaagattttttgatgtttttttggtgccaaaaatggggaagtaaagttcatggatagattggaatcgatgagggaggaaaacccaaaaaatgcaaaagaaaatagtggccggtggtgtctattccaatcatcactactacaatcttggcctttagaggctg

SEQ ID NO: 129619 - DNA, 639 bp, Cannabis sativa
aaaacaaaaaaatcaattttaaaaacaaacatgatttgtagctatattaaaaagtaaacaatttgattttttagttgttagaggacggataatagaatagaagaatgtagatgagttttagtttttcttttccttttaaaattatattgcatctaattttaatcatataaaatatatatttttaatttgttttaatttttttattttttttattatatttttaaaaaatatacttataaaataaaatatattttaaatattaagacaaactaactattaatattaatataaaataatgtaaaaaaaaaataaaaaaaaatattaaaagtaaattttaaaaattaatttaaattaattattgtttaatattaaggtgaaccttgcaaataaattccataataatatgtgcagattaaaattattttactctctctaaggtatttattgttttaagaaaagtaacaactttcaaaaatatgatagattgtgtatcttatactaaacaaatacactaatacacaatatattattttctttttaacaacagaaaaaattttcaatatatttactaatcatatgtataaactcaacaaaaaaaaaaacatgtatatatgcataaaataaaggctaattaggatt

SEQ ID NO: 129620 - DNA, 778 bp, Cannabis sativa
attataagatccatgaggatgatgcggttccatcttacaatcaattgatgatgagaggagtagctcatggatcttatatattttattatctttccacacataagcaatgtgagactctctaatattcccttaagatgttagttattttttactcaccatcttggacagttcgatcacaagcgactcttttatggctcactatctcccgaatcacaagtggctcttttttgactttggttctactttttagatcgattttttagatttattttgtggctctttttttggttccacttttgtttcaatcgactttttttattttttttttagatcggatagtcgttagaagttttttatttttgcttaaatatcatgttaaaaatttaagatataaagggttccatcttaaaatcaattagtaatgagagaagtagctcatggatcttatatatattctattattatttgttgatttgccattttttttttgtattttatgtcgtattcatgatcgtgttgattgatggactatcgttttatttattttatgttatattcccgattgtgtcatttgttggattgtcgttcatagaattatgttattttttgttttgtgtcttcttattttatatgattgtgttgtttattaactttttgtcgtttattgatttttacttatttattttaggagaattatcctatatactgtttttttaacttttttttttcttttacggtttgagtttctaaagtggttgcagcactagttgctataggg

SEQ ID NO: 129621 - DNA, 532 bp, Cannabis sativa
tatcgcatgctttaaggtttgaaacttttttatgaaacattgtgtttacacacctaaataaagtgaagtttgttgtatattcttctggaatgcagttgtaggaagttcaacaagttctagatttctcatgggctattctaagagtgaaaagtaatttaagtattcgggggttccaatctattcaaaagggctatctggaactgattctgaggttctagagaataaaatgagtaagtaaattagaacatggagcacatgcaatctgtcttttgcaagaagagctactctagtcaatttatttttggtaactatacatacctataaggcccaaatcacgatactcccaaagaagacattgcaagaatataatttagtgtgtacatcttttttatggaagggggcagcaaagtattgtggaccaggtaaagtggaatgcagtgaagtttgtttgccaaaatccgcacgggaccatcttcgtcccactctctctctctctctcttcttccttaatatttcgaaacacttagtgatt

SEQ ID NO: 129622 - DNA, 956 bp, Cannabis sativa
ttataatcttatgattaactataaaatggtcaaaatcagtactggagtaactgagtctacaaccattgtaccgccatactcatttcatttagctattttttcttctgagaccggacaatggagttattcaacttttaactgctcaattagctctttcgaaaagatgttgaattatccaaaaagtatggccataagcaatgataccaactaattgaattttcaaaagtaataggctacttacattcattgcaacctaagatacacattgggttagttcgagggaggttgcgcgtgtcgcagttcttttggaataaaagaatgaagacatatgttttgaaggcttgggaattggtttatgagggtgaagaagtgtatagttggaatttggtgcattatcacaataagttgtacgagtttgtcgcacaagattactttgctcgcttttcatccagatgatggagatgtgtttttcttttcacgctccaacaatgataataatgttgaagaagatgttgaattttttcaatgccgaatggttggtaaaaatataatcaaatcgaaactcttcttcatcttccacgtagagtacttggaagaagaactaatgttgtttctctattacatccttggtgacctactcgaattcctaatggcaatacaacttcctagtataaatatttcaggacctcatgattattgaagaataataatcttttaatgtgcttttacaatgtctttttatttctggtttgtttgtttgtttagagtaaggttgagagagagagaacattgtttgttttcaagaatctttatgtgaaacaattttcaatttttgcatattttacttcaataaactcatctgttgtaatgattcatgtctctagttcatggattatactattttttttttttgacaaagtgattaaaatcactcatgaatttacgacgcccacgtc

SEQ ID NO: 129623 - DNA, 552 bp, Cannabis sativa
ctgcgctctttctttttgtgtgcttaatacacagccttctatctaaaaataataataataaaaaaattaagagaaatactaaaaggcaccagcggtgccaagcactttcctacgtgtcaatattgtcctatatagtttaatataatagtttttagggagtatcgctaatcaatcgcaaggcaatacgtcttaagggtgttaggcaccactcatgctcaatagcaatgctctaaaattaatgagagctctaataaaataatgcttaggctaataaaacaaatacacacagcctacttcttttttctctatctggaaaataaaaaaaaaaaacaataataaaataatgggtagggctaatgaaatttcaaaagactctcaatatatcatgagaaactctaaaccattgcacaattataagataatcaccgcatagtgttaaatttggtacactaaatattaaatttactaaaatttttaatatttattagagtaaatactattttagatcttgtgttttgcaaaagttatagattggactctctgttttgttaa

SEQ ID NO: 129624 - DNA, 763 bp, Cannabis sativa
catcaggacagctggcccagtcagcatcggagtaggcctgaagacagagttgaagacagggcctgatgtgtaaaccttcatggatagtgccttctagatacctgaagagcctcttacgggcctcccaatgaatggttgttggagcatggataaactgattgagtttgttcacaatgaacgcaatgtcgggtctagttaaagtaagatattgtagtgctctgagtgtacttctgtagagtgtatgatatgaaaatggttcaccttgagataatgacaatgtatgcgtggaattggtttagctccttccatgtgaattttaaccagaagatctaatatatattttgattgggataggtaaatgcctgtggagtcccttataacctcgactccaagaaaatagtgaagtgaaccgaggtccttcaatgagaattctctgtgtagatcagtagttaagtgagacattaaccctttctttggacctgtgaccaaaatgtcatctacatacacaagtaaaataaccaaatttgcaccagcaccatagacaaaaagtgatgcatcagaccttgaagtagtgaatcccttctttattaaagtggtttttagcttgtcattccaagcacggggtgcttgctttagaccatagatagctttatgtagcttgcatacatatgtaggtctgttggggtcttcaaacccaggtggttgaggcatatacactgtttcttgtaagttggcatggagaaaggcatttgacacatcaagt

SEQ ID NO: 129625 - DNA, 961 bp, Cannabis sativa
  modified_base (207)..(217): a, c, t, g, unknown or other
  modified_base (898)..(936): a, c, t, g, unknown or other
aatttattaaaagaatatttggaagtaactgatactacatatttctatctagacccaatgatcaagaatttaggccttatatgggcctatttaaaacaataatagagtctgtactgacaaaattagagaaaaattacagttttacaaacattgggtatatgccgctaaaaataaacattggttttatgccgcttacaaacataaaannnnnnnnnnntatgccgctatttaccctaaattaaatggattcgcatacaataacagagaatataagagggaatttcctctaaccaaacatagtcttcatcaagctctaaaacatggttagctaaatcatgaccggctttattaatatttctccgaacataaaagacaacaactctagaaaaaatgaataagaaactaataacatctataataatatctatgaatgaggatagagcagatttagggtcattcacttgtggcaactcgaagagtatatatttctacatccaaaataggttgagaagcccaaagtaaactatgaaatagagatatagtctacatttcatgagatttgaagtatcctgtagtggctttgaaagtgcatcaaggacttggcgtgatgtatctcggataatcagtattataagcagatattactaattatccgagatacatcacgccaaagtccttaagcagatagcagtaatatcttatgaggcatagtggtcttgaacatcacaaatggaaactagcgcgtcaaaggttatgttgatttaggattgtgatttgagttacaatttaggttgtaacttgaatttttatttggaaaatcatttgtagtgagaccagggggagtggacttgaatgtcgtggatggagactatgttggaatattttaccaagatctagnnnnnnnnnnnnnnnnnnnnnnnnnnnnnnnnnnnnnnnaatatctctaaaataatgaaattaa

SEQ ID NO: 129626 - DNA, 1023 bp, Cannabis sativa
  modified_base (278)..(280): a, c, t, g, unknown or other
  modified_base (912)..(922): a, c, t, g, unknown or other
atgtatatgtaagtatgtatatttctatatctaaaaagtaatgattatttaaaagaagagtaatttacggcaaaaccccctcaattatcaatttacttgcaaaaaaccatccaatctcatattttagttggaaaaccctccaaagtattgttccgtttacatttttaaggtgtcgtctgtccagtctcgttaagtcctaattttgcccacgtggcaatgacaggtcactaaaaaattattctatggcaatatttcacaaaataaaaataaaaataaannnaaaaaatttaagagtaatttgtggcaaaactcccccaactatcaatttacttgcaaaaaatcatccaaccttaaagtttttgtgatgattttttgcgagtaaattgatagttgggggagttttgccgcaaattactcttaaggtttttattttattttatttttgtaaaatatggccacatagaataattttttagtgacctgtcattgccacgtgggcaaaattaggacttaacgaggctggacagatgacaccttaaaaatgtaaacggaacagtactttggagggttttcccaccaaaatatgagattgtatggttttttgcaagtaaattgatagttggagggatttttccgcaaattactctattatttatgtttattgaaacttttataaaacttttttttttctatttttctttctttgtcttttttttctccaataacgtgagttggcctatttatttcttctttagtccataacgtgatcacattgatcacttttttttattgagtcggccatgttaacctttttttttcttttttcattttttttcctcttctctaattctttctttttctatcttttttattctcatactaaatctttggtgcactcttaatgggtattannnnnnnnnnngtaaaattaaaaaaatttaagtttttatgcttactttttctatctaattaaaagaatctctcatttttatatcatataggctgagattgttccatcggtaa

SEQ ID NO: 129627 - DNA, 2280 bp, Cannabis sativa
  modified_base (42)..(43): a, c, t, g, unknown or other
  modified_base (1640)..(1664): a, c, t, g, unknown or other
  modified_base (2186)..(2186): a, c, t, g, unknown or other
acatctttagtgtaactagaagttttctttgtgtttagaagnntatgtcttaaaattttatgggtaggattcgatcaatgggatatttttggaaaaaatttaaggaaatgtttcaaggtattgctatattacactataaccgacagtttaaaaccatcatactaaaaaaaaaactagatcgcctaatcaacccactcccctctcagcgttaccatttagcttgctcaatacaaggatcaagatcatattccatgttgacatgcaatacaataacaagattattataaagattgaagttggcaaatttacaccaaaactacaaatgggtaagaagtaaaagactaaagaatgaaccttgaaagcacgaacaatgggttcgggcatacactcacattctccaccaaaattttgcaacgatctttgagtttaaggaccccacaactgtaaaaattgacacagagataagagagagaaaagaggagtgagatcgaaagagaccaggatggagggagagaaggtggagagattgagagatagagattgagattgagaaagactgaaatggagggagagaaggtggggagattaagggagaggagtgagatcaacagagagagagagagagagagaggagtgagagagagagagaggataggaacaagatatagagagcgaggtatcaaactttgaaatgagaccctagtgcacaaagattggggttttatattaataggggaatcctcgacgatttaaaactgttaagatgccctttaaaacctttgtttttaagcttgcaactcttttaaactgtcaagaaaagtacacgaatgtttaaaattttcagggatagtccactatagccgacaattttaaacactctcataattttattagcgatggtccaaaaaaaattattttgaggaccaacaggaatagtagtttctgtagtagtgatgtgatacttaattgttccaataatgatataatactttaggtgctagatataactggtatcttttagtattttctaacctaatacgtatagcaatgctgatgtaatttaatgtaatcataaatagttaaggtttgaaggtataccattagagcacttacaataacttatctaaaatagagaagctttaaaaaatttaaagaatcgtactaaaaacacgttatattattagatgctttaaactctttcttcattttaaattttctttaaaatacactattcatgctctatatttataaaatactattcattgctaaacatattttattaattgttttgggttttaataattatttttgtatgaagatatgtgtatatattaatattatatatttgaaatgaatacaatatataatttttttcttaaaaagtaagattttaatgatatattttaaagaacttaatgtatggtgtaatgtaaaagtgtactgtaaaataaagaaaattttagtgatgtatattaaaagatggaatagacaagctgttgaaaatgctcttgactattaatttgttattaattggtggttgagatgcttcactaattaattattaattactttaggatcatgtttgaacaataatattaagcacagtcaactcattaaaactttattattattattattannnnnnnnnnnnnnnnnnnnnnnnntattattattattattattggtcactaattatcactataattaatgattgtttttaatatttttaaaagacttttcaaaagccttattcattcatactactaagtacgtggaaattgcatattcacactactataagcatgagaacagtggcagattcatgatttaaagtgaggggagtataaatttttatttgtaaggcaaagtaaacttaaaaaaaaaaaaaagacaatgctctttataaattgaactactgacatttatcctatatgtaatttagtttaaccattacagtaaaatcaatattatgtttgtaaatatatttttttttatataaatatatgtagtaactaactaaactgtaacaccctaataagcataggcgtgttgacgtgattttaaacgtactgtgcagctcgttgctaatcatcgaggttaatgaaaatcgtggttaattaaaattttgttatttaattaaaacttctatatatttcatacgaaatatttcgggatcccgattacanaacactttacaaaagtttactagttctttacaaaatatttatcgtctagcgactaactacaaaagtgctgttgtctcgaggatcgtacgctcca

SEQ ID NO: 129628 - DNA, 648 bp, Cannabis sativa
gatggaccgaaaagttccaaggaacttataaaatcatagagtgagttcgagttgtattctcacttcatttaagtacacagaaaagctattctaatttaaagcgtggggatattaaattttaaatgggacactcagtattcttttgagtatcacctatgaaaggggtgcctagatttggaaagaatacaagattaagccctagatacattggtcatttttttatattagagcagataggccaggtggcctatcgattagctttaccacccgtgtcatccagggtgcataatttcttccacatttctatgttgagaaagtaggtgtcagatctgactcgtattttaggttacgaaaatattgaactccagaaaacttattttatgttaaaaagacttgggaattagagtcacaaatgtaggaattgtatccccaagttattcaggtaaatttcgaggacaaaatttttataaggagggatggttgtaataccccaataagcctaatggtaagtaattaaggtttataatggtattatgggttaatcaagtaataagtgggattatggtcctactggtctattttaacataaattttaaattctctataattgagtaaataagtgtaatttataaattacagagattttat

SEQ ID NO: 129629 - DNA, 705 bp, Cannabis sativa
ttgatataatatatatatatattatttttgtgagtcactagtcacgcatttcatacaatgcgtgatcacatccaaagcctatatatacatttatatatattatagtcgggtagggtcaggccaccattagctcaccttggcccgcagctccgagtcaccttggccatagtggccattggcagccacgagaaggatgcacatatgcagagcagtaggtggtcgaacccaaacttgataatggttgtatgtgtatgagaaaaaaacggatatcaaacttccatgcatgctacattccaagtgatgtagcatggaccccgaaggtcctaaggcacgtggaacagtggtggtcagaccaccacagtctctcacaggccaatagaaggtcaacatcgggtctcgagtttgaaacccgtgaaggacttgtgccttcttctagtttcggctcattctaggtggagggcacaaaactcaaggccaccactggtggtggtcaacatctttaagcatggtcatagtctaatagactcgagcgccatgcaatggtggtggtggtgtgcatggcctgatttcaaaataaaactgagctaacatattgtgagcattacatctcttaaaaaatttacataaaaattaattttaaaaatttaataaatgacaatattatttaataattatttatacttattaaatagttgaaattgacat

SEQ ID NO: 129630 - DNA, 785 bp, Cannabis sativa
ataacaacatttaaaagggagaaagatatagatatagaggcatagagagtacttagggttacaaacaaacgccaaaattgcaatattgtaattaaatttgagcttatcaatttttttttttatttttttttttgaaaaattgagcttatcaattaattgatggcaaattaagaatagtatacataattgcaattaagttatcagaaatagaaaaaaggcaataataaaatatgatgataggtattagactttataattaattagtgctaaaaaagaaagctatagcttcctaatccttttaattagggcggccattggtggagttagatggtgatacatagaaagtgatttcaaaaaataatgtaacacttacacacctaactattatatattttacttacctttattattattactattaattaaaacagtatacgtactatagctctaatggcaaatcgtcccaactaattgtaaaacctatttaaattaatgtctaaatccaacaataatatattgaaaaaaaaaacaaatacatgtatttttttttttttaagaaatcatgtaattttattaatagcaatcagctgaaataatattctgtaatctaatagggacatctccttcgttggaaatacaatcaggattaaaattagaaaaaacgaattaactaattggccacctagcttctaaatcgtttgacaaaaaaattaaaataaagtcagataaaaaaagattataacatcacagttaactttaaaaacactaattatatttagtttctt

SEQ ID NO: 129631 - DNA, 555 bp, Cannabis sativa
  modified_base (44)..(51): a, c, t, g, unknown or other
ttcatatttagggtgttaataaatatacttgtgagtagatctannnnnnnngtaaaataatttccaacagaaggtccccaccccttcggggtcttacatgtttaaagactgacccgactcttagccttcctcctacattttgattatcagcccttccatcgaccgggggtagtactcggccatctctacccctgaagggtagattctcacattaatattgcctattaggggcatacggccctttggcttggtaaaccctcagctcgggatttggttggtcgttggcctattttttagctttgtcatcgccatggaccattagggtagttaggacaataatcactattcacctcagggtcttcccttccaactgtgggcctactgtttctcaggcggctgagagaaaagagatataaccctaatgttaaatgaaaccctacaacctaaaatattttatttatatgtgaacataatggctaacaatattttatttatttatttatttattttgacgtggtgaacagagtcacacatgattaacaatgcagcaaacca

SEQ ID NO: 129632 - DNA, 609 bp, Cannabis sativa
aaaaagaaaaaaaaaaaaacctcaagtagatcgtatagatccaaatacagatctgtttagtaccaactacccaggccgcccacacccatggtgttagacaaggagaaaactaagagtaaataaactaatgttctttgtaatgaattaattgatcaaatgatacactgattataacttagcttatatactgagctaagagagaaagagttagttacctgatatgaaagttagttacaatcgagatacaaacaactaactaactaacagatttaagaacagctaactctattctagaacctattctctaacagccccctcaaactcagtgaggttgatgaaaatacacttagtttgtctctaagtatggaaaatttggagcttgagactgcctttgtgagtaaatcagcaagttgatcaatggttggtacattttgtaccgccaactatgatcgaagcactttgtccctaacatagtatagatctatttctctgtgtttggttttggcatggtgttaggttatttttagtattaattttagattaattttagtataattttaatttagttttaatcgtgtttggagcattttaacgcttgttatcttttat

SEQ ID NO: 129633 - DNA, 1143 bp, Cannabis sativa
atcataagcggctctttttttggctcactatccctgatcacaagtggctctttttgctctacttttcggatcggtatttttggatttttggtggctcttttttggcttactttccccgaatcacaagtggctttttttgacttttggctcttggatcaatttttttggattttttggtggctcttttttttcggctctacttcgatcggtttattttttttttgggttgaatagtcgctagagatttttttttgtttgtttttgttctgatagcatgttagaatttgaggaataagatgaatgaggttccatcccaaagccaaacacatctactgatgactttcattgcatgagaagctcttagataataaataataacgaaagataaaatgaaaatctttcaatcgatggattttccttgatagtagctagattcatatataattttttatagttgatgaagtaattaataataatttcactcggccatgatgtgtatcacaaaaataatacatatctaattacactactataaaattgagagacggtttttaagggctttcaacattagttatgaaaaaatttgctaccgacattatttcaggtgattatgtaagaagtagatagcaacggtagggagtaaaaaacaagcaacacataagaatcttatagtgtcagttattatgaaataaccgacgacatagggagggaccttatagcgtcggttatcataaaataaccgacaccataggaccttatgtcgtcggttattatacaataaatgatgccatacgaccctcaggagtcggttattatgaaataatactctataaggatttcttatgattttttttttcaagtttacaattttgtgttttaacaaaatttttgttttaatttttattaaaaatattttttatatatattatttcattattaatataattaaattaagtataaattatatataataaacataaataaaattaaacagaaaagttaaataaatatatatttacattacttaacgtgtttatatattagctattactttattaatattttatactttatattatgtgtttgtattttgtagtacattattgtatatatttaaattatgtgtttgtattttgtattttg

SEQ ID NO: 129634 - DNA, 716 bp, Cannabis sativa
tgggatctatcttttaataaaaattattagatgaaaagttgtgtgttctttttgtttgtaatttatatacatgtattattattgagtatacttttaacgagtattactcattcgaatggatactgttaaatttttttaattttttatgtttaatttttttatttaattagaaacgggttaattttataaatataggaaaaatagagttagtttagataaatataataagaaaacttaataggaacaattatgatatttaaaataaaaacttaacatatatgagattgaattaccataaaagatattaaaagtcccttcatattttttttaaaaagataaaataaatgaaactacagtgaccgctggagttttccggcaccggagtttgctgtcggcgccataaaagtcaccggaattgctgctaggacgaaaaagctgttgaaaaagtcatcataattggcattatcggcggaaaaatcaccaaaaaaatcagtttctttgtactttttcaaataatttttcttacgacaatgctaattttgaagaattttcggagtttgctgtcggtatcgaagaagtcaccggagtagctgccagtttcggaaaagttatgggagttgctgccaacgccagaaaagttgtcagaattggcattgtcgtcggaaaaattatcggaaaaattactaaaaaattggtttctttttcttggtaatttt

SEQ ID NO: 129635 - DNA, 1175 bp, Cannabis sativa
tattttgaagcatacagtagttaataagaataaattcaacatttcttgtttgcagatcccaaacaacaattattttactggaaaacaacttataaacaattgtttacatattaaaactttggtgcatctaattatatgcattaatgttttttttgatgcaatctgttgttgattttttattcagattgaccaaatttccttatcatttcaattttttcctgttttcttcaatttatagcacattctcaattatgtagaataaaagataggaagaggttcatgaagaaattgtattacctttaattctttctcttattcgattatgggtgagttttaatgatttcccgatgtccttatcttcgattcctctcctctgaacgcggtgagtttttgattgtaggttgtttttgtattttttgtacaaaaatggaggctaattacccctttttttttttcttttgtatttgaattttttgggttttgattggtttttcgttgagatctacatcttgttcagatatgatttcccttgtttttgaaagaaaatggtggagatttagttgtttggggtttctcggctgggtcacgaagaaggaggtctatcctccgttttttatgggttggcctgtatttttgtaagtagaaactgttattttctatttatgtttattttccctttttaggttataaatgtaaattgtttccctttttagtttattacagaaaaaatcccacaataaaaagaaataatatatgtaatttaaaataaaagtaaaaaagcaaaatattaattttaaaataaataaatattctacttattaatttttttttattacacattaaattaaaaaaaaaattaataatcaactttataactatatatccaataattttaatatgtaataattaaaaaattatatgaaaaatttagaaaatatatattggtcgaatatgaagtgagtagtatcatctttgactttgtccagaccctgccctcggcataggcgggctaggcctgtgcctaggacccatcattccaagggccaaataaatatcataatttttaaaattacataatgttataggcataaatctaccctccccgcgagaaagacttgtctatagagaactcgttgtattgaaggtgactcgcaatattatagtactcacagtac

SEQ ID NO: 129636 - DNA, 1354 bp, Cannabis sativa
aataataatttaatattaaaaagtaatcaattcaaaataaccgattcaatctgcacttatgcgaattggattgaatttaatttgagctattatgcggattggatatactgtgagcaaaatagtacaaattggattggatgaacacccctagcaactagttgtaatagttctttgatgcaatacaatatacaaacttatttaccaaaaaaataaaaaaaaaataatcaaagtatgaacaaagcttttggcaactatgaacaaagctttcaatgaattctgctatgtttcgaaccttaaagccaatataatttttttttttaaacaaatcaaacatttactttggaggtgtcacaactgagaaagctaatttgcttaaggagagtgattatggggaaagtaaatttccataccttggtattcctataagacctacaaaatagaaagttgagaattgtgggacaatcatctgaaagatcaaacccttgcttcatagttcatacttgggctagtaaacatttatcttttgttagtcagactcaacttattcattcaattcttcttgagttgaggaactactagatgagtgtctttattttgcctcaaatttttacaaaggaagttgacaagctttgctgatagtttttatggggtcataatgaaactcgcagctagatgcatcttgtttcttgggaataaaagtttgccttccaaaggtgtatgataaaattagttttagagatagctctaagtggaatagatccattttggcaaaattcatctcggctattttagaaaaacaagatcttctttgggtgaagtaagtccataacttgtatttaaaagagcaggatttttgagattaccagctaaagtctaattcgagctggtgttgacgcaagctctgcaatattcgaaagagttttaacagggagatattgtagccgttggttacaagtgaaaattctaggccaagaaggtgtacaattcgtcaagataaggtggtcttagcttgcccaaacctagatttattttggggcaagcaactcgttcttatcttctaagttgagactatcttatcaaatgcaatctaaaaattgactcatagggctatactgtttgtgatgggcacgatgagagccaccatcacctctactttgattgccctttatcaaaaagggtggttcgacatcttttaggttgggttttgatgcttggccaatggagtactcgaattggctagtgtgtatagggaacaagaagacaggtctattagctgatatataagtggcgtttggtaatacttttttaatcagttttctgtttttaaaagtagaaaagtgaaaatatttttcaa

SEQ ID NO: 129637 - DNA, 708 bp, Cannabis sativa
taacattaagatgaaattgattttgttacccaatcactgccaccatcagctctttatcagctacaatgttcacacccttattaatattctgttgacctgtagccatatcctgatagataaaattagtaacaacattactcccatatcaaatcacacactgattatccccctaatttcctgcatttgacataattgccttgctggacgattgaggctgctgcatcaccgtcgcatcagaaaaaacatcatccttcagactacgatcacggagacattgagaactgatctgatagctctttcttcttggttgggcacgcaagaaagaaccataaggcttaattatctgatcaattagtgtagtgaaaagcttcggacagaacctttcggtgtgaccaatgatccagcagataaaacaaaatgtagtcacatattcatacttgaaatttgaccagaaccaatcactccctgttcttcgtagcttcatctgtcgtttcagtggtgaagtaatgtcaatggtaactcttacccttaggtattctcgccatataccctgaaagttcttcggatccatttccacaaatgcacctatatagttcgcaagatcacgtaggacttggtctgatttaaaactggtttgaagatcatgcacttggtgttgggttttgtgccctaaataaaacccatttaaatataatcagatttacttat

SEQ ID NO: 129638 - DNA, 582 bp, Cannabis sativa
tggatccaaactgtatgtttatgtgtggaatatgagtcttgtattctgtgaccaggatccacttggactattctatgaactctttatcactaccagaaaagagcttttttcttcagtttttaagtatcatataaagattttgctttagttggtgtaactatcgctataaccgtagacgcaaataatgatattttttgcttcaattgtgaacagacgctaattgattatttgcttcggtttataccgaagcaaaaaaagatgtttttgcttcaatttataaccgaggcaaaaaattagtgcgccaacactaattgtttttgggttcagttataaactaaagcaaaaaaaaaaattaaaaaaaaaatttgtaattataaacagatcgatgccacacgaattttttcactttcacacaattttttttagtttcacataaacatatctcatatctcaaatttatagcaatctcaaatttttcaaatgatgggagagcaccactgtaataccctagaattaggaatggattagcaaaatcctaattagtaattatgaatagttgagaaattatattactatataatt

SEQ ID NO: 129639 - DNA, 1371 bp, Cannabis sativa
atatatatatatataaaaagaattataatttttttaaatactgaaaatataaatgtatgccataagaataagtgacacttatagttaggagctaccaaactttaatttataatagaactagagaatagattcgcgtttcgcatggttttaataattttttttttgatcaagaaaaaaaagcttcattaattaacaaagcaaaatacatcagatagctagagcaaacaccgccccttacaactcaaccaagaccaacatgacacttacctattttgtaatctcaataggtagtctctctcttgcttagacaagtttttcatgtttacaagttgtaatttgtacttaacaaattttttcacatcatcaactaaactaccaacagaactagaataattgctgaaaatacatctattcctgttgagccaaatattatagattacagtcgccaaaacagtaatgttgagccgatgtagcctagctcgacctgtcaaaattacccaatcataccatccattgtaatctgtcggccaagccctgaatcccaaccacgaaaaagttgtattcaggactttttgagacaacagacatctaaagaaaagatgttcatgggattcctccttctcctcacaaaccggacaaaggttcgaattaagtactatatgaaaccgagataattttttaattacaaatgaaattttatgtgtaatatagttttttttttcttttatgaatacataatatatgtaaaatctctattttatatgattggcacaaatattaattataaggtaataaaaataaaggcacatctagaatgaagttatttataataattaaaaattataaaaaaaataatgtatttagtttcatttaaaataacttagttcgaacatttttttagctaataaaatttcttataggacaaaattaattaataaaaaactatgataaaaaaattttaaaataaaattaattataataaactgtatattattatatattggatgaaaaataacttatatactaagacaataaaaataaaaaaaaaataaaaacttataggataagaaattaattaaccgcccataataaaagaaaatactctattagaaaatttataaataatgtgggacatttaattttaatgtatttgaggaagaaattttatgtatatttttgtttgtgtagttctttttcaaacaaaatagaaaaaatttataaaattttaaaaagtgaatgaaaaaaaaatctaaaatgtcacctaaatatatattttgtgcttctcattataatatacatatacatatatggaacacttcttaatgggtaatacacattaatggaaactaaaaaaaattaataaggtaataa

SEQ ID NO: 129640 - DNA, 1023 bp, Cannabis sativa
  modified_base (474)..(474): a, c, t, g, unknown or other
aataccagcttttgccagcacaaaaatgtgctggcaaaagtggcacttcttgtagtgcctggcgacgaaaaaaattccctgtgtaaaatacgtagttgtttttttggagattttacaaaaaatattgaatttaggtaaatatttacatttatactaccatatgacaaaatttacatttatactgacttggccatattttttttcttttatattgtaaacattggaaaacaaccgttaatttcggcaagatgaaacataaatattaaaactatattaatactgatgtgtcatggttttttaatgttgtttttgggttgttccactcactacaaaaaatcttacttccacaacaaaacttgtgactaaaagtgaaaaaattgtgactaattataaattgatattcatatgttgtgactaaaagatccgtggctaaaggtattagtcacaaaaaatacaatttgttgtgactaaatntatttttagtcataatacttgttgggacgactaaaactaaattagtgacaatattttgtaactaaatactatgttttatacacaagtaacattttgttgtgactaaaagtcacattttgtcacaaaaaaattatgttgtgactcaaagtagcagtttttctgtagtgtctattgtctcgtatgtttaacaaatgttggtttcaaattacacaggttaaaccaaccactgaatatttatttgaggtaactagaatgaaagaatcatggacagtagacctcaaagagagaacacacacgttcaacaggttactactacacaagctctgttcagattactacaccaagaaaaattgactagcaactaattaaagaatagtagtatatacccaataggacaccaaaatgagtgggatgtagcacaaaatgtgaaagatgtaatagtgtgaaatttagaagataaaaaaaagaggatggaagctggttgggaaaagaaacaacataacaaatgcaacaaatgtggggagctagagcacaacaagaaaacataca

SEQ ID NO: 129641 - DNA, 1044 bp, Cannabis sativa
  modified_base (994)..(1002): a, c, t, g, unknown or other
ttttacagatgctttgtactagtatagctgccccccaagtgaccaagcagacttatgactcttggtcacttgtatttcacaagtatggttttcgtttgtttggctcattgggtcgagtagaccttttgtacgcattaatggtaaattcataacttcctaatataattaacacaattagaagagaaataaacatctttattcatttatttttaagaacagttttgttaccgtagtaacttacatttatgaaagctattacatgatccaactgatctttagctaaatttaaacataaaacaattgcacttaaagaaaaaatagtactttggaatgtggtcattcgacctaagtacataattatttaatcaaaacgtttgggcgggatccgccccgaaggcaaccttcttaaaagtaaatgttcttgcattgtgtacttaaggtgctcatcgaaccttgtacatttactggtaggtttcctcaaagtttcaacattccaataccttggtgctagaacgagtttcatatttttatcataccgcccaagcttatatgcccccgattctagaacttcgacaaccagatatggtacttcccaattatgtctgagcacaccagtcgtgcatttttttgtgttcaggaatactcttttaaggaccatatctctcacaaagaattcccttgccctcacttgcttgttgaagtatcgagcgaccttttatttatatgctactaactttaggttttctaaggctcgtttttcttcaattttgacaagtgattctgctaggagagcatgattagcttcttgatcgtaagtcaatcttctgtgggacggaggttctaattctacgagcaatattgtaacgccctaacatttaggcacgctacccaagatgattaagaaaccttaatcctccaaaagggattactaataaactaagcgtcgaaattaaacttttaacgaaaacacaatgaaaataaacttgtaataatnnnnnnnnnacaaacaaaagttacatgttttgggatcccaaaaattgtttt

SEQ ID NO: 129642 - DNA, 1133 bp, Cannabis sativa
aaaaaaatactcattcccttaattgaaaaaaatatagccaacaagcctaggttgccttgcttaattagcatctcttgctctactactcttcttaattgacactaattgattttttgttgggaaatctaaagcctaaattcatgagatcaatacaataaagacaaaaatagttttcaatttcttcttttttacttttaatcatctaagaattgttaaagtagtgttatatgtttttatctcatgactatcatgaatattttttaatatatatattaattgtgttaagaaagatatttattatagtgagtactagagtatatatgttataaaaaaaatcctaaaatgcacctctaaaaacttgcatcaatgtatttttatttattttttagtttaattttttttataattatgtacattataattatttaagataatttataaaattttgagaaattttaaaaaaatttaatatactgaaaatagggttcaaacggtctttaaatttcttaagattttacaaattatcttaaataacaataacatacaaaattataaaaaatgcattatagaaataccatacattatatattagtgattagtgagtgggtttaatttaatttaattaaatatatgaaaatttgagtaagaaaccaatgaatgacaaatgccactaaacccaccttatcttttagagcttagaagtgcacaaaaatcagattaaatcaaataaatatcaccaaaaccaaaagctctttcttttcttttatgtaccttccttagtgggtagaaattacttttttattttttattttttattcttattacaaactacattagtacattcttcttgactttttttttttaattttttttttaaattttaagaacagtatgattttgatattggtcaatgtcctactttgtattaatctctaataatcaacaattccaaatatttatttcattatattctccgaaagttttaaagtaacttttgtaaagcttacatgtttcttggggtttgaacttactatactataatatcaaccatttttattttaaaaaaaataaaaaataaaaaaaatatatgtgaatgaagactttttcattacttaataatcatatacaattga

SEQ ID NO: 129643 - DNA, 1489 bp, Cannabis sativa
  modified_base (1446)..(1455): a, c, t, g, unknown or other
tgaaatgagttttatttaggccataaaacccaacattttcacgcttactgcaacatgaagagaaccgaggcaatttacaaggcttgaaagtctctagatctgcaccatcagtttcacacctattatttgctgacgatagtgtcttgttttgtcgggcttctagatcctctgcaactgctgttaatcggtgtcttgatttgtatagtcgagcatcaggtcaagctatcaatcatgacaaatgtgtcctatccttttcgccaaatgcacgagctactgaacaaaatttttttcagcacctacttggtatgcctattcaaccatgtcatgaacgctatcttggacttccatccttctcgggacatgacaaaaaccagctcttcagtggtataactgatagaatatggaagcttctcaactcttggagggaacaattattctcagtaggtggcaaggaggttcttctcaaggccgtagttcaatcaatacccacttatgcaatgagttgcttccaacttccagcgaagctttgtcatcaaattgagcaacaaatggcaaggttttggtggggttcttcagcgtctggacactccattcattggaaaaattggaattttctatgcaaagctaaggtcaatggaggtatgggatttcagaactttattcatttcaaccaagctttgcttgcaaaacagacatggcgcttaatggaatctcccaattcacttctgagtcggattctaaagaacagatactatgttaatagtgagctgttacatgctggtgtgggtattacaccttcttacacatgtcgatcgatagtctggggtaaagaactacttaagaaagggctgcgatggagagtaggatctggctcaaatatcttgtgtaattcccaaccatggattcctaatcactcttcttttttaccactggtttataagggagacaatgctatgacagtagctaatctaatatctgactcgagacaatggaacttggaggctctgcagaataatttctcacaacctgatgttgataacattctttccattccactgagcctttatccatctgaggatatattgatttggcattactcttcaatgggcagctacacagtcaaaagtggatatcagtttgctgctgaatctcccgatgctactgctcctagttgttcaggctcctctgttgattggtggcaatatttttggagcttgaaactaccttctaaagtccggatctttgcttggagggcttttcatgatgcactaccaacagcagcagtccttcatcatcgacacattgcctccgattccttatgtccactttgtaaactccactctgagacaatcccacatgcattactctgctgtaagagagctaaacatgtaacaccctaactatcttaggcgtattacgtgctttttaaacgtactgtgcagctcnnnnnnnnnnaacgaggtttatggaaaaaacgtgattaattaaa

SEQ ID NO: 129644 - DNA, 1356 bp, Cannabis sativa
catattaattcacatatactaaactatataataatataattcctcaattattcataattatctaattatggttttgctaatccattacataattccagggtactacaaatacaccctccttatagaaatttcgtctcggaatttacctgaacaacttcagatatttctgctgcatattcgtctcgaattctcaggttgcctctttcactcaaactttaaaaataatttatgttcacgtcgttactcggatgagtctaaaaaaaatatcattctgatatactttgaacattttaagatgtgcaaagcatatattttttttgctatttctagaaaagaaactatttagttactaatatagttattagttacttattataatttttttaatcttagttaacattcattttagaattgaattgtattatattatactataattaattagctttcatataacaaaaagatatataaaatatttagtatataaaaatagtagcttgttatattacatgttaattcattgtttcgaaaataaattttaaagttacctaaatgtattttaaattataatccaccataatataatttaaaaataactaattaattactaagatgtaaaaatataaattttagaggtaactaaaatgtatcttaaattatatgatataaaaataaaattttttatataaagacaattaattagttttttatcaagacaattagtaatgaaaaaattacttttaaaaatgctggaaaataaaaaaaataatgaaaaatgttaaaaaatattaaaaaatgtcagttttagctgatgtaacacgtctgtaatatgaagcacgtcaataatagtagtaatcttattattgtaaatcaaatgtaaaaaatgtatattattgtaaattgagaaaattacagtgcaatacgtaattttgaaaatatttatgaaaattcgttcaaatattttaatactgttaatacttacttttttttaacaaatcggtaaacgtataccgaaagtcaatttttttttggctagctgccactcagccactgagagttagaatctctcaattgtcgttcgttttattttttttcaaacttttgcttatttttcttaacaactgattttttatttatttatttattaatttatttttatctttttgtctttaatttttcttttgaaaagagggttgtcttttgtctttttctcaaattatatctctctcacttaacaattattttttttcttatttttctaacaaaactatataaaagttttccatattcacactaattatttaagttaaaaatcaatattaatgtaatctactttttaattatatatttttttac

SEQ ID NO: 129645 - DNA, 676 bp, Cannabis sativa
gtacatgtcaaagttcagggggtgccaaaataaaaatactaaaaaaaaaaacttacaaacataaaaaatattattaataacaatatcatactcattgaaaactttcatcttactagaaactaattcaccaaacacacaaacgtcaaaatacacactaatgtgagaataactcaactacctacataaaagaaggccctgcaacagggtcgaaacctccaccacatgaggtttaagcatggcaatgactgaagcagcagaagaacgaaccacatcactgttagagcgatacacaactgtccccatgccaaatctcctcctttccgagcaaatatcaacatccacaaacaaattaaattccgccaaattcaactcaaaacccactcccactatataaaaaggagaagcccaataagaactcataagaactgacatatcaaaatggtgttgggcatcttggaactgccataggtaactacgagccaagctactaaccatatcatcaaaaattgacttattattatcatgcacaaaggtattgtgacgataacaaattcgccaacaaagaaaaagaatttcctcaacttctacgttagacaagatattcatatccctaatcaaaagtttataaaaaatggacaccattttcaaactatctaactgttggaaatttatttta

SEQ ID NO: 129646 - DNA, 1163 bp, Cannabis sativa
  modified_base (32)..(70): a, c, t, g, unknown or other
  modified_base (927)..(927): a, c, t, g, unknown or other
  modified_base (1121)..(1122): a, c, t, g, unknown or other
tatgtgtttttttcattgttttagagaattcnnnnnnnnnnnnnnnnnnnnnnnnnnnnnnnnnnnnnnntaaatcctggtaaaatattcccaacatcctggtggtggttagccgcccacaagatggacagagggggctgttgttgagcttgagatccctagctagccccccatgtcactggttactgagatttggcattttttgttgtttggcctttgagtaaaggtatgtcctccctccagcaagggaagatctatcctagttactgaggaactgggttgatcagtatatcgatagactttccgtgatttatcaacaagtcttccttgaagtggatctctaatgagatcctcgcctcttctattggttctctagttgaaccgccttattagattgctggcctttcttttgcaacgatctaactctgcctagtgagaccgaaggacgcactcttgttcatctatccatctcaagaattcacgtcttggctgagcgagtataccgcagtcaacaacgtgtggttctttaagggattcgcgtctctattgaacgaatatatcgcggtcagcagcgcatggttcttaagggattcgcgtctctgctgagcgaatatatcacagttagcagcacgtggttcttcaattaggcctacatggcctatagcttccctgagtctggccaactaaaggtcttctcccaagcctaggtgaggtcacaaattaattgtcccgtccctcttgcatagtgatgataagattcaccacatctacagtgttcattgggattccagttgagcctgaaacttaagtatttggacctacagtctgtgggtcttgagggacacctaaatatgcaaatggtgcaacaagaattcttctcgtatcaaccttggcatttgattagatacgatatccacgctctcaatnaaagcaccaaactgttaacctcaacaaatgattaactgacagctgggtcgtatagatctgatgctcgccacgtgtcacacaaacagaataaaaagcaataaacatagagattttttatagaggtttggcccccttgtggtagtggataataacctactccccttttggttgtatttattgttgggttttatgcnntaaataaaactcatttcatataaacagatttacttattaat

SEQ ID NO: 129647 - DNA, 1201 bp, Cannabis sativa
  modified_base (48)..(60): a, c, t, g, unknown or other
tatgccactaaaaaaaatcattgggtttatgccacttacaaactcaannnnnnnnnnnnntatgccgctatttacccttataataaaagcaagaatggttgattggtttatatatatacatacccaattatttgttttcctcccaaatccttcttacgcttgttttgagatcacccttccaaaccttttttatgccatgttcatacttcatcatgcaaacggattcatactgtaactttgtaattactttagccaacttagaagtgattacatttccaaaagagaaattctccatgcgagggcattcgatcacagctactttttccaaattaggaaactgtatgtcactatttccgcagttgaagcttttcaaattgggtaaacgatgaaacgctaaaatctctaatttggggaagaccatcacattctcaccagcttcctcctcatccacaattacttgtctcatttctttacacttctcaatggtcattttctgaagttgtattagacttctggcggtggaagaattcattaaatttatcattccatcatgctttgatatatgaatctctctcaaattttgaaaggacataaatgatgtcatgaacatccacttcaaactcacttcttctaaattagggaccacaacctaaaattaattattattattgttattaaaattaaataaaactaactaaaacaataattaatcacaaagaatacatatatatagcaatacaattcttttcgtacaagttagtcaataagaaaacaagcaatgattctaaagttataaaacatttgacaaaatatgtgaacttccatgaaaatattggtttatatatgcatgtgtatgcacatatatacatggtgacatcacatgagatgtaaaattttcttttttaaataaataaaatgaataatgtaataataaagataaaatatgtccattaaatagatccaatttgttttattttttttttaaaaaaacatatattgatcatatatatatttaggttatgtgttttaatttttgaaggttaaaataaaatattataaataatttaattaactaaataatattattttagtaaaaaatattttttttaaagctctataaaaagaaatagaatagtatatttaaaaaaaaaataaaatacaaatgcttaaagcttttagaataatttatttcaaaaaaaca

SEQ ID NO: 129648 - DNA, 1531 bp, Cannabis sativa
taaaaatggtggctcatgtaataagtatgaaatgagagaagaagaaaaaaatggtaatacctaattatctatgagaaagaagagaataataatacctaattttctatttcgaaggtttttaaaattttttagtttccacttttttttttattattataaaaaaaataaaaagaaatatgtgtcttaaaaaataatttcctttaaaacaggaaacaaatatcctttttttttttttttgaaaatacatatatataaatatatataaatataaagtaatagtggcgttgggcttatatccaatttttttttattgtcacactactattctttattttgccttctcttctttccactaaatttgaataaacaaacatatataatatatatcatttattgcacaatatgttttatttgaaaacaaacaaaaaagaaaaaagaaaaaactaaaaagcccaaaagcccaaaccgtcatttacaagttaaaacaattactaaaactttaagtgggggccaccataaagtatataataataaagaatggattatataaatagaaaattataagatatggaaagtttgggggggccatggcctctatagagtttcaaatacatccgcccctgcacacgggttgggttttgggtttttggggtttcgggttcaggtttttgggcttcgagtcttggaaatgcacaacagaacccagtttttgggtgatcgggtgcatcgggtattggttcgggctttttcggtttgggtgtagtcgggttcaggtcctattgggctgagcccaaaagtttaatttatgggctgaaatgaaatttaattttttaaaatctattttcattgatttttaacattggttggacctttttttatgattaatatttttttgggtctgaatagtaaattaaattcggttcatacccaattacaaaaatgacattcaattcaaaacttaaactaaactatttctccaaataaataatcattcattattcacaattacttaccaatttaaatattcaaaacaaacaacgctatagctattaatcaaaatatataaatgaaagaaaaactagaaccaaaactcatttaaacccattcattatttcataaatgcttaccaaaaaatattcaaaacaaaacaacactaactatagctattaaatttaatcaaacatattaaggaaaaggaaaaagaaaattaaaaccaaaactcaatcaaaaactcattcattaatttcacaattacttaccaatttaaatattcaaaacaaacaacactatagctattttacttcaaaaaaaaaaatactatagatattaatcaaaacatatacatgaaaaagaaaacgagaaccaaaactcaatcaaaaacccacaaaagaaaaaaaaaaagtctaatctacatccattatccaatctaatctacaatattatagaccatataaaaaaaagtctcaaagtctacaatatagctattaatcaaaaaatattaataatccaaatcttaatctactccatatcc

SEQ ID NO: 129649 - DNA, 843 bp, Cannabis sativa
  modified_base (48)..(61): a, c, t, g, unknown or other
  modified_base (787)..(793): a, c, t, g, unknown or other
ttttagaaagtttatatttagggtattaaacaacatacttgtgagtannnnnnnnnnnnnngtaaaataaattccaacactttgttcccacactttaccttactacagctctttattatctcgtttcgctttctctcaagctcaacaacattgcaccgccgccccaacaaatattccaccaccatcacaaaccttattgccacctccatcacgtccatcaccaccatcgccatctgaactcttgccaccaccatcaccgccgcagtcaccaccaccgctagagaggagttggttcgctgaaaaaccgtgtgtggaggaaccgagacttcataaatattgggttaaactagcacgttataatttagataacacaccaattccacaagattgttgtgacactttaattgacgttacaaacaagtgccctaatgctgattgggatcatcgaattcttgattgcctatcatattgcgaaagtattaagaagaacaccatcaccaacaattagttttattatttttattctactttatattagtgtttagcgtttttttaaatggattagtagtgtttagtttttagttttttattgatcttatttttaaagtttgagttattatttatttgttaatgttttattcaattatttaatcattaataatatttttgccttattattagagttgtagtctttttggatttgagtaagctagaacttaaaacatgatttcttaatatattttagtaatgaccgctctagtaattttgattagtaaaggcaattagnnnnnnnttttattattttattattatatgtgaattaatttaattgtggaccccaat

SEQ ID NO: 129650 - DNA, 869 bp, Cannabis sativa
tggtgccttcgatccccatcattttaattctagtttaagagcttcaattgttaactgccacaactagaaaattgcaggaatgtcaatctcaaagtggggagcttccttcccatttatgctgaagcccattctctccttgctgctctcaattggtgtttgacgatccacattcctattgtttgcattgaatttgattgcttgcagcttgttaccaaaaactaacagtattgaaaggatagctcagctctatctagtcttatccaactgatccacaagtccttgtctcttttattcctaatgcattgctctccacccgtgtactaaaaatctagaagcacattctaatgcaaggctttaaggctagatatgaattcaatttggagattataatcatctcctctctttgtagatgtagttacttttaaaaaaaaaaaaaaaacatacaaggaaccaaacataatactatattattaaatttgtgcgtgatcacttatgcaatatacatttacaccactacatcttatatgtatgtatgtatgtaatatatataggtaagtatattttttaaaagatgggttttgtattttaaaacgttataatatcacgtgttttatattgaattcatatacgcaatacgaactaacacaatacatatatgatgatattaattaataatatttatatagtacactttaattataaataaagggaaagaatgtcaagaaatgctcaatataattatgagacgcatgaagatattattagctaaatttaaactctttttcataaaagaaatacattaaaagaaaaaaaaataaaaaacactattatcataattaatatgtttagtgcaaccatataaagcagag

SEQ ID NO: 129651 - DNA, 787 bp, Cannabis sativa
tcaaagctgctgggaacggccacggtgacggtggctatgggaagctagtttccaatgcttcccgaggatcgaggcgaggtcggatgttgacaagtcgtggtgcgccgatctctggtaagggccagcgtgctgcgtggatcaccaaaccaaagccagctggtgatggtacgccggttgccaattcgggtatacagaccggttttgaagatggagcaattggaaaggctcctgctggtttgcctggaatagttacgcctatgtctgtacctacaagtgactgtttgatgattactgtgcctaatttgaacaaggcttttgaagaaggaattaatatgggccgaactcttgatgtgtctttgcaaaaaggtgggccggtctctcctagtgggctaggtgcattggggcataatggtactgggccaattattttaaatgtaaagaccaactgttgttcaactcttgtgtcgacgtggagcgtggaatgagtggggttttaataggtgggccgagtgatgttaatggcccagttggggaaaaggttagtggcgttggtgatgggccgaattactctactgggccaattaatgttcatgagccaattatttctaatgggctggattttaatgaagcacctttaattgaatgtggtaaggatattaataccatgtctaatgaaaaggaagctgagaagaatattgaagaaaagaaggccttgtctcaattttttaaagctcaagaagagttacttcatgacttgaaacattttggtaagttggacttgtatgag

SEQ ID NO: 129652 - DNA, 1637 bp, Cannabis sativa
gtgtaaataaaatttttcatatatttataataaatgagtcccctcaaaataaaaaatcatgttgaatacacgtgcggagcacgtgtgcctcccactagtttaactataaatacatatatacttttggcttttggggtttctagattggactctccatgcaaattcaaccaataagtattcgagaaagatagaaagttatggttttatggcaagactccattgttggcattaagggaagttccaacatatatagttctttcttttacaaggggtcctcccattcacatggtctcctttacaagtcctattctgagacaaagacaactagacaccaatgccacgccaatcttcttatctcttaattcatccatatatctctatattattaaaaattaatctttctctataaacttaattcacacttatctctatcacccaaaaaaagcaatatctatcacccaaaaagtaatatagaaaattatatatagatcctttctcttgatagttccactttagtttatctctccttaattatattctctcatcttttattattttgtgctatttttcttcttccaaaatctataacgtttaataaactcattcacaaacaagcacatcatgtatatatatgatggccaatatatataaatgaaaaaagtttcgatggttaagttaaatatgtaattatatttttaatcatattattgaatagttgtgattaaattagaaattaaataaaaaataaattgtaacatatagtaacctaatactttattttcttaaaaaaatttaattaagcttaagttattttaaaattaaattaattataattattattattattttttttttttgtaatttattactaaacaaggttcttttagcaattttttttttgcacttaaaaaattttaatatttgtagcaaacatccttataatttgaaattataacacataatcttataatttaaaataatttcatgtataaccttataatttgaaattattatacttataactttaatttaaaatcattacacctaaatatttaatttttaataatttattaagaaattataaaattatatacaaacaagtttaaaatctaacaataataataatataaaaactattataaaactaatagaaaatgcttaggtgtactataccctcccattttttataagttgacatgtttatatgtcattttactttttaatttataactttattaattttagctagcaatgtatttttatctttcataaatttacacacccacatgtcaattttgtttatttattcctcaccaatcgacatcatctatcatttctataactttttttaatgattttctacctttacagtaaataaaatcaacaaaaaaaaaatatatatgtagatcactattatttttcttgttatttcctttaagtgttctctcaatctaaatcattacctgcctacaaagattatccaagatctatacccacaacgctatcaaattattgagatcaagaacgaataaatccacaggcccgaccctgggcataggcgggctaggcctgtgcatagggcccacctagcccaggggcccaaaaaaatattttccttttaaaattatacaattttt

SEQ ID NO: 129653 - DNA, 805 bp, Cannabis sativa
gagagagagagaaggaaatggattgaatggaagaagaagcgtgggaatcggattagagaagagaggttctcttctcttcttctcttttctattgttctattctatggaaccgggcaagcttggttcttaataaatttattttatttatttactttctataaaaaagaattgagtttcaataaaataaattaactatttttttttttttggagtcaatttagatttttttttttttttgttagtcaaagtaattgctacttagtatcaactcaatcatgattattttattcaatatattaattaattagttaataaaaaaaacacagaaatcataaattgaagttattcaacaatccacgttttgggtaagaattattagtgtttaatagttttcacccttataaatgatcatgagtttatagatatagaacaccctatttaatttcactaataataataaaaaatattaaatattatttcctattataattcataatattttttttataattatactaataataatgagagtatgatattttaatttaaaaaatttaaattgatatttggtattaattatttaaaaatttacagagatgacattataactataatgaatacaattataaaaattaatatcctaatatatttttaaatacaaaaattaactaaaaaattataataaaaatataatgtctatttttttttcttcgttatttaacaagtagatgcctaaattttggtacatgaattaattaaaagaattttgttattgagtatattagtgcatatttggcatcataac

SEQ ID NO: 129654 - DNA, 905 bp, Cannabis sativa
taaagaaacagatttaatttcattacttgtttaatgtgttattcaattagcaattatgaactatgtattgtgggatcttatgttttaaccgagtagtaatagttggacataccgagttaatatgatatctaccagtgtagacaatttatacgatcaatgaggatcaatagaatattagaaatatgctgtgatcataattgataaaggttagattatcttagaataatcttttccactgacgaagtatttgtctaaaagtgatgattatatgtactattggttaggtactttaataagtgtggtatgagaaagacgttggacacctatttactggagtaacacatgtgataaaaggacatgatgaatcgaaaagttctaaggaacttataaaatcatagagtgagttcgagatatatactcgcttcattgagtacatagaaaagctatgctgaattaaagcatagggatattaaatttcaagtgggaggatcagtatctctttgagtatcacctatgaaaggggtgcataaatttagaaaaaaaatagaagattaagccctagatacatcgattcattttagatattggagtggataggccaggtggcctaatgattaactttaccacccgcattgtcttgggtgcataatgtcttccacaactctatgttaaggaagtatgtgtctgatccgacacgtattttgagttacgatgatattgaacttcagacaacttattttatgaggaagcaacttgggaataagagttgtagatgcaggagctgtatccctaaatcatctaggtaaatttcgaggacgaaattcttataaggaggggatggttgtaatatcctgataagcctaatggtaaataattatagttatatttatattatgggttaatca

SEQ ID NO: 129655 - DNA, 1200 bp, Cannabis sativa
  modified_base (610)..(617): a, c, t, g, unknown or other
  modified_base (816)..(818): a, c, t, g, unknown or other
tcatcacaattgccttgaagttgacttctttcccttctggtcgtcgaagttgaaattttttcaggcaaagataccttcgacttcttcttcaatagacgacgaccatctttagccacggggggagcgaaattgaagtcatcattgttgatgactgggcgtttccctttatccttattagaaactgatttatgatttatttttgaatttttttttctggcaatggagatggagaagcagaaccacaagtaatagccaaaaaaaaaaaaactgatgaaaggaggcagttagaagaaaaagatggcgaaggttatggctggttttcgtgggttgtgaacgtgaggttccaaaagggtaatagctagaaggtgtttgggctgacatgaataaatatgtgtaagtggtattttagtaaataaaaactcattaaagataatattattgaccaaaccttataaaagtatttttgtaaataatatatcaatttgtacttttcatataaaaatgtggtgtgtcttatacatatatatttaaggaattatttcacaaatacataaaaataacaaaaaaaaaaaaattaaaaaaaaatacggtttcacgaaattttaaatannnnnnnnatttttttgattttatttacagaatatacagtttttttttatattgtactcttgttaatttgttgttgatttattgttatttgtatgttattttttattgttattttcatgttatttttatgtaatatttttttttttttttcgtgttatttttaaaaaaatccataaaaatgtaaaaaaaaattaaacataaatgtannntttttttttttaaaaaaaagtggtgttttatataattattcctatatttaaataaattaccattacattatttctttgttggggtttgagataataactttttttcttataagtagtttgagataataacttatatctattaattgagctgttaattgagacaatgacttatgtctacttacttcgatcttatttgcaataggtaataagagctacctataccactagtacaaattttccatagcgcatgtgcaaaatgagaaggaaagacaactgtatttttttggccttttctaatttaatagtatggtctccttttgaaagctaatacattccattcctaacaaaatcaatggaggtctttttactttttttttttttt

SEQ ID NO: 129656 - DNA, 1202 bp, Cannabis sativa
  modified_base (1132)..(1145): a, c, t, g, unknown or other
atatatatttgtgtatttttagtttatacatatttagatataagttgataatagttataaagattaaaattttatctacgtttactttaatttgatgagttaataaatagaaacttttaatttaatattttaaatattttataggtatcgagttctttgtgttgattgaagagtgcacaattgtagctatctttattggagaaaggtataatcactaaaactttaaaattctttattttgtcgagttcagatatgttagatattcatttgttgtgaagtaggttgtgtgattactgcggtcggatgggtggaatatgcatgttagatgagtttgaatatcttaaatattcatccgtaatgaagtattgcagtcgaatgagtggatattttgtattgttaatgtcattttgttatttttgtattttatgtgtttttttgtcatgtttcaaatttttaggaacatccgattacagccgttatgctgctgaaattttgctagaattaggataaatttcactaaaatttatgtatgtgtggtaattaatttaactaattattttctgcatatattcaaaaaaaaattgaataaaattttgttttgaagatttaaaacagatagaaattatatgagtgggaatagattatcagcggagtatagtcaaggtgttgactattttttggactattattagaagtatatcaaaaatcctaaattgattctttgcccttgtcttaaatgtggtaacatggagcatatggacattactaagatgaaaatgcatttgtttattaacggaatagacaagagataaggtttaggttcatcatggagaaaagaatagtgttctgggcgagggaacatctaagtgtaacaaggttaagggtgttaatttagtgtatgagtatgatcacattctagaaatgataggagatgcaccatttgaattaaatatcgatccattgaaatttaataattttttagaggatgccaacaagcctatttactttaattgtaatagatttactaaataatagacatttacaatataatagaaaataacattgtttaatataaattcacatataattcagaaactattaagtatgtagcaaataggaatgacaagcgaannnnnnnnnnnnnncaatcctaaataatttccaagatcttcaacaaactgatatatgtgtcccgtttaggc

SEQ ID NO: 129657 - DNA, 592 bp, Cannabis sativa
acacgatttattaaacatttttttttagggaaaatcttcaaccttatttaatgacccaaatcaactattacagataaatattaaaagcaagggtaagcatctgtccaaatgttttcacctacaccactcgtaacaaacgtagctagtgcatggccaacactatttgcagaacgaaaaaaaatagcattacaagaaccaccaccgccagtaactaacattgaacaaatctaaaaaatgattaactgataaacaacattacaacttaggctattaatccagctaacaacaacaattgaatcacaaccagctcgcgacaaatgaaaatcaaactgagacggacagctagaggctccgccacaggaaccacaaagtcacccatagctccaattgcccatgtagcccacacagcccccgtaccatcacgaataacaccacccagaccgacatagcctctatcagagaataccgctgtatgttgattataatccttcaatctaacgccataaatatgaatatcctaatacgatgaaataaatacatataaagtttagaaaatcttacattgatgacagcagaataatatgtctcattc

SEQ ID NO: 129658 - DNA, 1182 bp, Cannabis sativa
  modified_base (433)..(435): a, c, t, g, unknown or other
gaatttttatgattttatttttgatgaactcttgatagaaaaattattgtagatgcaaagaataaatttgttttaaattttatcattttaaaaatgagaaagtaagtattgtagatcaattttggtttgcatatactagtagaaaaatgtaaaaagtgatgtggtcgtaattagtttgtttagagaaataaaattcatcttttttactaaaaaatatatattataagaattaattgtttatgttcttatctaattttcaataagagggatgtttgtattgagtttatatttattgatgtttgcaaattcttattaccctactaattttttcacccttattttatagatttaaagctcaaagtattagtaaggcactacaaatttttttacttttagtcacaacaaaacttgtaactaaaagtaaaaaagttgnnnctaattataaattatcattcctacattgtgactaaaaagtctgttgctaaaagtattagtcacaaaaattacaatttgttgtgactaaaagtatttttagtcataatacttgtagtgactaaaattaaattagtgacaatttgtgtctaaataaaatatttagtcacaagcaacctttttgttgtgactaaaagtcacatttagtcataaacgttttcgctgtgattaaaaagtcgtcactaaaaattatattttttatagtgagaatttgcaagcatcgataattagaggtacaaaatcttattttttgtgttttttatattcaatctataaaattatatacataagattatttgtatgtctctatatcatttgatctaacatttaacattctatgccatgtgtaacgtgcgtgtcaagatggcacgttacaagctaggtgatatccactagttggccaagtggtgcttaagtagtggcacatgttggtggcatgctgatgcttagtttgtatgacagtggcatttttgtaaatatcttcaatattgtctggaacgggacgggacttagtatttgccatttatttaggtctacaaatacaatggtgcaatcagattggagaaactatgtgatttggtatacgctttgtctgtatgtctacagagccaaaatcatgtatgttcctggtagaaggctaaaagctcagaatgctcttttaaggggggaccctggtgtcaactctccacc

SEQ ID NO: 129659 - DNA, 895 bp, Cannabis sativa
tatcataataataggaccaattttcatgaaatataaggaaattttccaaatcattaatcatttggtcgtttcttgagacaattcaattaccatcaaactaaattgaaaagaaagaaaatcagccaattggccaccaaattcctattatgaatattttattttctatagttcttaaaaatcttgagaaatagaagattattggtaacatttcaccatcaatagttcaatgcattggttagttaccaaatatagagtttggtttagaaaagaacgcatggtagttatcatttattaaaggatcaagtcaaaggagaaatcaattttaattaactaatttatttaattatataaatatataaaaagtcaatttgttttcaaattaataaattttgaacccctcaaacacacaaatttaaataactaaagcttaactaattgatcatctttatgtcatctaacacttacttatcggtgcggttctggtgacacaccccttcgtaagtgagagaccacacaaattaagtcttggcaaacattccagagcaaggttggtaacgcccaaaaaatggggccacaataatagcctcgtctcctctctcttttttttttttttttccataaaatgctttaataagctattaaaaatgaatgtatcgttgcatattttttttggaattatttcaaaaataaaataattacaaaatatgactgtatgaaattttaaatatttttatgatttttaagatttaatttgcatcaaatatgtaattttgatgcttttttatgttgtaattttgttagggaattttgattttatatacttaaaaaattaaaaaattttattattaaaccaaaaatctaaaccctaaaaaaactatgccttttttttcaaaac

SEQ ID NO: 129660 - DNA, 903 bp, Cannabis sativa
ctgctcagaggaagcctgacatctcccgcagatgctttgatgccaccttgatctccgggagcatagaaaacctcgtatgccttctccgggaggcacccccgggacaatggcagcctttataaatacttagctattaatttgagtgttaacaccttcgtgtccacgtgtccctgtctggttggtccacgtgtattgggcaaaattaggggcaacagtaatgatttactttcatgaaatatggatttaaagcaatgaatatattaattgtgttgatttggatgtgttctgttggtttatgtattttttgataattgtatgtgaattacgacatttttccatgaaaataattttattttcatcctgaaaataatttatttgaattccttgtgaaaaattaagtaattttggagtgcttctaaaaattggctacactggccaaccttattatgttcctcttcgctatggagagggacaacatgtggttcgctctatccctcatctgaaaattagagatggagtgcttgtatgtcagcactcgttgaaagcagtgatgtcaaatctcctggatatctcagacaatgaagtagttctgagcatatccactaactttcgacataggcgtgttgttggtgccacctaaccactagtgaccaacctgactgaagtataagtacccagtctggttctgtttcagagaagacttcaaattaaagtaatacccaatctcatacagagtaggatgtggccatcctagctccgcatagagaacaaacatcatcgagaggtaatttaatacttattggggtgattttttgttgggcacatcccgaggtaagcagctatatctctaaaatatgggtgtaatggcaacactgcccctactggatatggcactttaactat

SEQ ID NO: 129661 - DNA, 1010 bp, Cannabis sativa
  modified_base (28)..(37): a, c, t, g, unknown or other
acgtggcttggcacgtaacaatcacctnnnnnnnnnntatatatatatatatattaaccatactttcactaatttgttaatgtaaatcatagggctaaagtctatttttccttttacttcaccaagaagtaatctattaacataaggataaaatagttcaaaactataatcacgctaaaacttgacataccaaatatctaattattttgtcctgctaaatctaagatactagaccctatctaagtgactctaatgaccaaattatcgcattccactactgtaaaattcatatatataacatataaaatacactagaatttaaatatatccctaactaagaaagtattttttaaagcctatttctgacatattaaccctaatttctgctaaaaagcacgtaatcataaagtaataattaactccttaattatctactaattctcatgatttaactatacaatcattaaaaaaaaaaagatcatttcaataaactttgaattgaaatcaaatttacatcctctaaatttcagaatcgcatattgataaaatgattaagtctatgattagttacaagcagctgacaaagtccttctagggagatgtcttagagataacaaacaatatattaaattatcgtcccatcactactacaaatatcagaattcgcgacggtcctaaaaataattttttttcagggaccatcactaaaaaaattaagtaactatttaaaaccgtcgggaaaaatttagtattcccgacggtttaaaatcgtagtaaacaaaataggcgacgttttttttttaaaaaaaatgcgaatttttaggagtttttaggagagccttatacctaatggtttaaaaccgtcgcctatactataggcgaatcatcgcctacactataggtgacggttttaaaccatcgggtataaagggcgcattaaaaaatcgtcacctacttctcgccatatttcccacgtgcccacctacttttttttttctatttcccacatg

SEQ ID NO: 129662 - DNA, 618 bp, Cannabis sativa
attagataattttaaaattaatttagaaaaatacacttagtttaatgaaataaattctagataattaatttctggtaaactaatttgtatttttatgatatttaattaaagaagaaaattaatattaagttgaatttttctagatacttaattgatttaatttctttaatagaaaaatatatttaagttgaaaatttattaattttagatcaacttaaattagaatattttttttgaatattaaagtaattaagttgaaacccattggaactctctatggatttcggtcaaagggttttaataaagctctttttatcttttttttgatccatattaattctaaacgtaaccctaaacctacactataattataatcttatagctcttaacctaataacactttgactctccttttgtcaaaaaaatagaaatcaaataagagcttatattttagcaattttcaaaaatactctcttttgttcatcgaattttgagtgcttgagtgttgagtatttgcccacatattttaaggtaatacttaggatagtgtgaaagtctgtgtaatcttttccattctgagttcttgatcacactctgtaacagaaaggatcaagagta

SEQ ID NO: 129663 - DNA, 854 bp, Cannabis sativa
  modified_base (799)..(800): a, c, t, g, unknown or other
ttgtgtgccataaaaagtactaatttttatagataactacaaaaacttttctatgtatgttgggtctacattagaccattcatttaaaaaaattaaaaaaaaaatatatattttcacacctaaatttttattattatgctaaaaacaaatactttgacaatcccttcaattaataaaagtaaaattttattttaaaaaaattacaacataaatactatatttttttggtttgttactaatgtttactcaatttttaaaattagtaccaaatatttttttttaaaaaaaaaaaaaatagaaattcattcaatttttcaaataccaaaaaagttacaaaaaaaaaaaacattttttattaagaaaagaaagtgtattgaacaagatcttcctattccacaaagccctaattttatttttcaaagctataagttaaacaagatcctaatatatattatttataattaaaattattgacgtaatttttcataaactcattctaacaagataataagtagagaattaaagaatgagaatcaaatttatagtggttccacctaagaagcacactttcacttagttacctttataatgttttaattgaacttaatttaaatttaaatatagggttaaaactattttgaaccatgcatttaataagagttgtcgatttgactatttgttttgttaaataataaaatgaaccttgtaattttttaaaagaggagtgttaattacaacctttatgtccgaaatcacatatcaaaatattttttttcaattttttttcatagcggtattnnttatagttacagtattatccttgtaaatttttaaaaatttccgaatagtttaca

SEQ ID NO: 129664 - DNA, 759 bp, Cannabis sativa
catgttcttatatatggctcaattctttaccatttatcccatgtgggacattgtccacaatagccacaaatatgttttcacggttgtattaaattttcctaaaaaatccttgatttgctaacgttcgactcatcgccagcgaagtcataagtgatcattcgaccctacaacaaagtgcagaaagtaacattgggggaagcaacgcggtaagtggataggaaagtcatgggaattcgaattagaaatttggatggcccaaacaattgctgtggacggtcaagaagtgagagagagaaaaggatgttggattaattaattgaggtgctagtatatattaattagttaatttagtaaattgttatttaattctaaactattattaaaaattacaattataatctattacaattcaaatattagctattactaaggctcttttcatttttgcatttttaaactttttttgcaaaaataagtttatattgagaactaaccataattagattttattttgcaaaatacctatttaggctttcatctctaccttcaaccttcaacgtatatcttatactcaaccagaaaaagtaaacgaaacagaagccggagaaaacctccattaataccgactccggagttgcgccggtcgatccactcgcccccaaatcatcgcctatcctgaagaaaaaagaagaaaacgaaacagagctccgttacaatcatgtcgaagttgtcggtgcttagctctccgatccgtcccca

SEQ ID NO: 129665 - DNA, 539 bp, Cannabis sativa
tgtttaatatttttatttattttacaatcttagttttagttatcaatatataaggctgttttttatttatacatttgttaagtaatttttttatttatttatacggttagatcaaatttaatgcacaaatataattttttttttttattgaattatacgtgttatcagagaaatttaaataacaccaaaaaaaagggtaagtattctagttagacaagaacacttactagtagttatgcgaatactcacttaattctgtgagtactcaaattttaggctatgaaatagacaaaatataaacatataaaggagacaacaaaattatagcggttcaatcagagtttagtctgtttagtaaacttttctcagcttaatttattagatttggatcacccctttatatagaaagcagatgactgttgagattatacaattggtcaggcaagactgttattataataattacacaatttaattaatagaaacgtttaaagaataaatataagaacaacttaattcgttcttgtcttaattgcagc

SEQ ID NO: 129666 - DNA, 1111 bp, Cannabis sativa
atttataaacaattaaatatttcacaaaataacctattttttgtatttgaaaatattatggttagaatatctataaaaaatatctaagttaattttaaagttattaattatttaattatcctataagattattttaatataatatttcaaattaaaaagataatgctatcatttaatttacaatatgcccaatattaaaatatctaattttagaattaaataatatataaatattaaggaaattaataattttttaaaatctgatcataattaaaaataaaataatcaatttttaaatttaaacctcaaaatatcaaagaattaataataatctattaaaaaactaaatattattaattttgaaaactttatatttaagtttaaatatttaaattagtattttattttgatattaaaggttttgaagagaaaaaatgaaaattgggtgaaaaaatcacccaaaaatcaatttttgtgttaaaaatgcacttgctgtcgtgaaggtggctgctgacagcctctcacgcgcgcgcacgaggggggatgtagcctccttgaccgagttttctcgaccatttgcagcatctacgtgcgcgtcccttgaagtccaaacgagactgatcgtgcatttagacaaaaagttgtctgatccgcgcgcggatcaccttgtccaagcgcctgcacgcatggtcctcgaccatatgcacccgaaatttcaatcctatctctctcattttttatcggaattaagttccgtaaaaacgaaagttgcttaatttttcacaagaactcgaaaataaatttatttttaaaatgaaaataaaattattttcatggaaaaattttgtaatttacatacattcatcaaataacacataaaccaacacgaacacatccaaatcaacacaataaacatatatatatatatatcgtttaaatccatatttcatgaaagtaaatcattacgatggctctgagggcagtggttacaaatattttaccaggatctagatttactaacaagtatgttgttgaattaacatactaaatatgaatatctctaagacaataaaattaaacacataagggattagaaaaccttacattgatt

SEQ ID NO: 129667 - DNA, 545 bp, Cannabis sativa
aatctttgtgctcaaattattgatatcaaataaaattaaaaaattaaagtcgtatttgtagatgctagtcgtatttgttataattttttctttttctttgtaaatacttcaaaagcatatgaaaggaaattaagagtaagaggttaaatattttttaaaaagtaagaaacaaaccattattaaagtattttcttcaaaatataaagaaaaaccttaagagtttaatagctactattatcatgtactatacgtaaagtagaaatattattgacgctgaaaagtggttaacatcagcttgctagattggcaagatgaataatgaatgtaagtatataatttagagagacacacaaaatttataatagttcactcccaatgtcgctattgtaatgaccgctttagtaatttggattagtaaagacaattagcactaatttatgatatttttataattatttataaattaaattatttgtgggttcccatttttagaaatgggcattagagttataatttctcaattccggagattttattaaactcta

SEQ ID NO: 129668 - DNA, 505 bp, Cannabis sativa
tttatgtactaagtttatttttgtgagtttagtttttgttccatatatgttaatgtagtgactgattctcttgccaattttactttaaaaattactaataataaaatctgatggcttgactacatatcacgtaaactctatcttgggtgatactatttattaatgaatctcttagccctcgaccactttaagagattagttattcgatcaaaataataaaaaaaagttattcatgggatgataataaattattttaaaatgcaatcaaatgaaaattgattttttttcaatttttttcattaaatcttctacatgcttaagatttaaagtttttcctccaaaatttttggtccgcatcaatctatctttttctatatatttaggtaaagaatagaaaccccattactttggctaagtgggttttctgcgattttgggaggtgagtctcaatgtactcaccaaaattctatcattttaatgaattttgagttatttagaaaaaaaa

SEQ ID NO: 129669 - DNA, 698 bp, Cannabis sativa
attattgatcactattattagtgaaaaacctttctaattaattacaagtttaacctataattaatcacattgcaattaaaatattaatttttacatatatatatattttttttttgaaagaacctcggttcaaatctcagtgcgttatattggaaattaaaatattttaataaacaataaagttatatggaattattgatgggcagtagtagtttaaatcatagcctacgtagctaatttaattaatatgtgtaataaagttggaattaaatgtttccaatatttagttttgaacttagattcatcaaggtcatcattcatgagagacttaattgcctaataaaacctcaaagggactaagcatgagtggcctagatccttttaattatatttaggggtgttactgttaatttttttaaaaaaatttattaattaattattgtacctaaaaataccgtgctaaattttcaaaaaaaaaaaaattatgacattatttattataattacaataatatttgtgtgaatttttaaaaaatttcgaataatttatattaattaaaaatagatttgaaatcttttgaactcacgccataaaataaaagagggaattatattatatactcactttactttacttgttttaatttttaccacttaggttatgtaaattatatgctagacttaaataaagagtgagg

SEQ ID NO: 129670 - DNA, 601 bp, Cannabis sativa
aaattaaaagtcacccataaatttctcaaaaaccaagaattttagttatataggcacactttatatagaatagatatatttgagaaaaatctcgccacataacctcttgagtaaatccggttagaaaaatttcagagggaaaaaagtgccaaatattaattaataatattcgactgcaaaattgtaacaaaacaattatggtagcatggacatcacacatactgatcatacaaagataacgctaatgagtgagccacactattagcaaacttaagccaataagaaaaccaaagaaagctaaacttattacaataatctacaatatccctcacaatataccctaaataagaatgatcattagtcttatttttaatagcattaacaacatttaagcagttagattcaatatcaacacgagcataaccaaggcaaacacacaatctaagactgggaaaattgccaatgcttcagcggttgggtcatggatattggagaacattgtccacgtagattaaatgtaaaagtattgagtcatatataaagaacatgggctactctactcattgccaattggttttgagtgaagtagcccatgttctta

SEQ ID NO: 129671 - DNA, 1781 bp, Cannabis sativa
gaattatatcaaacactttataggtacacaaattcaaaccacctttagtacacacattttatcacaaacaactctaaaaactaaatcacatatataaatctgtggaaagagaaaaaaaaacaacaataagtaaaaaattcaaagaacgaacaaactcaacctaaatactgtacatatattatatatataaatattgataactaaccaaaaatggagtagaaagccattttgtggtgattggatggaaaaatcaccaaggcgacggcgatggcgatggacggtaaataagatgttgttatgagccattcgtcgacaccaaccacgcaaagaagaggactgaaactcaacttcatctcagataaatcgcaggcagcaaaggttagggatggcagagtagagagaaggggcggtggaccgacaaacttgtgcgaggtcttggcttagggagaggagaaacgatggcgaacgaagatgatgaagtctcccgttctttgagggatttcttcccttctttgagggatttttttatttttatttctgaaaaaaaatattggggtgtactaaacaatacccttttggtaaataaaatgaggtgtgtttataaaaaataatatttaatggggtgtatttataatttttaggggtgtgaatataatctcccaactaataaggaaagcattttacatttataccctacaaagtaaaaacaaacataaataaaaaacaaaagtttttatttacgaaaataccggcctaaccacaaaaaatggaggaaactcttccttcttcgtgagccagccgaaacactccaatccaccaactctccactattttctttcaaaaaccaaggaaattaatcggctcaaatcaacatgtagatctcaaaaaaaaaaaaaaaaaaagcaatcaaatcccaaaaaatcaaaattcaaaaagggaatacaaaaaaaaaaaaaaaacagagagatcttgacctccattgttataaaaaatgtaaaaacaacctacaaacaaaaactgaaatcgtacaaggcagagaatttgaagagaatgagataagaaaaacttcaaatcttatcataattgaattagagaagaaattcaaggtacaaaaatttttaatgatcctcttcctaattttttttcttcataattgaatatattttttagattgaggaaatcagccaaataattaatgatatagaaatatagttgatctgaacaaataattaagaagggattacagctaaaaaaatactaatgcataaaattagaatctacaggtttttttaatctagaaacagttgtatatatgttgttttccagtaatgtaattgttgtttgggtataaatgatcaagaattgttgaattaaatcttattaaagattgtatgctagaaaatagttgttttgactgataaaaatagtcgtttagattaaaatgttatttgcaactatatattgatactaaaaacatttgtttataaggttttttattagattgaaatagttatttgcaacttttgtaattaaaaaaaaaatcataataaatataaaaatttcaggatatggaacctctgcaaattattttggtacagagcaatggccattgagatgacaataaaaactatgttgattatgaatcaagtggagaattactattaagagattgcacttttaatgaactagtgaaaataatgatgtaagaactccaatgcaactctgatacaacacaaatacaactgaaataccaattgaaagaaggatgtcaaccactacaa

SEQ ID NO: 129672 - DNA, 2035 bp, Cannabis sativa
  modified_base (1989)..(1991): a, c, t, g, unknown or other
ctctaagtccaagattatcaagcagatcttgtacctcaacttcactatcagtctgcacaaagtggaaaaacttttaaaattcaacaccataaatagcaataaaagacaaacaagggaactcgaagacaagaaaggagtatggattaaattacactaacagctagagaaatcaaggacaaatggtcaaattgtaaaaaaacattgacaagaaatatgtggtataattaaacacaatgtattactactactcgaagtgaacagatatacttgatggaaaatttaaagtatacatatgtaccctaatcgaagtgaacagatataaacatgaacaatgaattacataacgaaaacataattagctaggacataacaattagctcttgataattacaaccattattaactgtaaaaatgaaatcaacatatacttgcagtgtacataaataataaatgtactcaaaacatagaaagagagataagttatcaaattaagcgtctgaacatttgcaacagcttctattaaaaaacaaaaaagaaaaaaaagaaacatctgcaacagctttttcacaaggacaaatcagtaagttattctctcattcctttctttgtcccagtcccaatgaattcactctttggcaaatcaaagtagaagaagaaataacaaaacaaattgaaccaaagtcatcaatggaaaagctaaccaaagtagaagaagaaacaaagcaaaaccaatttagcaaagcaccaaatcatatgtaataacgatattgagtcgcctttagttacctccttattcacatcaggatgaaacttttacaacagacatagttacaaaaatagttgaggaagtaacataatcacacactgaaaagaagtgaggttatgttgtacagttcctactatcattattagaacatatttctatgaggtaaaactgttctctgcttttggatgttagacagtatttcatggccattaaagatattaagcatttatacattagtcaaagcaaataaatgaagattcaaattctcaaatgcaacaaaatctctggaacaaaaatattagaagtggaaaactcaatcccattattagttttgtaaagataaacttgatcaaatatctacatgctaaaaaaattgagagacaaggaagaaacaactataagaaggaaaagcttgaactttgtcatgaaagtctttaacttccatttcaaaaatctaaactaaaaagatattcaattttgaattgtaataccaatgacaacaaacaaagctcaatattcttgatatgtgtaaataagcaacaagaaaaattggacaagggtcattggagactttcattgaacatacggtaggcaattacaaaaaacaaaatgtagagttcgcaaacatcttttaacagatcataaaatgaatcgtatcaattttctgctttcgtaaatcccataatttagaaattttggtaaacaaaaacatataaaaaaatgaaaaacacaaggatcattacaatttcaccaagattgggaatataacaccatttgaaatgtacccaaatgcaaatttagtcaaaatttgggattataatttagaaaacgaaactttgcacaaaaccaacgtacctatgttaacaaaaataggtacgacacaaggaagatttcgcaggattttgcaactgacacaaggaaaatcgtaaataaataacgacaatcaaacaataaaggtcgcagcaaccataaaattgaaatcgtatgtcacctgggctttagagaaaaagaacagtggtgagaaatgactaatgggtcctactccttcaccttggcatagcagacatcggagtggtcaaactcgaaacactaaagccagggcgagctagtgagggcgatcgtttgaagttcgatcgaggtacaatccgcactagagtggaggctgtttggaatttggattttctctagaaaatgaggagaagaaaatgagatttggtgaaatnnngatttaatttagggtagattcaaatttctttttttttaaaaaaa

SEQ ID NO: 129673 - DNA, 879 bp, Cannabis sativa
gtaacagtaacaaccgaccttgtctccccaccagttgtagattgtgacatcacagtccactccacacccatctcggtcttcgtcattccaacatctccctgggtgttcgaatcctaggtctgcacccactgacccatctcagcacacgactttgggtaagattcctctgttggatttttctttccccatgaggcctcctattctgggccatgactatcttaccaaggcgggtgagtctgctgctaccttgaaaaggaaccatgagtaggagcaagtgagttttcaaaagcaggctacccgattgtcttccatcaagacagctgagattgcgaaggggattcgccaaccttcctcacttggtccagtgtttgatattactgcggtgagccaaaccttggtgcctaaggtgggaaagccattgcttcttatgttgcggagatgttggataacatgggtctcagcgtgagcgagctcacgtccaaaaaatgggttgtaagtagtagtgttgacccaatacacactatcggtggccaccaaacaacaggcagcaggggtaagtcttagtcctctaagaagttcttcctcttgataaaatctttaattaatgaaggttgtatgactattttctattgttttcctttttagattgctttgttcgcggagaggactgccaaagaagtgggtaatatgaccatcgaattgagcccacgtcgcgccaaagtccaattcttgacaattgaaaatgggaccttacgcacagaaaatgagcaagtcaagagccaggctgccttagacatccaaaaggcccaggaagactgtgatgccgagctggtggttaaggagaaggaaatagatgttgggttgtatgccctaaataaa

SEQ ID NO: 129674 - DNA, 992 bp, Cannabis sativa
tatatatataaattaattatttatcataaacggttcggtccggtttaactgttaattatttattacgaaccgcaaccgaaccattacgcggtaaacgttttgaattaaccagaccaccaaaaatggtttccccagttatggtttatagtggttcaaattatcgcggtccgaatttaaactacggttttctggctttgatgaacagccttaatgctggcatacgagagagaatgagcagctcgagtactggtataatatggtgacttgaagtgacaatggaagggtggttttcgctcttgctaagcgacgtgatgaggtttgttcgctgttagtggcgaaattgaaggccattaaggatggattgcatgtgggtttgaatagaagctacacaaatttggtgttgaatcagattgcagataagctgaccaacttgtatacaatacggatatgagttgtagggagtatgatggattgttgttggacattaggagcttactgcaatgtcctactgtcacaggactatcttttatgtatagagaatgtaatgaggtagctcatgtattagccaattatattttggaatgccaaacttgtactatgtggattggggttatactcccttgtgctcaacttgctattgagaaagacttgccatttttttttgtaacaattaactgcattaatgaagttagttttaaaaaaaaaaaaagtaatatccattaatataagtttattattataatttaagaaatttaaatatttaattaaattactatatttaaatattaattttagttattgatattaaatattttccctaattaatgccactaaatgttgtcacatttacaaatagataggagcaactttcatacttttagggtgactttggggtaatttcttttgttttgttgctcctaaaaagaagtattaagggtaaaatattaggagtgacacattaggggggcgacaagtctctccttattacactt

SEQ ID NO: 129675 - DNA, 1129 bp, Cannabis sativa
  modified_base (894)..(898): a, c, t, g, unknown or other
aaaaactggttttcacccctgctggaaaatccgggtaaccggttttacaagcattgtaaaaccggttagccgattttacccagaaaaaccaaaaaactccaaaccctaaccaaatcgtttccaactcaaccaaactttctagacctgcatattataccccaataaaccatttccaagtaataaaacagttacccaagctcaaaatcgaaaaatcaccattaaagctctaagtttgagttctaaaactcaaagcttggttaaatctattaacagccactaatacatgcttaattcaacatatctacacataattctatctcagaaaataacaacaatcaataacagcaaccacaactccttaaaactaaaatcatgcaaagattcacaacttaaaaacttaagaaactaaggaggaagttgcttagagacttaccttatcttggattcacttaaggctgctggaaattaacaagaattgatgaacaaacatcttaacccaagctggtctaggagggttcgaatgagaaagcttgaaagagagagaagatgccttttcttttttcaatcttatttttttttttgagtaaatgaaatgtaacacttgttttatttaatgtactttcagcccattaacatataaatcagattactaattaaaatcaagtccactaaatgacaaaaacctatggggaaaaatgaccattttgcccctcccacacaaaaagggcataaaatggcactaagggatattttgggaaattctaaaatcccgactattcccaacattcccaatgtctaaattattgtcccgctatactaaaaaattctaagatgtgattctaatagccatagaccgcgttttaatgttaccgggcacaaaatatgcaaaattannnnntttctatatgtgacataaaaatacattctgaattcacataaattatcctaaataaataattcaatactaataaataattttcataatcaaaccctaattatctgctaatttccaaattaagactaggcagtctttacagtacaactctatgtatactattactgttatcaatgtaatctaataggcataaacaacatgtacgctaaacatgtaataacatatgcataacat

SEQ ID NO: 129676 - DNA, 1339 bp, Cannabis sativa
catctttccaacttccaatcatagagctcaaagtgtcgacctttcattgtttcacatcaatatctgattccaaaaacctctctggaatgaactcattgggcttgttccccatacatgagctctttgactatggcttgtaagtaaggaagccttgttatgtctgaatctttcgcttggtttcccttatcaatgacatgtttaagctcaggatgtggatgaagataagctcatatttctgttattgtgtagctgttttgtgtaatctgttatgttctgtttcagtatttcttgtacaatcttcaactaatgtctcctctccttaaataattataaccatcgtctttgagaatcacatttgatgggattttagactatcataatcaaactcataccagtaaaacatgttcttctgaatttttataaagaatctgatcttgtcttgtaagaattgagaagagcatccaaagtgtcattatcattttcttggatgagagtattgtgaaaagccatgctagtccttatgccttgtggatcaaacatcttaacaaccgggaaataatcagccaagttaggcttagcatctttcatcatattccaaacaatttctttaagctctctggccatgtcagctgagctggattcaatgaagttttaaaactagctgtgccaatatccactgcctccccttcttcagccattaacagaaaacaagtgagagttgcataattttctaaggtttctccaactaggagagactggcatgctcgtagtgagtcctgaagggttcgattggagaagaaatggtcgcgtgtttggagaatttctttggccaaatctgctgaagaaaccatagctgtggttattctgcctagttttaaactcatgatggggccatgattatgagaaagattggctaatggttgatggggtttgtcaccaagtttcatgaggttccctactatgggcaagggtcttggccctggtggaagatgctgctgctgagttttgttgcatgaaaataataagttgaaggccatcgttgatatccaaatgatgataatgggatgcagtaaataactcaacaaatcatgcgtaccagtctccatattctttaattttgagctttctatattaattgaggaaaaaagaaaacatctagcttgctactctgtgaaacattcaacacacgttctatcaaaatgtgtaaggttatataagagagaatttgggacatacaaattacaatctttaaagggtaaataacggcataattattcaaagttttatatttttaagcagtataaacttaatgttcatttttagcgacataagtactcaa

SEQ ID NO: 129677 - DNA, 1934 bp, Cannabis sativa
tctcaattaaagtacaaaaatattgaccgaggtttttagcaatcaaatatctaacgtaataaagagggcttagggataattagtgcaggtaatttttatgtggttcgggcattaatgagccgtagtccacgagtctctgttattcatgagtgggtatttcttatagagaatattttttgtgtcttttttccgatccccgaccaattttagtgaggggtatttatagcgatttgtgagaagaaaaaaaggggtaactggtcttcaagtgccaactatggccatgcacaagtttcccaaaagtacaaaatagggcatgcattacctacgtagtaggctgcttaggttttagatgagattagccttcatccctccttgattgatgtgattcttcataatagagctgtcactagctcccttgattattgtgtaatcgcccaaagccagtttacgacgtctgacacgtcctctatgggtattcccaaacgtttttctcatgccgcattaaatgcaaagtgactgttcacctccaactttactggtccggaggagtttattcatcctttacctcccggagaagaagtggagctatttgctcatgtccgggagcttacccttgaaccataattattggttctgaggatatttacttaagtcttttgttcatccccgggtgataggcctttacttgccacgtgtcccgcattatagctgccacgtatattgggaaaaacttaaggcaacatttaccctcaagtcttatttagtcgtagataaaagagacttgtacactaaatacaaacatatttttgatatggtgtaaaaaaaatattttccttaattaaatagttaaattatgcataaaatcactaagtttccttttattattgatatttttagttttacaacatttgaaaaaattaaaaaaataaattacaaaactaatctccatcgttgcaagagcatttttataattttgtaagattttcgtaagcctccaaattaatgaaatcaattttaattaattattcttaaataaattttttatttaaaacatcttataaatcctttaaaataattaaaataatttgaattaatttactcttaaagaacctatttatttaagataattctcgaacccctaaattaattaaaacaagtttaattaatttatccttaattaaatcttttatttaaaacaactttattaccatactaattttgtcctaaaataacaacatttattattttaattgagattaagacaacttttgtcttaatatagttatagatttgaatttgaatttcaaattcaaaattaaatttaaaaaaataaatatcccacaaaactatattattttggcttaattataaaaaaaaataataaaactatattattatttattattatataattaaaatatttatcaatttgaatatgaaattcacattaataattatgatatttatttggaatttaaatctaaataaatatcctaaagtaataattaattatctaccataaataatgagtttataaatttttagtgtatattatatccaatatataatatagtatatatatatacattatatatggtatatgttattctattttttgcactaggatgtgacaatgcatactggtaaaacgtgtctgctattctctagatttggctggagagatattccgaacagacctcagccatgcatatgtatggacaaagtctgtctgactgaacaggacaagggcagatgatccgggcagcaaacgaagtcatctctccgagtcgtgcatcaagacttaacaacttcaagagtgatatcgtgaagctcaagcacacaaataatccctacaatcataggatcgtatcaaaaggatatggaaagctgtctgaatccctcaatttatgtattctaaatatgtaatttatgtt

SEQ ID NO: 129678 - DNA, 819 bp, Cannabis sativa
tggtaaaataaattccaatatcagtttattccataacctgacatttacgtgtcactaccgcccgtacctaatacggtatcgctaacaggaagaaacctaacaacggttttaatctatgccataacctggcaatctcatatcattgtcgcccgtacctaatcaagtatcaccgataggtacattgcatcacctaatcaggtgagcccgtttatcacatccatagtatcatcatattgtcattgcctaatcagacaattgacaattacaaaacatgtcatgtcatgtggtacattaacttttcttaccttaagtgtcggttcaggtctgttggacgacctgcttagagaacgatcaataatcccaggcccatgtcataacaatagtcaaccaataagtatatatcccataaaacatcttaatagttacaaaggacaacctagggtttcctaccaaactttgtggtataaatatactgaaataaaacttatatttcagctttaagacatataccatattgtagagctcgtcgaaatctttgataaagtatatagaacgtctaaaatggatactcgagtgaaaagttatgataaaaatatgattcccaattttctgaaaaaaaaaaaacccagaaacgataaaccgattaggaaacagttaactacttccccacaaaccagttaaccagttccaccaactggtggaccagtttggcagtaacataggtcaaaaatcccaattttcgcagtcactgaaataccatagaaacctgtctaaatcactccaaacttcacagggcacacatgttgggttttatgccct

SEQ ID NO: 129679 - DNA, 642 bp, Cannabis sativa
tttcaaaaaaaaaaaaaaaccaattctcataacaattttcacatgatattggtattttaatttgataatcatgttctatatactgcactggttcattcaactatgataatttagtattgcatttctcttattttttttaaaaaaacaagtagtatttagtttttgatattaagaatattaaattttaaaataaactaaataaatgtaatgcatttgggcctcaacgtgtccatatttatgagttaacggaagtggtagtaatagtgtaagagaattgtaacattagatattgttgcctccaaaaataaacattaagtatttaagtgtataaaatctaaaacattaggtatttattcactaatttacccttttttgtttattgaatgtataaaagatgataattcggtaaatgtattctatttttagaaaaatattataggctaagtcaatagtacacttttgcaagattgttttggtaaattttttatctgtattggtattcaatgaaattttttagttcattttttcttcatgatcacttatggttgcagctaggggtgttcattggatcacatccaatgtttttaggcctatccaaatctgatccaatcatatattagatgttagattttaccatccgat

SEQ ID NO: 129680 - DNA, 1149 bp, Cannabis sativa
ttttttagtttttgtgaaataatccctaatacaatatattaggctgaaaagaaagagtgagctactgttaattggttaaacaattaatgtgttaattttggttactttttctttttaagcatattttaattaaagttttctatagtagtatagggttaagcatgcatttctataatggtaacaatgttgtttttggttacttaattcttagccattttcaacaccgaaaccaacttaattatataaaaactagaaataacacttattaattggttactcattagtaactcttcagtccctaccatgaaaatgcaacttctttttgtattaaatttagctcaaaaattgagttcatgttaaagtttttggcccaagttttataattgtacatcaatttattaggagtaaaatgaactttattttaatataaatgtggaaaaagttaacaaaaaagattcaatatttattgaaaaaatataattaatatattatatttaatatagggataattgcggcaaaaatccttaaaaatttagggttgatccccaacctcaaaaattaaagataataatctccaagatcacgtgttattttttattagcccaaataattatttaaataaaataaaatagtaaaatatattttaaaataaaaaattattttattttatttattttacaccatatttattgtagcaccatacttttcatttgccaattcatatattatgtatagaaaaagaaaaacataagaaagcctgctacaataaatcacataatcgatctttattatcgtaatagacaatttattgtaatagaaggtgctatatatcttgctagggcaaaacttatcgtcttatataaaagtgttaaattatttggattttctcctttttgataaaaaaaagtaaaagatatgatgagtgcttttaattacaatttcctaatcaatttttacactccaaatttttttcaattttttttttatggcagtatttattatacttacattatcattttaaaaaaataatagtttacagtacgaaaatagagtttcctgatattctagtttaacacgtgtgttcaaaaaactttaaatctatttttgacactataaactatttgaaatttttcaaaaatttacaagaat

SEQ ID NO: 129681 - DNA, 706 bp, Cannabis sativa
  modified_base (658)..(661): a, c, t, g, unknown or other
atttaatgtattttaaagttagttgttattgtaacaaaattaattagttgttttattttaatttaggtaaaactataaaactaatgtaggaaaaaaaatggggaaagaaaaatctgtattttttttttttatattccgaataaatatattttgaaatgattagttggccatcagagctctaacctagtctgaataaatgtattttaaaatgaagagtctaggaatggtaaaaaaaatctatttattcagattaggttagagctctgatggccaactgatctatgaaacatttagatacttatcaaatttcgaattagatccgttccaccccgcttaaatttttttttttcagatcgaatctaacccgatccaatttcaatatatatatatttttttaaaaaaaaattgaatctgaatcagtcaaaaagtgaaatccctaatctgagtctctatctcgaagagtcgaaggttccatctcaaacttcccattgtgagacgaatccataatctgagtctcgatctcgacaactctctctaactaatggtatgataatgaatcacttttgggtttcaatctaaattatgttatatattcgtggaagaccacaaagagtagaggtgttcattaaatagctgatccaatccaatccgcacgatnnnntccaatccaatccgcaaagtgcggatatctgcacttgtgcggatt

SEQ ID NO: 129682 - DNA, 741 bp, Cannabis sativa
catagtccatatatgatctgagtactgcaagtcagtcttggctaaggcaccgtccactaactcttcactacagtaaattaaggctttaggagcgacctatttagaggccacaaaaattcacttctaatagttggggtaatattaagacaactcgtctcgtccctatgaaaaggcctatctcaaaagaaattttaacgaggccccatgtagctgatcctattatatatatgtcatcggtaatgtagtagtgtctatagctccaccatcccaaggatcatatataaatatatataagaaatgctaaaatacttcagtggtgtctatcactattaatctttgtgttaatatcttagtggttcaattaacaatgctccctaataacaatgctcaaaatatatatattttagagagtatcgctaaccaatcgtaagacgacatgtttagaagtgctaagtactagtaatctctaataacaatgctcaaaatatatgtatatactattttaaactaattaaatagcttaataataattaatagacttactctgacgaagcaatcgtggtaatgcagccttaggagcttaggagccatggttgcatctgcttgaacctttgcccaagtaatatcttgtactgtttgctcaagattctcgcaactttccccataaaagttcatgtaaagccctcctaatccttttccttttcctcctcctcctcctcctacttctccttttcctcctcc

SEQ ID NO: 129683 - DNA, 674 bp, Cannabis sativa
aaaataaaatgaaaaaaaaaaaacaaagcatcttcacttctgtatgatgatattagaacatatcaaagctattgcaaatctaattagaggagcgcaatagcagcaaatcaaacacataaaaatattgaaattcaaattcaaaatattcaagacaactcaacagttgagtttgtggcttaaagatttaagactgtggcttctcccacttaaggagattcctttttacaactgctcttgagcaaagccaataaaaaatttcaatatgttatgaaaatagctatctctttttttttttgtcaaaaggttaaaaaacaagggagaatactattgatttcagcatacaagttgtaatgctgaaatcgtatatataggtacctataactataaaagtataagcaaatttcaggtggatccttaaataatttaagctcttgcccattttccatttattctctcatttctttatagagaaaacgttcatagaaaaaactgaaaggtgttgggaaagatgataaacttcaagcgcagtgaaataataaagaaacgaagcaaagcaatttacttaattcgataaaactagcaaacccacaaagagagatatatttcacttatcacttcaaaattacatatactctctatctcaatctctccacctaaatcccaatacactcttt

SEQ ID NO: 129684 - DNA, 2075 bp, Cannabis sativa
  modified_base (2009)..(2025): a, c, t, g, unknown or other
atataggctcctaaatcacatcgacaataatcacaaataagtgactctcaaaccactaccgggacttaggtttaaacaaaaaccctatctactacaaaataatatggcaataccctaaactagcagggagttaaccaacctgaaacctgaaactaacgtgaaacgataacctgaaattttcaagaatccctactgcaaaaaccggttaccaagttttacaggcccctgtaaaaccggttagccggttttccccagaaaaaccaaaaaatttcaaaccctaaccaaatcgtttccaaaccttaccaaaccttccagacctgcatattataccccaataaaccatgtccaagcaacaaaacaactatctaagctcagaattgaaaaacaccattaaaggtccaagattgagttctaaaactcaaaagttgattaaccctactaacaaccccttaattcatgctcaaatcaacataaaacaacataactaaacttcagaaaacaaaaccaaacactaacagcaaccacatagctcaatttctcaaaatcatgcaaaatccaaactttgaaacttaagaaaactaaagaaagagttgcgtaaagacttaccttgatttaaatcctcttagaactgctagaaatcacaacaattgatggacaaacaaggaacccttcctggtctagggggttcgaaaagagagagagagagagacttgagagataagttgatttttgattaacatttgatttttttacgtaaaatgagatataaattgtttgttttattaaaaataatctgtcaactaaacataaaaatcaaattattaaataaaacaaagtccactaaaggacaaaacacaactgggcaaaaagaccaaattgcccttgcccacactaaacaatcacaaaatcacttaggggtattttcgaaaattctaaaatctcgacaattctcgacattcccaatgtctaactatattgtcccgctatactaaaaaaaatactaggatgtgattctaatagccaaacaccgcgttcaaatgttgccggacagaaaacatgcaaaaattatgaaatttctatatatgacataaaaatgcattctgaattcaaataaatcaacataaataaataattaaatattttcataattaggccctaattatatgctaatttccaaattaaagctaagcagtttttacatggacctttcgggatgcagcccaatctacggggagttatcccgtgctaaacaactgataaattcgtgccatccatgagtgtgaattatcaactagtgcactcaacccctggacgtcgatgctggatctttttaggtgactaacatggactattccgtgttctacaattttttgatttgtagccaacttagccaatatgtcagcgaatgaatttgttccctcgtgatttgccttatattataacccttaaatccctatagtaactcacgcaacattaggacataggaagccattcactcgccttttgtctgatactcacgggagacctgattcaccactagctgggaatcactttaaatatccaccttgttagcgcctacttctttcgctagcttcaaccctactatcatagcttcctcttctacatcattgttcgaggcacggaacccaaaacgtagggcactttggagctggtgtccctatggagagattaaaattaagaaagctccaacccctttctcattggacacaccatcaacatagatcttccaagtgggtagcttagaaatgggctcttttgggaggtcgttgaagctttgtgcagtttgctacaaagtcagtgagggcctattattttattgacacctgtggctggtaatggatgtcaaattggctaagttccatagcccacttcagtaatttgccagacaattctggcttttacagtatttgtcgtggtcctggaagtatggtcgtagcttatgcaatgctattagtatacaaaaggttagtgttgaccgaggttttcgnnnnnnnnnnnnnnnnnattataataaagagctgtaagaaagtgagatgaagattttttacgtggtt

SEQ ID NO: 129685 - DNA, 503 bp, Cannabis sativa
ttagggcacaaaacccaaaaatatccccctcctcaacaaccacttcccaaatgataccgtccatgagatcttgtccctacctccctgtgacattaaccatagtgactcacttttttctagcagcacactacttctagtcactatactgtcaaaattgggtaccatcttgccaaatcccttaccaatattgccatgccctcttcttctagcattgatactgtcaattcttggtggaaatctctctgggtgcaatgcattccccctaagataaaatactttatttaccgactttgtcataacacccttcccactgttaaaaatctctttcataaaaaatgtctcccctttcccacttgtcctcgttgtaacatgcatcttgagtctatccaggatgctttgtttgactgtaagggtatcaagagggtgtggtcaggtacgctttttgtgacagtcagtagtcccgtgatccttaaggggaaataccgggtaagctgtgcaatccc

SEQ ID NO: 129686 - DNA, 986 bp, Cannabis sativa
gtgtgatatgtacgtgattgatccaaagaaaaagatccaatcttagttgcatcaggttatgtgaaacttgaaaaggcagacaaagaaggcaatattaccgtacatggagtaaaaaagaagtttgttgattttaaacgtgtctttgttgagaaggtggttgaaaaaaatatcattctctcatgccctatagagcatgaaggcttcgatacagttggtttagctgtgaataattttgtagcttggccaaagaacctaatcggcatacatccagatgatttagaaaaggtatgtcactttatttaaacttattttattttactataaacatctagtatttttaattaatgttatgtttgatgtagatgaaagaaaagaagaaggtttcgagagatcattcagctccactaactcagccactgatacacccaacagtgttggctataagcctgtgaacccttgtctattgcacagggcccatttaaataagggtccaattccttgccttcttttcatattggtttttttttatgaaataaaacagtatgaaaaaaaaaggaacaattattactttccactttttaagtgatgcataatctcgtaagcaatcatgatgttatccgagatcaactgaccttgcaaaaatacactttgagtatcagatatgatagacggcataacactcttaagtctattagcaaccactttgcgcacaatcttgtatagcacattgcataacgcaatgggtcttaaatctcccatatccataggttgcttctttttagggattaagacaaaaatggttttgttaaggtctataggaagagaaccattatgtaaaaactgcttaaccagattgatgacatcatccttaacaatcggccagcacttctgaaaaaaaaaacctgaggtcattccatcaggccctggggatttatccggatgcatttggaacaaagattttcgaacttcttcatctgaaaccggta

SEQ ID NO: 129687 - DNA, 903 bp, Cannabis sativa
ggtgtggccgtactctgtttcgtatatttccgtgtgcatgccttgtccattgatttctctcttgcacctctctctctcgccctcatttctctctcgcaccctcttctctctcgccctcatttctctcttgcacaccctctccttctcgcatggcatccaacgtgcatgctccaactcgcacggttatgtctcgtcaacccctgtttgcagatcatcacggggtcggtcttcgtggtgcttaaatacatcccgaaaatcatgtgccgatttttggtgttaacaactaatcttgagggttatttgggattaacacttgccccctaatctgtgttcttgtagactaaatttgtgagctttactcccatcttttagttctgtggctgcctcgttaggaaattattctttaaggtctttttgccatgatcccttgtgggggagcactgattatattccttttcatggtcagtgtttgtcacatggagagagtgttagcctcttgatctttctcgacctcttgtgtgagctattattttgtttgagggagctctttgtcgcttgggctttctcaatctctttctggtgtaatcttactttgaaggagtatagactctttgagcagtctcgacttcttattggttacttatcggatataagggagcttatggcccttaagttgcgcataactttttttaagttttaagattttattgagggagtttgtggtccttaggcgacgcttgacctcttacattgtattgtggtacttaaagtgcgtttttgttgtgctaaaagttagatatacgcaagtgcacgtagtcacaaacaagtaatataatgataagtaacgagtattgtctccacaaggactgtaaaaataaaatttctagtgcaaaaatcaattac

SEQ ID NO: 129688 - DNA, 760 bp, Cannabis sativa
ttcaaatgtcaaaaggttgaattggtcagatgagctctatccaggagaatttgatgatctgaaagtttgtaacttgtattctgaggaaacatccgggccagtccaaccgcgattggcggtctcacagtctgatgtctcaatttcacgtcgcgataatcgacagttgaatcataataatactatggaggtttaccttacaacatggcttgccgaggtgaacatatgttctcggagagtgaatggtatatttgctgaaattggagaggaaattcggttaaacattttgtaagctggtttggatgctgaaactgaaagaccaaaaatttggaggaataaagaagaggtatttttcacaccagtttttgcagtttggtacataagaaaggggagaattaggtaaaggttaaattgttgagtaggtccttgtaaatttattgactgagctgaattttgactatattgtaggtgtgacttgtgagtgacttagtgaagttggatatatttttgttcaaaaagacatggaatttttctatagaaaatcaaagcaattagtaaatatgtatatatttacgtagaggcatatgtcataataatttgatttgattttggcattgttgtgttcgttattttgatgtgcatgacatctgttggtggtgtcaaaagaaaaatgactattcgagtccctcctcagttacctaaataacaattgagtttttgcggttaaattctcttacttataattttatttattttttttttt

SEQ ID NO: 129689 - DNA, 605 bp, Cannabis sativa
  modified_base (534)..(558): a, c, t, g, unknown or other
tcaaattaaagaattgtatattgtcatttgttattttcaaattgctaattaaattctcagctatagcaggagcatgtaaaccatcattcaattttaaatattttttaggaatattagtaggaattgatttgtaaccaatttgagagattgcgatacatgatctattacctacgatgactttagctttgtcttttatagtcagtggattaattcatctggtttgagtcatttgttacatggtgagaagcatcactgtcgatgtcccaaccagctcttgcactttagttggtggaccctactaacagtgcttgagggggttctttttgaggattgtgattgctgttctgagagttatcattactagagttgtcttgatcatacctatagtagcacttgtaagctatgtggctaatctttccataaatttgacatgtggggcgattttcacgtcctttagtagatgatccacgacctccattcctaaaatttcatcgatatatttttgtttgtgcactacaaaaaactgctactttnnnnnnnnnnnnnnnnnnnnnnnnntaatttttttgtgactaaatgtggcttttagtcacaacaaaatgtta

SEQ ID NO: 129690 - DNA, 1626 bp, Cannabis sativa
  modified_base (1154)..(1155): a, c, t, g, unknown or other
ggttaaaatgtaagagattattgagatttagtcttaaacctctgtgatctgtgagtttgggttagatttaggttcgattggtcagatctctattttagagaagaatctagtttttcaagccaggtttgatgccacccgatgaaggtctaatggactctatgaatttgttaagtttcgaggttgaagacatggtggtctgatgggtttctgatagtttgtttaactttcatgctttttttcatggcccgattggaccaatatatggtctgatggggcccaatatatcttatatatttgtgctattgttgtaggcctgataagtctgatatatggcccgattgggacccggtatatcttatatatataatattggtgtaggcccgataagtctgatatgtggcctgatgggggcccgatgtatctatgtattatttctatttagtgtatgggacgatagggccccatggtggatgatgcttggtctgattattattcatgcaaagtaagtatgattattgatgatagtgggtcgatagttagtccgattgtttttgcatttcttcatttttgtatgtctgatacgggtctaatggaggtccgattttgtgtctgatgctttgctacagaattgttaacattcattttcttgtcttttttttttttttttgtagagacttccatagataataatttcagtcttggagcaatacacaggctgtgtcacttggcgcaaaggaagttattactacctgaagattaaggccaaatttaaggaatttgaatatgggatagggtgaaggaatcccatttcaaagagttcttcgagagagaactattacaattttcgagggcattgatctatcacttgatcttgcacaagatcaaatctgacaagccacacgaggtacacttttactttgcgaagaagaaatgcagattcggtagggtggagtttggtttagtgactgggttaaacttgttgtccatacctactgaataagaaattgaagagaaaggaagttcggaccggttgattatggagtatttcaacggtaatccttccatcagctttggctaactactaagagtttttgagagctgcacaaaaattgatgatgtctacaagtttgggatggccttatttgttatgggcnncctcactggtaaggaggagaagactgtcgttcctccttttgtcataagaatggttgaaaaccttccattcttctacgagtacccgtagggaaagatttcgtacaagttgatggaaacttataataaagatttcataaatgtgaaaaataggatgcataagaagattgaaaagggagttagtcagaaggaggcaaaatactcatcttacggtaatactgtagcgttgcagtattgggcatatgacgccatcctgaagctggacaacgagtatgcagtaaagatgtcgcatcgctttctgagaatggtcaactgggagagtaagccaaagacgaccactcggcacgcacgaaggtgatacgattgtttgctagaaatataagtttcttgcgctttacatttatttcatgttaatttccatctattaatatatttattttatttttcagttgacagtgtactccatgttatgtc

SEQ ID NO: 129691 - DNA, 1256 bp, Cannabis sativa
  modified_base (27)..(63): a, c, t, g, unknown or other
ttacttataatcgttttagaagttcannnnnnnnnnnnnnnnnnnnnnnnnnnnnnnnnnnnntaagatcctgataaaataattccaacagaagttccttccctcggcccagccccaacgtgggtcccttctactctgttaacgcttacgtggcgccattctcctcttctagcagcttgcacacaagttgccttcccattggctctctctcttcccctttctctcttctgctccagcacatggagcttcacccatcaatcaacattcttttcttatttactccaagtccatacccatacactcttgtacctgccaatcaaatgaagcataacatcaaaaacaaaaatcaaaaagtaacaatcaaccaaaaagttataatgagaaataataatatattctaatgatagtaataacgtgtggtatcttaaaccattacatctattattattattattctcattgttctcattattattttatttcttaacccttaatctatttatttattacattttttgaagaccctataaattggagctcattttttattattttggtgtgtaatttttatactagaaactatagcaaaaattcctctcatttttcttctcatatttctttctagaatttttatgggaatgatgagtataatggcataatctttcttggaaagttagggatgatttcatatgcaaagtgaggttattttgtatctttgatttacttgttgtaatattcattgagtaatgtaagtttttattccacttttatttttatgttcttcttccatatatactaatatacatgctattatatactaaatatatatatagacttagtcatgctttttctatatattttatttagtgattatagtaatggtagtattgctcatagctatttttatgcacatttttatttactttttgttaaatgatatataggtttagtcatgctttctctatgtctctaaaaattaataagagtaagattaatgttcatttccttcactatcaccaccatctccatctctatctctttgtcatttttttactaaaaatatataggattagtcatgctctttctatgtgttactatttagtaaaaatattgatgtttacttttatgcttaatcttttattgcattattgcttgatgtataatgtcatttctaggttctatataagattaaattatttcttttattttcaagaacttgtatactcaaaatataatgaactttaatgttacatcat

SEQ ID NO: 129692 - DNA, 537 bp, Cannabis sativa
ttgatgcagagaacctggttagaattattttacaggactaccaagaagctcaacaagtcacttctcaatctaacaccttggaagataagtctctggaagatgtgcacacaccaatcaacagctcttccagttgctctcttcagcagtcaggctacaagttgcaagtagatggtgccttcgatccccatcatttcaattctagtttaggagcttcaattgttaactgccacaaccagaaaattgcaggaatgtcaatctcaaagtggggagcttcctctcccatttatgttgaagcccattctctccttgctgctctcaattggtgtttggcgatctacattcctattgtttgcattgaatctgattgtttgcagcttgtaaccaagaccaacagtaattgaaaagataactcagctctatctagccttatccagttgatccacaagtccttgtctccttttcctaatgcacccttgctccccatcagggccggccataggtataggcgggctaggcccgtgcctagggcccacactt

SEQ ID NO: 129693 - DNA, 684 bp, Cannabis sativa
cagaagaaaaaaattgttggcatattataaaaatctctcattagggtcttacaataatttattgaagttataattataaaagggaaaaaaaacaatatattgaaattctatgaaattatttgtgttcaaacacaaaattatcatatactcaaaagttgctttgttgaaagtaaaatttttggaacttgaaatatggaatgaaccaaagtctaagtatgtaatatagtgaaatgctaagaacatggttcttaatattattgagggctcatatttttatttgtataattaaatattaatttttatatattttaatttaagtattattataaaaaattattcatcatttatttataagacgtcactttataataatgttagatattattaatacataataataacacttctcgggtttgactttttgtgcttcctatcaaaatgtgctcttatcaattaatacatattatttaaataaaataaaactatgtacaaatttttcaacaagaagaaattaataatacaatatttgaaagtattgaaaaatattgattcttctagtttcatttttgtagtttactttagtttggtcactaactaattattgatttcacttgttataatctttcataaatagtcatattataatgtttccaatttgtttgcttggttttttttttttttttt

SEQ ID NO: 129694 - DNA, 815 bp, Cannabis sativa
taattatatagcaattaattatctgtaaagtaataaataacaagagggttttacgaggttttgaaattaaatcttcatagtccacgggtccatcttattaaagacaaatgtatttgaatacaaaatacaatgatataatttagcaattgtatctcttttctctcaagattcgtcgtcccctttttctctgaattctgtccctatttatagatgcacagggtgacagttattcccttagaatccaatcatttgtaaccgctcatgaaacatgaacattccccacgttttattttgtgcacatgagataatattaaaaaaacttcctaatcattctttgtctttatctattgacggttatgttgactgttttagatggtttttgtcgtttacatgttatctttcttaaccatctttatacaaaatatcaagtattgagttacaatgcagctcgcagtctttctttgtcattgagaaatgtattagcaaggtggttacttcaacgcgtcaaaagtgaggtgagtaaatgttgaagttgttttcattccttaaacatactcacaagtttgtggatcaatgagttgcatgcttttactcacgagtatgtgggtcaataagctgcaagctctttgtttactcgttttgaacaactttcattatgtattatgtttatccaaagatgggcttgtttgtctcgctggtctcattaatcaatagttattactcatgcctcgttgttgcctatatggcggcgtgtaacaccctaactagcataggcgtgttagcatgatttttaacatactgtgcagctcgttgct

SEQ ID NO: 129695 - DNA, 1647 bp, Cannabis sativa
  modified_base (1561)..(1561): a, c, t, g, unknown or other
aaaaattacttttaattttttttcaaacggttctttttcttaattaatattttggactccaattcagcctaaactttgggaacttcggcctcgaccccacacaacccaatcccagacccgaacgtagatctacttaaataaaattaaaaaacaaaaaatgaagatgaaagttatgaacacaattttgtttttctttttaaattaaaaaagcaaaagtagttataaagtacatttttatttttaaaaacttaaattttacttttatttttataattaaaaaataattttttttttttaaaaataaaaactcagttcaatttataattgtgagtctatacaaaaattttaaaatatatattataactttttttgctgaatatttatatataaaattttagacaatatttttttaaataaaattcaaactcaaaacaaaacctaaaacattaattaattaatttgctttataatctactttaactttttgtttattttctgacctcttaattagtacttaatgtttttctttatagttaatttactgttagtggttttagtttagctagcctccccatgctataaaaataaatataatgttatgtgtaccgggtacgtatatatatgtgtatctaatttggtataagatcgaataaatgcatttaatggtgactgagtttctgcgcattggatctggaatcacccaaaaagtagtactgtttttattatatattattctatttttacaaattttaataattaatgtcaacattcaacaaacctaactaaatattgttgttgttgtcttgttcatttgtttcttgcttggcctcctttgctcctatcttttgtattaaaaaatcctaaatataggagaattaaaaggagaaaaaaaaaaaaaaatatatatatatacataaatataggacagatttaattgtaatcgtgacattccatgtatatatgtacattccactagattaaacttcttattatatgatttcaaaaaataaaaaaaaaatcttattatataaatttaagcaacttaatacgcaggtataggcctaaggtcccatcttacgagggttcgaaaaaaatatatatatttatatattataaatatatttttaccttactatatttcataaatttataactctgcgtaatggaatttctttgtaaatttaagttattacgaaatcaaactcataaccatatgtaaaatacaatagaccgattatcatcatgctacataaaattattattataagtgtatattaatatatattatgttatattacaatataatttcttaaattaagttatcataattttttttaggtcaaaaattaagtcattcgttctttcaaaaaaaaaaaaaaaaattaagtcattcgaatttttattaattttctcaagaaaaaaaattaaggccccataattttttatcgccttcatctttcattttctcaggcacaatcctaagtaaaacttaaatatataaccataccactaggttaaccaattaaaattactttagtctattttttttttttaaaaaaanaaaaaaaaaaaaaaaaactttagtcttaaaaaaaaaaaaaaaaaaaaaaaaaactagcatgaaggcagagtttaggagagagaaac

SEQ ID NO: 129696 - DNA, 975 bp, Cannabis sativa
  modified_base (940)..(942): a, c, t, g, unknown or other
taaccaaattaagttaggacattcatttcattcacacgcagtacagtgtaacttaataaaaactgaccatcatcatcatggtggagactgagagtattagcaataacataccaaaggaattagaacaagaagaaaatagtaataataataaaaaatggtagtgatgatctatccacatggcttccaaccacaagctctggcaatgggaagtggtggcattcggccttcaacagctgatggtcgaggttggagtgaacatgatcgtgtacatgatgatcacaggaggcaactgcaagcctatcaagacctttttcttcatgatcatgatgtttggctctatccacttcatcctatctcatcaccttcccaacttcaattccatcacaatcatcacatccttgagctactcaaccatgcattgcctggtcagcctctctcgccaaaggagtcgccccacatgtcacctatgttctatctaccactagattgggagatgtggcttttgcctttgcaggccataatgtggtgttggagatccaagcaaccatcacttccacctcggataaaccttccaagaggcccatgtggaaaggggttttagtcgcctatgcagtggtggccttgtgttgcttccattggttattgaattttcggtgatagcatggatggcaacatccttgtctctttggagaaaccttggtgacttgttttcatggccaacatgttttttgtgtttcatgtcattggtagttaccgggtacaattataattttctctatacaaacaaacaattcttatattatatattgtgtatatagattaactaacatttacttaagtctaattaggattttactctctaaactttaacatgtaccaaatcataccccctgaacttttctggccgttaaaaatccctcttgaactattgagattgttnnntttaaggacttttgtctaatttcactcaatttt

SEQ ID NO: 129697 - DNA, 858 bp, Cannabis sativa
aattgatgcatgttatcatgcatttattggatttgtgatattttggtgtgtatgtgttgcttagattatgtgtagtgcatctagactacttttgtgagattttagggttgtttcacatgttgaattttgggttttaagcttgaatttttgggttccctttgaaggtttgaaggcttagaaattcaagcttgaatcatgtgtaatgtgtagattatgttcatgctttgggtatgttgtgaaagtgattttgagctttgttttggcttagaattgttgtgtaaggtttgtgagatataaaatttgagtttatgaatggttttgttcgagttttggatatgttttggttgaggttcaaaaatataaaaaagttgtcatttttagaccttaaaaattagttttctaggttttttgaacctgtgactgaatttttggtcatcgcagcgaaaacttaggagagagccatcccatttttccaattttgttttggctatatcttttgacttgagactctattttggacgttctttacattgttgaaaagctcgtttcaagctctatatgtttatttgtaattagaatgcaaattatgtgatgatgtgaaattgaattttggggttaaccctatttgtgaaatctcaagaatgtgtaattaggattatcggcgcttgttcaggaatacccagagatttggaatctccacatacttgggataccaggtgagacagtagttagcacgtagagttaagcattgtgacgctcatgtttgatattatacttgtgattaagtgagaaatcgggattagggttattaccctaaagtgagcaattatacgatctaggattattactctagtgttt

SEQ ID NO: 129698 - DNA, 1871 bp, Cannabis sativa
caagcggctcggcctctgtgtcaaaccacataaagactcacaacagaaaggtaaacacatgcacctatctctctctatagtgtgtccatctacggataatggttaccaagacatggggcctcacctaaccagtccaatagtcaatatttaattatatttaccacataagtgggcttatttcatatgagaaaatcctaatagatacgggtcaaccagatccattagtcaaaaagcctataaataaggctctatatacccctccatgcaaagggttacaaaaaatttagcaaggcaagcttgtataaaaaaactaataaatactccatagccaatagcttaataataatgactcatgaactaaggcttattaacgccttaaccatgtaaaaatctcttcttattcattttttaaatacgttttctttagcttaatcttcgtttaattagtttttcaaaaactcagtgaataaaagcatttgcaagaatgggagattttagcacccctccaacaaaatcgccaccagtctgcccccttcgcagttcttcattctttgattcaaaactggagaacccatcatcgtaacctctttaggtttggccaaggattttgtttttagaatttggtcatttgacgaaggacccaatttcttcaaagcaatagcttgcttccccactacaaaaaaatcttacttttagtcacaacaaaacttgtgactaaaagtaaaaaaagttttgaataattataaattaccattcttatgttgtgactaaaatgttcgtgagtaaagatgtttgtcacaaaaatcacaatttattgtgactagatagatgtgcttaaagtcataatggttcacctaacaatacatttagtgaaagaggagaagttgtgtggacctgtgtaatcgagatggatgtaccaatttgaacgatacatgaaaatcttgaagtggtatatgaagaagaagtaggcccgagggttgtattgttgaatcatacatcgttgaatggacgattgaattctgttcagatctacttgtctgaggttaaaattgttggctcttgccctactcgggttgataatgaaagaagtagagggagtaggggtgtttttgtttgcggtgtgagtcgagctgattgtgacaaaacggatctgcttgttttgcaaaatattgacaaggtctaatcgtacattgagtaagtttaagttaacttttcacacttaacattacaaaatattcaattgaaactaaaatgtgaatgctttactggatgttcaagggaacattttaattggatcaagaccactaatccgactaagtcaaggaataaaaaatgggtacaagatgaacattatcgaaatttcagtacatgcatggttacataaaaaggttgtatgcatttattattttgttacatatcatattgatacacttgtacgatccctaattcacttgtgcatgttaggtatatgcgaaaatgtgtgaaaaccgaagcaacatatccaacacactattatacatattacgagatctttcgtgtgatgtacttaaataccaatcattctatataaatagtactcaattttatactcaagatcgtgaaaaatctaaaaaaacacaaaataactatgttatgatagctgctaagacttttcaaatatcaagtttaaaagacaaaaacactattgaatgtgatatgtccttttacggtataattcaaaaaaaattgagaattagattacagtagtttttgaatccctatttttctttgtgattaagttagaagtgataacggggttaaagacaatgaatttagattcaaattagtggacttgaatcaaataggccataagtctgataggtttataatgg

SEQ ID NO: 129699 - DNA, 1361 bp, Cannabis sativa
taatgaggatttgatcctttgaaaagattaggcataaagcaagtgtggcttggaatctgtggatcaaaattacaaacaatattaagacttgtacctactcgccatcacaatccttgttgcagcaactccttacccaaaacaatgcgtcgccaatttaatgatcgtgaagtgccaagactagtagtaagaaattggtgaccatttaaataatacatgtgacaaagaactttgctaaaaagggaattaggaaattctaataaccaccaagcttgcttagccaaaagagcttggttaaattgtatgaagttctaaaaccgaaaccaccttaaacttttgttttgcaaagaaaattccaatttttacaatgaattgattactcgaagttgttgagccccactgaaattcgggcaccatactctttatttgtcgacattaagtaattagcaatctgaaacaatatatattataggttgtaatggcctatagtatcgtctttaaaagaacatccttatctttaatggaaaataattgttctttccaaagagttgagtagcttccaactttatcagtaattccaccaaagagttccatcttatcacgactagcaattgagggtaagcctaagtagcactcatggcatggttaaattggaattctgaaagtatgtccgaaaaaatgttgatcttgatccctaaaattagacgagaaggagagaacacatttgttaacctaaaaactttccctggtgacatggacattaatatttgacatgtgtaaagaaagataacatctcggagttgagtagtcctgagtcatagcgatcgacctaagaggggtccctagccatgcgcctaggttgactatgggaactctagaatgggtgttcagattccgttaaattgttttcaactcactatctcttagtattctataccatatggagatatgaatcatccaagtccaagctataaaagctaaaaacatacgaaacaacaactcaaaaatcaacccgggaatgcctagggtttaacttggcgcccaagttgacaacataactacagtttcagttttcgggaccgtcttagtgaaaatgggtcaaactttgcattgggacatgagctagacataccacagacatgtatgaggcatcataatcaaattcagagaagtttcattttttagcacccggagccccggcatccagcccccaggttgacaattttccaacttgggccacttccaagcatcaaattgaaaatctgaatcgtgcatcttccttgtcttcatcaaaaatgaggaaacaagtgttttaggggaaaaaacagaccaacctaggggccaaaagtgttctatcatcttat

SEQ ID NO: 129700 - DNA, 1289 bp, Cannabis sativa
cgagttacttggagcttatttttgtaactctcttagagtgaattatgatgaagataactttagaattacttttgtggtgtgagacatgattttatagagcgctttaatagcttcaaaatacaagttgaatcacatcaattagatacaaactgaaagcaatttagatctcagtgcccaggttgacatccaacaccgagattgacatctgacgttaacctagacattatataagtataaaaacgtccaagggtgtcctttgagatgcttaagtgatagtttaacaccacttagtccatttataggttccagcgaagctagtcactagttctcaggatgttgctgttttgcggaaacaaaagactcgaaactgttaatttccgaatgagtcaatttgtcaaaaaattgaagttgtgaatttgattgttctaacttcatggatcattgtacttatgaaaatctagatagatggtcgaaacatcatcatattcaaataagcaaaacccaataaaccaggccatttgttgacctaggcgttgggccctttaaactgagcttttaggattctatttttgatactttcaagtcttttaaacttaaggacgaggtctcttcccttgtttttgaccatgccagattcaatggtcgcattggatttgacatttgagtaattgacggcagcgtctcaagttgattgttaacttgaacaatgggccctatttccagggactcgggtttgtggttttctccctgagtttacttgaatattcattatttttttatgacggtaacaatgccgagagcactttttgctgaactgaattggaaatagcccaggttgacaaaatgtcaaccttggcgttgggcccagccccaagtgtcaacttgggcgctgggtcccaattttgcctctttggaaatttcgttaggtccccgaaaataattgaatctcaatattttctaaagacaaagatgaagctcgaagaattcttaaaaaactccctttttgtggtctaggttggcaaattgtcaacttgggcgctgggctctgttctttacgctcaggaattgttatttttcctccgaaaggacctatttcctcgtttttgatgaagccggatttaaagcaaaagtcaaatctctaatcagacacttggaaggtgcctggattaatagattgtcaacctgggtgctgggtgctcggggctcaaagctaagggccctttgtgctcaaaaaatcaacttgctccgattctgattttgatgcctcaaatatgtctgtggtatgtcta

SEQ ID NO: 129701 - DNA, 566 bp, Cannabis sativa
gacggaggtgtgcagagcaaaacgaaaccagagtttaggtagtttagccaccaaaaattcagtttttgtggttaagtgttataaaccgtaaaattcaggttgtttttgcgccaatatcccttattattattattatatgcaagttaatgttgtcaacttgtcatgtttattccaattattccaatcaatactcataagtagtacggttgcttattttgaaaagcattcataattttcaaattaaatattaacatgaaaaatcaccatacaataaagtggggacatgcaaaattaaaaggctttaatcgatgtgacttttgaccaaagggagccaattaatttaaattttatggattttttttttttttaaataaattataggaaatgaattaacgtttatgcaatttaaatttgatagattagatgtgcttttatttggtggtcacacatatttattaaataattaagaaattaggcttttttctatgggtattttacaattttgtatacattattttaattaattacaaaatatgtgcaaaaaaacttattatcattttctcata

SEQ ID NO: 129702 - DNA, 689 bp, Cannabis sativa
caatcagtaacttttgcaaacatccaaaataatatttatcctattattttacatcaaaactttatactcaattaaaatagagaactatttttattgttattgctccaatcatgctctctactatagttagcatttaattattttaattatattttatagtttaaatttgtcaaatataaattaattttataaaataataaaatgtaatagtacttttgattaaaatattattaaaaaaattagcaaaaaggtaaggagctccctatatttagagagctccatactatattataaagagctattttttatggtttgagctcatttgttcaagtctcattctatattttaactaaagaatatatttagagagtatggttagagatgcacgagagttttagaatattttattattaaatatgaaatcaatttcattttatttcacgagtcaatgaaattaaaagattggtttcacactattggattgatatttataattatgaatattctaaatatgactagattttgatccaccaaatatttaatttttcaatatttgatttttagaattaattgttaaaatattctgataattaatattttatgggtgattgaaattaaatagtgttaaaccatcagtcatacttatatatttacatactagcaaaaactacgtgcgaggcacgtatact

SEQ ID NO: 129703 - DNA, 696 bp, Cannabis sativa
aggttcaggtttgggtctaatccaaatttgggatcgactctaggtctgggtttggggccagggtcggggttcaagtctggggtcggggtttgggttgaggtccagggtcagggtcagggtccaggtctgagtctggggtcggggtctaagtcagggtcgatgtccatgattcgagttcgagttggggtttgggcctggggttgaggtccaggtttgggtcttggtcgggatttgggaccggggctggggtcagggtcaaggcccgagtctaggtctagggtctagggttggggtcaaggcccgagtccaagtctagggctggggttcgggttgaggttggggtctgtgattcggtttcgggtctgagattgatttttgagttcaggtctgagttccatggtctaggttgggttgaagtccaaaatattgattaagaataaaaaattatttaaaaaaaatttaaaagtgatttttttttgttttcaaaattttgattttcaactaaaaaatcaaaaagtgaaaacatatttatagaacatgattttagaaatatttttacttttttaattttaaaaataaaaaactaattaaaaaatagggtaattagtaatttttcccctgaactttgacatgtactaaatcgcgcccccggaactttttggccattaaaaatttcccccgaactattgagattgt

SEQ ID NO: 129704 - DNA, 1229 bp, Cannabis sativa
aaatatagtgtttgcataagctatttactatatggaactgacttactactcaaaatatagctagtgagttgagatgaaattacaaggcttaccttgttcatcatgtgttttaataatcccaaaaaatggtttatttctttttctgtatagctagatattatacaaagagtaagaaaccaaagaatgagatcaagtttaggataagcacactaatagattttagtgtttgtgacctttgctagtagttagtgttttgtctctttgttaattaagtttgtattgtgcgaaacgcaacaatcaataatttacgattcagtttacagtactaacaaacacgcaatatgatcaagaaataatatactaagagatctcaagaattcaggataatgaattaagcagtaaaataaaaaagaacaacaccaggtttaatgagttcgagccatgtgcaatactctacatctcgattagaacagctgtagccatatttttattgatatcagtgtttacaagatttcaaaaatctttacaaacttctcagagactatgagaagaagtttctttctctagtttagactctaccttacactatcacgatttttactcaagcaaatctgatttaattctcacataggttaaaaagatttacaactatatatagatttgtattattgccaaagatatctcctaaattatcatggcacatttatactgcctttaatgatccagctcatcaacaacaataataattcacgcatcttgaaatattcgctttcagtatggacaattcagaagctaaacacacaagccttctaggtacgtacatcgcttccttctcggatggaccttcaagattgacagtaagctctctcgaagtacctccagattagtaacaagctatccggaagagacattccatacgtgatacaagcttatctagaagtacctttcgaattcaataagaccttctccacatggcaatctgaatccacactaagcttcaagtatctactctttagattcacagcttccaattaggtatgacaaaacacttgtaaccataacaaacaaatccccaccttggtttcaagttgaagtcgcttgataaatttttgtttaaaatgttgttgtcctctcagtcccttcaggctcagctgacttcgatcaactttaggcaatgctcaaacttactatttggcactaccttggttatcatatcagaaggattgtct

SEQ ID NO: 129705 - DNA, 1000 bp, Cannabis sativa
caactcatccatttgctcaaaattacattctcaagtaaattaaaaccttttcaaacttcatctaatccaacccaaactgaacaaccattaatctaagctaaaagaatctaaataatccttcaatatcaaagcttaaaacaaccctagactcaggttaaacatacagctttgaattctcaaagaaaatcacccatacattctataaacttaagaaattcaaagataaaagtctccaaatcttacctcaagactacaccacctctaaaccctgttaattcagccaaattaatgagaaagattcccttgttgttgctggtattcatggccacgaaagagaaaaagaaaatgagggataagcttaaggtgataatccttttatttccttctaattcccaccttttcctattttgtttattatgtttattgtatatatttttttaactaaataacctagtaataatcagccaccaaactacatatgacaaaaaaagtacatatttatcctcaaaatgtccattttgccccttatgcaaaccctaggggtattttggtatttttttctaacttatctactaaaccgataactcaaaactctaaactagtccgatataaaatccaattcaatttcatcttttattgtcatgacattgctgaccttcccgtcaagttccacaattgttaggctcgaatatatatatattattcgaattatggtatctacgatacccacatattttaacataatctccgtaattaataaattacgctttatttactcatatttacctaatcaactcataattagtttatgtaagattataatcctactctaatgcccacttaatcacatatttaataaaatatgaccaattaaaatataattatattttctgggatattacaacctacttcactacagatgaatatctaagatattcaaactccactaaataaagattttttaagttttagtgattatatttttctccaataaagatag

SEQ ID NO: 129706 - DNA, 511 bp, Cannabis sativa
ggtcaacagcttgacagcgagaaaagtagagggctcatctcgattctcatcttcaggcagttcagtgggttcagagaaagaatgaatttttgtttctacttcagtaaggtgaaggttggcagaaagtgtgtttgtaaggtcatccatagtacagaacaaaagtggtaagacaagagggaagattggaaagatttcggggaaaaatctaattggggaaaaagtagttgtacgacttgtgccaggtttggaatcaaactttccattttatagagacttaagttatggatcagtatctcatggataggcttcgcagaagggattaagttttccatgtcacgttgtgcaatgataatagctagtgcactagtgactcctattccaattctaggggttctggtatggatgtaggtaggggtgtacatcaaaccgctcaaaccgctcaaaccgcccgcaccgcaccacaccgcaaaaaaaatgcggtttgaaattcttcgcggtgcggttgcggttt

SEQ ID NO: 129707 - DNA, 1606 bp, Cannabis sativa
tctaaagccataaatatattttggccatcacatatcacttcaacaaatgatctgaagccgtacgggcagaagatgtcgctgattttataaagacccacgtaatttatcgatacaggattcctttaaaaattatctctaacaattattttaaatgtaaggcaatggtcaagttgatgaacaagtacaaattcaagcacaatttctcatctagttacaacccatcttcaaatggtcaagcagaagcatttaacaaagtgttatgcaaaatcatgaagaagacgacgacaaagaataaaagggattggcatgaacgcctcctagaagctttgtgggcttatagaaccactgtgaggaccgccactggttgcaataacttggtgtttgggtctgcgggagtgttacctttggaggttcaaatacctttattgagaattgctactcaactaacatacccagatgaaaatgtacaagcccgtctagccgagcttgaagcattagatgaaaagtgacttgctattcaacaaaagctcaaaatttaccaagctcaagtagctggagcattcaacaagaaagttaaattttgatctttttcggtttgagatctagtgcttactgtgaaaagaccaattgtcataactagatggatgaaacacaaatttgaggcaaaatgggaaggaccttatgttgttattaaggtcttcctcagaggggcatatgaacttttaaatttggaaggtcgacgcatttatccgcgtgttaatgagaagttcatcaaaaagttctacacttaaacaaaaaggtatttacccatggtgtagacagggcacttaaaaaaaagatgagcgtataatgaactacgtaaggcttgatcccactccgggtacgtaggcaatctagtttataattaggcccaaccacataaaataaaaattcgatctcctaaaaatatatatttataaaataaaaaaaaattgcaaagaactacgaacgacttggtcccttaaatgggtacgtaggcaatttgaacaaaattagatacaaccacaaaataaaaatatatatattctattcgtcctaacaaaggagtcaaaaatctaaaaggtctaaatgagaaaatactattagtcctcaaggctattaaaaaaaaaaaaaaagaacagaaagagagctaaccaaaactataagtaaaactaagaaagttttagaagcaaaatcataagatattcaatctatttggagaaataaagtcaaagcgccgagtcttctctggatttattcttcttgaatcttgagcgtcactttcgctctctccgcttcatggaatttttctacattagcttggtcctttaaccaacttatctcctcaacgagatgtcattgctcctccaaggaatcattgagactagaaagatctacctcaaatgatgcttttttggcttcgaacgtagctcgtcgttgttgtatggctagttctgctgcaataatctttgcttcctctgccttaaaatcttcaaaatcctttgtcttattagtgacagatatgtgttgggttttatgtcctaaataaaactcatttcaatatgatcagatttacttattaatatag

SEQ ID NO: 129708 - DNA, 1112 bp, Cannabis sativa
taagcaataaaaatatatacaagatgacaagttcattaaaaatatatttgagtttgcttaaaataagatcatttctaatgatcacgaggcataatcaatgatggcttgcagattgagggccgtgaagataagttgctcccgcgtaaagtaggttattaactacttagcttaagaggaaaatacgggcaatggaaatcactactaaactttatgcatgtgattgtttaaattgtggatgaaaggcaagcaaacatccacatattaaattttaaacttaatagtatgaggcattaaaaagaaaagttggccatccaacttcgcaaatatgtctttacaaaaaacaagtgccaccaggggcaaaccattgtcttagtcaaaaggccatttaccataaaagggaaaagggagataaataaaaaccaagtatgcatgctaggagacttggacagatcttcttcttcttcttcctcgacctcgccatcttcttcctccttccttgtgttctcgcatggagccaaagtttcctcttctttctcctccaagaagttggtgtccatattggggtttgccatccaggcccgatatacaatgcaaaaaccaaccctatcgcatcgttctccagtttgacttctttttcaacaagcttcttgtcaaattcattgtcttgggctttgatggtcttctaaacttcctcttttgcctttacaacttccttttttgccttcgcggcttcctcttttgctttctcaacttcttgcttaaggcgagtgtttcactattgagcgtcgtctcgttacttacttacaaccttgcattgggatagtgatttatggacctcgccctccaagtattcgagtcgcccagagagtcgtcggttggaagcaaaagaagtgaaagaagcctgaagaattggaaacagatgaatatgaaagaggtataaaaaaataataatataattataataataaggccaacttaccatgaagttatagcccaagctcctcgaaagcatctcctttggactccgaagattgagaaaatctgaatcagggggaaggagagtttgaagtttgcaccagcaagcaactccatacgcctgggaaaattcagat

SEQ ID NO: 129709 - DNA, 589 bp, Cannabis sativa
ttttcatacttataataatatgtagtaagtttatttataaaattaaatcatgatattacatatttaatgagtgataaagaatattaacaaatgatatcaagagccacttttgctttatgctttgagattttagggttcatattaagaaatttggaaattttctaaaaatctggaaaactaaagttttgattttctatttatatgatttggggttataattttgtaatttattgataactcaaattcagatttcaaaatggattatctatatttaagttattattttgtattcgaaacacaaagccttcttccaaggtttctatttatttctggaatcaatttattgattcattctgagatataaaggttttagactcaattttctgtttttattttccaagtactgcttttatttttcttttatatggccattgtaactcatcttggattatggtgtaatgtcaagtaaggtccatgctccgtttgctacatatatgttttatgtttggaattttgtaattgggctatttttggtgaagctttttttttgaaagctataataaagtaaaaggaaacttacaaaaatact

SEQ ID NO: 129710 - DNA, 542 bp, Cannabis sativa
  modified_base (501)..(507): a, c, t, g, unknown or other
ttttttttttttttttcaatcaccataaatcttttttaattgggtaattgatccacaattttaggaagatttgattgaatcttcatttacgtgaaaatgcaatcatatatggtagttttatttttgtggtcagtcaccataaagacactgaacaaaaacacaatccaaaagggtgttctcagggagtagtgtgagttataatattgtaatttttcaaattgcaagtgcactgagagaggtttataaatttgcaacaattataccgtaaaaatataatgtggtacagtataatttgattggtttaaactatcattattattaaatattataattaaaatttaaaattaatctaataaaattttaacaatataaaaacaaatcttattaaaactttaatatcataacatatatatatatgagtgcacttttaatgggtattgcccaataagtaaaattaaaaattttgaattttgatatttaatttttctatctaattaaaannnnnnntcatttttatatcatatgggctgagattgttctat

SEQ ID NO: 129711 - DNA, 553 bp, Cannabis sativa
aaaataattttaaaaaataaaaattaaaaaaaatttaattgcacttcaattgccttatgacttcttcaacaatcttacatcgctgttctcaagaaagctcctcgaggttggataaaaattccaactgtggctcgttgtttttacagaaccatcatcgatctgagcagaactcaagccattagttgtcctattgcgtgaagaatccgaattgaaactattgtctacagatcctagtgacagattgctgaaatccatttagagtcgaatgtcattcatggaactgccaaagttagctatggaagtcgaagaaaactccaataactgcggtgcttctggtgctatataaaattttttaaaatcagaaaaaataactggtgcttcctttttttctttttttcttttttttttccctttttattctttttctttctttttctttgttcactcagcctcagaccagatctaccaccatcgttcttcgcacgacaccaccaccacctccttcccaaatctccctcgaacataccacgccgatcgacgttgagccgagagt

SEQ ID NO: 129712 - DNA, 607 bp, Cannabis sativa
  modified_base (580)..(581): a, c, t, g, unknown or other
ttatttttgtgtatttgtgaaatactcccataattttatctatgctaaacaacttcctttcttgtacaagattaaatctatttttgagactctctttaatgctatatctatacaatttagattcatacatattttcttagttatacacaaattttagtttagccaaatgtcataaattagacatgctaacacatttttatgaacataatataatttttatgacacattctaattttgtttattatttttaaaattatatatgttttttttaacatatatatttttttaataaaaaaagaaatattaaaataacaaagtcgaccgttaacttaaaacagaaaaaaaaaataactccattagtgtatatacattagggttgtacaaaaaaaaatcgtaaaccgcccaaactgaataacccgtccaaaccgaaccgaaaaaactgataaaaattacaaactgaaataacccaaaaaaattacaaaccgcccaatcagttaattgggcgggttggacctcctgcccaattaaaccgaccaacccgattttgcacctttaatttttttttttttaactttttagnntttattatatataacataaatgatta

SEQ ID NO: 129713 - DNA, 700 bp, Cannabis sativa
aactcgacaggctgagtactctgtctagaagcagtaagtcttcaaataactcctctgctaattttgctaacaagaatggtcctggtggtcaatacagttccagtcaacaaaacaacagaggcagagggggttttaatggtggaaattgaggcaaatctggtggtggtagaggaagaggaggcagatccaatggtccaaagcccacttgtcaagtgtgtggaaaatatggacactcagctgcacattgttacaatcgttatgatgagttttacatgggttctgcacttgctggaaacaacatagatggaaacaaaaccaatcaaaatgctgctgcattcattgctacaccagaaatgcttgaagatggtgcttggtatgctgatagtgggcctagcaatcacattacatctgatgtgaacaatctgaaccagaagacaaagtacaatggtaaggatcttcttactgttggtaatggaaatcagttgccaattaaacatgttggttcaggttctttatccactaaaaatagcaatgttctggtgttacaagaaattttacatgttccagaaattactaaaaatcttgttagcatttcaagattaacaagtgataacaatgttattgttgaattctcatctgataattgttgtgtgaaggacaaagtaacaaagaagaaggtgcttcaagggactcttaagga

SEQ ID NO: 129714 - DNA, 673 bp, Cannabis sativa
  modified_base (629)..(634): a, c, t, g, unknown or other
tttattttttaatttaaaaaaaaatacaaaagtgtgttctgtaaattttattttcatttattgattttatttaagttaagtttgggttcgaagtcgggatcgggggccaatccgagtttggggtcggggccagagctcatccaggtttcaaggtctaggttggagtcagagttcaaaatattgattaagaaaaaaattgtttaaaaaaatttagaaagtaattttttttgccaaaattttttaattttgattctcaattaaaacattaaaaatgaaaacagttaacatgattttagaaaatatttttacatttctaattttaaatttaaaaaattgattaaaaagtgttactaaatgcacccttaaataaaaaagttatgataaaatactcattgtcatctttaaaaaattcatgtaatttgaaattacaaaaataacaaagtcataataaatatgaactaataattgtccaatcttaaaaaaaatattaaaaaagtcatatcactcattatcttcatcgttgatttgtttttcatatatgatcagtaattttatcatggataattagccatttcacaaatttgatctcttgaaatgctaaactcaacactatcattcaaagtttcgtnnnnnntttgtatagtagtatcttgtactttaagaatctcttcat

SEQ ID NO: 129715 - DNA, 636 bp, Cannabis sativa
ggaatcaaacttggatgggggaactaaaccatggacctaggccccagaacccagacccaaatcttaatttgggactcaaacctgaaccaagacctgacctggaccttggattctgaattcggacctagacccaaacccgaaaccggctttggaccaaaactaggacatgttcttatacacgaacccatactaggaccaaaaccgaacccaaaatgggactcaatcctgggacccaaactcagacccaaacctagacctgcacccagacccgaacttaacccaagaccaggatcagaacccaggagttagacccaaaactaaactcgaactcagatccagatcgaaacctggactcggacccgatcctagaccaaaactcaggaccctaacccacacccggagcccaatctggacctaaaacgagatccgaacccgattccaaactcagacccagaatcgaaccccgacccaaactcgaaccaaaactcgaactcggaatcgtaactggaactggaaccagacaaggacaaggactaggacccagacccgaagccaaacgtaaagaaaaacccagaccgagacccaaacccgaaccgcgactaggacccaaacccgaacctagaccgggacccaaac

SEQ ID NO: 129716 - DNA, 1334 bp, Cannabis sativa
acccctcatggtggagtgcctcttgaacagtaagaggtacaccaggtgtaggaggagatgaagcagcctgtgacacaaggacccgtggcttgaaaatgcctgctttgccacaggtaatcatagggtgttaagagatgagaggagcaggttgtgtcacgggtgatatatctcgaggaggtggatgttgaatgggtgaagttgcatgatcaggtggctgatgtgtagtagtgacagggctagcagtagctgaactaggtgattcttgggaaaacaaatctaaagtatgaaatggtacagcaaagataggtcaaccatgatcaaaagagggtgttacctgatcttgtgagatagaatcctgggaaggttatgctgcatgggactgagatgacattgtattgaatggtaaatcaatccacgagtgagggatagagagtgtcacttctttttctggctgataattattaaaaaaaccgtgttgacaaggaaactctttttcattaaaaatgacatgtcttgagatatatatgaccatgcgagctgagacacttgtaacctttatgaacatcactataccctaagtttacacacttagtggagtgatactgaaatttatgagtttgttaagttcgaaggcagggaaaacaagctgaactgaataccctcaacaacttataatcatgttgtttgagtacaaaacctcataggagttttgtgattaagaacagaggttggaagtctattagttaaatagacagcagtctgaaatgcatgagaccaatatttttgaggcattgctgcatgtgtaaggagtgtaagtcctgtttcaacaatgtggtgatgttttcgttcggctcgaccattttgagctaaagtatttgggcaggaatggtcaaacaatatgccattttgtgctactatacttgaaaaagcctgatattccccacgtgaatcacttctcagtgtttttattttcctcccaaattgagtttctaccatagctttgaactaaataaatgcttgcaatgcagctgatttatttttaagaaggtatagccatgtatacctgctatggtcatcgaggaagtgtatatagtatatgaaattagtgtgtgatgttatggggcaggcccccataaatcagtgtgcactaagtcaagtaaactagtagctttagacaaagaattctgaaaaggtagtgcatgcgatttaccatattgacaagcaccacaaaagtgttgagtttcattcaaaggaaattttacatttgacattctaaggacttgatttaaaacattaacagatggatgtcctagacgcctatgccaaatgtcttt

SEQ ID NO: 129717 - DNA, 1303 bp, Cannabis sativa
taaaattgggtttaagtaaaagttatctcattttacaaattatgtatagttttagattaggatatcaattttagtccctaatatgcatataatttcaaatttccctttgcattttacatttgtgctttccatatacataatttttctgggccaaatatttgtgcccaacagcatcaataagtatctaataccatcacaaaagtgatcttttataattaattagtcattttttataataattattttactaaaatatgtagagaatctgatattaacttatactcatagtgttgtatcatgatattaatgttggacaccacatatttcgtgtcacctaactcgcgatatgtaatgtaaccattaaaaatgttttgcttgaaatagaagtaatccatattattattatctctgcccagttgttggtataaatgttaatgatatactttatagtttatacgtaaaagtggtctttgttagattcgttagttgagaagttgttacgctcagatttttttttttaggctcagattttttgaatgtgattaaatagcaaaacattaataatttttaatagtatgtgatattatgattatgtggatgtgtggacctataatacttttggggcagttgctatatatgtggtatcaatatgtagccacaattatataccattgttaattataaaaataattgctgcagaaaatagaaaggaacgaagttattgttaccgaattagaatttgagttgagtcgcggattaggtcgccgttctctttaagacgttcacggcactgcttaaatttgtgcaagtaaactatcagcctcgtcgtccccgaaataaaacagccaagtcaaacacactgtctcagaactttattgcacgatagagtaccgttgaaatactacacccaaaaatcgactactgctcaaaatataatatgtaatataatcgtatatatattatgtatgtttttcagagtgaaaaaaagatttttttcccctattgttaagacgcattatatagacaatgcactaaaggtagaacatgagatcgtgggaacgatggtaaaaatcaggaagcctctgtttaccaattaatcaataaataaataataatttaataaataaattttctccaaaaaatacggtgacaccacacccgccagcttgtcaagtttggtcggatagacggcagcagcgcgcgtgcatggtggtccagtgtgtgagtcctcacccatatcactactacaatatgggcctttagcttcctttttattttgtaaaaagggaagctaaagggtgtg

SEQ ID NO: 129718 - DNA, 1087 bp, Cannabis sativa
tttaatttccgcgcttattttaaaaccaatcccgtttagggaattagggtttcttaatcatattgggtagcgtgcctaaatcttagggcgttacatcgatcctcaggtcgcttagctcaaccaaactgtggctgacttgcaacgagagctgcgagactctctcaataagtaacatgaacgatttcaacacttgttcatgcaaaattggaagaacatcgaaagctaatgtgttaagcaggaacaacggagacttaacctgtcttagcggactagagaagcttattgctctaattgcggaactacttcccaaagaggttttttcgagttagtgagagagacacctctttaaccaactggtcacatgggaactagtatccaaagtgaaacccttaatgttcagaacaccactactacacctagtaactgagcaggcactaggcaaacatcgggtgtggaaacctcccaaaaagaggtaccttcgatcaagagttcgagaggactcaagctcgaggccccaaccaatgggccctccacttgatgttgaacaatcacgtaacaatgagagaaccaacaaggctcctccaccaagtcctcctcaacgttcttaagaaatcaggcctctagaccccgcaaggggaaaggtgtatgggtttatgccctgaaaagcctctaaagatatttctaattattaaataaagagttaaacatttgatatatatgtgaatgttaagttattaatatttattattgaataatttatgttaaatattagaaaattccttattcaaatatgaggttgtggcttgtagctgtacagagaactaagaccacttgctatgaataaaacagtcagcaacaaattaaagttatgaaatctttaattaatggctgctagtacagttcactgatactcgttctagggtgcaagtaattttggtttagattactaatgtagtgagacatctaagtaaaggtaatgaatataatgaagattatatatgacaaggaccgatatgaataaaattgtctttattaggggtgttcatctgatccaatccgcacattttggtcaaacaacatccaatcc

SEQ ID NO: 129719 - DNA, 1127 bp, Cannabis sativa
  modified_base (1096)..(1096): a, c, t, g, unknown or other
tgtgctctatttcaatggctaagaggtcaagcacctctcacatgaaattattggatttttattatttttgttgtttttttaagagtttggttttgggtttttattttctcttttatttaggggaacaaactgtggatgtggagaaattgaatgcacttgatctggccataactcggtctaagaagcatccaagcaagctgcaaaagtcaaattcgatggttgcatggggaaagcttcttttccagttctctttggtagattttggcctttgttttgtactattactcttgatttgtttctatttctaatctagcttttctgcatagtatgttcaaaatgaaattttttactatctaattaagtgaaaggaggattcctatttttttaattaattactagaggaaaattacccattgcccaacaattgccaagggaatcatacggtgatttcagtgatttttcttccatggtatgtgtatgcaaactttggtgtagccctcaaataatgtcaaaatttcattgactatatcaagaaaatgcaatctcaaattctgtgataaaattgctacttgtaaaacttttattacaattttgaacatgaaatgtgataggaaagactatgattttgtgaaatctaacctctcagtcgaaggctttgatgtagttgatgatataatttttttttctatgtataggtttgtgctacgtaatttgtacattttttttaactagaacaaagtatcttgttataatatttgcttcaacatgaatatttccaagatgagaggttatcttattgcaatacatgtcagctaaagcaccaatattgtagacgagaggcagataaggttggatgctttacccattattgaatagtaagctccataaccttttgtgaatgaaatacattatattatatttgattgaaaaaccaatttggtagattcggcccaaaaatccctaggagatttgttggtactacactaatctttgaaacccaagtagttgactttatttgtaataccctgaaattatgaaataaattagcaaaatcctaattagatagttatgaataattgagtaattatattattanatagttcaatatatgtgaattaatatgattt

SEQ ID NO: 129720 - DNA, 609 bp, Cannabis sativa
tattgataagtaaaatacccaatttctaccataatagccccatatacatgtatatatatatatttatatatattgtgaaacttaactgtccacaccattcaataacaaggtaaaagtataaactttacaacttacaaattatgtacaatctatataattttacttagtctgagtattcattaattggtttatgtgtttttttaagttgcttttaactatatcaaatttgaaccttaacaaaaaaattatgagaattagtggtacacttaattatgtaagatgaaatttgttaaaatacatgtcatgtggtcaattgaataaaatgataataatagtattgatatattttaaaaatattccatcatgtttttttttattatgttaataattaaaaatttaaaacttacacccttactatttaagatgaatatatatttttttttatgtcaatttatttattaaatatatattcttttgttcatcaagtgctaaagtaaaaaaaataaaaattattttcatacaattatatatggggaaatttgaaattccatgcttataatatttttaaatttttttcctaaatttataattattaaaattggtcatata

SEQ ID NO: 129721 - DNA, 580 bp, Cannabis sativa
aaagaaagagaattaaggttgatcatcaattagaaaaagtagtaaaaggaaagaaaagaaaaaaggatactaataatgaagatggtgatcagagtagtgaagatcatcatgattatggtgatcttcttgttctgtccttgggaacaggagctgaaaaggtggaagggaaatacaatgctgatatggttaataagtggactaaacttaattggatgcaaaatccattagtttttggtcatgattatccaataattgaaatcatgggtgatgcaaacgcagatatgattgatcactacaccacaatgtttttccataattatgaacaaaatttccttcgcattcaggtacttatattatatatatcattaatatagtttcaattaacatcttattaattattgtacaaaaatatattacttaataacttacaataatttgaaaggactcggagttgccaaaagatcttagtgcgatggataacggtgatattaccaatctgaaaaaattggaacaatatgccaaatgcttgctacatggcaagccaattactcgcctcgatctacctacctttaaacgcatt

SEQ ID NO: 129722 - DNA, 1014 bp, Cannabis sativa
tatcgtagtctcaattttaattttaatttgtttttatttttatttatgctattttactctaaacctcaaatacctattttctaacttttgtcactaatttttttagtaattaaataaacatagtcctagtgggatcgacccttacttacaattatactaaaataattagaagtattggaattaaaatattagtaaatttgttgtggcttacaacatgcattagtttgctttaaataccaacacaatattcaattcatgagatatctacttttatgaacatatttttcctttagttcatacttggggtcttcctactacttatgaatcttttttctctaatttgccttatatagcagctcctcaacattcgcatacagcaactcctcaacatcctcaaactaatttttctgatccttttcatgtttcttctcattttcatgatagatcaaggagacaagtttttaaaccatcatacctgaatgattatcactgctatttggccactaataacaattttgtttcatctcaggcttctctagttactactcatcctttatctcaagtttttgggtatcacatgccgtcccctacttttagagcaactgtcttagccatttcaagccattttgagccataattttttagtcaagctcagggaattcttgaataagacaatgcaatggacacagaaatagaggcacttgagaaaaaacagatctggattgttgtttctttgcttgaagatcaacatgtcattagttcaaaatgggtttacaagatcaaatttaatactggtgggcgtgtagaaaggtttaaagctaggctggttgcaaagggttataaccagtaggagggaattaattacacatacacctttgcgcaagtaactaatttagttactgttaaactagttttgtctcttacagcaatcaaaggttggcctctacaccagctggatgtcaacaatgcttttctacatggtgatctccttgaagatgtgtatatgtctctacc

SEQ ID NO: 129723 - DNA, 1014 bp, Cannabis sativa
  modified_base (899)..(910): a, c, t, g, unknown or other
attagatatgataatcttaccgtaatatctatttaattcaatatctcctagttgatcctagatcaaatgatcttaatcctcatatggttaggttcgatctcaagagtgttatgttctttgacactaggtgggttcatcatccacacgctgacgcactcgtgatagtcgtaaatataggaggagataatgtccaccaaattttagtggacaatgggagttcagttaatcttctcaatttccaagcttttacgcaaatgggattgtaagagaaggacttgaaacctgtaaccttgagtaactatgggttcactggagatacaatcacactgaaaggaatgatcaaactaccaattactctaggaaccacctttgtcactgccaagtgaattgccaattttgcagtaatcgaccagtatttcgcctacaacgcagtaataggtcacgcaatcttgaaagaaatgaagataataacctcaatttatcatcttaggatgaaattccctaccccccaggttgtgggatctgtgcaaggagtctaatcaaactcacgagagtgctataatacagcattgaagctcgtaaaaaagaagaaatcaataaatgttatatatttttttgaagcacctcctcctcgaagcgaagttcttagaatcgaggagatactccatgttgaaaagcccaatttggatttgaggatcctctattacaccaacactacacaagctgcagaagaaacaattaaggtaccaatcgatccttgcgatcataattaagttttaaaattgtttctaaactaacaattcaatggtgagaaaaaacatgtcacttttctcaaacaaaatctggatgttttcgcatggaagcattcggacgttggaattgttgggttttgtgccctnnnnnnnnnnnnttttaatataatcagatttactaagtaataaagatcaaaaatcattttatgttgcatggttgacatgatttattttatgattatatttaatgtataaatactat

SEQ ID NO: 129724 - DNA, 502 bp, Cannabis sativa
aaaacacagggtctaaaatgatatttacccttaattaaataaaaggtaaatattattttagattttgtattttttaaaaaaatatacaaaatagtacctcgagcttaatttttatcaaaataaatttaacattaacttgatatggatgtgtttatgacaagattgataatatttttttttgtatttattcgtactaaaaattgatttaggctgattatattaaaaaaaattactaaaattatgttgagagttgtattattttaaaaaatataaaatttaatttaccatttgataaaataaaaaggtctagttagtaattttagtaaaatattatgatatttaccctttaatgaatatttagtgtaaagatataatgctttatatttaagagtattgctatgaagtattaatatatctagcagggtcgatcctgagttgaaatagactataggtaaaataaaatttgttaggaccttattataaagataaatagtatttttaa

SEQ ID NO: 129725 - DNA, 1307 bp, Cannabis sativa
gtgataatggtagagattactcatagtaacaagtaactcccccaaatattacaaatgacaactaatgtatattgtcatatgttacatattattaatttattacaatattacatattatatatatcaacaatttaatattatatgttaacaatacggtaagtaaaaataaataagaaatgagacatgagaataataccgggccaatcttaagctaaggcaagctaaacctgcatctagggcccaaataaaaaatatatatatttttaataatttttaaaaatattatttatttttgtaataaggaccctttattttttttatttcctagggtacatttcaacttaatgctgatcttggaataatctatatggatgtttcattcaatataattgtaggaggtggactttataaacatataagttgttcatatataacgcggggtagtttggaccataattattaaattcaaccacaaaccccaccatactgtacgatttgacgaaaatgcaaactaaccacactctaaagaatttcatatcttattttttatgcgatatggtatggtatgggcagtttgataaaaactcctaccttaagctgcttcacctttaaaaaaacaaaaataataatttttgtagtagtgtaacaattaattaccaataatctattatgtataagaaaatagaaaatatatgaatgatagatcaccatcagatcatgaacatgaagcaacaattattttttattattattaactaaatgaaattatttagtaacaaaataattactaattaacccttaacccttagaactaaaactatgtattatacaaaaattaaatacacacaatttatataaaatatatatgtacacacacgtttatatatatataacacattttcaacttttctacgatcaccaaaactgaaacaccacaaagaggaagaaaatctcaacagccaccgcggaacaacccaccgccgctgccgccaccccggaggaatagaaataatagtaaggacaaggatactcatcatggtcatgccctcctcctcctccgctgccgccggccgccggagacggcggcgtcttatttccgaccaccactatcggcggtgaaatctgaacgggggttttggaagggggcggaggagacccagttgtgtaaatccacgccggcgaaggtggcggtgccgccttcttaggcggaggtgataaatccggctgcaacagcggtggcgagaatgtgaagtaagtgggtggaggggcgttgtttgccggttgaaccggcggggccggcggcggtg

SEQ ID NO: 129726 - DNA, 941 bp, Cannabis sativa
  modified_base (868)..(877): a, c, t, g, unknown or other
tttgtttaacaaaatagaagaaggtctccaatcagtaacttttgtaaaacacaagatccaaaatgatatttatcctaatatatattagttatttatataaaacaaaaaatttaatacaatactattgtgtaacaaaagtagtataatttaactcaatctatttatacatgtcataaataaccatgtattatattgaaataatacaagacaagacaatactttactatactatacaacacaatacaattaacatacaatacaatatggtttactaaacatcatcgaccttaatttttatgatcataggcagatctatgaagggaaaagggggacaattgacctccctcaattttgtgtgtgcatatttattatatatatatatatatcatattattttaattgacacacttcaagtattgattccaattattttatatgtcggaaaatattatagtgaatcttaaaaattttcaaaaattatgaatggttcatattgctgaatttacattaaactgtttttactctagtaagaaaaatgagtatgaaggtaacaaaataaattgtttaaactttattttttagtattataaaatattaaaaaaaattaaaaaagtacatgagtttcattattattacaatgcacaccatcatgaaaaaaaataaagattaaaatgtgtttacaatgtcctaacccgtaaggacaccacgtgtgtattttataatttagtttataataatttgggtgattactcaatggttacatttttattataaccatcatagttacatttttcttttacctaagagcaggttaccaatgggtaacacttccgtttttagaatcaattaattataattaattattttnnnnnnnnnnttaattgaatatttaacaagacctattttagcaattaataattataaataattttttatataaa

SEQ ID NO: 129727 - DNA, 1820 bp, Cannabis sativa
ggtgcaccacgtgtcttcctcctccacctccacctctacctcctcagcattaatgtcgttactggaaaacgacaataataatgtgttggaagagtgttgcattgcggtggaagaagagttggactatatttatcgtcgttgtaggacgaacgacaagtcggttgggcctctggagattcgagtagtgaagcccgggtcttttgaggcccttatggacctgttcattagccaaggtggttcaattaaccagtataagactcctaggtgcatcaactctgctaaggctctcaaccttcttgattctaatgtcttggcatccttttttagcccaagagatcctacctggattccataaactttaattgctgttgtcactctcgatcgatctatcacttactttttttttttttttttaatatatatgtatcgaatcatctaaaacttttagaatattttctaattaatatatcagcaatcttctttatttatattacatgtctcttaattaaacctttccttttagcgcccgtaatctcccttattattgtttttacatagtacaaaattgtaggaaacaaaagcaaaaggcgacccgctttatatatacgcaaatgtacgtgtaaagtggaaaactagtttaaattgaagaaaaatataataggtgtttttcaaatgacaaaccagacaaaagtgatggtatcacacatttcaacaatttttcttataaacttatttctcattattatactcacaaaagctaactccctcaaattgagaataggcattatccaccgaaaaatcacgatcatcatttacaaattaaagcatttatattaccatgtaaattagtaaattacattcttaatatatatattataagagacatcgaaccttgtacaaaaaactatagttggatacgtgtagtgaatacatatatactctactcatggttttgtgtattggtcggtgacacacacacaaagtacgaactgtaccttttgcggcccaaaagtatcttcattttcttttctttttatttctaatttaactttaattttatttataacatacatatacataacattcataattctgtctttcatgcatatacatgtacagtatatatatatatgatagtcactactataaatgatgatgatctatgcgaaatctaatagcttgacaagacatcgaaaaaaggggtacgatctagatatatagtggctgcaactttttatgtaaatgttgtgcatcatcatcatcatcatcatcactataattacttttgatattccaagtcagatttcaatgctcggatatgcctagtcatcttttttattagataatagcactaacaaggaaactgacactttcaagttacatatataatatgctctggctcaggatactacgaaagttactatatgtgcgcgcgcgctggcagggtatgaatcagatcagatcagttgatttgttctcactatttggacgactgaatacttattacttagatgcatgaagattctctaatattctctcagattatggctcaatatatctagcttttccccactattggacggatgcacaaacacatgtattatatatatttattatcatatgatcaagttgctttgatacatgatatattaccacatgcaacgaatgtaaaaatgttgagtatttgtaagaatatatgacttactccattaattactaattacttttgaaaaattcaaaattaagacttttatattattactccaaacaaattaccattaacctgcaatatacatttattaatatgtgtatatatatat

SEQ ID NO: 129728 - DNA, 967 bp, Cannabis sativa
aaaattaattaaaaatcatagaaaaattagaaatttaattttaagcacgttggaaaaaaaaaacgtcgaaaaacgacacccggaggtgtcgcacgcgcccccacgcgctgtccgtgcgagtgtactttgcggctgggagtctcctccttcctctagccgggtctgcaaacgggtcacgcgacctggtttgtggcagtcgagtctggactgttttccggccaaaaaagcgacgaaaactggggattttggatgggttttgttcgggattgaatttatagtccatttacactactaatttcgggtattaaaggaaaaatgtctagatcctttggtaaaatcaatccgaaaataaagaacactaaaaaaaataattgcaacaccaatctcggtcaaaatccaaaattaatgtgatgagttggatgtggttccatctcaaaactaattgataatgaaaagagtagcccattcctttttatatattctattatctttcaatacattagcaatgtgagactctctaacatcaccaaaatttaatccttaattcaaaatttcccaaattgttacttttcattttcaaagttattccaagatatgcattgttttttattttagtatgaactttactctttcccttccaacctttgatgtttttactctcatttttctttttaattaatctcatcatcaattcacaatgttcttaaattatggtaataactaaaactttataatatgttttgcatctttatttaattacttttattatggttgaaaaatgttaaaaggcatcacaatgtcacatgatttgttggcacacaattagtaatctaatcctacatattttgttgaataaataatataggatcatttataacgtactgaattaatctagtgtttagctaataacaacgctcatatataagacttttgagtgaaaatgtcttgtgaagctcagggcaggagt

SEQ ID NO: 129729 - DNA, 846 bp, Cannabis sativa
agtgttagaataatatgaatctaacggtatgaaacaatcctataaatatggaataatgaatattatatacattgaacatatatgtaaacaaaagattgagattatattgttaaatattttatatgaaatatataattgtatatatgaaaatgtggaataaatgaatatgtacacgatataattaaaggattgaaatatttttattcattaaatctttgagctttaatctcatacaagttttagatccgcaaaaagaaaaataaaaatgattagtgtgggtattcgggattctaagctctctactctatttagatagatttattgtgttttcacagaaagagtagagctcgggaactgagactctatatttatataggtgagatcttccatcaatgtatctctcacaattaattatcaaaatattttaacaattaattaaaaaattaaattgagaaatgaattaattggtgaatcgaccatatgtaaaatatttatatttattaaataattgatttagaatcaattgtaatgaataggaaatatacatacacccaaaaatcaattaaataattttatatttaatataaaagtattataatattcacccacttactcaatatttagattgcccatgtaagcccaatgttccttactacacaataaacatatgaattataccaataagtcctcattatatatcgagtattatctttcatgtattatgatatatttattacataatcatgtacttaatatggcaatgtacttaagcgaaaaacctcatgtttcttctagtcctctaataataattttctcaaattaaggtgcacataaatatgagaaaat

SEQ ID NO: 129730 - DNA, 614 bp, Cannabis sativa
cacctcagatcttgaatcagaaccaaccactatagcatctacaattaacgccactcccacccaggtcttgctatgtgaatatattttgtgtgtatatatatacgcgtatagagagagatcggaagaaagagagagagagagagagagagggtttttagttcctctttagatctggctcgttaagagtgtctgtgttaaattttagagagagagagagatagagaaacagaagggaaaagatagagaaagaaaaaaagagagggatgtagatgtaatttaatcatttttcgagggtacaatatataaaatataaattttactttatatttttatgagaaattttatttaacacctttaaaaatttttaaagacactctattttaataattttattttatataaattttatatttttaattgaactaagtttttgtaattttttttctttcaactcatatttaataaaaatatacatatcaattatataaaattttaaaaaaataaataaaaaataaatatacatagtttagaaaaaagaaattaaaataagtatataaattagagtaatttgcggcataaatatttaagtttaacttccaattgtaaataaatac

SEQ ID NO: 129731 - DNA, 808 bp, Cannabis sativa
taattgctccacaattcacattaaaattcaagcttaaagatatagaaataactctaaatcttaaagttatcaattgcgtagtcactttattcctggcttaaatatctcaagcatcgatatcttttccttacttatatttgtatgagtggacaagatacatgggaaacgaaggctacagatggctgcatggagctccccttggtgataggaggagctggtgcgtggagatccccttgatgagaggaggagttggtgcgtggagctccccttggtgagaggaaaagttggtgcatggatctcctcttgatgagaggaggagctagtgcgtggagctatagtgggggaaaatttaagtgtaagtggggatgtgatgtggggaaaaggacaagagaggtggggacctcctcttgtctctttttcttatctcaagaatcttgaattgttcatccccttattggttatccataagaatacttgcttattggacttttgcggtgaacatcttttaatgttccttttcctagattaaactgatacatactcataactcccacttaacagtagctgtttggtctaatgcataccagaatatacatgagactcttactgttgatcggaattcttttcatgacttttatcttttctagaatagttgaaattattccttagataaccactatgtctaggagccaaaaggcttccttcataattagccattaagaaaattctccaacatcttactaaagtaagttgcttgcacttgagtaaataaattaccaagtataccacaagccataggtttagataa

SEQ ID NO: 129732 - DNA, 1306 bp, Cannabis sativa
atgcactatgactatgagcaagagcaaaatagtgtggagtgtggattgaattggatgaacacccctaataatgacatgttgaaaaattggtataaaaagtgtttctctctaaaatttcttaattagtcgtcgtttgattttcttgcttgtccagggcttgctggttgtttctcgactgtacagtgtggctctagttgggtcttgattcccacattattttttattttactgggcttgctatctatttgcttgagtgttcttttcatctttgtcttttttttttaaaggtgtgtctaataaatttgagttgcttattggctttagattggattttcaatgttgttaatctttttagtgtgttctgagtgttctttatcttcgtcgtctttctttagaggtgtgtctcagtacatttgagttgctcactgactttagattggatcttcattgttgttaattttcttagtgtgttatttctatttgttatgtttgtttttatttgcattggagatttagcagttttttttcacttttttaatgcttcaaggctggcgacttattgatattttagttgaaggtactattaaggtttttattgctattttttttttgaaaataaggctttcaataaataaaaaaaaattagacctcgcggtcattacaaaggatagaaacaggtatgcaggacgactccataacacctgtaatgttctgggcgaaggcccatctagccacattatgggcagcaaaattacaaacacgggaaataaaagaaaagttacaacaaagaaaatacttagagagttgattacataaagatacataattatcaatattccaaatatagtgcaaacccttcatcactttgataaccacatctgaatcactctttaccaagacattgtcgcggttcctgagtctcgccgtgtccaaagcaagataacacgccgccacctcaccaaccatagggtctctaaaattaagaatggacgtagcagcgcacacaaccgaacctgaatgatccctggctagggccgcaatgcacatggagtctccaccaaccttaacatcaccgttgattttgatccaatcatccggcggaggcatccaaacaggcgcagccacaggaagcatcggggggaacaagcaggaggcataatctctataacaatgggacatagaattaattacattcacaatattacactgagtcgagttatgtaccttattattgcgggttttccaaatcatgtccacgacgattgaagcataaagaaacagcttgtcagcatcatccccatttaac

SEQ ID NO: 129733 - DNA, 1245 bp, Cannabis sativa
aaaataattatttttaaaaatgacgaaataattaccaaaaaaaccaaaataaattatgagatgataacaaaatatttataatatatagtttaaaaatccgtcactttttcttacattttttactgtaaaattttaatttatcaatcttatagcattaaaaaaaatctcataataaaataaatttgtctaaaattctactaaaaatagatattaattatttttttttatttttattaaaaaacaataacttttgaaaaatataatatggagagcttatccattcaaaagaaaaaagaaagaaatattgtaagcttatattgttactatttctttagaggttttttcaaaaacatttttatctatgttttatttattgtttaaagtttttatttacaaaaatacgcttttaatgtttcaaaaaatataaacttcttaacaaaaaataagaaaacaactaaaaaataaccagaaatcaacctcacaataattataaaataacaaaaaaataatgaaaaaaccaactataaataaacatcaaacacaccaataaagaatatcaaatagtttattgaagtttatttttttataaataaataaactcaaaccgtaaaaataaaagtttctccatattaatatatttttattatttttttgaaatttctggtttattatttcacgtaattttattactctatatacaattttttaattttttttgatttatgatttgggttgctctgatggttgctcagtggtttttatgtggcttgttatgtagattttggttgcgatttaagttgcttcagtagtttatatgtgggttgctatgttgattttagttgcgatttaggttgcttcattggttgctatgtgaatttttgtaaaaataaataaataaaaatagtaatttgcggcataaatacctaagtttaactctcagtagcaaataaatacataagtttaatttttgacgataataatacctaagttataaaaatagattttctataagtatttggttgtacgtgttaagtaaatcgccatttgacaatctttgattggtctatgtcattaatttttttttttaaaaaaataaatgtaccattgagaaaatgacatgtggataatgacttgatatttaacgattaggtatttacagagttacaaaaatataatttaagtattataacttttaaaaattaaatttaaatatttattgttaacgcaaattttcgttaaataaat

SEQ ID NO: 129734 - DNA, 1293 bp, Cannabis sativa
acgtaaaaattatctcttctaacattcatttattaattcacacaactctaattattgattgttgaaaattttggtcaatatttttgtgctttcaatgaaatgaaagttgtaggaagcttgcctaaaaacaagatcattaataacctcatggtacagtggtgatgacaaggaacatttcacgtccacaacaacctaacgacctaaaagaagaagaggtagcgactagggtggatgttgaaggaggaggaaataccgatgaccccgacgatacaaaccaagaagagtaggaagaatacgatgaatacaactatacatagctagttcagctaaggcaaaaggttgttgaccatgaggctgagttggtagaacaaaaaaagcaaaaaagagaatgcaagaaatattgattgccataaaaagagcaacggaaaatgcgggcatctaagtggatccaactatagttttgtttgtacaagaaaagactggggaaaagccctctcaacccgaataaggccaaaaataaaagaatagggagcctagtcccaccatataccctctagagaggcctgccccaaaggaaaatcccacgactgtgtttggaaagaacaaataggcccatgatccatgaaaagttcgctttgatctcccaaatgagaaagatctgcagggggtagatttcccaaaggaaaaactagccttatgactgtggagactggaggagcgtatatgtgcatcaagagctagaaaaataaaaggagtctgctaggaaaaatctctcggtcgatttatgacataaactcaatgccaaacatggagacccaagggcacaccttgattagaggaaaaaagccgcaccagccttcgagggtatcctaaatgaggggatcctgaccaaacttgttatctttcgaaaggacatagcaagggtctcccagagatagaagggagatgactcaaaatcagattgtgaggattgagagccttgtgcgaggaatatactagaggttgaactcccaaaaaacttcaaactgccaaaaatgactatgtacacgggtgacacagatccaagtgatcacctgtctagattcaaaagggttatgatagtcatgagggttagtaatgacgccaaatgcctatgtttcccattaacattgggagggtctgtagaggaatggttcagaaaggtaaagccaagatatctggattgctggaataaattgtaaattaattttagaaggaaatttgctgcaactaggaagataaaccttgaaattagtgccttgactaacatcaaat

SEQ ID NO: 129735 - DNA, 1352 bp, Cannabis sativa
  modified_base (1316)..(1325): a, c, t, g, unknown or other
ttatgaggactaataagaatattatacgtgtacagttgtgtgtaaataaatagtctagtttagtatttaacaaaagaaaacttatagaatagtaaacaacatagaagaagtgaggttttgagggttttacgctataaaatttatttgtggggttaagtgtcacaaattgtatagacaattttgccaccaataactcttatatagaaaaatttcagagagattcacttaagaacacacgataggtttgaacatggctcaataaccactactacaaaatactcctttgatgatccttttcatgtgttgcttagttggaacaagtcataaggttgtgggaataatgtttaacatgaaataaatataaatgacataattatattctatatacatatatatactagttagagctgaacgtgccgtgcgttaatgttattttaatgtaaatttgttaaatttttgaaataacataataattttatgaaaaaatcagtgtaagaaagtagaataaaattcacttcaaatctacacgaaaataataaatttagcaattatcagattgggattctatttttcatgaactatagaaaataataatatacgcttagcaatttataacttttatttcacaatattacaatcagcaaaattttgcaaagggagcaaagctaaaattatagatggtagggatcaatattgagtagtaaatcttagtaattaaaattcatttttgaatagtatatgtcgattaaggaaaatataatagctattaattttagaaagtttttttatttttacattttaaaacaaattttttttacatttttataaaaattcacatagaaactcatatagcaactactatagaaatttaacaaccaaaatccatatagcaaccctcatagaaatcactggagcaatttaaaccgtaaattaaaaaaaatgttaaaaaatagtgtatgggataattctccatatactattattacatttcaaaataattttttttgtatatttacggaaatttacataaaaactcacataacaactaatagagaatctaaatcttaaccaaaatttacataccaacccatatagaaaccactaaaacaaccagtgaaacaacccaaaccgtaaattttataaaaaaaataaaaaataatatataggataatttttctaatttttaaaaatattttatacaatgcttaaaaaatataaatcaagtaagtaataaataaaaaataaaatgtgagtaatactttaaaggggaattaacctctatactgtttttttaacttttttttttttcaaatttnnnnnnnnnntttctaaagtggttgcagcactagttg

SEQ ID NO: 129736 - DNA, 709 bp, Cannabis sativa
ggtttgccatgtcacattcaagtatgaggatttgcccactttttgtttcatttgtgggatactcgaccacacagaaaaattctgtgaacgtttgtttgataccccgagagagttgattaaaaagaactatgatttagacatgaaagcggtgagaagacgtaattatgcggatggatcaaggtggctgcgttcaggaatggccacgaagaatgctgggtggcctggggctagttcatcaaaccagcaaggaggtccggtgggtgtgccgatgacaggagggggcattaatgatcaattaatggctgagaataatcaaagtgagcaaatggggggatatggccataacactcgcaatccacatattgtcaataataacaaatcccttataacaggggagacgttattaaggaaagaaaaggagggtgatgaggtggataattcaaatgttgggctagtttttctggattccaaaagaagaagagttattgaaggtcaagttagtgggccaattggaaaggtaaatggggaggtgggccgtgcaaagaatggatcaaaagcccatgatttagttgatgaagtggtaattggttgtgaagaaatattggctgaagagggggttacaaaaaacttgagtggggcgggttctggtatccagacccgccaagaattatgaatgtgttaagctggaattgccgggggcttgggaacc

SEQ ID NO: 129737 - DNA, 705 bp, Cannabis sativa
  modified_base (596)..(602): a, c, t, g, unknown or other
tggtgattgaggtcgtcggtgcctagggatttgaatggtccgacacgtggggttggacagtggccgaagggtggtcgccagagttacaccgacaattatatttgtgggttttccttttgtggtctagagagagagatgttttccttttagtttatcctttttttcttcatttttaactcagtttgaccgagtctttacacccatggttgttataggctcttaattaggtgtaaaatgaattaaataaagtggtttggctgttacacaaaagctaggatcaaaaatcaaacgttcaagatagtttttgtccaacagctacttcaagcaacatgtcgcttggtgtaatttttgcaacaccattttttaagttttataactttcactttgaccaaactaaaaccaaaccttttccaactcatttctcttattaatatctatttccctaataatcatacatttgaattccaacaatttatttgtataataactcttttattacacttgaactgtgataaacaaaaaaaaaaaaattacaaataataacaaatttcacataatttatttactatgcactttgttaattccatttttggcannnnnnnttgacaaaaatattttattattcattgtatattttcggctggtatacattaatatggtttcctatttggtgtattcaaacttgaaaggaaagttgtctagctt

SEQ ID NO: 129738 - DNA, 791 bp, Cannabis sativa
gttgatgagcccaagcttgcttctaattttagacatattaacctttgcaatgtcctttacaaaattatcgctaaggttatgactaacagactttatgagattttgggggatgtggtttcagatgaacaaagtacttttctctctgatagtctaataactgataacactatgattgggttcgagtgtgttatcatctcaaacgctgagttaagagcaagagtagggtgttcactcttaaacttgacatgtctaaggcttataattgtgtggggtttcatgagagatggatttctttggtgttcacctgtatctctttggtggactacacttttaatttgaatggtgaaatccagggtcatagtccttagtagggttctcaaacaaggggaccccctctcactctttttgttttttatttgtgttgagggtttatctgctcttgtcagccaagattataagaacaacttactttctaggatctactatggtgtattggggcctcctatatctcatctttttttgctgatgatagtttgtttttcttcaaaactactgagttttcttgtagcatatttaagcagctattgggatggtatggtagtgctttgggtcaattgattaatttcacaaaatctactatatgcttcagttctcaggttcctgttaaggtagtcaaatccatggcttctattttggcagtgaatgtcatagcttgtcatgagaaatacattggtctttcttgttttgtgggtcaaagtaagaaaggtttgttccaatctatctgagatagc

SEQ ID NO: 129739 - DNA, 1158 bp, Cannabis sativa
tttttttaaagaattttaatattaacttataattttatatccattttaattttatatcaatgggtctgggtcccgggtctggggtcttggttccgaggtccgagtccgggtcctggttcgggtccaggtcccggttcgggatcttgggtccgggtccgggtctgggtttgggtccggaacgtgtcccaggtcttgggtccgggaccgggaccaggtccaggtccgagttttgggtctcggttttgggtccgggttcgggtccgagtccaaggtctccgatccaggtccgggtccaggtctcgggtccaggttcgagtctaggtccgggtctgggtccgagtctgggttcgagtctaggtccgagtccgagtccgagtccgagtccaggtcccaaggaatctgagtcttgaattaagtttttttttaaaaataaattgaaatcgggtcagatcagatccgatctagaaaaaaattaggcagggcggagcggatctgatccaagatctaataagtatccgaatgtttcggatcagaggtgatccgccgggtcaaagctccaacccgctccaactaaatggatctttttgacatgcctaactcttatgcagattacaatgcttctattttccctactctttcatgtctggtagttggatggcttcctcctcgtcttgagtgggttaagcttacctgtgatgttaaagtggggatagaatgtatgtgcattgcagttgtgactagaaatcaccttggagtagtgtgtggggggcatacaactagattagaattctctgatgctctatgtggagaagcgacaacttgttgcttggctctggaagttgctaaagatggaagctggaattttattataatagagggtgattttagggtggttatcaatttgctcaacgatctagaattctgttgggagattgagaactatactaatttttgtaatagactctcgtttttttgcttgttataattttttttttgttagcagaatttgtaattttatggcctataagctaagtggcttttatccataatttgtgtgatcgtatgtatgtttcttttattctaaacaatattttctataatgaccgtgaagtctaatttcacctctacacgattatttatggtggcgtttggtaacac

SEQ ID NO: 129740 - DNA, 960 bp, Cannabis sativa
aactttaactctctctagaaaattggtacaataatctaagcaataacctcaactcactaacaacacaaatatataagataacaagatcaacgatcattacataaaaaaaatcaagataattcaagttaagtgaaatgaaagaggactaaataaggagtaattaaaataaataaattaaaaagaaacctactaaaaaataaacgacaaatgttatctcaattttgagagtcataggataatgggaatcactctctataatctcaactttcatgaagccataatctcacctatatatatatatatatatacatatatataaataagaatttaaagactgattcaatcgaaacgttttgaataatggcacctcttcaatggcttaaattagcataaaggacatttaaataggtaaaggtggaatatcaaagttctaatgaacattcatatataattatatatgttttataattatcatttattatatacttgtaattgtaatttaattattttatatgttacgtattattaataaatttttaaatagatgctagaaatttttagtgtcttctcacatcttctattgtcattatgaaaaattaaaaataataagagaaattaagaaaatagaaaaagtaaaacaaagctcttagagatggccacatcattatgcataacaataaaattatatagatatataaatatagatatttaaatttgaataataaaataataaaataaattattaacaaaaatgaaatgaaaagacaaaataatattagaatgggagttataaaaaaaattactaatgttcaataaaataatgctacttatttgtgtatgtttgctttataattatctttatatattaaaagtgtctatctaacggcaattcttgtttaacgattcttggtttaacgattcgccttacacgattaacttaacagactgttaacgttaaac

SEQ ID NO: 129741 - DNA, 920 bp, Cannabis sativa
aacccaaaagacagccgcaccaaccccctcaaaatgccactccctctccatcccaaacaccattaacgactttctctcggtcatcgactctctctctctctctcctatttctcttagtttcttatcccgttagcgacgacggcgtcttcacaggccgcgctcggggggtctatgccgcctttcgcatgtctcgtctcattttccctgacttggctaacaagggcatgttgaatgggatcaagaaggcctcctggtagattagctgcctttttcgcccgaagcggatttcattcatctcctttcctggtaatgtttattaatatattacgaattgagtgagatttgatttaagtttgacaatgtaattcttgcaaatgctagggttcaattaattcttcctgactccactatagattcagaaattgtactcttaattatataaaatgctttatatgttcaacgatatagatacgctattaattatccattgttataatccaaataatcaaagatcctctatagatgatctacatccagtagagacaaatttaccgctctacatttcaatgtattttatccttaaaatacttagctagttgtaaataatattttagtaaactaatataatttttgaaatgagccctcaatcatttatcgcattaagccaagctcgaaggaaatcatcttttcacttctagaagttatagaagctatatattccatatctatgattagcgctcccactttttttttttttgcgctcccactcaattatactaccatgttcctaagatgtaaatattaagccaatctaattggtcagctttaacgaacaactcatagagcattaatacatttaagccagaacctaaccatctcaggattaagatctattgacctaagtgttgggttttatgccc

SEQ ID NO: 129742 - DNA, 1495 bp, Cannabis sativa
tgaaatgagttttatttagggcctaaaacccaacacgcatatattccaagttcagtcagactgccagcaagctatcaatattattcgcaactaggacatgcttgttatgactgtgattttcttatgcaacaaattcgagacttattgggttctaatggggttgttgggttacaatttgtgtaccgagaggctaatatggtcgctcatagtttagccaattatgttttgtgttccaaagctagtgctatgtggattgagattatacccccttgtgtcaatcgagttgtgaggcttgattgattttttcctgtgtaatttctcgttttaatgaaagatttccgtttaaaaaaaaaaaaagataaataattaagcagttaacatgtggtccgataatatattgacatttgtttcttatgtggcacttaatggatttagctgtcaattaacagtcaaaagatcaatactacaataaaatggtaagttaagagacttttgttgtcacttttttttttttatcaattaacagtccaaagatcaatactacaataaaatggtaagttaagagacttttgttgtcacttttttttttattagatcatatatgtaacaataacaaatattaaaagagtttcgctgcaaatattttattaagatcatatatgtaacaataacaaaacacaaaattcaatcagtaatttttgtaaaacacaaaatctaattagtaatttttacaaaacaaaaagttgaaaataatattaaccctctatatatttgagttattttaatgctacatagctaattatactattaccaatctagcagagtaaccagttaccttaatgatatttttctcatatgatcaccttgcatgatatttcttatttggcgacattttgagcacgcgagtgctggggtgctgaaatgtggcatctaggcactaggtttaggcctttggcaagtgtctaccacacttacactgcacataggtggatttttaattttgaaaggtaacttggggttaacaatgacacactcattataatttataatgttgacaacaatgatgtgttaataagtggtgctatttcgataaaatagttaataaaatttagaaatttagtcctaatagaattttttttatatatattttttgtaattgattaatgtatttaaatgaaatatttaataatagttagtgaatattaaagtatcttgtaaggaataaacataagataactgtttttttttggagtaattaacttgttaattaataagtttactttgtatatattcataactagggaacaaagccgcgcttcgcgcgggttcgaccctagttttgcaaactttattttaatcattctcctgaagttactcgagacaatgcgacatataattggccatgagtgaatatttgcttagggagatacaatccgacatatttaagcgattgttcttgacttttattgactgttatggtaaaacatagtgccaa

SEQ ID NO: 129743 - DNA, 773 bp, Cannabis sativa
ctcaaaccttgtccaaacacaaaaccaagccacagaataacttaaattctactcaaacaccttcaattaaactacaacatactcaaatacaaataagcaataactacagtaaccgagaactcaaaacatgcataaaacctatcatagaacataagaaatcaaagagggagagctaaggggggtaataccttagattggaacactataaccttgagctgaagaaatctcaaacccttgttggttgaagggagctcgagaaagagagagagtttggagaaagagagagtattttcttgattttctttttgtaaaatgagataattctctaattatcctatattaaccttaaaatcagcttattaattaaaataaatcactaaaacacaaaagagacaaaaggccaaaaagaccatttcgcccttgtctgagccaaaaagcaaccttgtcacttaggggtattttggtcatttctaaatctcgaatattctcaacattctcaatgtctatataagttgcatcgctactataaaaatactaaaatgtaattttattggccaaatgtcgcgttccaatgttgtcgagcacaaaacatggaaaaaaaattcatgtatagcataaataatacatccttaatttaaataaatattcatatattcctaaatcataattaataatctaaactcataattaagctctaattgtctgctaatttcgaattaaaattaagtggtctttacaattatcccccattaaaagaatttcgtcctcaaaat

SEQ ID NO: 129744 - DNA, 785 bp, Cannabis sativa
agagagagagagagagattgatataagagagtgtgtgtgtgtgtgtgaaacgaaatggggcgactgggagggaattaggttaagttgaaatatatataagtagggttttctaaagatgggccgaagcccataactgatttttttaatgcctttttgcgtcaattgtacactgatgctaatagtgtatataatggctttttgcatcggttgtagactgacgctaatagtgtatacatattttttttatattttatcttttgtttcgatttttattttagcgtaggatagataatcgacgctaattaatattatttgcatcggtggataattgaagcaaaaaagtgtaggttgacttttgcatatgtcaacaagtttaaccagacgtgttgaccgacgcaaaaacccctttttgtagtagtgtctgccctaatcctctacagttccaagcaacgcctctcatggctcatgtggaggagatatgacattctcctccacaggcgtacaagagtgaatagacacactaaagccagattcttcaataaaaaaatagctaaccatagggttcttcataacaccatcaatgtgacttcgtgaaatcgagatatcataagagggttctttaaaggctaccttagactcatgatcctgctccttggagtcccacaggaaatgacgaataacaccggggtgcatttggaacaatttttgaggccttgagcataaagaagcagaggcctcatttaatttccttttcttaaaatgagtagttcgttcattagtttcag

SEQ ID NO: 129745 - DNA, 1134 bp, Cannabis sativa
aaaaaaaaaaattggtttgaagtgtaaaaataaaaaagtcccttaaaaatattatattattattagtataatttaatatcgtattaaatatattttatatttactttgtaattatatgatgtcacctcttaatggtattagactcggtggttcgtacaaaacaataagtgaattagctattagtagtgcctaatattatcatgaagtgacgtcttgtgaataattaaagttatttcataaaatttagtataataaattatgtataaaagacccaatactttactctactaatagtgatatgacagcttaagtcatgttagacatcactggtacttttaattttttttttaatagtaacaagagagatgctaaaaagtgccaataccatcaaaatagtatattactattagtacaatcaagtattaagtctctctcacataatttagtataatatttttttttatagaatattgctatgttaggcatcactaacacataataacaatgctcaaacatgatgtagatagtactaagggcaattctaatgggcatctataaacttaaaaatggtgagatttcaatactaaactattccaaccacacgggagaagtcatcctattaatgagtttatctacagtgttccatgaatattagtggtgcactgtagaccactgtataatttttgttttagtttttaataattaaatgttacatattatttataatatatcttcttggtgtaacatatgattttattatattaattaaataataaagcatatatatattttagtgtaatatttagtgttgtaattgaaattaaaaaaaattagtgttaaaattatacttttttagtgctagttcaacactatatttaatatttgctcttggcctaagtactaagtagttgcctttagctaatgcaacttgttagtgtggaaactgattctaatacaattattaaagctgtcaagggtttaaacttgatgcgagaaattaataactatgttgcttattgtggaatctttttgtagttgtaatttttcaaagtttttcaaatcgtttgattttgggataattttacaaatgcacaaaaataacaaaaatacggttttacggaattttaaatattt

SEQ ID NO: 129746 - DNA, 1027 bp, Cannabis sativa
gtacggtgagcgtcacccgcctcttcaactatctcttcatcaagggacttggataagttgtgtgtgcgtttgagcatttttctgaattcagcagcattcaggcaatcggtccgcttgggtctgttcttgcggattccagaagtagtgggagctggattagaaggtgctccaataacaaatcggagtggctgaatcgagttaaggtccgccaaaatggtggagaaagcttgggagacaggtacaacatgctggggtgcaccatttgtggccacaatagtctcggccgaagtggatatggcctttgggagaggtatagtaagttgctcagttgtggtgataggtggggaaggtgaggagctagtgggaatggtattggtttgagtgaggaaattggattcaccttgggtgtgagcagtctgtgtggcggtgacaggagctggagggtaaagccatgtggtagtaggaagagtgggttgattaaggttatgggtgtgggaagtgagcacattgggtgaggagtgagccatataaaaccccataggagtagtttgcggcttgctcaattgttgagcaccataagcagaagtgggctcattgaaaaggccttccgagatgattggaggctggtgaagacggtaatgaggagtgggggccaatgagattgggttagctatgtgtggcctcaaccgagttcttaagcaagcaatgtaaaagggatttaaagtgatccgaattttggcccctaaagattgatcatagcaaagcaaatgaggagccgaggaggaatcacattttgcaagaaactcataataatggttcatgatatggctaagacgtccgcagtaatgacagaaatctgggagatttttgaaacgaaattcaagccaaaccagggctgccattccatggaaatgaaagcccgtaccacgcggaagtggtttagttacatcgatctcaatgcggacccagagataagggccccaagtctcctttagagaagcagtatccacttcgataaaatgcccta

SEQ ID NO: 129747 - DNA, 775 bp, Cannabis sativa
atccacataattattaatatttataacagtccttgattttttttttgttatattttttttttctcaaactatataaattgtcgtaaatatcccccttagttacatttcattttttttttaaacaaattgcttatgggccatgagatacatgtacaattgagttacaagggtttatttaacaactttagctaccgaaattttaatttattggcattaaacatacaaatattagctctaaactttaataatgcatatacatattctcataattgattgttagaatctgcaactcctaacactcaagaatattttaaccagccccccaacaaataaaccctagcagaaagaaaatgaaccaaacggctacaccaaaattatcaagtagcagcctttgtcttcttcgttgttcttctctgaagaacacgaagcacaactataaaacacaacccagaaaaatagcctactgcccagttcgaatcaacctcaaccaagcctttttttatgttcttctatgaagaacatgaagaacacaaagcgagaaaataaaacccagcaaccctctctctaaaccggttctataccaagagaaaaacaaagcagaaaataatataaacacaatagtaaatgcagaaaataaaatggagagaacacaccaaattttatagaggttccccgaaatcgtgcgggtacgtcctctttgagctcgcctcgttccactatgaatcttcagagttacaaagcttggattccaactcacaatggtaagagtggtaat

SEQ ID NO: 129748 - DNA, 624 bp, Cannabis sativa
ggtaaaactcccaaaactacgataccgttagcaatttactgtttccatcaaaatttagctgttaagtgccatgttggcttgtccacgtggacacaatgtacacatggcacaattttattggtccacgtaaataattaatttaaaaaataaaatcaaataaaaagatcaattttttttcctatttttttttttcttttcattttttttcctttttctttttttttttttcatattctttcttttctttttcgttctctcctttttctttcttcttttcctccgtttcttctttttcttttcattgctctttctgttgatgatgcaaggagccaagaacctagacccgtcgccgatgaccaccctgcctgctgccgtcactgaggacccccaaccaaggttagtctatcacctctgtctgtgtctctctttctctctcttagccctcttctctttctctctttgacgactctcttctctttctctctctttctctcaaccctcttctctttctctctcgatgcatgtacccactccgtcgccaaggaccactgagctaggcgccattgccgaggacccccgagctcctccatcccaatctcaatttcctctctctctctctctctc

SEQ ID NO: 129749 - DNA, 1559 bp, Cannabis sativa
tgttataagtttataacgtatatgtttaatttaatatatagaaaaaatcacataaaatttgattaataaaataataaattaatgagttgaccgggtcaacctgtcggtcaactagttgacccggccaacccggtcaacccaaacccgtagacccgcgaacctgtgagcccaaaatctgcaaactcgaaccattcgacgggttgggtctgggtacaattttttgaacccgaaacctataaaaccgaaacccgatcaacctgcttgatgttcacccataataataataataattttttttgctataaaacgagatgataataagacagttaagaagagtccaacatcaagaaaagaacttattcgttctcttattttttttatttatttatatgtattatataaattatgtagtaaaactaaacgaaagaatattctcgacaattttttccttaaaaaaaaaaagcaccttatgattttacttaaaatataattgacttattaacaagccattgatgatctgccaacatttatgagatgagtaacatacgaaataaggatgaatttggtattgtttattcataatgaaataaatgatcaatcttgtacatttatttatatataaaaaattaaggcttttaattacattgtatttattattgttttatatagctacgtagtagcattatatatcttcctcaatcctcattattccaaggccagttggtatatatcatatttataattgaaaacgattacgaaaatggtaataaatagagaaatgttaaaagatgtggccatctttgaaaatttagaatattatattattattaatataattaagtgttgaattttataataattttttaaaattaacgttaagtaattgtaaaataacatctgtgtggtgcctaataaacaatggtacgtaaaataattatatatatataaataaatatattattgtctttatttacttgtactgttttccaagttgaaaagttgatatacgcgtgcgaaaggccttggagtcttttcagaagtatacgtcggtccacagaataataaaaacctaactagaatcatatgcctaaagtagtgcaaagcatgataatataattttttgacagaaaggaacaccattcaccaaaaccttacatattaatttatgagaaatgttataagatatagtttaatatttttcaaaatataatattaatattagtgtaattatattgagtcttatataatttaatttaattcattaatcactcttataattatcaaagagcaacaacatatattattattgttttaattacgatcttctattttttttaaaaaaaaaaattatatgccatattaaaattttgaaatatttaatcctaattttcacaatattcaaaatcttgtggtttataatttgggcagccattatatttttagatgtaatttaatggtattatatattagaatattttctatttaaggaaataaataagtaattgattttgtgataaatgagtattttatattcgttgaatttggacaaaattaattac

SEQ ID NO: 129750 - DNA, 1440 bp, Cannabis sativa
ctggtagaatacacatataaaccaacagattattcaatagcataatgaaatgaagagatttggaaattcaagctaagtttaccgtcaaagagagtaattgaacttttgagttcttatgttgtaatcttcttttcagagcttttacaacatcttttgcctgcctgcacattcaaattcatagttttatactttaccaagtaacaccacagacacatacatacaaacataaatacgtacatacataaatatatacatacatatatttatgaaaagggtaagcagctaaagaaataaatggaagaaaatcttccaattttaatttaaatacagtagaatttaagcaataacatgttaggtgaaaagagtgactaacagaatttaagagaaacccaccaaaaaaatctcttattaaaagcagaatattactattctcaaatggatttcttaagccatgcttacacttttcacaccctaaaaaaattagtgaaagaaataaatgttttcctttagataagggaaaagactaaaactttcgcagaagacacataagaaaccataaaaaaatttaataaatcgatcaaaaaaaataaaattatgaacagcagacatatgatacgccaaaagaagaaacaaaaatcaaagtcaaacccccaaaaaaaggaaaacaagagcaagaagggtcggtattaaagcttttgattatgaatagacaacgtaccaatgatgagaattgacagaatcgcatatatctatgttcatagtccaatcaggacttatcagaagatcgctggtcgccttctctacagctactgtagctgaagacgacgaagacgatgatgatgaagacgccatcggcaacatctttctttttcgatacaactgaaaccttttctctgtattcaaccaaaaattaaacgtacaaaccgattgaaattccccaactccttagtttcgcggaaaatacacgcgcgccattactgtgtgtgtctgtttggatggaaggaaaattccgaaaccctagaaatgaaaaagaaaattaaacaaggaattttcttccttcctttctttcttttttttctcttactaataatataaaaatataaataaataatattattattattaatttattttttcaaaaaatattaaaattttaattattattagcgaaaatttcgttatttgctttgtttggctttagtttcgattttcgtcttatgactctatccatttatgaaaagtgtctcttttagtaatctctttatgcgtgagctacacgcgccaagagatgaactcgataacttacgtataagagcgagtacgttgcggtgctcaagtttagcgcgtggaaaagtctgtttcctcttttctcacgcttttcggttactttttttttaattaaaaaagaaatatttgtttatattttactttttttttttt

SEQ ID NO: 129751 - DNA, 594 bp, Cannabis sativa
  modified_base (540)..(541): a, c, t, g, unknown or other
tatcgaaggttgtcttttttctctggccaggcatgcggttgtattttgctagtgcaatttgatttttgctattgggattagccttgactatgtgacataattttgagcattttcatattgtctttgtgatatagttttgagcgttttcacattgtctccatgatatatttttgagtgttttaatattgtctatgtgacacgattttgatttgttttatttcgttgttggttcttatttgttcttcgatatcttgtcatcaaatcgttattagtagttggaaataataagttctctgcgactgaaagtattgttagtagtacagttacgtattttacacaatagttaagtgctcaaattatgagattaaataaacctgttgtaataatttctgttgtaacttttgagcgatggataaaataaaatataaatatttttaaggttatgctataatttctttcattttattctaaaagatctgagaattagtagactattattttagttgattttcattaataaaggtgtcgtttggtaacacnnttattttttaattttttaattacaaaatgaaagtaaaatttctgtttttaaaa

SEQ ID NO: 129752 - DNA, 1473 bp, Cannabis sativa
  modified_base (1283)..(1284): a, c, t, g, unknown or other
ttaatatttatagttaaatttgttcagtacccattaatagataatacttattcagaattattctatttatatatattcatattcaaatattctctttatatatatacttttatatttattcatattatatatatacatttagaatattatttttcttatatatatttatatattatattcattccattattaattttattctatataattgattattataatttattatatatatttataatatttttatatagtttaatatgtatatacgaatatatatataaatataaaagtttagtttttggtccgttagttgaattttttgatttttattttgtggtgtttatttcgaaacttatatacatcaccacgtttatatgacactggatatcaatctaagcatgagaaaactttttgaaaaacttagaaatgtaaaaaattctctataaaacttttttcggacccatcttaattttatgaaagtaaagtccccttttttcgtatctttgttgcataaaatctatatggatctctttattattgtatatagaaaattttagatttaaaaaacatgcaatttcgtcgtcaaaattcttttttacgattgggttttgggtcgggcccgtcggaaccacgggagaaaattggatcattttcgacctggctggaggttgttgaaggctcataaacgaggtgtcattttttattgttttaaaacagtcttctcctcatgaaaaacgacatgtcgtttaaggcggtgaaatttttcaaaaaaaaataaaagaaaaaaattctaatttttttgtaaaaattttatttatttgatatattaattatattcttaatttgtgttattttagtcaataaattacatgtattcaatttttctatttttatttaatacatatatttagaatttatatgttatttggtataaattaaatgtgaaatttttttaatttgatagtttattacatgatttctttaggcatgtaataatcgtactaatttttataattgtggatttattatatattatcaaatttatgtaatttattgtctaaattaataaattttaagaaatcttccattaattacatatttaggaatttgcatttaattaattttatttgacaaatttattgttagtacagttaatttagatttgtatgatttatatgctatacataaatttcatatatagtgctagaattttttaagaaaaatattcaaacattaagataggttaaatattttatttagcacattaagtttcataaaanntcataaaattattcataaaatatgaataaaacgtaaataattttgtggtttgacataagaaaacatgaacctgtgacaaatgctcatatctagaacggttttttatgatcttcgaatgaccacactaggagcattaatctcaatgattgtctattatgttaataacgaaattacttttaggtagagccc

SEQ ID NO: 129753 - DNA, 1545 bp, Cannabis sativa
cttgggaaccaacggactattcaattccttaaagagattgttactcaaaagaaacccaattttatttttttgtgtgaaataaagtgtaataaagctagaattgaatatgtgggccgcctattgggctttgaagggatattttctgtaaaggcccaaggaaggagtgggggacttgctttattttggaaaaataccattgatggtagaattgttggcttctctcaacatcatattgatttttttgtggaaattaatcgggagccaaattggagacttactgggatctatggagaaccgcagaggacacaacgggaggatacttggaacttaatcaagtccctggtgagtcctttgaatgacccttggtttattatcggagacctaaacaacgttctaagtcaaagcgataagaggggaggccttccctacccgaactggttaataacgggattcgagcaaactctcaacgactgtgacttggtggatatggaacttgttggttatccatttacttgggaaaaagggaggggaacttcaagatggatcgaagtaagactggagcgtgcacttgtttcttcaggttggtatcaacatttttctcattctcggcttttaaatattgaaacctctccttcagatcataacccgattttccttgagtttgtaatccctgaaaaaatcattcctaatcgtcgttttcgattcgagaatgcatggctcaaaaagcctatgtgcttagagatagtgaaggattgttggagtgatactggccgactgtttgtggctgaaaaaattgctttttgtgctgagaaattatccaagtgggggtcgaatatcacaggaaattttaaactgagaattaataagtgccgaaccgaattgaagaggttgaagaaccatcgtgatgatctttctgtccaacgttacagtgaggttaaaaaggaacttttcttagttttagaccaaaaagaaactttttggaaacaacgggcaaagcaattctggttgaaagagggtgatcaaaatagtaagtatttccatagagctgctagtaatcggcgtagtttcaatcaaatctcaaaactcaaagattctagtggtggaaggattgcgataccggtcttgcggatgtagtggtggactatttctccccattatttagtgcttcaaacttgagtagtgagttggtggttcagtgcattcaaagaaaggttacgcctcagattaatgaagatcttcaacaaccggttctagccgaggaagtgaaaagagcagttttcagcatgcatcttgataagagccttggcccagatggtatgacgcctgcgttttatcaaaaaaatttgggagattgttcattcagatgttacggccgtggttcagcatttctttgatactggtgagtttgatcaggggtgtggtgatgctaatgtggttttgattcttaaaaagaaaactcctgaaagtatggttgatttgaggcctattgctctgtgtaatgtattgtacaaaatcattacgaaagtgatggcaaaccgtatgaaa

SEQ ID NO: 129754 - DNA, 907 bp, Cannabis sativa
atttggcttagcttgaaaagtataaggagtaatttgtggcttaaatatttgaattattaagtgtcaaattattattcatgtttttgtgagaaaattaggactattagtgcatgattaaatcaatgaaactttaacattcaagtaattagtaaagacacgaataataattggataaaaaaaacagagtatggaaaatcataattaaacaataaatgtagaaaataaaaaaaattaataccaagatatatactggtttaagttgaatagatcaatgtgatttatgactctatttcaggaacaccaccaaatcttttttattgtttgagtaagaacaccaccaaacaaagagatataactaatatagctgagagttccaattattaataaggtgaccaaatatttattttttttctatttttgattttgcttaaaaaagaaaaagtggtgattcaaaattaatggcgtaattaattttcaagtttgatgttgaactctttttatatattaatttgatgttttcaaatttgactgattgactaattaggaaactaaagaaatattcaaactttgacgatatgaccaaataatctcacgttgaatggttatattatcaattaagaaaacatatataggacttatattatatgtttacaatttcaattattctgttaattagtttactacatggattgcaatatatatgaattgtaatttgaattggattaaaatttagattgttccgtatattttattataaaaaggcaaaaataaaaaaaatactttaaaatgtataataaaaaatcccacactaatttatgcacccccaataatatcattttcacacaatcgcatgcatatcatatgcttttttttttttttttctgtcttttgtttttttttttttggg

SEQ ID NO: 129755 - DNA, 661 bp, Cannabis sativa
atttaatttatttatttttgtaggtttttttttttttttgttttgggtttttagaaaattttaaaaataaaaaaaaaaaaaaaaaaagcatctttgttgcgttgaattgatcttgttaacgccgttgaaatctccttctcgatgcgcccaccgtctctatcgacaccatcagtggtcgtgatggtcatccatccaagtttatttttctcccaataagaaaacaaaccattcttctcttcctttgtaataattactgtaaaaataataatatatatataaaaatataaatagctatgatcttctgccaatctactctattgataatattttgtgataaagagagaaacatcttcttggattttttttttcttttggaagaattatattgtgcaaatagatttagagttcactgattgaataattacatctctcaatatttacagagaaccatcttattggaaaaaaaatcctctttcttatgataccattacatatttgatcactcatacccattgttagggaaatttgaaattctatacttacatatacataatatcttttccctaaactaataaaacatatgaccactttttcaaaaccccaaaaatacccctctcaaaaactcttatttttttttcaatttttctgggcttttaagggg

SEQ ID NO: 129756 - DNA, 2063 bp, Cannabis sativa
  modified_base (2011)..(2015): a, c, t, g, unknown or other
tacctaattctactaaaatttcaatagcataacaactataattgaacgttcccaaaaaatttaaagctattaataagaacaaaacacaatttaaaataatataaaacaatcacaacagcatttaggaatataaaaatttactactcatctgatcacagtacatatattcacagaacttatttcactatgtatgcatatttaagatattcaaactcatctaacatgcatattattccacccgttgatcggaccgcagtacaatatattgcaaaacctactaaattactagttagtaactaactatagtattctaaatataatttgtaactaactagtaactaattttactataacaaactatataataattggcgatcctcacgcattcatgatttatccataacaaaaattaagaaacaaatcttaataacttagtttaagagaaacttatatcaaataattttattctaattttactaaaatttctgcaacataacgactataattgaacattctcaaaaaatttaaagttattaataacaacaaaaaatatctaaaacaatatgaaacaagtgatgatgagttacatgaattttaatcatcattgcttttatcattaatgttttaattcgagttttctgagttctaggataatagaatttaagattctagttctagaaacataattatttttactttagcttaagttttatgatacatttttggtacgtttcaattttatgtgatattttattcattcttatgtgttctaaaatattatttcaatatgatttttggcagcacaacgactaaaatataacgttctcaaataatttaaagttattaataataacaaaatataatccaaaataatataagataatcacaacaacatttagcaatacaaaaatttcccacccatccgaccgcaatatatgtattcacagaaccaattttaccacggatgaatatttaagatattcaaactcatctaacatgcatattattctacccatccgaccggagtacaatatatcgaagaacctaactatgcatgaatatttaagatattcaatctatactaagcattcatgattaattaataataaagttagtaaatgtatacctcaagctagctagaaaccgatcaacaccgaataagcttgatccttgtaaattgaccccacaatctacaatataaaaaaaaatactataaaactaatttttttttaatttaactagttattagttatataatttataaataactagttactaactagctaatttattacgagtaactagttaataataaaaatacatcaagaggaataaaaattagtaacttgataagtagttgtaactaactatttactaggtacataaaaaataaaaatacatgaataaaattaaaaataataaaatattaaaaaatagaattaatttttaaaccaatttttagaaattcatttctaaacatttgttttaatactcctctatttcattctcatcattcacaatatttaaaaaaactattagtttaaatattttgttgacctcagatttggcaaaccgatagcggatcgtatttaatattgatgcttgccagtgtcacacaatgagaacaatgagaacaataaattaaatgaacataggattttataaaggttcgacccccttagttaacgggtaatgacctactctccttttagttgttttcatacctagagataatactactcaaatcactacagtgacgggttcttaagtaactctctaaaagttagattataggaattagagttggcaaatcttaagtatgagaagagaagtgggtgtgtgtgtgagagagagagagacctagaactagggtttttattagaacttaatgacttcagacttagagcttagggttttagggttgggttaaggctctttacataggagagcttaaacccttcaagtcccttagaaataggtaaaataagttgttattgttggaattattttnnnnngatcttagatctactcacaagtatcttgattaacatcctaaatatgaa

SEQ ID NO: 129757 - DNA, 673 bp, Cannabis sativa
gccccaaccacgtaaaaatctcatgcattaaacttcctacagctttctcatatatattattaaatcggttgccgaaaatctcgatcaacaccacattcgttacaaaaattaggtatgcgttcataacgaaaattaagccacatttcatctttaatccaaggcaaagtaaccattagaccacgaagaagaggttttgaaacatcaataccaacctgaatccttaagggccccatccttcattgagagagtcctcatgaacatcgatgtagtttcctattaagccaccaataatcctcgcaagagcctcagacttgctttaaaaaggcagacgataaacgtgatcccagaaagaagtaattgtaaccgaatccaaagaggtattttgtaaaacacttggaaggcaaagaaccaagtgttggttgtgtagataggactctaagaagatctccttagcagccaaatgtgatcatataaaaatcagtatcataagtggaagcttccaccgcaaatctacctgcccaatttctaaagatgaagttgtgaaactatttaggactatggccctatttagagaaaattctacaaaggatgtgattgctgtgaggtcgagaatagggtgcagagacattggaaatattgatgttgctccaaaattcgcccaaaatacgtggac

SEQ ID NO: 129758 - DNA, 519 bp, Cannabis sativa
tttttttaaaatatgtcatatttagtgtaattaagtttttatgctgtaagtttttactgatcctttgattgctgaagcaaatgcagtgtgtttggcagcgaaagttgctctggattcaggtatgaaacggattatattcctttgtgataatctctgtgtagctaagtccttcgtagtatcggctcacgacaagggggattttagaatccaagaggctttggcgcggttcaaagattgctgttccaagttcgaggaatgggatatctatcatatttctcgtacttgtaatttcatagcgcacaacattgctaaatgggcagcggtgcaccaaaaatctgggagaattgagtttgatgagcttcctggtggagtgcttgatgacttcagggaatgggatcctgggcctacactgactatataaatcctggcagtggtctagtggttgcgttaatttgtagtttttttccttattgtgttttcttttctattgttggctctgttcctttttttttttttttt

SEQ ID NO: 129759 - DNA, 1940 bp, Cannabis sativa
ccagcatggctacaagcagaaagaagagcaacaaaggtagtgggatcaggtttaatgtttatttgacaaaagagctgtatggcctctctagcttgtccatgtaaggcataagccttgatcatggaattccaagaaattatatcacggtcttcaatttcatcaaacacttgcttagacatggaaatggaaccacacctagcataggcatggatcaaggaatttgcgagaactgtgtcaccttcaaaactcagtttaataacttgagaatgaactgctgaggcatgacgctctgtcacaagacctgcacaagcctttaagacaatagagtatgtataccagtctggaactagaccttcttgaaacaattgagaaaacagaagtaatgctttctctggttcccgttctgcaaatattgttataatgctagtccatgaaacaatatcccatacacaacttgtctcgaggaagagcttataacagtctgcagccttccctccgagatctgaataagcctttattagagcagtagccaccttgacttctgatacaaagccagttttgacagtaagacagtgcatttgaaaacaaaatctgaaaaacatatcggtgttgttgtcgttgcttaaaaaagaagaaaaaatgctgagaagtgtggtccggtcaaaactaattcccttgctatgcatttgagtgaaaagatccatagctcgagctcgaagcccatgaaacagaaacacggaaatcattgaattccacgatatggtatttcgatgctccatgaacttaaacacagtccaagcatcggttgttccatcacatatgccactccttttatacatggtaataagagcattcccaacataagtacatgcgtccaaacacattttcaaagcaagagcatggacctgcagcccaaattgaccataaccttcaacacatgaagttaggacacttgcaaatgcaaactcattgggacgaaattctgacagcattctcgtaaaatgcctacagcaattgtctgtcagtccacattgtgcatacccagagatgagagcagtccaagaaataagatttctctcaggcattttatcaaacaactgatgcgcataatccaagtagccacatttacagtacatgttaagaaggtggtttgtaacatagaggttatgctgggtggtggggctgtggccaaccatgtagtgatgcagtgatacaccttctctgagggaaccatggcgggcgcattcatggaataaagaagcgtaaatttgatcgcaatgagtttctccgttggcgtagaagagggaaagagcttgatcaagacggccacaagttgcgagcagacggactctgttgagaaggctgtgagattcaggtgtagtgagagattcaggtggaggaggaagattggttgagccgaatcttcttaaggaaataaaccatgagcaagtagcaggacgtaacatcatacattcgtaagttatgctggctaataataaacaagcaagcttcaacaacagttcttttcaaaattatttaagtttattatatctctctaattaaaatgtttttcttttccatcaaaacaaaaataacaaaaaaaaaatgcaataaattgcccatctatttatctatatctatatatataaataaaggaaagcacaaacacggtgatacgaccgtctttatgaacatcttcactatttctaagcattctaattttttttttttaatgaaaaaatattattttttatgtattatatttatcatcatttattgctaatttattatttaaaaatgaaactcccaacattttttttccttttcatctttctacctattggtctttccctctcataacaacatggtatttattcaatcataagaatgtcttcaataagacccccatttttcattattttctacaactatctctctca

SEQ ID NO: 129760 - DNA, 1056 bp, Cannabis sativa
gtcacagactaagtcgctctcttttaaacgtttgtggcactgcccagaattatgcaagtagttggaaattgccggtcgtcctcaggtttaaatattctaattgtcgtacgctgtatcaaaacatcactgcactgtagcgaaccgtcgaatacaccctcaaaatagatatcgctgatggaaattttatatattgaaaactgagtttttttttctcattataaaaagatgtatttctcctgttaattcaatcacattatatagactaatagaatgaaaaaaataaaatgagaagaaggacattttttgaatcatggggaatagttgttgaacgtgtcccatgaactgatatgactaaattatcaatttcaattaaacacgtttctcaaataaattaaaaataaataaaaataaaaaataattcttttattaaataatttttagtaaaaaataaagtgtcacgccacactaaccaactcgaatcgaacggatgccgagtgtgtatagttgggttaagtgtgtgtcctcacccattcacacaaaattagatactcattggagccttttcccaaatgctaaagatgcaccttatataccctagtaaaaaagagctcgtatcccatgtgggactaatgatatttcacacactaggacactctcattttatcaaaaaattcactaactttgtaaaaagttccaacaactccccacttgaattttttaaaaaatattttcatctaacaatatcattcatcaataagattgaacaaaaataaatatatctttcgatttgaacctctaagtagtgaatacaatttagattctcttagagtgacccgtagtcttgaactctatctctaacattgtaccacccataggcggacctaggggtgttgagggagggctatagcccaccttgagatttgaaaatatattaatatacaattttgttttcatacatacatagtagttaaatagaataattagttaagatgctttaaatttacatggagaccatgttttgaatctcattgccccttttttctatgtgtatctact

SEQ ID NO: 129761 - DNA, 909 bp, Cannabis sativa
tattttcatagagttatcaggtcttaatccttgaaccacataaaaactctagttttattctttgtttatactacatttctttattacattttattagtttttaaaaatcttagtaatcattttgatgctttcattaagagttgaagaaagaagaaataagtgataccaagaatgttgtatactacaaccatggtagccacccgaattactgttgaaaaatttggtattcgtgatggggatactcccgtggacaatgtgaatcctactactcaggcgaataaagcaagagtcgatggagatccgtcagaagtaaccattcgttctgctaagaagactcaacatattgaaaaatatgttgatgaaaatcctatcaatgaagattcaaaggatgatcttggggatgatgatcctgaagacgatggaaaagacaaagaagaagaatattgttatgagccagaccctgcagtcactaaaatggctaaagaactcattgaaatcaagaaaaaattggaagattaggaggaattctcccatcaaatgcaagaaactttaatcagatcggaggccataattgaattaggagaagtgactcacaatgaaatattcctaatgacctcgctccttagggaaataatgctacaaagacaacaaacctaaaagaccctggagcttctgatcctgcaagggaaatggaaaaggtgtcatgggagaaccaacataaaatatagctcccactcctccatggaagaaacttaatactgccaaccaacctttgcaaagaaagaaggttgttaatgcttcagggcaaaatcagccaattaatctgcaaggccgagttgtgtggggtgataagccgagtgttgggttttatgccctaaataaaactcatttcaatatataatcagattt

SEQ ID NO: 129762 - DNA, 506 bp, Cannabis sativa
aaaaagttaaattgtataaaagtaaaacatggcacctgacattaaaaatgtaaataatttatcaaatttgtcattttgtgtaaaaaaacctaataattggtagaccaacacaaagtacaaataatttttaaggtcaaagtaattaaacttacttacattttgaatgaaaatgtggccatttatccaaaagtattgtaattttgcctgattatcaatatatcactaatggaatgcttcaagatttttgaagataaaaaagagtttttgaaaatttcataaacttgaaataaaagtaagaatgggaacttaatttgggggtttcaagcactatttaaaaccggaatatttgtaaagtttttctctgtgaacctcctcgaatcaggataactcatcgtctaaccgcagagcatgctttcccaagtcatgggcaactaaattctcagagcgagccacatgagacaaaactgctcccgaaaatttagacaataaagctataacatcttcaa

SEQ ID NO: 129763 - DNA, 536 bp, Cannabis sativa
ttggattggattggattgattggatcgtatcgtgcagatgcagattgggattggattggatcggatactttgtgaacacctctaattattacctcccataaatagctttgatttttaattttgattagaaacataaattggagagaaatgtatatgtagagaggatgaaaattttttactgtttgagatttcacacataaacccgagaagaatatggtctaatgtgcttagttgaattaattatttgtaagaattatggaagacttaaagaaaatgctgagttttttcaagaagaaaataaacataataaaagtttactaaaaagtaaaataaaataaataataaaataatgaggattgcaagatagtaatatttttcattgaaagacatgtgtccatgtgtataaatgatttttttgagttagttttttagtaaaaaaaatagaattatctttgaagaatgtctgtataaatgagggtaggttgaaatatacccgttttttttcatctaaaaaccaaaaatagtcttattttaaa

SEQ ID NO: 129764 - DNA, 657 bp, Cannabis sativa
gtactgcctttttggctcactgtgatgagctcctaaagctcatcacccttagaaggaagggttctctctaggcacatatgagccacctctatggctctctgccccatggttgagtctgctccccgactgggattcggggcacccctacctaaattttgttcaatcctagccaaaggatcatgaatcacgggctgcccagctggtgtaggccctagaggaggaggaggaagagatgatccaataacatttctggcacggttggtccaagccaccttgcccctcaaacaaccaaaaagctcattagaaggtccaccatcaagagatctcaacatagaagaaacattcgcaaaaaaaagtagcaaagtcagaatgaaagtgccaaatattcaatgcaagataggaatataagagatggtgtaattaactatcaaataccaacacacttagaagaggaatcatttgaatccttaagaactgcctttcccttgcccctagatgtaggcaagggatgagtacgtcccgtagagctctagccttgaggcctaattcaaagagaagcctgtccaactgtgcccatgcgagctaagcgctggtggatctgtagttggggctccatccacatctactgatgggccctaggcccctacaacaccagag

SEQ ID NO: 129765 - DNA, 1902 bp, Cannabis sativa
tgttcgggtcacaaaccttttcggaggatactcgcggagcctgacttgcttgagctcttccgaccttttggtgctgtgagccgtgtttacgtagctgtggatcagaaaactggaatgagcagaggatttgggtttgttaactttgttaatcgtgaagatgctcagagagccattaataaactcaatgggtatggttatgataatcttatcctccgagtggaatgggctaccccaagaacgaactagagtactactactcaccactgcccttagattctatgaattatttacaaagaaatttgagcagtttttgttttagttttgaacaagaagctatatttacctttttatttttatttatttttgtttattacattttgtttctttttgtaatattgatgattttgcaaagaggaggaagatggttgatgctggggaaactcggttgcattgtttttgttaaaaatcaatttgagattagattaaaacaaacaataattcagtttcctttgaatgtatgtgggtctctgaatcgaatgagcaattctgcatgatatgtggatggcttgaataagcttttgtattttagtctgcattttgagagttgaaacctgagtttgagatggaaattgcttaaccctgcaatctgcattcgagctgttgtgagtatatattcttagtactctacagtatttctagagggtcatattggttggaactatgcaagtctactggtttgtgatgagaggttttttttttttgacatatctaattttgtacttttccagttttcataagagcaatttgcgttaaagttgatgatccgagatgtattatagatgacattgtagtattttttttttttttgaagtaactggacaagaaaacagttacagagaaaaggagaagctaaattctccacacagaatccaaatttagccttaatgcttcccttgcattgagatgtgcatcttgattttcactatgagggatgtgctgaaggagatcattagggaatagagatagagataggaactctcgaatctgatggacgagtctggatagagcggagttatccttccaagaactgtgaattttcgataggagttgcaggcaatccgattgaagattggttcccttgtgatagatggtattatataatatatattgtgacatttatttagaagaatgatatactatcgtggcttgccacaaataacatttatatacgttttacttgatcaaaagtgatttatcacattacattatcgtcctgtttgacttggtttcttttttgaaagtgttcagataaaaaatgaaaattcttttaaaagaagttagatttataacttctcctaaaagatattttaaaattaaaataatttacataatttttaatttatttatgttttttaatgatatttaaatattttaaaaagtattttttattaaaaaatctatctaataattatctaacagtaaaaataagttaaaatttataattatgttatacttatatgcaaaaatagaaacttatccaaactgggcatatgtcaagtttttgtaatgtatgtcaagtaaaatgtaccatctgtttggcagtagattgttttctgataaaaaaaaatcaatctattgatgcttttgctgtgttgtatgcaatctgcacatttgcaaaatcattcattatggagagacaatatgtacaattcaacctaactaatataataaaaaatatatttttctttgatttcattttgttatttatttgttttgaaacataatttgtcctccaaacaaaaaaagaaggaagctctttcactcatgttcaaaccatatttgagaaagaaaaaaaaaaagctaattagtaatttttctccctaaattttgacatgtagtaaa

SEQ ID NO: 129766 - DNA, 1508 bp, Cannabis sativa
aatcttgaaaattatcgatttgccaaatagaatcataagtataatttagtggtagttagtccaattccctgtggtttgacctcactcgcgtgagtttagtacttgattatgtatacttgcgtactgtgtttaattttcgtaacaatgttcccccaaggcatagttgtatttggcgattcggagctgaaccctttcctagtcgggatgaacgagagtcaagataatacctgtaggcacaggatactcatccacctctgaaggaatccccgagttagtgctgggagcaggagtattcacccttctcagtttcttagcaggctctgtctccaccaccttgcctttgcgcttacggttaaggggagggatgatttctccttcttcttcttcttcttcttcttcttcctcgtcaatcaagacagcttggttctcgagaagtttagcagaaggccctcctagagtcaccaccacactacgtggcttgagcaggccagcttcaggactgtgtgtacaggcaagggcatcgaggaggtcatccattggctttggtgttcaaagataagcaaaagagtcagaacattgtcaaaaaaccatgcatacaagagtaacataatgaaactagtcctaccctggtgatttaattctaccctagcaaaggtatatattaaaagattggtgttgtcatcccctagaaagctattcgaggggaggaaccaacttgaagttaggtatgaagaatggtccaagaagattcgacccaagaaatgactaaggatggaaaaataaaaaattttggcattataaccccatcgtaaatggggcatccgaaacctatccaaccgattgtcaaattccactggccttaggccagcataatcttaaacagaagggacgtgatgaataatcaatggagacttacaagttttggaagtgctagcatcaggagccccagagttggggatcgagaaaggaaacttagggcgagtaaggacttgttccttcctagcctcctcccggaggatcctccccgaggtagcctgagcattgatataggccagctcttgttccttcttgaatttataatttttgtatttgtcttctgtggaagagatgatgtcctctcggagcgccttcgcggtttcggggtttcagatgtgagagcaaagaaccttgtacaagttgaagtcgtccaccgactggcttatcgaaatcaacttggccctcctgcaattagcagtggtgaccagatcccccacgttcaactcatccttattgtaaccaataaaaaccttcgtgtggttcaaaaagagttgggtgggggcggtacggtgcatgggaggaaccctgacccattccgtgagcagctccggatgtttgacagctttgaaatcagatgagaagaaaaatcggcgacgatacccttttgcattattttgaaagttaaaaggcaccaaaccctcgttagcagggtgggcctgaagtttgtaaaaaccatccttaagtttgtcccc

SEQ ID NO: 129767 - DNA, 675 bp, Cannabis sativa
aaaacgatcttaagctctcaagtcatgagctccaattgtttagtctaatcttagatatcacttccacctataccatcaaatagctaaatagttatcatctttgcattttacattcaaaatcgagtacaacaacatataaaataactatatttaaagtttagaattttaaaacatcacataactagtgcacattaattattagaaacgggtgtactagaaacattactaaaaatagggatagtatatatcaaaatgaccacctcgatgagtagatcacacccatactaactatttatcgaaacagtacatgatatcactggaaataggcggagctataaaattattaccagaaaaagtagcgggttgggctaaatgacttagtgtagattgttctcctcgacgagttgagtctaatggtgaagaagactcgtcaaacaggcaccggaaatgactagaaaatttgttaaaagtttgaaccttcaaactttgacttgcgatcttgggcaaatggcgacggaaaggacaacaccacttaggagttgaggtcattggcatctgtggatttgaatggtccggcacgtgggtcagacgatgaccgaatggtggtcactgaagttacaccgatgattgtatttatgggtttttcttttgtggtttgaagagagagagagagag

SEQ ID NO: 129768 - DNA, 1007 bp, Cannabis sativa
aataatagaaacagaaataacaccaggtttttacgtggttttgtagttaactctgcatagtccacgagtcaatcttattaagatttttctgatacatacctaaggttcttttcaatgattgtattttattttctctaaggatattccctcctttttttagtataatatgcccctatttataataacataggttggcagttaattacattcaaattcgaatcccacaactatattttctcaaaattgtgggccttaattacgctccacgtaaataaaagtagttattatttaaaaattacacagttgtgatttaaaccgcttttaaagggtcaatgctgacgtggattaagacatgctgtaaaacatatctcgccgaggcatctcacttggtacatgaacaacttagttcattcataagtcttctagcaatggcatgagcactagtatactgagcaaacttaagaatcgctctctgtaaggccttgcagactggacaatcatgtcctgggagttctcaatagcaacaataaccttggcagcgagctggagcttactaggagtatgcctttttatacatagcaagatggatgtctcgctatgcattatataagtcctccttaggattatgcctttggacgcgaaatggtttctcatcaatacgcgaactaatagtttgcacatccttatctcgcttaagaccgtgcagtcagtgagttataaatatactctattaactccatatttaatgagttatttcatttaatacttatttatataattatcaatatattcgttgattcatattccctaaagttgacatgtgtcaccctctgaagtaccagtcgaatctcgagtataacaattataataaacttgaattacatttacattcttattcttcttattattatttatattaataatttttttctctcgtgtaagtataaaaaagatacacaatatttgatatacttatttgtaacatgtttatatttatttgtgattat

SEQ ID NO: 129769 - DNA, 1278 bp, Cannabis sativa
catgatttaatatttcaaaatcagaatttaaatagcttcttgcacgtgtgtttgtttcaatacttttacacccgtgccacaagttgtttgaattttgattggcattttaaattatttgaaattttcttaaaaatttgtcggagcttgtaactaattatgcactgttatgttgaaatatatatatttatatataaatatatgtatacaagtagattttcatattatggaaaataccaaaggtaccaatagttagtgattaaaaagcaattccttatttatatataaatatatatgttccatatatataatctgagtacatgtaagagaatgaaaggttgattgagatttgcttgtggaagttgttgttttgaatggaatcatgactcacgagtggtccacctttaccatcctggataagaaatttcttacacaaatatttttctatttttctggttacctttcatctgttataataggtatctgttagtaatataacactgcattttctcctttacttcgagatgaatattgtttactttgattcttttttctagagagaattttttatggtgccaaagatagtctttctttggttgtatttcttctttcttccttttcccttttctgcttgtggcgagaacattatctgcttagttgatgcccaaaactaacaccacatcacctaaggttggagccaccattcatacatattctattaattttcaacctctagaagctcctaaaatttctttattatgattaccgagcaatacattattttttaattttagtggaaagatatagatttcctagaagctcaagcactattggagtttgctattgcagctttaaacagagactaatacaacaataaataattcttagtggttcaacttttctagttcatggggctgcccccagattatagacttgattagaaagatttatgacagaaggcacttgactaagtaaaagaacactccttctgaacaagagtgcaagtttatttttacaaccaacactttgctaagtttttggagttactaatcagttagaaattccttcaacaaacagtgagtattttgtgctaaagatgcaactagctttctctcaaagaaagtgacgtgaaattcttctcccgaaagaatacaagctatggaaagtgcagaatgtgcagtaacacaagttacaaactcattaagatacacaacttaaagtgcgtttggtaatattttttcaattaatcttttgtttttttttaaattagaaaagtaaaaa

SEQ ID NO: 129770 - DNA, 581 bp, Cannabis sativa
gttttgttttgtgcgatttagtcatttctatcttaccctctctgcaaagcttattgttctttagattttgtcctaataatagttccaactgattgtccccattgctcggtcctcttgtgtattctagttaccctctccaaccgtggactcttaattcaagtttggttttatttgctcttcataagttgttatatcatcagagtagcatatcgggcagtttcttcttctgtgtgtgtgtgttatttttggaagtgtttcttggatcagtcttacttttttccctgaagccgtgattccccttcacaatttttcccttcccagtcatttcacttccttgaacaactgtgccgtcatatactttatcccaaacaaacctttgtgtcttttaacttccattcagtcaccttcaatctttcacactctgccaggtccttcattgtttttcggtttcttactactttttagctacctaccctatggatgatctaacaaattctctctctgttgctctcaacctcacagaaaccgagtgtactattcaaacacttcatgaacttactcctgcaactacacctgaaacc

SEQ ID NO: 129771 - DNA, 899 bp, Cannabis sativa
aaaaaaaaattaaaaaaagaaaaaagagttaaaaattaaaaaaaaaaaaaaaaagagaagtggagaaaatggaaaaataaaataatatagatacataaattttttattaaaatttaattaacacgatatttttatcaaaattaaatacctaataatttaaaatttaaatctatatcaatattatagttagtagctataattacaaaaataattagtaaaataaggatgccacatataatttttaaattactaatatacataaaaaaaacaaaaagtgagaatgaacatcgaccaaaaaaaaatagagaaacaaaatcaattgaaaaaaaaaaacgttaaaaaaattataataaataaataaaatgatttctaaaaagtaataaaataataaaagatttaaacaataattaaaaatgacctttttagaaaaaaaaaaagatttgaaaaataattaattaatagtttaataataactttttattttcaacgaacatttagttatttactaattacaaattgtagatatttactactttaaaaatatattgcattaaataaattaattaaagtaaaaaaataaaatcctaacaaaaaagtaaaaaaaacaaacccttataaattattattgtgttgatgtcgaggataaaattgtgaaaccatcataaaaattagcatttaaagtaaagatttgtgaatattgaaataacaaataattgtgtgcttctaccatgatcataatcatatattgatcaagaaatatttaagtgatataataaatgtcaatttttgatatataagtatacttttgtatatacttagggccagtttagcatagctgtgctatggaaaaaagcagctgtagctgtgctgtgagaaaaagcagctgtggcagaactgtg

SEQ ID NO: 129772 - DNA, 897 bp, Cannabis sativa
gtaaaagtagtcctattttttcaagagttataagtattagtttagataattaatttgggtataaaaatgcatagaaattcaaatttcccatttaatatcaggtcctacttatagggtgacacttcatagtaatgctcttttttttaggctaattaagtttttcatccctcgaactttaatatataccaaatcatgcccctgaatttttaagaccgttaaaaatctcccataaattattgaaatttttgaatttaaagatttttgtctaattttaataagaaaagtctaacttggatgaaagttcaggggacatatgattcggtacatgtcaaaattcgaggcacgtgatttagtagatattaaagtttgtggagtattatttaattagtgtatggacaatcacatacttagtaaaattgaatgaaattggataaaagtccttaaatccgacaatctcaatagttcaagaaaaatttagaagacatgatttagtacatgttaaagttcagagaacaaaaattaaaattagcattttttaatggtagtaagttataaaaatatttaaaaagaacttatgtaatttatgtaaaatattaacatttaaaatatttataccaaaacatcttatctcatcatatgaatatgttaatatattactattaaataaatagtatatcacaaaataaatccaccatgcttactcatggatggcttgaatctcttaccacttgtttttcttctcgtgatcttgattgatgctctcccccatggataatttcttttgattgtatgacctcaatggcaagtcttttagaaagaagaatatgccatcgaaatgacttttagattgttagaaaagttctcattacaagcgagaatatgaggattacaatcaaa

SEQ ID NO: 129773 - DNA, 1600 bp, Cannabis sativa
  modified_base (1494)..(1499): a, c, t, g, unknown or other
atttcgaaaatatgttatatgctcaaaagtagcatcctaccttttctctctaaaaaaaaatagcattctacctatagtttagactacctaacattatttgataaaatatggagatatccttaatgtgccagtgtcgaacattattacaagttatcatactattgttagtatagttacatattaggttaaatataatttactttaataactataaaaaaattgcactattcattcataattaagtttcatctcgtactaataactattagcaatgttctaaattatatgtagtgaattaattttcccaaagtatattttcaatataaagaaaaagattttctccatgtattttcaattttaaaaccaaaaacaaactttttttattttttttatttttttatttttcaattgtaaagagcttctttaatgaaagcaacattggtatttgcttgaggggctcacatttggttttaagctaattagttgttcactttaaatttggcaaactaatagcggaatcgtatttataattgatatcaccatgtgtacacaataagaacaagtaaatcaaagagacacaatatttttatagtggtttgacctcctttgttagtgggtaacgatctactctccttattgattgtattgataccagagataataccacatagacaagtggattctgaagtggctctcttaagattacaatagtgagaatctaaaagcaaatctcaagtagaaaagatgagtgagacttagtctcttctacactgcttgtgtgcgtgtagaagagagagctagggttttagaacttagaacttcagagcatagagagagcttaaaactcgagacctaacaattcagacttatagagataaggtttagtttagtgatctttatatatgagagcttacaagagaagataggttaatgtcacttaaaatgaggagatatcacctatttgttacataataaaataataaataaataatatgttaattagtcccccaaaataggtaaataatgaagtttatctcctattttcgtgggctgttaaagctcaaatcgtaactgaaagtgttgtccaagatgaaagctacagaggcacaaaaagtgcttaccagggtcaaagctggccgacccttcctttgctggaggctggccgacctatgctagtagtagggccagccaggggggtcagccagaccccttaacttggccagttcattatctttttgtcccgcttaagtattcaaactcccccatcaattgatatgttgcgtatgatgacttggcattcttactgacaagttgtactccacgtggcatcaatcttgcccacgtgtacatgtcacatcatgtggacataaattaggatagtgagctcgttgggtggagctctcaagatctttgagaatctttggcacttgtcacattttttgacatagtccatcgaatcctgaatcatggttgtgttggaatatattttaccannnnnnagatttactaacaagtatgtttgtaacatcctaaatatgaatctctaaaacaatgaaaataaacacatataaagtatgagaaacttacattggttgcagaa

SEQ ID NO: 129774 - DNA, 803 bp, Cannabis sativa
actgttgttacaatagtagtaatgttcaaaaacacacaattcaaactaaaaccaatcacaaaatcaaaactgaacttagatgaaactaggcaagaataaacttagcttgggaattaatgaattaggaatctttattgatagaataatacttggtacaaaattagatatgtctaagcataccactcaacacagtaaacaattaacatcacttcaacggtgatactccaattacatccctccacacacacacacacattgtgatcttggagaatctctttctaaacttggctttgaatctgaagtatgagcattggatcgcccttgagtgagttgagtcaaatgtatttataggtgtttgtgaggatctatttaagttggtaacaaagccaactgttataattaattgcagtttttttagtttcaactgggacgtgttaagatggaacaagtgacttcacagattattaagtgaatttaatcccaacaattctacctgactagactcacttgatccctgatccaccataaatgattgaggatattaactgtccaatgttttgaatgcttagcaactttagatattgcctaaacttgtctagagttacacttttagtaagaatatcactagggttatcatgtgtacttattttcttcacttgcacccgcttagatgacacaatatcccttatgacgtgtaacttgatatcaattttctttgacctctagtgaaatattggtttttccataagattcatagtactttgattgtcacaataaactgtgatatcctcatatttgaaacc

SEQ ID NO: 129775 - DNA, 725 bp, Cannabis sativa
aatgtaaccataaaataattatatgtataaaaacttgctattgacaaagataaatttttttattgaataaattgttgtcgaatgaaaaataaacaacacccaaaaattacaagtatttaagctacacaagaacacttataaatagaattgcaagtatttacttaaattggagaatactcaaagtaaaataacgattaatagaatataaacaacaagtatataaaatacccaaaataattatagtggttcaagtagagtttcgtctgcttatttcaattttaaaagatagagtgtgatccctttattcgcatttgatcactcctttatatagattgcaagtgatcattcagttacaaaaccgtttacgaaataaataagaatatttttgaccattcttatttaatactcaaatgggtgcgactactctaattacacgtttggctgttcatattctcgataaatgtaaactcgcaagttcactagagttaccacacatgcataaacctctcaggatttttatagacgcgggaacttacgtaggtttaatattataaaatgactgcaattataccgatcacatatgtaatgaaaaaataagacgcgtggattcataacgagttccagcatacaatagtcatttggaacaatcgatgtaattaggtacaataactctattagggctcgtttggaacgccgtatttggtcgtattgtattgtattgtatt

SEQ ID NO: 129776 - DNA, 751 bp, Cannabis sativa
cttaatcaacgccggagcgagcttatgcccttgttgtaagctcggccgtagcgtatcctgactcatcatttccatggagcctaaacctttcatgtttgatttctcgggaaaatgttcttggatttggattgggctttttttatgtttaattttttattattatttaagattttgggtttttgcttcgatttgagattctggttctaaatttgtgttggccaaaatttttagaacctcatcctttttggtatattcctcaaccgatttttgaaataatcagggagctttaattcttctccaaccgggctccaatgcgaaaaggattcaactaactaaaaattaccaatcaacccagatcagaaaccaaaattttccaagaaaatcctataatatttttcgtttgatcaaacagtacagctaccaaagtccgacccatgtcgaatcagatcatgctacacaacaacttttcgaaccgaaggcaacccttgttaagaacccaaaactcctcatcaaaaaacacctggctggccgaggtcgctggcggcacgacagccaaatgggccgccgtttgctgctgctgcctatgtgggctcatgaaccttctgttcctcgccgccgtcgtaatctcatttgtgcttgcctggtacggcgacaatgaggatgagaaggagagaaagagggctgggaggagaggggtgtatgtatatatgtatatagaaaaagaaaggggttagaaagagaagagggtttt

SEQ ID NO: 129777 - DNA, 765 bp, Cannabis sativa
  modified_base (41)..(46): a, c, t, g, unknown or other
catctagaccctaaagaactgtttagctactcttattcatnnnnnnaaattcacacatattaattttagaaaaaagaagagaatagagaagaaaagactactgaaaatcccgttggaaaagccttcgcgaatgatatttatctccaattttcgttctcaatgattacttctgatttcctctgaattgcttgctgaaatcaattgaaattcacttcttatatagccaatgagggaataaaaagatagaaaagattgcacatgctgaaaatcctattcagctttgaataagataggaaagataagcccgggttgaaaaactcctatttttatttgaattagggggcaggccacggcatgctttccctatgccgcagcccgtgttgagcttttcacacgttcttcaggccttcatagacacggtcgcgtcatggtatttccatgcctaggtgcggtccccactttgtgcccatttatcttttatgtgatattttatcttttttttttcctttaatatttttctaatcttcttctattttaaatttgtgaaaataaaagataaaaagcataaaattgctcaaaacacgagtaaaactaaattaaaattacagtaaaattaatctaaaaataatactataaacaacctaacaaattcccccaaactaaacatttactcgaccttgagtacactaaaacaaaaaacaaaagttaaacaagtcaatctccagaacatgagtaattttcaagtagactcaataacatgattat

SEQ ID NO: 129778 - DNA, 1227 bp, Cannabis sativa
tctctctctctctctcacactctctctctctcaatctctctttttctcatttgatgttggctgattatttagggttgcggtggtgtggtcgccatgggtggtggtgtgtggtggcatgcgatgttaatggtgcggtggtggtggtgtagtggtggtggtgcggtggtttaaacttgttaattttgggtttaaatggttgttcaaatctttgtatatgtggtggtgtgaaatgtataatagtgtggtggtggtggtgcaatggttttgattttttttttaaattcttttacttcggttcctaatcgaagcaaaaaactaattagcgttggtgcaataattttttgcttcagttatgaaccaaagtaaaaccttttttgtttacttcggttcataactgaagcaaaaaaaaatttagcatcagttcgaaattaaagcaaaagaaaatcaatatttgcgtctacgataataatgtcggttacacaaactgaaggaaattgtttatgtgtcactttaaaaccgaagcaaaaggccctttttgtagtagtggtggaatcaaagaatgaaaaatttctttaaaatgccttgatcagtgggaatgatcaatcaaaggacttaggtcctgagaaagatctttcagaaccttcaagttcaagtgcaagattgataatggtcaacaaccccgtagttcaaacggatgttgaacaattattactaatcattgaagatccaaaagttggtaatgataatctagtagatcaagatgttcaagagttgcatgcaactgttgaacaacctgctgaaccaattgctgctccctaagagcctgttggtgaagtcttaaaaaaatctactggacccgtcaaacaaaagatttacaaaggctatgttgtgtatttattcgaatctgatattagagttgaaaatgatccagaaacatttttacaacctatgaacagtagagaatcaaaattatggtacaatgccatgggtaatgaaatgaattctatgaagtgcaacaaagtctaggaacttgtatgtaaatgggtctataaaactaaaatggactcattaggcaacactgagagatacaaagcgagacttgttgctacaggattcactcaagaagaaggaactgactatacaaagtctttttctcctgtatcaaagaaagatttcctcagattcatcttggtataattagttgctcatttcgatttagagctagag

SEQ ID NO: 129779 - DNA, 1007 bp, Cannabis sativa
tagttatttacgaataaaaatattattccgattgcctccattccggaagattttttatgtaatgaccgggaggtctaaacttaattaattaatactactacgcgctttttctcaaaaaaaaatatggaggaaacttcgataatttttatattaagcacttttttttttaattatttttactataccaaaatcataaattttaattagaataataattagttacaactatctattacaattatttaataaattttcatgctcaaaattatatgtcgaaatatttttttcaatactttttatagttatatttgttatgattataatataatttctaaatttttgaaaaattcagaatagcttatattagtgaaaataaagtttatgatattttagtccaacaggcatgctcaaaaaattttcaaacttattattactaggattatggtaaattatataatttttttttaaaaaaaaaattacaagaataatattattactaggagtatgtatttttaggctaaaaaattaactaatagattgtaatataagataaaccgtagcactcttcttttaattatggccactatattgaaattttcttaaaaaagattattactgtatttttaataatttatgacataaatatttaaatttaactattagttgtacataaatttttaaatttaattttttatggtaataatacttaagttatatttttgtaactaccttactattaaatattaagtcattatcacaaatcattttcttattagtatatttaaattaattttaaaaaaaaaattaaaaatttaatgatttaaattaattaggaattgtcaagttacttcacacttaataataatattaaatttatatatatatttacaactaaaaattaatcttaaccatctatgttgaaaatatttcaaaaaaaaaaatgaaagaaccgacaattgcaacaaattaagataaacgagttaaatttttaatttaattttatttat

SEQ ID NO: 129780 - DNA, 1452 bp, Cannabis sativa
ctccacaagattgggagcaaaggtttgctgagttgcaggctagaatacagcaacaggatgaggagattgttaggctgaggcagcaaggccctcaggttgctcatcttcctcagattggtattgctccagtaccaatgttgtcagcggaatatcctgtagctggcaacaggttggtaccactgtatgaacgatttcggaaatagggaccttcggtctttctaagaggccttgatgttatgaaagtcgagcaatgactaaccactatgaattggatactaaattttatgggagtgaccgatagcgacagagtggaatgtgccacatttcagttccaggaagatgccctggtatggtgggagttagtactgctcacacaggatgtcgctgttatgacttgggatgaattctaggatctgtttaactactagtattataatgaggttgttcgcagtgcaaaatggaaggagtttacacaattggttcaagaagaatcaatgtcagtgacggagtatacgaccaagtttgaacaactggccaaattaatcttaggtacagtacctacaaattacactgagaaggaaaagtacttgggtgggcttaatgccaagatccgtcatgatttgacaattacgatcgatgatgctaccccatattcaatgatggtatagaaggctctttgagttgaaggtgtagtacagtttttgcatgagccttgaaggactcagggttcttgtggattcactactcctctttctagtttgggtaggagtagtagtgattcaatttttgattcaacaaggaagactcctttcacaccaagcaattctacgcagaacaagaggttccgcgggaaccatggtcggagtggtggtcatcaaggtggatttacatacccagaatgtccttgttgtaagaaacatcacttgggagaatgtaacaagaattcctgcttctagtgtggtaagatgggacactttaagagggagtgcccttagttgacaaggggtgagccaaagaaggagttcatatccactcctgctcgggtatttgccattacacatacagatgctgaggctagtccatcagttattacatgtcagcttttcataaataactcctattttactgtattgtttgactttggggctacacactcttacatggcatcaagagtaattgataaactgggtaggccctgttatggttatgaattaggttttggaacccttttacctagtggggagttagttatcttcaggaggtggattaaggctctaccaatcacagtggatgatagggagttaagtactgatcttatcgagttatctttagtagactttgatatcattttgggatggacttcttatccaagtatgcagctagtgttgactgcatgagaaagatggtactttataaccggtaggtgaggaaccatttgtatttgtgggttca

SEQ ID NO: 129781 - DNA, 544 bp, Cannabis sativa
ttaatgttataataaagttccattgaaacgacaaaaagttttgaaaaccaatcactttccaattgaattgacctaattatacgataataaaatccaataaatctccattctaagctaacaaaaagtaaaattagaaaaaaagatcaaacctcgtgatcacaatccacaagctgttgctcgctaaggctaacaagctctcccgtggcaaggaagttagcaccttccaaggcaccggttgtactgaaactccagcatgatccgcaagaaccctaaaatccaaaacacaacaaaaattcaatacaagacaacacacaaaagagtattcaatacaaatatatataaacatatatgaagaaatacctgattcttgactggagtaacggccccacgatctctccaatcaaaatcctcaggaagatcttcagtaggaagaatcggagccttattcgcatcagaggggagtctaagtcggctcctgagtccaagaaaggtacgacgaaactcagccggagtaaggtcggagaaacgagtcacgccatggtta

SEQ ID NO: 129782 - DNA, 1016 bp, Cannabis sativa
ttttagtgtataaaatttatgttagctaaacaacaaaagttaactaaaaaataaacacaattatcataaaattacactttcaataaaactaaaaaaaaaataaaataaagaagtctcgggaaaacaaaaaaagaacaactgcattaaaatatgtgtgtctattaaaaaaaaaatactttctccatcaactagaaataacaactataaacaaattcgggtctaaaacaaatcttctttgtgtcatttggaggagcctcatcatcactatcaacatacttcatttcttccatgcgagcatacttgtagaacatcacaaccagcctatcaatgtttctcaacatcgaatttggagagaatatgtttcatgtcaataaagtattcagcaacgatactacaaaacatctgcaatcactataaaacaacattaaaataacataaaaacaacaacaaaataacataaaaatatcatatttttgaaaaaaattcaagttgcttagctgataagaaaaccttaagctcttggataattttaaaggtacttatagacagagcttttgcaacgaataaatttttctgatcataaatataatcccaatcctatagcatttaaaataacattaaacaaactataaaacaactttctactatgaaatattttttttaaatgaatgaactacaaccaaagaatatttcaaacaacacaaaataaaaaaataatctataaaacttggcaatatttttctttggaagcttgaactcgtcaacaacattagaggtcttaccacgaacatgaaaatattagaatgacaaaaattaataaaataatgaactggtaaaaatacaattaatagttatacaaactataagtatatcatgaactgaacaacataaaaacaacaatataataaccaaaaaataatgttattgtaaaaattaataaacgtgcaactaaaaaaaaactcaaatacaactgataaatgtaagacctaatccaatgatatagttttttttttttt

SEQ ID NO: 129783 - DNA, 670 bp, Cannabis sativa
tgatgaaaacatgaaactggttctagtaccaaggtattggaacagtgaacatctaagaaaatactaccaataagtgcacaaggtctgatgacccccttaagtgcacaatgctcaaacactcactcttaagtaagtgaccttctgaacggacctcgttcaaaggtttggaaaaaaaactagtactcaggtcggatgaccacccctaaactatagtatgatcataaatcattgttcttcagcaatatcttttgggcggaatatactgttcaattattttatggtttaattagctaaagattagttagatcatgtaatggcttttatattttaataaatgtacgttactgtggtaacaacacatttagaccaataaatgaataaagatattaattatcattctaattatgtccattttatcttttatatagcaagttatgtaattaccaacaaaaatacgtacaaagggtttgccagatagaaaaaagtgaacttatgatatacaagtgaccaagaatcataagcttgctcagtcacttggagggcaactatacacccgtacaaaacataggtgagtaacaagctcgaaaaaacaaaaagtatttacatgtacaatcatttagacttaagagaaaatattcatttttaaaaggtaacaaagcatgataactct

SEQ ID NO: 129784 - DNA, 1864 bp, Cannabis sativa
  modified_base (1795)..(1803): a, c, t, g, unknown or other
tggtaaaatatattccaacagatagaccttccctgatctataaactagtcttccttggagtggatctctgatgagatcctgcgctcttcgattggttctctaattgaaccgccttatcatgtcgctgacttctctattgtaacgatccaactccacctaacctagtgagattgaaggatgtactcttggtcatccatccatctcaagtattcgcatctctactaagcaaatacattgcaatcagcagctcgtagttcttcacttaggtcggcttcacagacgacctctctaagtctagctaactcgagatcttttccctagtccacatggggctcgccaatatcttgcttgccgattcctagtcctgtctctctaacatagtatcggagatgagatcaagttgttgttcctaggggctattccctaagggtccttcgttcagtcggaggagatgcaagtggagggtcctccctcggaggcaaaggcttgttgttcagatccatagggacgttcgtgtcactctagccagctgtagtgaccagattcgaagtgcctactgtgatcggaattctagtagtggctggaacatggacattaggatctacagtcagagggtcttgaggaagacccgatgatgcatatggtgcaactagagttctcctcgtgttaaccatggcatttgatcagatatgatgtcaacttgctctcgatgaaactaccaaactcttgacctcaaaaattggacaactgacagtggagtcgtattaaactgaggattgccatgtgttacacaattagaactagaaagtaaaagaacacaagtatttttatagaggtttagcccccttagttagtgggtaatgacctactcccattttagctgtattgataccgagagataacactattcagatcactattggtggaatctgatatagctctcttgaggttacaaagtaggaatcaaagatggcaaatcttaagtgttgagagatgctatagtgggcgagtgagagagagatgaagtgaattatcatacttagagctttacggcttaaaattagacttagagttttagggttaagttaagactctttatataggagagcttaaaccctaattagtaaataaaataagagatatttacatattaaattggtaaagccccttaaaaataggtattttctatgtactttcgtgggctgttaaggcccaattcacagtctaacttgtagtccacgtgtaaggttgtgcattgaagtcttgccaagtccaatcctagctggccatgcacctgtaggatgcaggctggctggccttgtgcagtctagaagctagctggccatagggcctactaggggtggctggctagaccccttgaggtggctggtctgttgctcgttgtctcgttttagtgaagggaccctcgttggctaaagtgctgacttgacctccatgttggtgagttatactgccacttggcactgatattgtctatgtaagcatgccacatcaagtgggcaaaaatcaagaaaataatatgaaaaatggggctccaactaaccgacttgacaccttgcacattagtaatgtacaacgtctatggccaaagcattgcgcccaaggggtacatccgactgcccttagttgtttgagagaatccaacaaccagaatagtgatgtcgtagttcgtagtaatggacatgccctcagccttcaacgccatgataagtcatccagccttgtacgacctacaggcagtaactgttggattatattttaccaggatctagannnnnnnnnatgtatgttatttaacatccaaaatatgaatttctaaaacaatgtaatttaaacacatata

SEQ ID NO: 129785 - DNA, 1298 bp, Cannabis sativa
taaattttttttttattttttaaattttaaaatatttataattgtttttaaaattaatattaagtcgaccaatcataacaatttgacacgtgtacacgtgggctggcatgtagcacttaattgagattttttgataaaagtgtaaagagcaaaacgaaatgggatttaagtaggttttgccatcaaaattttaatatttgttgttaagtgttaaaaaatttaaaattcaggtagtttagtcgctaatatccctaataaacaatgttgctattactagtacaattaatgctcaacacaattagaaacgatatgacacatcgtaattattagacataattaatatatttttagtattttttatataaaatagtgtcttatatagtatagccatgcatataatatcactatgaggtcgtatttaatcatcgagttgcctacacgttacgaagcgtttgcactacgtcacaccgcagaaaaaaaatatagtttaaaattttttacaatgtagttgtaatttatatttttgccaaaccgtgctgcatgatttgcgattttaaatttaataattgtgatttaaacagcaccatactatatattataaaaaaataatttttaaaatataatttttttatatatatatataaaatcatatctttacaaagttcaaatcacacaattaaattatgagaaaattataaatttttatgggtttttttactatgtgcaaaaatatgattttttttttttcaaaaaaagttattcaatgggaattgtttaaaaaagttgaaaaaaattagataagggtaactaggcacctttaggggtaaccagttacttccttatactatttgttttattaatttttttcctaaatttttctataaaatattttcttaaaaaaaaaaaccataaatttgcaagcttatatcataaaaatgaaaattcctttgtggaaattacacatatttatgaatttcatacattgtttgcaaattatgactttattttcttctcaaaaaaattattttatgggaaaaaaggttaaaaaatattgaaaaaataatttaggtagtactttgccaatattcttaacattttgtttattattattttttttttcataaataacttttttcaaaaaaaaaaaacatatatttttgtaaacttttactatttaaaagccataaaaataaaaattccatgtcaattttcattttccattcattgcatattagtattagaatataatatatatatatatactaggtgattgttacgtgccaagccacgtagtgtta

SEQ ID NO: 129786 - DNA, 709 bp, Cannabis sativa
tttccattccctaagcatacttacgagtatatggatcaatgagttgcatgctcttactcacgagtatgtggatcaatgagctgcaagctctttgtttattcgttctaaacatctttcagtgtgtattctgtttattatggacttgttgtctcggcggtctcactagtcaatagttattacttatatctcgctattgcatatatggcagcgagcttgaatatttctattaattgtaattttcgaggtgagttatttaatatgcatttaataatgcacaatttgggctggttcatattccagctctaatacacgtgtcaacttcttattgctaaccaaaatttaggtataacacaatcctttcgaaaagtttggatttcagttatattgcataaaatgtttccagttttagcattttaaatttttttttttatgatagtatacattgtagttattttgaatcattggtaacttttatttttttttttaaataaaaaataatttaattcaaatattttattatacgcgtaactatttttttccttatacttaaataaatatttaaaattttactttaataatgctgaaacaaataaaaatatgccaaaattacattttcagaaagtgtagtatatttttatccagggccggccctaggcataggcgggctaggcccgggcctagggcccacacttttcggggcccaaaataa

SEQ ID NO: 129787 - DNA, 742 bp, Cannabis sativa
gggattgcacagcttacccggtatttccccttacggatcacgagactagtgactgtcacaattttagtggtagctaggtttgtagtaggaaattttgacattttagggttcaatttaggttttaacatagtaattgatagaaattagtgaactatggtaaattattgaattgaataccttttttgtaccaggtttagaagggtgttggttcgagttttagggagaaaccccttaaatatttggtctgccagaattagtcgaccggttggttctggtgcagcagaaccggtcgatcggttttcctgcaggaaaaattcttgggtttttctttaggctcaatttttgcttgggatggtatctagtatctgatttaggttcttatttgttgtgtaaattattttggggcttgttggaggttaggttttgctcggttggggaattagggttagtttttagaatttcaatttaaggtatttatcgaattttattatcgtgacataggatctgggattgtccagctctgtttctactcacagcccgcacgcctgaaatctggactgaggtaagaaaagtgctacgcaccgtttatgattaaacaagtatgaatgttatagtctcaattatgattaagatcacgatatgtgtttgttgtgccttgattacgatcgaggattggaaatggtcattaccgttatgagtaattactcttgaaactgctgataggtttcttacttatcgttca

SEQ ID NO: 129788 - DNA, 1608 bp, Cannabis sativa
  modified_base (69)..(76): a, c, t, g, unknown or other
  modified_base (1392)..(1412): a, c, t, g, unknown or other
atcatcataaattaataatttagaattaataactaattttcataatgaaccctaattatctgctaattnnnnnnnnaaagctaagcggtctttacaagtggcgaggccagtacgagttgctcgacagggataggtgttggagcctcaagaacatcagggcatgagcagttctccccctgtaaaattactttaaggacatttttaaccatcgcaaaattgccccattccagttggttcctatttcctacagaatccttgcaagattaagggttctgtacaaaattttaggatgggtgtgccccactcctctggaaatagtatatctttactcggtcaaggcagtccctatgaagaagaattttgtagggggcttctattatcttgggactcacacaagcgatcgtaagatcattgttggttttccaaacaagactgctttcaaagaagacttctttaggacaagtggtctctccccaatcaacacaactgcctttcgtataatacgtaagtaaattttctccaaacttggttttagattatcccatgtctttaattttggcctcgctaacttgtaattttacttttttttgatatctgtctcgaaaagaccaacccctactcccgagagggccgagccacgcaagcttctactaggttttccctttggcctctgatcagccgagtttctcctgaacgaggcaaatttgagatatgttggcctactcgccaaaaattagtacacttgcgataataactatgtcatgtatgcatcgcggaagcaggttccagtcccagcggacgaggagactcagaactatgtggctcgggcgcattgccttcagaacaaagtcccttaggaagctgaagaaggagcataccgaggtaatcaatgtggatggtcacccactgtgcttaggatcgagcgtaccacactagtgtctttccgatatagccagtataatttttacacctagaatccctttctcatagatcgtatgacacataggtttgatagttggtacccaaaattctatgttcagattagttgtaggagctcctactatgggattgtcgtgcagtatgggaccatgatggatagctcatatagatttgagttgggacttagaaccaattaatccctatgacgtattcatgatcataggatctacagaatttagtaaatactatagtcctccctctttgtcttcttatgattatagtaaatccctcaagtgtgaaatcattctccattttcccctttatttgttttttttgaacaagtgttaacatattgtcttgtctcaccaattcttaggaaacctcatcggatgtcaacgtggagcccttagaatttaccaagtaaatttcccaacttattaattccttattgannnnnnnnnnnnnnnnnnnnnttgcactctcagtcatatagaagaacgctctatatgttcgacgatataaatacgtcattagttatcaatttttataatcctaatttgatcaataaccctctaatagatgatctacatcgaatagacacaaagttaccgtcacaccttcaatgtattttatccttaaaacacttacctccgtataaatgatatttca

SEQ ID NO: 129789 - DNA, 524 bp, Cannabis sativa
  modified_base (52)..(64): a, c, t, g, unknown or other
aaagaaaaatgtaaccatatagttacaataaaaatgtaaccattaaatagtnnnnnnnnnnnnnatatatatatatatattgcaaaggtgaatttatctggatttagtatccattttccttttcatatttataattatttagatgattccaaagctcatctaagatttaatttacatatattttttaattcatatgctttcttttagtttttacactgtgtatctgtaggttttaataatttaatagttttatttttttttccttaatattcaatattaaaattagtatcagtcttttattttggagtgtaattatctttttaaaattggtgtcaataataatctagtacatagtgtatattagataatgtatacactcaaaagtcatatatatcaaaggttttgtaatgatcgctctagtaatttagatcagtaagggcaattagcattaatttttattattttattattatatgtaaattaatttaattgtagacccaaatatttagaaataaatattagag

SEQ ID NO: 129790 - DNA, 1227 bp, Cannabis sativa
aaagtttgggttcaggcaaaatacgattattgggtactcctaacaattcattaagagatacaacattaagttaacttaaaggctattcctctaagggttcctttaattcctaaaggtgtaaagcaaggtttaatgcaagcgtaaaaatcttgtacaagtctagaatataatggagtattaatttgaataaaagaggtccaacctaaaacttcaagatgactaaaatctacacaatcaaggctagggagatcacaaattttaccttttagaacaatggaggttcttgccttttagaagtggaaaaattgcaagagaaaacaacccctgattttcggttcttgcgccatctggaattccggatagtctgtgcacagacaaccagaattcaggttggtgcaaaacccggccggaattctgtatagacaaccgaaattctgggttgaaattttaggttggacctcttttattcaaaacttgtacaagatttttatgcttgcattaaaccttgctttgcacctttaggagttaaaggaacccttagaggaatagcctttgaacttaatgttgaatctcttaatgaattgttaagagcacccaatgatggtattttacttgaacccaaacattcccttaagaatgatagaaactttaactttgtggagtgttccaagaatctttgtagtgatgggtccattatcatgaaaccaaaaatacatcaactcattagaggccaaaattgttcataaattcattgtggctaaccttgcacctaggagtggacattaagatgagattaattccacagaccaattactcatgcatctcatcctaacaaaaactacacatatcaacctaggctatctctttttaaaatttatcattgatgtgtctagactccatatggtcaagatccttccttttggtttcattcttagctgtcttttccctcgtttaggaattcccatctcacttgaaaagaaagttgatcccacttctagtgactttctaggatccaaaactttcaaggctatgaattacaaatttactaataattaatggtttttcacaccaaaaagaggccaaataatgaaaattgacttagaaagtgatgatgaagaccaagatgaggacattaacttgcccgcaagttagagtgaagaagaagtacatcatcaagctcctctcatgcctcactttccccaattcaacattgaggaggcttttgct

SEQ ID NO: 129791 - DNA, 659 bp, Cannabis sativa
cttggagcctcgaacacataagggctggagccattatccccctgaagggctattacaaggacttcctaaaccataggaattgccccattctagttgaatcctatttcatacagaatccttgcaagtttgaagtaactgtacaaaattttgaactggagtgccccactcccttggaaatagagtatctttactctgtcaaggccgttgttacgaggaagaatgcagcatggttttttttactatcttaggactcacctaggcgatcgtaagatcattgtaggtttgccaaataaaaccccttttaaagaagaattcatttggacgactggtctttccctaatcagcacaaccatcttccacataatacgtaagtgatttcttgcttaagacttggttaaattattccacgtcttttactctggttttgcttattttaattttgcttttgtatttgatagctatctcgaaaagaccagttcctactcccgagatggctgagcgacacaagctcctgctgggtcttccctttggtcttcggtcaactgagttccttttgagcgaggtcaacctgaggtccatgggtctcctcactgacaaggagtttacttatgattataaatatcccaagtattcttcttggcagcaggttcctgtcctaa

SEQ ID NO: 129792 - DNA, 549 bp, Cannabis sativa
aaaatggccaggaaaattcacgggaacaaccaaacaatgaaagcaatacatctcagatggaatcagaaacccaaaatgctaaacctctaccctcgcgattttctcctgggactcggctagaacaaggcacgagtagtagaggacggaggattgctatgagaacccctgaggatattaatgaatccagcaccccaaagaggagagggagaccaccgaagaacaaagcgaagcttgcagcaacgccaaaatctttcaaaggaaagaaacaatcgaagtctagagcggggaaacgatcatcaatactaagccaatgggaaggtagttcttttgatctaactgtgaatcttgataatcactttgtagtaattgaaaaaaatgcaaggcctactacaagttgtatcatcaccgaaatcacagacaccacaacgaaccaagttgaagatgacagcaagcagaaggatttttgtttcggggctatggagacttgcccaaaaaagtctccacagtcgccatgaaaatactatcttagaactgtcgtgggctcgggaa

SEQ ID NO: 129793 - DNA, 1313 bp, Cannabis sativa
ttttaattaattttgtaatctgggtcatcaaatcagcttgaagtacgtggattaatgtagtacatccaataaagacaggtgtacatacatatactggttataaagttttcttgtatttatattcaatacaatacaagtatacaaggcatgcaagttatatatgtactgtgctccctcttgtatgattctcaagatatctatcaacaaattaatcacttgatttgatattaatctcatgggattttaattaccaatcattatgaaaattatggccgattaattatcatttctaatagaattagctatagtgtcctaataataataataataattgtgccaaacgaaacaatcaatgacttagaatacagtttacagtaccaacaaacatgcaacacgatcaagaaactaaataccaagagatctcaagaattcaagataataaattaagcagtaaaacaaaaaagaacaacatcagctttaacgagttcaagccatgtgcaatactctacatcttagttggaacaacagcaaccatatttttattgatatcagtgtttacaaggttacaagaatctttacaaacttctcagagattacgagaagaggtttctctctctagtttagactctaccttgcactattacgattttcactcaagcgaaatcttttctagattctcacacatgttacaaagatttacaactatgtatagatttgcattgttgccaaacatatctcctaagttattgtggtacatttacactgtcataagtgatccaactcatcactagcaacaataatcagcgtcatcttgaaacacgtgctttcagtacggacaatccaaaagctttgtaacacacaagccttcaggatacgtacataacttcgttccaggatgaaccctcaagactgacaaagttgttttggagtacacctccaaattagtgaaaagccatccagtagagacatatcaaacatggtacaagcttatctgaaagtaccttccgatttaataagaccttctgcataagactttttggatccacactaagcttccgatatctactctccggattcacagcttccaatcccagacgacaaaacttgtaaccataatcaacaaatctccaccttgatttcaagtttaagtcgcttgataaatcattgttctatacgttggtgtccccttcagcctctctgggctcagctgaccccaatcagcttcaggcaatgctcaaacttactacttggcactaccttggttatcatatcaaaaggattgtcttcaattggaactttggcaatcttcacag

SEQ ID NO: 129794 - DNA, 525 bp, Cannabis sativa
ttgcatggatagaagcattgtaattccaccaattttgatgtagacactatgaacccatctaagccaaagactctcttggtggttcgagatagcccacacatacttactcatggctgccttgttccaatcttctagcttcttgattcctaatttccctgcagcttttggttaacacaccatatcccaagagactgcccctgcaccctaaaataaggcctgccctttccaaaggaatgctctacatatagattcaatagacttcagaattttctttggcataatcactatttgactccaataagcttgaatagctataagaactgagttgatcagtgtgattcgagttgcaaaggataaattccttgaactccagctcttgattcttgtcgtcattttctctgctagcagttcacattccttcctgttgcccctgaattcgcccaaaatacgtggaccagtcgaaatgggacacgtggatcagataacttgtaaatatttgataagtctttgtacgccacaaggaag

SEQ ID NO: 129795 - DNA, 570 bp, Cannabis sativa
caaagacatgttacaatattaatacattgtcctgagtgtgatactatttgcagccaccaacaaacgacatggattcaagcccaacctcaatccaatgagctcttcaccttttgtgttaataggttggacaacttagatcatgacagagtcaaattgcttagcggcgagttcatctggaccgagccacattcgggaaggatcaagctcaagctcgaagtagagaaagaggttcttaatggagctttgattcattactcttatgttgttgagtttgttaagcaacaacttatgtgtgaatcttgtacttgtagctatattggatattggtattgaacttcttaaacttttcaaaacattattttctctttagattcatcttttaatttggtatattgttatgttagaaactcaaattctcccatttggctaagttcctggtttatttttgttatttaatttttttgaatgaaaagtatttaaaaatatttgaatctcattgagaaaaaaattatacatattataatttgaaagtagctttataaaaagtaggactccaaaaaaaaaaaaaaa

SEQ ID NO: 129796 - DNA, 1332 bp, Cannabis sativa
tgcttagagatagggggaaataagcttttggacaaaggtgttataccttgttcaagtcatggtgatccccactaatctacactcaaggttgtgagtgagtatgtataaatttcttcatattatatatatatatatgtgttatataatagtagataatcttttcatctcttctacctttcttatatataatatatataatgtacatatattgtatattatgtgttgtaacatctatttaatctctttgtttgtctttgtattatattgcaatagagttataatacattttgattttcttccattgtaatagtatctctaacatttataatcgagagttaaacttaaatatatgacaaactaaataataatatatttttttgtaattactgttcttctttcaaaaggcattaatttaaatatatataattatattattttaacgctagagtcattatcaatctaaattaataattttaatataaaatgtcaaaattatacaaaactccttaatttagcaacttctcattaattcgagttgattatttacatatattttattttatcaagttaatccaacttaagtttataaacaaaaatttaaatgtttaatattttgatacatatattttttaaatcataaatctaagcgcaataaaaaaataataaccttatcctaataattaatatgagcttaaataacatgctataaaataataataattattatttttagatatactttcattccatcattgagaatgtacatttgaatataaatgatacatgatcatcttttaatttcttggaagacgcttctaaatctttatttattttattgagatcgatcatacacatttttcataatatactatatctaaataataaataattttttttcctgaaaaaaaattagaaaactaattgaaagtataactctcttcacttagcctttaaatagagatattaattaaattagaaaaaaatgagagagatattaccaaaaaaactagtacagctaggctataaaatataaaaaaaggttataataattatagtaataatattaatagagtaataataaaatagtattaggataggagttatgaaaatgaaaagatactaataattttttaaatgataaataaatattaataaaaaataaaaatataacaaaattgtgaaaaattgaaagaacagccaaaataaaagataattcatgtgagaagccacctcacatgctctaacaaaacaattatatacatatatagatatggatttaggaagaggcttcaatggttacatttttattgtaactatcatggttatattttt

SEQ ID NO: 129797 - DNA, 1097 bp, Cannabis sativa
tttgaaatgtataaatgaaaaaactcctaaatataacataatgacctttgattctacaactcatgactcacaaaaactgaatcaaaagaaagctactattattctattcattattttcaaaattcttatagtttttactcaaaaatttcatgctcctcaatgttgacagattgcctacacaattcaaagcaatacttagatttctaatgtaaggatctttatatccttttacgtgtttacattattattttagaaagtctgtatttaggatgttagattagtgctaatcaacatacttaaatagtaaattaagatcattgttaaagatcttccaacaaaatcttcttgcaacatgtcagcttgtcaggtgccgtgtcatcaatgcgaattttggaataacattttctttaaagttcatgtgggaaattctagtcgtacggggactttctaagctccacacgttgcatggctaggtaacacgcatttgtacacacgattatgatatcagttcttcccgaaatgtgtgaatcttttcctatcccttcaatttttcacattaattactcttttttgaaaactgcaaatcttgtattgacgttacataatccttataatgattaccttttaacttttttttaggggaatagaatatttttaaatagtaatcctataaatgggatttataatattcatttataattttgtagccatttgaaaatattaagaggaagaagagagtgtttttttttagcaataggcccttttcaaatttgattttagatatttggatattttaaaattaaaaaaaaagggttttttctacaaatttcttattagagttatttttcaaatttgtacatatttaaattaatttaaatattatatgaaatgttatttgatattgaaataatagttaaatttagaaaattaatctaaatcctcaccatattttcaacttttaaatttttattattttatcatactttattaatttaaattataaaattaaacaagtactaattacagtagaacctctatccaaaaatacacttggaaccaagcaaattatattataattgagaggttataactaaata

SEQ ID NO: 129798 - DNA, 1173 bp, Cannabis sativa
  modified_base (908)..(923): a, c, t, g, unknown or other
taaatattttacaaaaaatagtgtcttatgtaattattcttaaaaaaaatatatatctaatcatattttcaaaaataccatattttaaatttttaccactatctaccaaaaaaatatttgctttttttcccctaaaatctctcttgagtctagtattttcttgcatatattgattctcatattggaatatattgtttaaagtattcctatacatgtgtgtgtgtgtatatatatatatatatatgctctaattaataacttttttttttttttgtttccagctactatgaagaaattgagaagaaataagaggatggtaacaaacgtttacagtcgtgtgtttatgcagtgacttattattaagtgtacaagaaggatcattatattataggttgtagaatatatgttgtattgatatatatatataaatatatatgtgtatgtacatatataagtgaaatcttatatattgtataatttcattctcatgtactccacttctactgtaatgctatttgtgagaaaataaatttattaacaatatcttttttctaatctgtatttataattataattatgatgtgtaattattttatggacaatacacataataaatatttattaagtggggtttgaacttaaaagagacaaaagaaaagagagagaaaagaaaataagtgcactccgattgtatttattagagtctaattttttttagtcgtatccattatagttatttaaggcatctgataaaattttgagaaatttggaaaaatttaatacatcgaaaacagtattcaaagaatctgttgcattcgtgacttttttattttatacatatgtatgaaatagatggtttaaacattgatttctatattataaattattcaaaatttctcaaaattttnnnnnnnnnnnnnnnnaactataacgtacacgattatgaaaaaaatttagaataaaaaaatcttataaataccgaaacagttaagaattgcatcagtacacctatttacaaaacaccaaaaattattttacaatcatatttaattaatatataataaaaaaaaaaattctcaacttcccaaaaatcttagggaattttacaaaaatactgcttttggaccaaaactttacatttatactgggacacggcaaaaacaacatttatac

SEQ ID NO: 129799 - DNA, 842 bp, Cannabis sativa
taatactcattaagagtgcatgcatccataacatatatatatatattttaagtataacaataaaattttattatttatctaaactaaatgaaaatactaattagtttgattgaatattggatgtattgaacttttgaacacctcatccaacatctgatttgattcagttagaaatttaaaagtaacatctaatctgatctaatcacaattagatattcaatgtttggcaaacgattgtaattagatcgatcatttgtaatttaattagatcgatttatacacacctctaagtagcacgataatctccccccaaatgtggctaagcactattgtttagcttaactcttgagcaataatagctcatttgttggaagagttttttcctcaattcttcaaattttgaaataattagctattttgaattaacaaatgtgagtgctctaacatcatcttctttactctattatttaaaatacatcattaattttttttttattttacctcaaatttttacattatatcatacaatatatcaacttctctattttttctctacatcacaaaattattatattttaaaatatataatattaatttatatacatacatataaaataaacaaacaaaaataataaaataaatttagagtaataaatagtgtttctctacctagagaatcattcttaatttcttttaaaaaaatgtaaaataactcacttgatatattccatctttaattattctcttctttattaaaaaaaaaaggaattatttcacaaatacacaataataacaaaaaaaattataaaaatacggtctcacggaattttaaatatttttat

SEQ ID NO: 129800 - DNA, 903 bp, Cannabis sativa
  modified_base (36)..(59): a, c, t, g, unknown or other
  modified_base (686)..(686): a, c, t, g, unknown or other
atagttcaaggggcattttcaatgaccttaaaagtnnnnnnnnnnnnnnnnnnnnnnnntcaaagttcagggagcaaaaatcctaattagccttacaataataatgaatagttttatttttagacaccttcacaaaaggtcttatactaataaagtaggtataacacttatattaaagattaagtaccaattaagcccattaagcaccaactcataaacacatgtgacatatttttttagtttatttaatacatagtctaataatatatcgccatgtgattagagttgacacttaatggctaaaaagggatatgattgttataaaatcgtaaaataaagtacttttaccattattttttttcattagggttatatgcgtagcaattataaatgttaaatgagttttaccgcaaatatgtagtataaaataggctaattaggatttttaactcctaaactttaacatgtaccaaatcatgcttcctgaattttttttggccgttaaaaattctccctaaactattaagattgtttgatttaaggacttttgtctattttcattcaattttactattttagtgattgttcatgtactaaatcatactctccaaactttgatatctatcaaatcatgtccctcgaactttgacatgtactaaatcatgccctctgaactttcatctatnttagaatttttttactaaaattggacaaaagtccttaaattcaataatctcaatagttcaggggtatttttaacgacattaaaagttcagaaagtatgatttggtacatgtaacaattaagagggaaaaaatctttaattagagggtaaataccattttggaccatgtgttctgcaaaagttacagattggatcctgtattttgttaaatgacaaaa

SEQ ID NO: 129801 - DNA, 1550 bp, Cannabis sativa
agcctcttagcaaggagtgttgaccttatgcagtcggttattccaacttccaatatatttttttagacttccaaaaaatataagggcttataactttatgtttgcattcacaccaatgggaggccgaattgatacaacaatcaatcaatcaaaaggaccttatatttttcaaatgagtggtcagaattatcattttattggttctttgttgcctaaagttgaaaaaaaaccacagtttgctcaactgtatatctatgatattgaaaatgaaacaaggaacagagttgacaattgcaaaaatgtaggaggaacattgaaattgaaaacaaaattgttgataaattatctaaaatattggatcaacataataatttggtcaaattcttagaatggcaagggatagattcaaagcacaatcggaatctacttttgtttacgaatcctaaatagcaaaacaagagatggtcgtcaatacaatatgccaacagtatctaaagtagcaggcttaatagtggtaatttcagggaagagaactctgaacatgatgttattgtagagcatcgaaccaaaggactccaaagaatcacagatttccatccaagtttcatgtctatgacatacccattaatacgcccttttggtgaagatggatatagacttcacattccttttagaaatgcaaatgagattgactttaagaagaaaatgctgacaatgagacaatattattccttcaggctggagcaaagattaaatgagggtcacactcttcttcgagctggtcgactactacaataatatatagtggattgttatatggcgattgaagaagaaagatttagatggatacaaaattaccaagaaaactcaggacagacctttactctggtttaatgaattctagtcatgaaggtgattcaaattgctcaaaagtggaaaaaacaattattttgccttcatcacacattgggggatcccgatatagagtattaaattatcaaaatgctatggctatttgtaaataggctgaatatcttaatttatttcttactttcacttgcaacttaaagtggacagagataaatgacatgattaataattggccaaaaagacgatgagaattgggttgatatcatatgcagaataataaagttgaaccaactaatgcacgatctgaaaaaagaacaaccatttggaaaaataatcgcatgtaatacactctatacaaaattgaaatgattatgttgaagatgggaaaaagtttgaaagacatagatggaatgccccttcctaattcttcaataataagagatttaggtgatagactaatcaacaaaaaacatgattatgatagagaacaattaaatatattgcatgagaaattatatgcttctctaaatccttgacaaaagtcagcttataaagcaataatgtattctgtagaaaatgaacaaagaaatttattttttatcaatggacatggtggcactgctaaaatatttttatggaatacaattattgcaaaacttagatctcaatccaaaatagtc

SEQ ID NO: 129802 - DNA, 1350 bp, Cannabis sativa
aagcccacggcaattccaacttattgtactcataatgcttggtgggcttggaaaccaaggcccaccttctgcaagttttttgagttggtaacatctgtagggagatctttactagtatccacttcagaagcatttccttcagattgactgtccacagccccacttgtaaaaaccatattcaatcttttccttttcaagtctgctatctcaattaactcctcattagaatagctggctgagttgtcattgaccaaaacaacatggtcattatgaggattttcttgattccttatatcatgtgattgagtaatcataggatcatgattgacaaataatttgtgctgatttttaggcattgcattcattcctgtagatgtagcatcagctggcggatttgcttcctgattttcctcacggtggactgccttgccagatctcagccacggagaagcagtcaagaagttttgtcgtcggagaggagctttcatctctaagctatacggtttgacaagttgactggcagggatatcatacactttgttgcagagcttctcggcatggcccatgattccacagatgaaacaaaaagtgggcactcgttcatacttgaaataagcatagaaccagtcaccatttctactacgaaacttcattcgtcttttgagtggttcagtcacattaatcttaacacgcactcgcaaataatcacgccatactccttgaaagttattaggatcagaactgacatacgtaccaatgtatttggctgcctctctaatagcccattcggttttgaaccctggcctcaattcatgaatttgaacccacatttcgatgaaattcagagcaaccattcttggatttccacctggtttgagcctttcaatcaccagttgttttctatcatatgtccacgggctgccaacgattattcgttgaatatcgatttcgtgataaaattggaatagaaatcgattttgttcaaggatttttatcgtaattcctttccctggtttccacaaatcagccataatattttgaaaaattttgaaatctgaaacttttccagataatagtcggcctacaaggcaccacctatcatcaaaactagtatcttcttcctctatacagtcatcatcatacagtacttcatgttcttcttcctcctccaaacaaatgtcagcccatttcttagtgagattttccccattactggatgaagccatctgcaatacacacagactaagcaggcagaccaaaaagacaaaaataatcttaggcaatcgacagaacaaacagaattagacactctcaatcatgagggacagaacactctctaccaggagagac

SEQ ID NO: 129803 - DNA, 738 bp, Cannabis sativa
aacactattgggattcagttgagaatgacttctgcgaagcagtcttggatttcttccaaaatgggtgtatgcattaaggagtcaatgctactaatattgtcctaattcccaaggtccagaacccgaagagacctaaccactttcgtctgatctctctttgcaatgtggtgtataaggtcatctctaaggtcattgctaacaggatcaaactattgttacctaagcttatttcccccacccaagctgcatttgtgcttgggaggaatatacaggataattatgtgattgccagtaaataatccactcgtttaataggaaaaaaggcagagaaggtttgcttaaaataaagattgatcttatgaaagcttattataggatgagttggggattcattgatcatgtgctttcgtgctttgggtgcctcaagagtttcggaatcgggtgtcttagtgtatcactaccacctccctcaatatctgccttaatgggggatcctttagcaagattatcccttcgtgtggtcttcgtcaaggtgaccccctgactccttatctttttatctgggctgcaaaaattttgtcaaggcttctggaggacacccaagccaagagaactatcagcgggatcaggcttaataggggggccctattatatctcatatcttcttcgcagatgacctcattctggttggaaaagccaatttagaggaggccaaaggttactgggattgtcttgaga

SEQ ID NO: 129804 - DNA, 692 bp, Cannabis sativa
ttgggatcgagtgtattaaaatatattataactttacacaatcaattaatacaagtcaatatcgaacattgtattaaataatactaatacaatacaatacaacacaatccaacacattacaatacgtcctaaagccttttttgggatattttgcagcttattggatgagtagtattaacaaatttatatttgtaaaaggtatgtttttaacaatataagattttcttttctcagtctaataaatctgatttaggtgtataattttttaaatttgaaaaataattatttagtaatgaaatttgttagtaataaaattattaaaaatttaaaatgtgatttgtttgtacattgtttttgttaaaataaaatgtaatttgatatgatgcatgtcataatactaatgttatatgttatgatatatttgataaatttaaaattattttatgactattctattaagtttaaataatcatttattatatagtcttatttcatttaagtatatttaataataatggtgagtttattggcttgttaacagaagtaacatttttatctatctcaataaatacacccacaattttgagattagtttgggaaccttgatcttctctgtcggccacaactatagccacaacaataacaattaaccttatattttttggaatgattatgaacgagactagtgatta

SEQ ID NO: 129805 - DNA, 1173 bp, Cannabis sativa
  modified_base (42)..(53): a, c, t, g, unknown or other
atagattttaaaaaagaaggtaaaaataaaagagaacaatannnnnnnnnnnnagagtgtaatttcctcttatttttactatacttcgagttggacagaaccaaataaacttaatagagtacatattttcttttaataaagaataatgtgaaataaatatttaataaaatcaaaaataaataaaataaataatttcagtaaaaaataatagaaattaaattttatttttttttattttagttattacaatataatgcatatatataattttaaatataataaaaaaatgagtccacttagaactattttaattatattaaaattgaaaatatgattaggttaaaatagtccctatcaaaagggatgaaataatagcatggaaaaatgagaaaattacatttactatgggattttaaaagttgtttacttaaatatggcacttttaagtttgaccaatttatatggtatttttttgtttttaagtatttttatggtatttgatatagtatatatatgtaaattaggtttttaaatcccatatttaatatttttatttgtttaggtaattttatttgtcactgatactggaaaagttgtcgggtttgctgtttgtgctagaaaaatcaccagagtaactgtcggtgccagaaaagttgtcgaatgagttgctgtcgacgccaaaaaagtcgtcggaattggcattgtcatcgaaaaaatcacaaagaaacaagtttcctgatgaagaaaccatttttttggtaattttttctggtaccgacaacaaactctggaaaagattgaactaaataaaagtcgatgccgaaatagtgagaaatgtaatggtgcatttttttggagtcaattgtaaaaatattcaataatatataagcattatatccaattggtacatctatttctttaccgaaaaccattatcaatgaaaagaataatttaaatttgagacaataaaattaaatttaatttaaaagtaattgaaagaaacaaaaattaaaagaggaaaaaataaaacaaatatatatgctaaaaaaaataaagaaatagaaagaagatttaaaaatatcacataaaaaaatatggtaaattagtaatttttcctcttgaattttgacatgtaccaaatcgtgtccgtgaattttttttgccgttaaaaat

SEQ ID NO: 129806 - DNA, 933 bp, Cannabis sativa
ttttaatacttgtaatttttataaaaataagtatgagacttttaaaaatatatttatgttattttattaagtaattatcactttttaaacggcaaaagaagttttctagacatttataagtttaatattttttactattttttttttgtaaaatttatacatataaattaattacaccacatacaatatttattcaattaataaaattaattttgagattaaggttttgtaaagttacgtagtttttaatatttaaaaatacagctatgatctattatttaacaaaacactagtatgtatataagaattattttctaaatatacaaaaatggcaaaaattttacatttctactaatctactatgttcttttttttcatttttacagattttatataattttttacaaaagtacagtgttttttttttctgttattttcaaaaaattgttgttttgacgttgctgttacaagaaagcaaagtatttttttgcatcaatacgaagtgttatttttctgttatttaattagaacaatgttctttgaacgttgcctttctaaaaaaaaataaagaaaaacttgtaaaaaaaaatctgtaaaaatataaataaaaaatttcatcaagtatatatatatatatattatatttatgtaaatttctcattagatccataaataggttgataatattattatttaaatatctcaatatggtattattatcgtcaaagttaaacttaaatatttatttgcaactatttagacagttggaattcatatatagtttacttttctcgcttgatcaacatatcaccctcatttatacatacgtatataatattatactaggtgattgttacgtgccaagccacgtagtgttagttttatttaatattttagttttttattttaattaataattaaaatagtataatt

SEQ ID NO: 129807 - DNA, 1139 bp, Cannabis sativa
ttttttttattaggatttggttaatcttacctgccaatctatagaaaaagaagacataaggggcaatattatttattagttaattaattaactacacatacaatgttgacctaatgttacaactatatatatatctacatatataatattatttaagagatattccatttttttataggttaattgattaattgttattattttgtttttgacaaaagaaaacattattaaaatgtttgatcatctataatcatataattgcaagattaataatgtggggagctaatgactagttaataaaagatcattattattggatattagtattattggatattagtagtgtcacccaacactttttgtaggtgtgtctttattattgttatcttgttctttgaataagtctaaaaaaaagctaccttgaataagcgtggatcttcgggaaaaggctttcttaagtcatgagcacatattaagaactgaaaaattttagcttcttaattagtgtatttcagaaatcatttacaagaatttgtttttttttaattgatgtataaattaattaatgtatataaatgaaaaatattaactaattaaacacccacgacactttttctttttaaaatttgagcttagtgacagttagtgagttatgttaaaaacataaataattaaataataatgtgtatatatagtttaattatatcaatcatatatgaagccacatcattaattgtaagttatgttttctaaaatgatttgtcgatcgacatacgtagcattattccttagaatattattcatgtatatataatataataaaatatttgtatacatattattgaatatatgattatcaaatatatatatattaataattatatttgtacagacacatgtggcccatgtgtagccgcatgtttatgggatccaacgattgataattaattagggtttttattatattattttaattatttaaaagcaatgttttattttattattttgaattagctagaacaacctaacattccacacatgggtgtatcttaaattggtaatctctaaatctttgtgtaggtgtctttgtctcttaataattttataattaatttgtttactaaacatatataatctct

SEQ ID NO: 129808 - DNA, 1177 bp, Cannabis sativa
tggaattgttttgtataaattagtaaggggtataaaatttgatataagatatattattaagggcaaaaattgaaatttcccgttatgcttttacatagttaaccgtgaataattttgtaatgactaatcaaatcttttaaattacgattctgtaagggtcattctttaagttatagagttagattaagagcttgtttagtacgccattaagagttgtattgtattaaataataaatgatattatgtttggataaagcaatgtattgtattaattattacgattaaattttttaatacaatgtatgttgtattatttaatacatagcagatggtccgtattagcttgtattataatatttacaaaagattcggggtcaacaccgatctccgacccgaacacggacccgaacctgagacctagacccaaacctaagacctaaacccagacccagactcaggacccggacacgaacccaggacccgaattcggatccggactcgagactcgagacccaaactcgaactcggacccgggattcggacccggacccagacccaaacccaagactcggacctagaccaggacctggacacgagacccgaatctagactcgaactcgagacccaaacccgaacccggacccatagttggtgttggggtcgagtgcattgaaaatatattataactttacacaatttattaatacaagtcaataccaaatatagtattgtattaattaatactaatataatgcaatacaatctaacacaatacaatacggcgtactaaacgagccctaagtgatagttttagttaaagaagattagtcttcttagagggttgtaatttaaaggattgtgtgattgatcttctcagtgtgaagaaccaagtgtaaggagatgtgctccattgttatgtgatgctaccattgttcatgtaacctaattctcaagctaatcaatacaagaagtgtaacgtccccacttcaaacttccattgggcccttacacccacagaatgaatggctcttatacatgagtatgtcactgtggttgctcatggaatgacgactgacactatagaccaacacgagtgtttccagcgtgctttttcctcactcgcacgcttcttgagaaaacttctcaggaggtcacccatcttgaaattaccccaggt

SEQ ID NO: 129809 - DNA, 897 bp, Cannabis sativa
gggggggggggggaataaactcttttcaaactcacaaatcagttggggacaccaattatgttagatgagctgacgaagaacaaggatagacttagctttccaagagttatgattgaggtatgattgaatcaagagtttccagatgaaatttcttttactaatgagctaaatcaatacataatcttacccgtgtaatatgaatggctactgattacttgggaacactatcatggaatggggcataataaagaaaatataataaacgaatagagatgaagcaagaatgggtagtgaagaaggcagtagaagatgtgaaagaaaaggcagtggaggaaaaagatagtaaaggtttttaacaagttaagcaaatggtaaaattggttcggcaagaaggtcaggacacaagggctctaaaactcaaattttgttcaaacacaacagaaagcaacaaatcaaccctaaatcaacttaaataatcacaaaataacctttgaaatcatagccaacataattttaaacttacagaactctaacctcaaaattgcatggatacttaatcttataatcataaaaaaaaaaatcaaagaaaagagggagggaccttgattaccttgaattggttctaaaagatcctaccaacaccagctacaacacccagaaattgagttaaaaacccaagttttctgctgggtttcttgagaggtcgagagagggggagttggagagagagagggtataattttgtctatttttgtaaaatgaataaatccaatatcaaatattatacaataagggatcgtttggtacaccgtattgtaatgtattgtattgtattatgttggattgtattgtattgtattagtattagtattatttaatacaatacaatatttggta

SEQ ID NO: 129810 - DNA, 1664 bp, Cannabis sativa
  modified_base (1576)..(1576): a, c, t, g, unknown or other
ttggcatatttaatttttctaatttgtgcaaaattactcaaatattagaaaattgctagttttcaatcattacttaaacaaaatttggttaatacatttcagttatatttactaaatttggtcgattttttttttgataaaaaaggaatacaggattatttttttgtacttttagaaacaaattaaaactaacatttaaaatgaatgtttcatggagtagtttttcaatttgtttattgtcagggtgttttttctttttttggcttttcttaaaaagaccacgttttttccatttgaacttaattatatacatttttttttaattttcttaaaaaaaataccacattatttgttatggtaaaaacaactgtttttttttttttttttaaatacttatctgtctattttatattattacttttttatatttttgaagttttttatacagcgaagaaattattatagatccattattatttttacaaataactttttctagtattttacaaattttgttgtgtttcaatttttatttttataaaacattttttttaacaacttatttgttttgcaagctctagaactatatggagcttgatccctgtaaagggtatgtaggcaacttatttttgtaagttcagctccatttttttttttgtttctctttttttgtgaacaatgtagaagcagctccaaaaagtactttaatttcgttcgtttctaagtataaggtttgatatttggccttatcattttaggcactggttcggtttgattgtaggttggttgtcttagagattcttagtgtcaggtcagatactcgaatgggtcattatatttggtttgtttccctgtaacattttatttgtgcagaacttgacaaaacctgttcatgaataaagtttggttggatcgtaggttggttgttctcagtaatgagttagatttttttcttttaacaatatcttaggtttatttcctgttagcttttggtgtgtgtagagcattagaacatctagtaaggtcagatactacaactccatcaactattgatttttacttggtcccttgcatgtttatctgctctcgtacatttatttctcatatcttgtattgtttccttttgtatacttggatgtctttgtccttatccgtggtttcctttttttttccattttcttttcctagctctgtgggttgaaaatattctagctctctttgggttgttttcagtttgtttcaatttttttcaaaatggttgcttttttccattttggattatcatagattttaatatcgttacatttttttgggactatagtgctgttatttcatatttatggtatgtttttcctatcttggtgttaggttatttttagtattaattttagaataagtttagtatatttttaatttagttttaatcgtgtttggagtaattttacgcttgttatcttttatttttgtagatttaaaaaagaagaagattagaaaatatcaaagaaataagatgaaaaaaagataaaaaaaatctcacaaaaaaatgatatgtaaaatagagaaaattgtgcaaganaataaagctgaaacttcaagcctgaattcgactatgttttgattagattttggaaaaagtaaaagcataaaagttctagatctctctt

SEQ ID NO: 129811 - DNA, 1769 bp, Cannabis sativa
tttagcttagggcaactctaatggagatactcaaatttagtgttacattaacactaaaatgatactattttaatattaaatttttttttcaattctacccataacactaaaaaaaatatattttttattattattttattttattaaattatctcacactgtaatatgtatataaatataaaattttaatcataaacatattattttaatataaaaaaaataaaaattttttgctatagtctatagtgttctactaaagcactcccacgtttatagaataacatttagtgttctattggagcaattttgtgtccaaactccactatttgtaggattttagtgtcccattgaagaagcccttcgcccctatacacttttttgttacaaaatactccccctaaattataaaaatgattagaaatctctctttctttacattttttgaaataatttttttcatatgatcatagatcaggatgacatatatagttatagtataagggtctgtttaataattttaaactacccaaaatttattttactgacgttaaacatacaaatattagctctaagaatatatatacatatttttataatttattattatactatcatttattttttgtttggactcttgaacatttctaaattaacatcatgttagtagttagtagtgatacatcaacaaattatttaaaaaatgagcacaatgtaacttaaggggtatatttgtaattattttataattcatgtagaaattttacaacaaaaaaaaattaaactctataaatgttatagttagggagaaatacaatcttggtataattaaaggtattcattcaattattatataatttctcacagtacaaaaccaaaaaacaaaacaagaaagtcactcaaaatttgtttttacttttaggtgcaaaaattgattataatctcagcttttttatttatgataatgtttaaattgtttgtggttagacttatagtagacaatgaactacatctcaccagcctcatcaacgagtcattcctcctgcaccgtggcaacctccacccacaacatctttaaaacttaacattgatgctgccttggattcgcaacaccacattatcggagttggagcattggtccgtgacccagctggtgttgttcttgctgccatgtcaaaaccagttattggtagctttgcttcccatgaaatggaagccaaaacaatctttcatagcatcaattggatcctacaattgaaagtgccaattactcatatcgaaacagatgcgctcattgtttctaatgctttaattggttcttgtcctgctatttcttttttcaaaggcttaattgtagatatttcttgtcttctatcctctctccctaatgtatttattaatcatgtcaagcgtaatgctaacatgactgttcatgggttagctagatatgctttaaggttggatgaaacttacttttggatgagtaatatcactcctccgatttacgatattgttgtaaacgaattatcttttgttttatgataacatagtatttcttctcaaaaaaaaaaaaaaaaaaatcatcatgtgtccatgtgtgtgaactgtgaacagaaaaatcccaaattaagggggtggaaactgtaaaagaaaaaattgagggcccaaaacataaatttaaaagaaactaagaaaaaatataaaaaaattcaatataatttttttaaaaatataaaaatttgagaggagcatattatagcatgtatatatgg

SEQ ID NO: 129812 - DNA, 617 bp, Cannabis sativa
aacttctaatgactattactctctatgattctagaaaattctataatattaccaaaatgatagaaagttctagatacttgtagagtaggtgttgatctttaacacaaaactcatattttgatgacacggtataatgcaactaatatttatagcacaaaaagtatttacaatactagtttgtacaccataaaagtaatgacatttcaaacactttgggtgcactctttaaccatttttttttttatttttctaattaaaagagtacaaatattaaaaaaaaccctgtaaaactgtttttattttatattttttaaaatgagaatgaaaattttaaaaataaaaataaaaaaaaaatctatttttaaaatttttttaaaacaattttctttttttaaaaaataaaataaaagtatagtctatttgtattgtttttaatcagtattcgaacctagacccaatccccagtctcggaccccaatcttagtcctcagatgaacctaaaccctaaccccagtctttggccctaaatccagacccgatgccggatcccaacccgctttctcttacctcactttctcaattctcacttaaataaaaaatatatatatatatagtta

SEQ ID NO: 129813 - DNA, 1203 bp, Cannabis sativa
  modified_base (66)..(69): a, c, t, g, unknown or other
ttatcatatcttacaaatattagttattctttgtttagaaatttttttttaaccaaatgtaagcannnnaaatcaaatttcccttttattttcatctttttctgtggagagcttaagcatgattatattattttttagatttatatcttcattttggttatgaagcttcaaaatttagagttttatagcaaatcccaaagtgtaaattggtaagttttcttgtcttttagagaaatggatattaatataaactattttgatgtattttttattttattttatgtaatgtatgaattgcgtatagaaacaaaatgaatcacttctattcttgaagataggatatctatttactatttatttgataatattaaccctattttaaaagttttgttgctttctcttaaaatttctaataaataatcatcaactttatttcttgtagccttaagccttgaaattgttattacgttgttttattatttgggcattcagatactgttctacatattatatatagtattattagtcctacaccatatgttattttatttatgaggtattatttataggatgagtgaaaataaaaaagagaagttggtatggcaacttacctgaagaaaaaaaaaagagaaaattagaaaaagaaaaagggatgtatatgcattaaagaaatatcaaggcaaaaatccaacacaagtacaacactctaaggaagtgtgtgtttctcctaccaatcttcaatgtcaaatgattaagagaaggaaacataccaattacccaacttttgaagttggtgagaatagtttttctgttatgttgattttatttaaccataaattagcttaattttgtaaaaattattaatatttaaattttttataggttcaacatcaacaaatacccattcatatgttttaaaaagaaaccgtcatagttctactttacaaaataatgttgataaacctgatatattgaaatctgaatctatttgcaaatattgttttgcaaagaaattcaagtatgagccaaaaggtttttgttgtgcaaatgaaactatttctctattatctaataatgtttgtgatgtctaagatgaattgtacaatctttttatagaaactgataaaacaaaagagttttaaaaagggtaaataccattttggaccctttattttacaaaagttaccaattggaccctgtgtt

SEQ ID NO: 129814 - DNA, 859 bp, Cannabis sativa
aactgtgtagtcccatacctacacagcctcagagtcatcccacttgaccttccctaggcggtgtgggattgcacaacttacctggtatttccccttacggatcacaaggactactgactgtcacaagcggtggcaatttaaattcttgcttacagttaaatgtttttttctaagtctgaaacacatgttcttttggcaaaaaccttcggtgtcccatataacacattttctcctcgcaaatatgacatgctttgtaccttttcacactgtattcagaaaaatttatgaaagctgaaaaatcattaatggtctacagtaatatggccttaagattgaattcttctttcctaaaggcattgtatgtaggaacatcctcataccacaattgactcaaatcatcaactagaggggctaggtacacatcagtgtcattaccaggctgtgaagggtttgatatcaacaatgtaagcatagtgagctttctcttcattaccaaccaaggcggcaagttatacatcaaaaaaaaaaaaaaattggccagcaactatatttactgctaagagtggtatgtggattgattctattcgtagaaagaccaagacatatattcttaggttcattgctaaattcaggccacctagcatcaattgattttcaagcgggtgagtcagctggatgtctcatcttagcatctaactttctattactggcattcaaattttttgcatgattgacatttcaaaaaaactgaaccaaacaaggtatttggggtaagtaccataatacttttgcagggacaccaacctttacctcgtcagaattctttttcttttgccacctagactcaccacaagtggga

SEQ ID NO: 129815 - DNA, 721 bp, Cannabis sativa
tatttatttatttttatttcaagttttttttcactgcttcataaattttatatttttccttgcagaaaaaaaaatggaaatatgtatttaattaagggtaatttttatttttttaaaacaatgaacaaattttcattgaaaaaaataaggttatatccaacagagaaagataaaaaaatttcaattcaaaatggttcactatctattttaagtgcatgcacaactaattcatgaacaactttattagttgattgacgaatctaaatcagagttgctttaggaaaattaaacggtaaactagaaatatcatctaaaagagaaccaagatcattagaaagaaaaaatctcttaacaaaagtagagattacaacaagacaatcaaattcaatcggttttgagttatttcgtgttattgatttttattcattataacactgttacagaaccggttctattttaattataactggtttaagttattttgtgttatttattttattcattatgttacagaatcggttatattttaattataaccgctttgagttacttatttttattcattatgttatagaactggttctatttttattatatccgagacatttggtcaccactttttttaaaaaagaaaaaattataacccgttttatgaggtattatgtgttatgaagtattttattgtgaaactagttttgtttttaatttatatttcagtgtt

SEQ ID NO: 129816 - DNA, 1461 bp, Cannabis sativa
  modified_base (1080)..(1080): a, c, t, g, unknown or other
  modified_base (1360)..(1380): a, c, t, g, unknown or other
ttaacaaaacagatggtccaattggtaacttttacaaaacacaagatctaaaataatatttactctttatattttggtattttcccttaagtaattttcatttctttatcgattaagattttctattaaaaattagattctcgtaatgtattaaattaatttaagtgtgagtaaactcaaattactaaatttatattattaaaaatttactactttttggaaattccactaaccatttatagggtttcttttttctaaaaattgtcaaattaattaatgtgtgaggattagattgatttaattaatatattatgagatactattttttaacagaaaattttaatactttaaggatgtgctttacatgtttttttctttatgtttttgtttcatttgttttaagttcttttactttctatttttataattttttatttatggatttatataaatgcttttactttttttttgtcttctttatagtttatattagctattttcttttcttctttttgttttattttttaccataaagagtttttgtcactagattttaatattgaaagtacaaaacaattaaaaatatgcttatagggagcagaatgaacactctaaaaaaaaaatgcagtgagccacaaaaggtcatgtgcccctacatgactccactcaagttacaaaaattatattttgatgtaaaagatcttaaataattttaattttgtctcaacaaaattaatttctagtacttcatccttataaaagttatataaatatatatatatatatattatttttaatattttatattcatcctcataaaatttatatatagttttatttttttatttttataaaattttaataagtttctcgaataaaattaatattttttttattaatatcctatttatatataaaaaaaattttgcctagctcctctaaaataaacagctgactccaccactgggattgatgcatcccttgttgttttagtattaaaaaaaagaatttaatctaaatgttttttcatagtcaaatgtgttacttaaagttatttaagacatcttgtaaaattttaanaaattctaaataatttacaatatataaaatagtgttcaaacagtctatttcacatgtgtataaaataaaagaggcacgtatgcaataggctgtgtgaactttgaaccatttcagcatattaaaattttttgtatttcttcaaattttgcaagatgtcttaaataactacaatgtacacgactatgaaaaaaatttagactagaaaattctcctgaataccgaaatagataaagaatgcattactacatccattttaggtaggggtgttcataaaatagcnnnnnnnnnnnnnnnnnnnnnatccaatccaatccaatccgtaaagtgcggatatctgcacttgtgcggattggatgttgataattgacatgtaaaagtaac

SEQ ID NO: 129817 - DNA, 942 bp, Cannabis sativa
aaaagttatagattctatatctatgattagtgctcccactcaattatattaccatgttcccaagatgtaaatatttgtcaaactattggttagcttccatgaataccttgaagaacataaataatacagctaagttgaacctaaccatatcaggaacttcttgattttcaagtttttgaatttcttgattttcaagttttagagtagtctttgtgcattgtgatctatgcaatagcttatagaagtagaatgcatgactttttgatgacaagattgaatcttgcactttgttttgacattctgaacttcggggttcgaagagcacgaagaatttagcttcgaatgtgcaaatacgactacttaagttgattagggacctttcctggtactttgggtctgttaaagtcctttcccagttgtttagatccatatcgaaattctattcgattcttatagaaccacctttaggctggccgattcttggggaaccaattttaagctggccgattaacctgtatttttatccatgtctattttatgatctctggttgttcacctccctcttattttctgcacagatgaacccgcgtgactattgggaaggtgacaatcgtattgacgaggatttacttagtcttctgtatgaagacttcgctcaggtagttcctcctttgagagctcatcgggtagctctctgagtgattttgaattgagcaatggttcctcggaacctgagatctagcatcaccactattctgagctaataggtggtgaaatctacgaaagattcatttggaaactgaaccaaggatggaggtagttccttcccatgtcttggacttacatcgtcttgcagggtgtgcccgacacattacctgttggacaagcatcttctgtgtttagagatcttcttgcagtagaggctggtgtgactgtcgcccc

SEQ ID NO: 129818 - DNA, 883 bp, Cannabis sativa
  modified_base (54)..(56): a, c, t, g, unknown or other
tctgtttctttattgatgttgaataaaatagattacattgaaattgagttttannnagggcataaaacccaacaccattgccacgtcatcactaatggcaatggtcatctcgatgggtgtgccattatactacgtaagtggacgctacgtatttcaagcataaagtcgaatgggcgactccatctatttttccatgactttaggattatacatgggctccactaaacacaataaagtcactttttttttttattttttttattttgtcttctcttagtttaataggcatgccacatttttcaagaaaaaataattaatctccttctcgccataatttcttcctcaggtcctaacctcctttttattttcgttaattttttcaggaacaaaaagagagttgtgggacacgaaaccatttcgtcacacaacgatcccgtagatgtagaagaatccactactagtcatccctctcctagtaccagtagacccgctcaatggaataggactaggaccaaagttgtgggggtgtatttcgaggcgagtcgcatcacctcttcttttgaaagtatgttccaagtcagtgattccttagagctcacgagcttagcttcggtgatggattgctgggtagagctctggcttccagtgaaagtagctattctcctcctcatgagaacatgtacgcgtggggcacttccttacttatggtgggtggcatgcttgttaaatgccaaaatattacatattttatagtgtaaaaatacaaaataaagtttattctttataatattttcaagaaattaatgcaatatattattatattgaaaatattttatttaagattaattttatctttgtttataaataataatagtatttatgg

SEQ ID NO: 129819 - DNA, 1417 bp, Cannabis sativa
ctctctctctctctctctctgagtcttattgtctccaccccaaagcctcaaaatccatgagctgaaccacctcaaaactcccaaaattcctacccatcgctagagttcacaactcgctcattttttgcattttttttaagtttttgacgatatcgcaaaatacttctaaatttcgctatatcgcgaaatatcactaaatgtctttaattcacaacatcactaaaatcattgttgaatgtcgtgaaatcacactcaagttttcacaatgattagcgatgtgatgtgcatcttttagtctgatatcaaaaatacatcgctaaacatcgctaaatacacaaaacaaacctcaaatttagtttatcattacaaatatattgctaaatatcgcaaaaaactagaaaactagaagaaaaaatgcaaaaaaacaagagagtctgtgagagaggacaacggtgttcaacaacaggggttctgggtcggagagtgagagagttagagagagaattttttttttttgaaatgtaagggtatttttaggaggaaaatatattaaaatttaaaagtatagatatactatttctaatagataatatattaaaacactatgttttatatttaagcatactaagtcaaatttctcaataacatccgtcaattaaataggattatataacgtgacacataagcaccatacatcgtaatataaaaaaatttcttaccggaatcaaaaatggaaaccaggtaccaggaacgtgccatctccttcattgattatgatagtaggacttcgaataagtgcatgaaacacaaaccaaaatggaaacttataaatttacttctcttaaaataataattcacaaatcgaaaaccattttctaccatacaactccattaacgatcaaaaataatagcttcagtcacaaacaacataagatcgatcatgagttcagaaccaaaatcgttcctcaaactatcaaaaatacttgaaaaattagagatggaatggttgctagataaaggagctactcaatcaatactttaaaaaaattaatcggaaacgacataaatccattaaaaccgataaaaaaagctttgtgaaaaaaattaaaactaatagtgcataattaaattaactaaacttcaaataatcaaagaattagcaatgaaaagattaacaaacgcaagcagtaatcagaggaaaataaggatgaatagagtatgaacaacccgaaacaattaaagctgtaaaatgataaaatcaacacaaagatatatactagttcaagtccgatagattgatatgatctatggatctactccagttctagaacaccactaaattctctttattgattgagcaagaacatgtacaatatagtcgagatcgattctttgatggattctctcaaagtatttc

SEQ ID NO: 129820 - DNA, 762 bp, Cannabis sativa
agcggtagtccaatccattcctacgtatgctatgagttgttttcgcttgcctatgtatttttgcaaccaagttgagtctatgatggcaaatttttggtggggactgaatgagaatgggtccaaaattcattggcgttcttggaaacttttatgctaaaggaaagatagcggtggtatgggttttttcgttcttttgtacacttcaatcaagctctacttgcaaaacaagcttggagactccatgcccaaccggatacacttcttgcaaagcttctcaaaattcgttactaccctcacaactctttcctagaagccaatcttggacactccccatctcttacttggcaaggtatccattggggcaagcaacttctttcatcgggtttaagatggaaaataggtgaggggtgccgtgttttatgtggttttgacccttggatcccagggaactctaccttcctcgctttccactatgaaggaccagctgatggtggagtctctaacctcattaaagaaaatagagaatgggatataggctttctgcagcaatggttctcacagccggatgttgatcgcattctaacaattcctttcacttttttcaggaataatgacactttagcttggcatcaccactcatcaggaatttaaactgttcagacaggttatcatttagcttcctctcttgcagatgttgatgatttttcgagctctttgtcacaaaggtcatggtggaaatttttttgggcacttcagctgccc

SEQ ID NO: 129821 - DNA, 843 bp, Cannabis sativa
cgcgtgggtggaatattggggatcataatagaaatattcatttttccttttgttatttttatatttttattgccacacattttttattttttttttttatatttttattatattatgtttttgaaaatattgtgttaaaattttaaaattacaaaaatactatatttaagtaaaataaaaaaaaaaaggcaactcttcaaataacttaacaacatgaaaataattataaaacaacaaaagataaatataaagcaacgaaaaataacaaaacaatgacctgattgcaatatgcaaaacaatcaactcctcaaatatatttttatattataatttgttttacttagttttcaaaatttatcttcttatactattacattattttttcatggtgtttaccgagatttttgaaaaataactaattagagcttaagaaagatataaaacgataaataatagacaagtaatttttacctagttcaggcgttaataatccctaatccacgaggtcgacgagtgtttgaatatacaaatatttataggataaatattaactctctattcatgtcgtttctctctttaagaagaaagctagtaggaatttttgtaaagattttgtaagtatcaatttgttcaccctttgcacatgaaaaataggggtatttatatataccatccacccacctagggtttcgtactcaacatgttacaatggctggtactacaacatggcgatatgaccattggttggtaggaagcctttccatcgtgtagtgtatggttgtgttggattattgttttaccaggatctagatttactaccatgtatattgtttaacatcctaa

SEQ ID NO: 129822 - DNA, 840 bp, Cannabis sativa
ttgatttttatatgtattatctttaaaatacgtattttattcatgatatcatcactttattcaaacgttattatctttctacactaaaggataaaatttatgagtactttttattaataaaatttgttgtgtaataaaacataatcaattaatcattaaaaaaaattaattaatattattaaaaaaatgaatactacttaatacctttaaatcactatctacaattagcggcatacctaaaattaatattaaagaggacgaaaaataaactaaatattaaaaatgaagatgattttattagaatttgaacttttgatttctataacatatgtaagacagtttaatcatgttaaaattattattatgtttatatttattattttcaattacaaatatatattgtaactcacaaaaataaatatatattctttcttgtttttttagatggacgactgctccttctcatggaaattacactttatacattttttatattgtcttcttttacgtttattctcttttttaaagtctctcttttttaccttttttttaaacattatattaattttgctcctgccactttaagagactctccatgtgagtctcttatttcaggatattttgagtatataaaaagatgtatatttcaattaaatataaaattaaaaataaatttaattaattgattaataaaaatggtatttttcaacttacctcctctcatctctacatgagtccgcccatgttcacagttatataaaaagggaaatttcaatttttgaccctaataaaataccccatttcaaaatatatcccctccactaatttatacaaattaat

SEQ ID NO: 129823 - DNA, 555 bp, Cannabis sativa
ttcagagacggtcacaaactattataataacagtattaaatttattttttattttttattaatatataataatgttacataaatatttaatacaacgaaaattttaaaaataaataaattataatgttttatgaaattatgatatatataatttattattgtaaaattcatcttataaaaaataacaaataaacataaaactatttcaataaaattataaaattgagctactttaatattcttaaaattaaaaatttattagttttttaaatattaattataaactataatgcataattggccatacacaagaaaatataacaatcactcacagagggtgcacatcagagagttttacgggtttcgggttttttaggttcggattttgtgtacgtgaaatatgtataccgaccccgctcatatgggagaacggattttggagtttcgggctcgttgggctgggccattttttttttttttaattttggacaaacataaaattaagataatttttccaagatttatttttattttattttaaagcattttttgaaa

SEQ ID NO: 129824 - DNA, 1027 bp, Cannabis sativa
  modified_base (990)..(996): a, c, t, g, unknown or other
ttatactattgttaattataatcatagaatatgcttaatataaattgaataaaattaaaagtaaatatataaaagacactaaaagcagtatatatatatatatttaaaggaaaacaaagtcctacaaatcaggcaactagtggagaataaaatattctttagcatttatctatttaacatgagtaatattgctcttaagtatataatggtactttactagtgattaataattaataaaaattattaaattaattacacagacaataacaataagagatttctacacaaaagacttaaaaccacactttcttttatattttgacaattttttatagatttcctaaattgtattttttttttctttagaaacaattttgttttaatgttgctttcatatcagcaatgtaaaaataatgagaaaacaattgtttctaattttataaaataaaaaattaaaatcggtgaaaatattacaaaaaacttgtatatttatttttttgtaatttttttttatcatttttaagtatttttaaaaataaggggatgactataaaaatatctctaacaaattaattcaacaataataataatttttaagaataataataatattgagtgcttttaatataataattaatactattttagagtctacattttacaaaaattatcgattagatcatgtattttataaaataacaatttagtcaatgtattttccaaatagtacttgagctcaattttctataatttttcaatacaaccaacttaaagatatattttctagcatacaaatatattcactacaattttatcatatcaactcttaaattattattaacttttattttttttaaaaaaaactttcataatttctattattttgtacattttcgaaaatataaagcccttaacaaaatcagttccaaatattcacccttaatataatggaataattacataagacactattttttgtaaaatatttannnnnnnacgttcaaagaatattttttttatattttta

SEQ ID NO: 129825 - DNA, 798 bp, Cannabis sativa
acccaaggagactggtttgtccacttgctggaggccaatagaattagtcatagtgcagacaacatcatttgtcggtccatcagtctctataggcttgtccgaagacttttccgaatatagaatataattttcagcttgcaaagcacaccatggcccaactccatgagaaaaatctctaaccaccctcttaactcttctaatggctagaatcggcttgtcgccaagagaagtagtttcaaaatctaatctccgcttcttcacaggagtggttcgatcattaaaatcagacgacggttgaacaccaatatcgatactcggagcttttcttttgtaattttgagagttaccaatttcctcaagctcatgtaaataatcatcttcatcttgaaaatttttggacagagcacgattttcgtctaagtttgctgaaaaatcttgtcccattaaggagctacatgggacaccatgtcttgggttcaaagccaaaattgaatctgacccatcaataaaataggagttccctttcggcctaccaagagacaaaccacctttccacccagagacaatattcttcgaattaaattaactggtggcccaagagaaagaccagaccccacattagccaattgggccgaaccacctccaaggccgtgacccaaagagattaagggcaaaataatatcgtggccaacagatgaacaaataaaaggaggaaattagactctataccctttttatattgtcttcttttatttttactctcttttttaaaatctatcatttttaccttttttttaa

SEQ ID NO: 129826 - DNA, 1372 bp, Cannabis sativa
aaaaaaaataagtaaataaacatgatatctcttatttttgtaatttaacaactgtattttaataatatataggttaccaaatactacacaatttttctaaattacgatgctttaaaatttataacttatgaaacactcatcatttttctttcccaaatacaattatatagctgctttttcttatagcaaaattaattgtaccaaattggccctcctagtggcttaatgtaatgtaatatatacaggtatttttttttccatggtggcggtgatggtctccaaaagtagttgtgtttgttgattgaaatgacgaattctccagtcacattacaatacctcgctccttatacacaggagtcccatcctcatcatcgtgaaaatgttccacactccaatcgatctcaccattctttctttcatatgtactcctagtaggtagtgttggattagggtaataaaataggttaagtatatcattaatatgttttgtgcaacaatgtatacatgggtaattaaaaaaataaaataaaaattaaggaaatttttatagtaaacctccaaaaggatcattatggtagatttttatctgatttggcatttaagaaattattttagtttaatttttttaatgatcacgtaagttgtagttatttaagattatttgtaagtttttaaaaaaatttgaataatttacagtatcaaaaattagatttaaacagttaattcctataagtataaaaaaaaatagttatgtgtaacaaaatatgtaaatcttatgatattgtaaattattcgaaattttctgaaaatttataattgatcctaaataattataacctatattactattaaaaaaaaaaaaaattaactaaaaccctcatctgtacaaatgctaaaatagatagaaaatttattaaagcatccctttaagtagaagtactgtagaattatccaaaaattaataatgactagtattttaatacattgattattaaaattaagattggcttttcacatttgtatggggctttggcttttcacttctttttaggggttggcttttctattaattatgaactctatcatagtaatatcattcttttcactgccatgtgcttggattagtggtggtcctataactttgtatatgggatatataggttcaatccaaactcaaattaacttttacatatttgtttagggatatttgctgtagaaatatacttaaattattacattttttttcgacaaatgtacccggaattctgtttatcatttttatttttgccaaaaagtacctaaaattatttcatttgtagcacctagctaggtacctaaaaagaaactctccaattctttttttttttttttt

SEQ ID NO: 129827 - DNA, 838 bp, Cannabis sativa
tacaattagtttcacttagtcaaaggctatgcaaattatttactgactaaatgggacccgcaaactaatttatgtgatcggaaggcctacctcgattcctattgttttcagccattgccacgtgttttcagcatctaacaccgtcggcatgacgcgcggctcctttcgtggcagtcaagctcgaggaggatatttcaaagtcagcgtcttgtcgttggagcgtgtactcaacgcgctaacattacactgtgaagaactgattaatatatagttaaataacgttaggcaacctacgcaagtaagtaggcgattttttacggtttagaaatttcttaagaataaataattaagtgaagtaaagtcaactttgcatgtgcggtgatattagggcatttaatttgcaaatataattaaaatgaattaactaatcagagcagaaataaacataatattttttttgataatgattgttcagctacaattttgcatatggctttttcagccatttatgtgtgtgccaattttgtttaatgatatatataataaattttagttgatattccatttttctcaaaaatttgagtccaataattaagaatatgttccaatttatttgctggtttaatcattatttcagcctactaaaaaatttagtaatacatttgatctatatatatgtaaattattttgtctaaataatgtaaatatattgttttggttagaccattaatgagaatttctatcctatcttatttattctaaataaaattaaataaaatatttcttgacaaaaaataataattacataactgttataaatattaataattatgtggat

SEQ ID NO: 129828 - DNA, 1322 bp, Cannabis sativa
tttttttttttttccttttctagtctttaacttcttctgaagtgtcaatatctttttcttaattctgtttcaaatttaaatctgtacttatttttgttcagtcagttcttatctgggctacatcatttttagtatgaaagagaatattgtcttctaatgattattcttaatttggagtctttttcccctagtgtataatatgtacatggattaatttaatttgacagaaaacttgcctaacagatctaaattatcacttgtcggtcgtcaaaataactttataacatttgttgttagaatttttgagataaggtaaatgaggttttatcataaaatcaattggcaatgggaggagtaaccaattcatcttatataatcacaatttatttttacacatgagtaatgtgggactaactctaatacaccttcctcacgtttgggcctggaaagtctgggtgtaacgaatgacatttaagagataacagggtcgaatgtgacatttgaaagaattccacaaggctaaatattgggaaatttgtggatgtacacgtcgggaaatttgtggaatttgaaacaggtcaaagactccaacactgaaaaattggcacactggctgaaaggtcccaaatggaggttaatgggaagacataggaagcatctgtttgaaccggcagtattttggctcacaattgatcacaaacgactttttggaccagtggcaatttgggctcacaacggatcataaatagcactgataccatgttagaatttttgggataaggtgaatgaggttccatctcaaaactaattggcaatgggaggagtagtccattcatcttatatatcacaatttatttctacacatgagtaatgagggactaactctaatatttgtgccttaatataattgatactaatttaaaaatgggagaattttaagggtagaactttatcccaaaaagcacaagataagaccatttgcacatggttaaagtaattctcctttcgtcatccatcatcttgaatcctaatatctatactaggaaaactgaagaacttgaagagagtccctagctaactacaaatttcattgtttactaatatttcatcatgttctatgaatgcttgatttcatgaaaactattctatcaatgtacaagtagatttattttatttttttaaatattattgcttacaaatcctattaagttattataaaatacatattgttttattgattatatatatatataaaaaaaatttacattccagtactttaattgcattctttttacaaaaatatggtgctgtcatttatatat

SEQ ID NO: 129829 - DNA, 1146 bp, Cannabis sativa
tcagacttattgcttatggcagttccaatacgttttctcccatgcgacattaaatgagaggtgactattcaaataaggtcttgttcctcctagagataccttagcgttcccctggtctccgagaatatgtgaggccttcacctctcctccgggagggcttattctcgttgacactcttaatgccaaaaagacttagtcgatttatctaatggtcatgcttctcaaacccacgtgtcgttgtcatattggtccacatattttgggcgaagttaagggcaacacttaccccctaagcctcatttggtgcaatgtaaacgaggcttgccaggtgcctccggctgtcttattgatttcttggtgcgtgcttcgagcgcgtgggctgcatttatgacagtcatcgttaaaatttattgctttttgcaggcaacgattcgcttcccgtccattaatgatccggcggatttaattggtgtcagacaaatactcaagcgttttcagccgccctgaagagcatttatcaaaaccattagatctgcagaatgcgaatcgattcgatttcctaccgttcgatgacgcctgatcacagctgcttcgtgcccgttctggcccataaaagccagtctttctccttcatttggctacttcccctatttttccactttttcgcaagaacactttggagagaaaaaatttcagacaccatagatttcttgttgctcttccttagtcgctctcaatccaccctataccgttgatcaacgtcgacccccgactctcaactttcgtgtaagttctctggacactttgtgccttttatcgtttttttgcatgttaggatcgaacttcttgggtgagcgccagatttctgggaagtaactctgactgaatctgttgtttgatgcatagaatcttctttatttatgtctgttattttcttccattcttctttagaatcgacccctctgtcgaaagactgtttagggcatggggcgatttttattccttcattctgcgtttttttcttttcttttgctttcactgccttttggatttttgcacccgcagcttgctaaggaaaatcctttgagtttccatttttggcaaacatccggagggggccttttaccagcggttaggggaccccca

SEQ ID NO: 129830 - DNA, 552 bp, Cannabis sativa
catgttacccttatcaaaatttgggtaaacaattcccaaaataaaaaagttgaaatacattaaacttttatgtaattaaatcaaaggaaataaagtaccttaaaaaatcaaaggaaataaagtaaaatacaattaaaatcaaaaatcaaagaaataaattaaaagaccattgttggggcactaagatgtctaacactactataaggtgatatcttataattggttagctattttctatattgtttataaaagtaaagtaattgagacccgatattaaattacaccaatagttatattacacactacaagagtattagatagtatagttgtcctttagcatttctcagattaataatatatatattgacgtggtgaacagagtcacaaattattaataaagcaacaaaccacaaacgacgatggaacctcctcgaaccaagatagctcatcgtttaaccaaagaacattttttgccaaaccatgagctacataaatctaattgcgagccacataggacaaaactgctctaaaaaatttagacaataaaactat

SEQ ID NO: 129831 - DNA, 1374 bp, Cannabis sativa
taatatatttataattttactatagattagaattatatttttaagtaactatttattataatactaaaaaaattaaattagccgcgcgaagagcggctatgttgcctagtctatctatttatatatatataaaggagaagtatgaggcggtgacgtggtggtctcaaaatatgttctaaagtcacttttcttttttctccttaattctctcttttctttaattttttattagtttcattcatatctattaattaatatataattttttattaatttaattcatatatataaattaatatataatatattaaacttgccacaatagagtgagttagtatggtgtcaaatttaaacttgaaattaaacttgagattccgagaatacattccgttaggtagttttatatgcaagtacataggagaactcctaatatccttatggacgaggaagcagagagaaggcttgaaggcttcctaccagcattgatgaaggcttgaataattgcaaagatgtggatgatgacatctgatttagactaattagtacttgaaagctaacattctgtttcttcattctatttgtattattcatctgttaattaaggactatgcattttattatttcttgaagatggttactttaattttaagggacagtatattgctgatattactgtaattattttgtaattgctagaaattcatgacttgataccaaataaaattaatttgttacctctttgtttaatgcatacatattaacaagtttcttcgtatatattttttaatttcttacaggaaataaaacacctacgttcatatcttttggatttgaagaaagcttatgagatatatgcgtagtgtttatgctaattatacagctttcattcagtaagttacaatctatttacttcatattactgcatttcatattgacctgtctaaagacaatcatcattacccaaaataaactgaagctttaatattgatgcttttaaatattgatgtggaagatgtggatgatgacagcggttttttttaaaaaaaatataatttccatatatattgattattatataaaatattgttaacaattaataatattaaaaaaaaaagatcgtgttggtgtcttggttctttttttttgttttttttttcttaaaaaaaatgatatttaaaaatagaaattttttatataataaactaaaagagaacaaatttacatttacaacctaaaaaaatatcatacacctgttctatttttttactattttattattattttttttttttgaaagtattcactctttattatataaaatattgttaactattaacaatatttaaaaaatggtgtgttggttctttttttttt

SEQ ID NO: 129832 - DNA, 640 bp, Cannabis sativa
  modified_base (541)..(542): a, c, t, g, unknown or other
ggctaacttccacatgttgtagtacctgaatggcttcttccgtgagctccaatcacggtaaatagacacaagaatggggctgtgatcaaaggataattcaggaagaaacacagcttccgaatccggcaaagcacaactccatttcgaattaaccatggctctgtctattttaaaaaaaaaatctatcatctggtttttggttattgttccaagtaaaaaaagagcctgagtacttcaaatctatcatctcacaaacctccatacagtctcgaagtctttgtgaaggattactatgagctttcctaccaactctctcatttgcgtataatatctcattaaaatctcctaacacaatccagggctcttgtataccagagctagcttctccaaatcaccccataattcttcccttttctactcatcatttaaatctcatttaaatctcatttgcttatttccctaaactaacaaaattgcttttccattttttatttggtgaaattgtaattccatcccactatgtaaagtccttttttggcannttagttgacaaaataatttttacttttatggtaagattcttgtgcattcataaccgatttcttaccttgtttatttggtttgtagttgctcttttcct

SEQ ID NO: 129833 - DNA, 532 bp, Cannabis sativa
aaaagaaaataaggccccccccccccccccaatacaaaaaactaggagagagagagagagacttacctgatgacccctatcaaaaggagtttggtggtggtgactaatcataagggtgaaacctcggaggcattgccaaataattttcatcctccactcctatagactactactggatcaaggtattcaactacctcacttggttctccacataagcactacgttggaccatgtagttttgcatgtggttgttgttgaatgatgtagctcaactgatcatgagtgtattgcatggtagggtgggtgttcatcatcgccatttgtcagtgtttaaacaatctatttaacacacgtagaaaataaaagaggtatgcgtacaacagactatttgaaccttattttaacgagttaaattttcctaaattactcaaaattttataaaatattttaaataattgtaaagtacacgaacatggaaaaaaattaaaataaattttctttctaaatatggaaacaataaatggtactccta

SEQ ID NO: 129834 - DNA, 542 bp, Cannabis sativa
tacccggtgtttccccttacggatcacgggactactgactgtcatagatattgtcttgaccttaattcgagatcaagttacccgtcttgatcgtcttagtcgggtttgactttgtccaatccgaggtaagatttatctcatctcggatctatcaagaacttccctttctaggatgggtatgctcttattttaatccaattcgagatggtcttatctcagcctgacccatgctatgtactcgccttggtcatctgaagtagattgcttcttgtgggccctagagatgacacatctggagccttttctgttttgggcttttatcttgcttgtttgttgggccttcctcctctcctcttccgtttttagtgggcccttaattgggctggtctcgacttgtccaatccttatatggaccttcctcaatttagaggaaattacactatatactctttttatattgtcctcttttgtttttacccacttttttaaagtctatcatttttacctcttttttcaaaattgtaccaattttgctcctatca

SEQ ID NO: 129835 - DNA, 1195 bp, Cannabis sativa
gcaccgagcacaaaaatgcattatatgcttatgtatgtgttgactatgtaaatgatttaaaattagaggctaattgcttagtccttggttataaaaggaaggtggatttccgacaaaaattaaaattcatataaccttttctatataagaaacgagaactattctattaaaaatatagaaatgccaaaagaaaatgaggcatcatcataggctacaagaaacaacaccaactcctaactaggtctaaaatcaaacaatcattaaaagttttcaaatgaaaattccaaaatggcaacctaacacatgatggaacaaaatagaaagaaagagaaatattttttctttttgaaactaggatccctgctaaccctacaatatttggggaacagaaaactatacaaattgctatgtaggtacccataacgggctcgaacctcagaccttgtgggagcaaatcacatggtcagttatcccacttgggcagaaagaaagggaaatattacagtgcttaatttctaaatgtcaatttaactataagatgattacatataaatccagccaaaatgcaacaaggttgttattaaaaccacacctgagcattgaaccctaacattttattaagataaaaaactctagatattactgaaacaccattgcatgagtaatcgcggtatgaaataacaaatacagtttccataaccactagtaaatgcaataaaaatgacaagattatagtcgaacctgagttgccagatagatattgttcagatgaggaggacgagcttgcacaatagctcgatatgcatttcttcttccttccatactctgaaaatagaatataggatggaggagggccaggaatgaaagaagatacatcagaaggtgactttaaggatcacacattattaaaatgtctccccaaataatgtgaaatattccttaaaaatatatctgaatgaaaataaggcatatagaagtaccgcaaaatcaaagaagaagttagaacggtcaaccataaaaagttccaaagcacttcttcttaagagatatctgcaacagaaacaaagtttgaaaccaaatagaagttaaacagtaagtagaaggatacagaatatgagacacataacagtaactccatttgtattatacaaatcaggaatataaaaaaaataataaaagagagagagagagagag

SEQ ID NO: 129836 - DNA, 661 bp, Cannabis sativa
acttgactgaagtttatataccagatattggtactaaacacaacaccattgcaacctatccacccatgcctcccacagttaatacttttccgagtgggcctggttctcaacatgcaccatcgaggcaaaccacaactactgatgttgtcattaacacaatgttgaagcaatatcagtaacggtacaactaatcaaccaacaacctgatcatttcaagaggaaaacacgattcagatttgaaaagatgtggcttaatgaagatgaagcagcgagtatcattagacagaactggagaacacaatgtacaacaacaagtattgatctttctcttaataacctgcaagcttgtacaacttccttacaacattggcatgcccacaaatttggaaacatgaagtagaaaatctcaaaagtgcataaagatattgcagcagttaataattctgctatcgggacgcaacaaacaatgacagatttaaaaaaatcagtaaattttggatgattttctttcacaagaagagatctactggcaacaaagatcaatggtagattagatgcaaagcggagatcaaaatataaagttctttcatgctcatgctacttcaaggaagcaaaataacaccattaaatcactcacaaactcagcaggtattactcacag

SEQ ID NO: 129837 - DNA, 537 bp, Cannabis sativa
  modified_base (388)..(389): a, c, t, g, unknown or other
agtcgggacatagggacatagcgatgtcaggggtaagggcaaccacgtatgctgaggtactggaaaacgccttagaagccgagttgtgtgaaagttgtatacaaaaagacaatacgactagatgggaggccaaaaaggccagtaatggaggtaatgataacaaaaggaaacctccaagtaaccaacacaacgaagccgacaagagaaacaagacagggtccaaaaactataaagggaagaagccatatgtggagtaccccctatgtccaacatgtagtcgtaagcatccaagagaatgtcgactgaaaggcaagacttgttacaagtgcggacaaccaggccactataaggactgtccgcaaaagggtgatcaactcaaggatgacanncttgtcccaactcgagtatttgcattcaccagaggggaggctaagactagtaacaccgtggttgtaagtcagatttctatcttcgaaaaattatgtactattgtatttgattctggagctacgcactcatttattgctttaaagatga

SEQ ID NO: 129838 - DNA, 557 bp, Cannabis sativa
caattaagcatgtgtaagaaggatgagttggagtgaaagactgaaatggattgcctaattaataaacacttgtatttaatttatgataagataagatctgcacgtgtggtggagaattttacaccagtcaccacgtaattgttggcagcagcaatttgagggtgtactctcatgtacaaggtggtccagaagttgaaaaaagtgaaagagatatgttatagaaagatctaaattaataggaagaattttgatgatattcaaggctgtaccagcatttggtggaatgtcagcaacaattgagtagggatatcctttgagtgtgcggctagttgataagaaaatgcaactcagacaagagaatgttaatactcacaaggtgttactatcatttttgcagcaaaaagttaaggttaactgacttaaacatggagatatgataacacttccatgtttttattactaaaaattggatttttctgacaacgccatgaaaatgtgagaagtaagagtggacgagagagagagtgtccttacacccacggaatgaatgactctta

SEQ ID NO: 129839 - DNA, 713 bp, Cannabis sativa
gtcgcgaccaccattatccatggttgtgaccctttttaaggacaagccaattctaaagattctggaattgcaaattgagggataaattaggacatggtaataaaaaaataatgtcccaatttctagaaaaatgagcaaaaataaaacccaaaaaactctgtgaattgtataaccttaaattttctagccctagaattatccaaacactcaaaatcaaattacctaagtagcaaaacaaggtagacaaagaaaaacacataccaaaaattgaaattaaaatcatgaagaaaaaattagcaaagagaaatgccacttactgatttgttaagatgtccgttgtaaaaaagaacttcgcgatgaagattctgatgatcgaaaagctgggttgtgatgattttgaagaaaaacaacataattagaggagattcgcaagaagaatatgaaagacagagagggcatgcaaattctaaaaagagagtggttgagatttcttcaaagcaggaaggttcatgggctgaaaaatggcaaaaatagtgcacagttttgaatttatatcaaaaaaaggtggcaaccgtttgatcaagtgtaatttgatcaaatgtataatgcccccgcttgaagccttcgttaggcccttacacccacagaatgaatgactcttatacacgagtacatcactctggctgcttcatggactgaagactgaccctaca

SEQ ID NO: 129840 - DNA, 703 bp, Cannabis sativa
  modified_base (48)..(48): a, c, t, g, unknown or other
tattgatattgaataatctggattgcattgaaatagagttttatttanggcataaaacccaacaagatattgttggtgttttggtagttagagcagaagtggttttgaggcattgtatagaatggcccaaacagaattcaagaagtaaaatggcgcattcaggggacgatgaacctaagatttatgtaatctaggatattgccttgggaagtcccgaggttggttattatgaaggaagataaatcgattatatggatgtaactatcaaggattatgcaagttgctaatcatgataaatatcctctgatagggagttatgagtgattcaatcgttttgggaaaaagtagttatctttaagaatgacccttgctcgggttattattgattgagaattggagagaagagcatttctggtagtgttttccgtactaggcacgattatcacagacttctagatataccatttgaactgaccaacgctctagtaatttttatggatttgatgattagggtaattaagaattttctaaaaacatacatcatagtgtatgttaaagatatatttgaacaccctttatcaattatgatgtaaggtgttgacttcgcttttagccaacgacaatgagtctttttgataagcgataaatgatatgtcgtaataagaatacgtaataaagcaataataataagaagaagacatag

SEQ ID NO: 129841 - DNA, 1493 bp, Cannabis sativa
tcaaaaaatttatttacactaataacgatgtgttacgtcagcataaataacgaaactcaaaattattatcaaaaataaaatacaattgaaaattctcgcttctagaatttcattatttcgcaagttttaaaaaaggcaacctttttgttgcttttaatgtaaataatatatcagttagttacattttaataagaaaaaaaaatattttaattttttttttctcaaacacatttaattccttattttgatcagataactttaaatttatgattttattttttaatttttaggctacattatatgttcttttattatttaagataccttgaggttattcttttcaaaaaattctaaatcatattttgaattgtgaaaaatatatattttttttcgatataattagaaaagatgaacaagataaaagtaccatttccttttcttttataaattattgacatagaagtaactaaatattatatatatttgaacaaaacaagtataccacctaattttataggttactacaataaatattataatattttatatttaaaaattctctagtatttaaataaatttactttaaataagtaacaccaacacattctatacaatagagaagaggtcatgtttaaaaattcaatttcttataagttattttaaaaattagttggtatttaaaaattcaattttatagtaaacaaactaaaaagttacttctgattttaattatttttttctaacaacaattaaaaaaacatatacttcctatacgttaaaacggtccccttaaaaaatagattaaggtgatatactttagtccaaattggtgaaataacagaattcataaaaattattcagtagactttagaaagaattccaatttttgagctcaaataattatcggtgtaactaaaaaaatattttaaacttttttaaaaaaaacaaaatggagaaagagttattttttaatattaaagaaaattataaatatagtgtaagttacatgtaaaagagggagtaaaaaataaaaaaccaagaaaaggaaaggactctgagagattgaattaattatgagctctctcaattcactatcgcccacaaaataattcaattacttaacagtattaagcataataaaataataaattacatacttgcaattaaaataaaattgtagtcacctcgtgtaaataattttaaattatatgggatctgatatttagttgtaccaataataatataatatgttagagaatattaagtattactagtattttttaacgtttctcataaaaaaaaaaaatatattgactaccttagtcattaatattttattattatataattactgttataacacgtgccaaacatgtaatttaatagcaatatcatttttgttcatagagtttgcttaacttattatatattgtaatacccggtaaaaatatacatatattttaaattttatttgttatacaatttgtgtgaga

SEQ ID NO: 129842 - DNA, 800 bp, Cannabis sativa
  modified_base (748)..(755): a, c, t, g, unknown or other
tggtaaaatatttccaacaacaagctcgaaaaacaaaacatatttacatgtgcaattatttaaacttgagaaaatattcatttcagaaggtaaaaaagcaagataactctagaattaaaagctacctggccagccagttttcttgaaacaaaatgcaatattttccaattttaaaagtcgcttggtcacctgtattgtattaaaaaagggcccttgaactgaactgaaaaaaaaaagatagaaaattcaaacacctggagtccttggttctttatatgggtaagatgtgtcattagtggattggttctcattgccttggttagttggagcattagtgttggctgcctcagattcttccttgtctttttgggcttaacaaaaactaagatatgcctctttgttttcattgagttaatcaaagtttgcttctaggttagccttccaaaattcataaaagacatccaaggcagccgtctccaagctttccactttcttctggagaatctcccgctcagcaccaaattctgtctgtccagagtcgagagtctcctacaaaaccttcttatccttattccaattggaaagaaggttccaaaggccttccctctcgtccttcagagatttaacatccttagtcagagcctcattttttacttcaacctgagcagtggaggacatatcattgatctccttcctcaagtcctcagcaagctttttggtggccaagagtgttggaaattattttacnnnnnnnntagatctactcacaagtatggtgtttaaacatcctaaatatgaac

SEQ ID NO: 129843 - DNA, 1476 bp, Cannabis sativa
ttggttgattgggactctatgttaccgacttagaaagacccctgtagcgggttgttcagagtgacaggcttctctgattcgttgagacagattagctttccgttgttcgtgctcaactcgttggctctcgagatttcgccaattttccactaacaagttttgaaattgctcatgtttcttgtcaagagagtctcggggtcttcaacttgatgattagcctcctcggggtcttccaactcccgtgtcgctctccaggtggaatctgctcattgattccgaaactaggagcatttggtggcattgggtgacaagttgtggatatgcttttgtggcctccacctggcacctgagatgcaggagtagtcccagttccagcttcagtaactagcatgccctcacttgtctggccagttgttcgggctcctctttcaatacttaagagtgtattacaaccatttgtgagtgacttccttgagttgtgactctcaatgaaagtacaaaaatattgactaagaaatctagacagagatttctaggccacacctgctcactagattggtgagaatgagatatatgttaagtataaataaagagacaataatttattgtagttcattccctatgtcgcgatagtaattgagctacatctattttgagtttttattctcacgagatggattacagaaaaatagccaagtctggatgctctaatttttagagagagaaactagagagatatgctctgaacttatggttacttttctcaacttgaaaaatgagctagaagagctctcattttataggtgaaagaggtcctattaaatgggataaaataatcctaagaaatagaaaaatacatttagactattttttattttagatgatggtctaacggagaaaattaatttctgaagttgattgtcgatttccagagttttaatcacgcccgctagacctgttccgggtaagttgtagcttaaatttgtaactcccttgggagtgaaatttggagtgaatagctttagaattgcaatttaagtgtgaagtatgacttgatatagcactaaaatagcttcaaaactcaagttgaatcgtgtcaattggatcaatattgagtgaatcatgaccattttactgaaggttgttctgggcccagcgcccaggttgacattccagcgcccaagttgacatgtgatgtcatcttggatgctgggtgaattgaaaaacgtgctagtgatgtattttttgatgcatatgtgatattttgacatcacttagtctttttctgtgttctggcaaagctggtcaccagttctcagagtgttgcagttttgcgcaaatgggagactcaaaactacccaatttctgagtaaatcactttgtcagaaaagtgataatataaagttgtgaatttgactgttctgacttcatagctcttagttattgtgaaaaattagacgaacggtcgagatggta

SEQ ID NO: 129844 - DNA, 2152 bp, Cannabis sativa
  modified_base (32)..(32): a, c, t, g, unknown or other
  modified_base (1919)..(1920): a, c, t, g, unknown or other
attaatcaagattaactgctaatttccaaatnaactaagcgggctttacaatggtaaattccttaggcaggaaattataccacaaactccgcttttacttgcctttaattaatgctaacacttttatcttgtctcgcagaaatgcatttcgagggtctcatgcagaataaagggaagaagagaataaccattttggaggctccttctgatgtggaggtggagcccctcaaaggcaaaggaaaaccaccgcttacaagaagaaagcctctcagactgttaacctcgaggtccctaagactgaaacccaggatccaagtcctcctctagtcaccgcaagtaccaacgagcccgctccaaatgtgaaccaaacttttgtctcttagagccaagccctcgagactcttcctatcgacgccaatagtcctagctcaaaattcactgtagaatttggtgcagcctgctggtgttactttaaagccttccttccccatgaatgggatctagtttgtaatggggatttggagaacatgctcgagaggagtgttgctcatggcctctcgataaactctatttcctttctcctcttacttttccttttaactattttaaaatttgctaacacattctctatctatccttagcaaactttcctcgcgttcgtcgtacaacggtgtggcatggacaagctgaagtacttggaaggcgaggttcagaaattgataggccaacacgaggttgtgaccaaacaatggaacgatgccaagttggagaacacccgcctaaccaaggatgctgagaaggttaagaagaaccttgaggccaagcttgaagctgccgaaaaggaggcaaaagataagatcgaggaatgcaagaagctcaaaaaggagcttgatgctgccaaggtgacacttgatgggaaagagaccgaaacccgagaacaatgcaacaccgttggcctccataccctttatcgagcttagatggcaaatccgaatatggatacaagtttcctggaagagtctgaagaggaaattcttgcttactgtgagattcttgcttactgtgagaagaccaagaaggaggaggaagaggccgaggtagcagaagaagaagatatgtccaagtctcctactatgtaggcttggtttttatttatttttattttgtttaggaaaacgggcctaaggccgagacaatggtttgccccttgtggcaccttttttttgtaaagacaaatttgcaaggttggatggccaactttgcttttatcttttttaaatgtttcgtacttttatgcttgaactttaatatatacttgtttgcttgcgtttttattcacaatttaaacaattatattttgatcaaatgcaaaatactttaggcctttccattgctcgtattttcctctggtaagtagttagtagctactatatgcgcgagcagtttattatctaccacgcttttcatttgcgagcagttatcaattctatctcgcaataacagttataatttgttttaaacaaacttgaatatactattaatgatttatcactttgaatgatttatcactttgtatatttttgattgcttatatgaatagttagatcgtctattcatacattaggtttaagtacttttttcaaggcatctttgtgtctcgtataatactttcctatacaatacgagtcgttagtattcagcttcacatgtgagttatgagttatatctcatttacaacttttgattttcctttctcgtccacaggtttttaaacaaaaagttatttataatagtttgattctcctttctcattagaaaggtttgatcaacaaaaactttttaaaaaaaaaaattaaagtggtgggtttgcactatatcatgtatttctagataaattctggttaatcatacacatatgnncctcaagtaattttaaagagtaacactttataattacttaaaaaaataaatgattaactttattcattaaaaaaatttcaaaatattacctaaaaaatgtgagttacaatcatcaatatactagtagtagggtcgcaaatgttccatgttccagtagttctttatcagcgagccattctgccgagccaatttgtaaatcccatttcctactatcgcttcaatcacataagga

SEQ ID NO: 129845 - DNA, 992 bp, Cannabis sativa
  modified_base (756)..(756): a, c, t, g, unknown or other
tttttttgttgtttttgtgtatttctgaaataatccttttaattattatagaagagttttaatgatgagataattaaattaaaaaaatataataaattcaatataaaatagtacttctttgatatcagatatttttaaagaataaagtgattgatattaatagtaaataattacttgattataatattattaaatagagatttaatgatgcaaacatgattattgggaatgttaactaagtattgaataaataattaaaaatggtattaatatgagatattaatgaaatttaacaagtaataaatttcacatcatgaattgagaagaagtcttaaaatcataattaaatacaatagactattatagagttgtctaactgagtgaagatattaaatatacttggagtatattaaaataccatttaaaatgtgaattcatttaaaagatattattataatttagattaaggagttaattaataaaagaatatatgtcacgacccgagccctaggccgtgacagatatgtaatatctatatcttaggtggtcaaaggtcacactttgacctttttaggaagataaatcttataaatgatcttttaatttttatcacaaaatactaatttaaaagtaatggattaactcctatattaataaaaaatattagtaacaaaattaggaccactcatcaatataaaagaacaataatattcccacggttatgtaattaccgaatagatagatttaataagtcantaaaataccaaaataatacctagcatccatcattcctcatttctaactagtgcatagctaatttaagtcatacagaccatccgtttcagcttaaatacaaaatgagtttcatagaaagattaaatagtagaacaagactaaactaataacgactttcttcttcaacggtaccaccctcatcccctagcatcaaactgagttcctggaatggtaaaaaatagggggtgagcttataa

SEQ ID NO: 129846 - DNA, 782 bp, Cannabis sativa
tttgtcaaaatttgattggctaatacatgagttactccattaattttctgaaataataataagcttctaatatattctagtataccatcaatatccttacagccattctccttgcgatgaattaattagacagcttctacgcaatcagattctatattaaacctttgtaaatatcgttgaatttctatcttcaaaccaatgcgaacatctaacaatttcccccgtaatggtgaacacttctgctgcagcacagtagaagttgcaaacataatccaacttcctcattactacccactcaactgatcccagtacaaaccttaccctttttccagcatccacattcaattttaatgtaccttctgtaggtggaacccaaaccgcaactagtcgttgagtcttcctttctttcaccacgcatagcccttgtactattatttctaatgaaccacaatttcaagatacaagtaagaaatattcaaatacatctcgcacctgttgcttgaagccacgcatctcccacacacttattcaccttacaaccccataatgcatgaaacacattctcatttgcacaattagagcacttgttacaactttgattaatctgaagccctcttgacgattacgtcgaatgagtagggagtcatgaatgagccatttttcacacaaagtgcttcacctttgggaaattttcagcttccacaacaatgcatggggagattttcaaatctttgatggattcccagtaggggtgttcacaaagtatccgatccaatccaatc

SEQ ID NO: 129847 - DNA, 539 bp, Cannabis sativa
tttagaaaatacatggtttattttgttatttaacaaaatagaatgtccaattagtaactttacaaaacacaaggtccaaaatggtatttaccctattttttatccaaacacaaaaacttttttaattgagttttccatattagaattaaattagatttactctttttttattattattataaggtggatttttttttttaaatgtgtactgtattaagttttccctgttgtttcactattgtttttttaattgtttctgttttgtattctactattgtattataaaaaagatagtgtatttttaagaaaaaaatttgtatggcaatatttttataaaagttaagccaaattctaatatgttttataaattcccctcttttaattaaaaaaacttaaaaaataacttatagaaattaagccaaaaatttgaagtgggtcaagtaaaatttatttgagataaattgataaatactttttttttatatttattacttaaaaatacttttatattatattttattaaaatatatttttttttt

SEQ ID NO: 129848 - DNA, 1406 bp, Cannabis sativa
  modified_base (27)..(27): a, c, t, g, unknown or other
actaatcagattgtaaagagttttatntagggcataaaacccaacacacgttgcctcaggttttcactttttatgcgccaacaaaagtgccaaaaaaagtggcggtcaacttcccgcccaagtgcaaaagtgggaaaaatttaggtgggaaacgtttgccggcgcaccccattgcgccggcaaaagtgaaaacttaaatgaaacgcagcgtttcattaatttttcagtcagctcagacttttgctggcacattaaattgcgccggaaaaagtcgaagctgaagaaagcttcagacgcacccctttcccccattctttctcttttcttctccttcctccttctccatctctctgcatattctccgattaaccaccgccggctgcccctatttcctctcaaattttaccattttgtggtatttggaccgagcaccacccatagttttcatttgttttttgttttttcatttttttctcaccctaaaccccaaaaatttttgccccctaaaattttcaccaaccccactcacgtccggccacccactgccgccgtcgctgcccctttgcatatgcctggtgaaggtaatctctattttaatccttttagcttatttattttagttttcatttgagtttatatagtatttttagattattttttgtgtaaatttgtgtttaaaattgtgtgtgttttttttagtttatttatgtttttgtttataaatatgtgtatgtatagtatttttaggttatttatgtgtaaatatgtgtatataaacatatatgtgtaaatgtatatacatatgtaaatgtatatatatatttaaatcttaagataaatcagtgtatatataaatgtatatatatataatatatgttatatattatatatttaacatatatatataatatatgttatatattataacatatgttatatatattttatataatatatattatatatatgtgatattataacatatttatttttaattttatttagttaatatttaattttttcttaaataggtttttggtattcgtttgtttggtgtttggcaaaaataacttctcgttttattggaaggttagtatgattatgttatattatttataatatttaaataaaaatttacttgaaaatgcatattagtagagtttgaatatcttatatattcatccatagttagtaggttctgtgaaaaatatactaccgtcggatgggtggtaataattaatatgaatgtaaattcttttggtattgtgtttgtgattgtgtaggtgttgtaaatttggaaacgaataattgtaaagtgttatgctgtccaattttcggtagcataacattttcaatttggtcaaagtttttatttaaaaaaataattagaacatcattaaatcata

SEQ ID NO: 129849 - DNA, 1108 bp, Cannabis sativa
  modified_base (52)..(52): a, c, t, g, unknown or other
tatgttacaaaatcggttatatttaattataaccggtttgagttatttattnttattcattatgttatagaaccgttttatttttagttatatctgagacatctacttctgttgactttttcagcggtgactttttcgtcgacttttttgggaaaaattttcgacggcaatgacttttccagtgactttttggcaacttttctagtaatttttctggcactgacgacttttctgttgactttttcagcgaaacttattattacaagttttattatattcatttatttttttttttctatattttaaactttaattattttttaatctcatatttttttctgcattatttatttatgccttataaaagtaaattctcctatattttcccatatagatgaaaaaactcctttctaataatgtgtggtctataaaaaatttatacccactcaagccaattggaaacaacaaaaaaatctagttggagttttttatatgaagatttttatgtttttttatataatgttaaaaattttaaatatattatttaaaaaataaaatagaattttttcttaataaaatattaaatataatatcttaaaacataaattagattttttttttttttttgaaaatagttataattttaaaaaataatcataaaaccatgaaatatgatattcttaaaaataaatttaaagtctttttgttaaagatatttttggacctgaacgagttatcttgggcgtggacctctgctgcccaaccatcgagccggcagcattattagtcatctctctcaaaatgcaatgactaaagataattttaaagaaaaagtgaggagaaaagatagtgggaagaaaatatgagaagagacaaaaaaataataataataatctcatttgtccttaccaatcaactatagagagagattagagagacagtgagttcgaattatagagagtgagagagagagcttttctgattcacatagggttttagtgtttttcaacacacaaaaagacttgttaatcaaagctctatcacaatttatataggaaaatttatatggtatactgatgtcgcccaattagttacactgcggtcgcgg

SEQ ID NO: 129850 - DNA, 1050 bp, Cannabis sativa
atagagctaatagcctgcaaaccggttactaccttagcatgtgaagaatgttttgaaggcttgaagaaaacaatatgacttgcatgatttgtgagcagaattccaataaccaaaaatggaaaatacaccaacccattgaaaaattaaaaacaaacaaactcttcctactttcattatctaaacttagaaacaaggctttatcttaaaaaaaattccgaagcaaacccaaattctttctctctttcctttcctgagtaagatgatcaattagaacatgtgtaaatctctgttgctagaataaaactacaactacttaggtcacattttcattcacatttcatatggtttaactctcttaatcaactttttaataaaatatctaaatactttcttattaaatttccccaatttttttggactttcctttcatatgattcaacatagattcttgaagttaagcatagattcttcaacgctgctaaactaaaccctaacactaaacccaagaaacaagataaaaaagagcattgtactatatagccatataatacatataaaacacaaaaatattcaaagaatttcccctatatatacacatttctactatccattattggattatcatcatttgaagagagaaaattcaaagagtaagtaagaagaatacctcattttgtcgaatgaaactgagagagagagagctttcaatttcaaccaagccgaaaaaacaaaacacgaaatgaagaaatgcacggagagttaagttatatactatagaaataaagggctttatgtaattttaaagagttttagggacaacttataaattaatatagttaaaggttggcttttggggaaaaaaaaaatattaggatttttggtacttagcttttagaattggctaattaaaatttttactccccaaactttaacatgtaccaaattatgctcctaaattttttttgccaataaaaattatccttgaactattgagattgttagatttaaggattttgtttaatttcattcaattttactatttcagtgatt

SEQ ID NO: 129851 - DNA, 632 bp, Cannabis sativa
aataaatataaggataaaatatcacaaaataatattacaaatactaattaattataataaatataaggataaaatatcaaaaaaatattaattacattaatctatttatggtaattagtttaatcattaattatttatattagttaatgattaaaatgtacatttttatgtaataagttttcaatatgcataagtttttaaaataattttttttgcacattttttataattatgttatttttgttgtacatttatgaaaaaagctattttttaggtgctattggagatgacctaagattaagggaactccatattcaatgagattattaatttattgccactttaattgtttgttgggtggttgcgtgttttagggagagatagaaagatagtagagaatccttcatcatatgatttcaaaactgttctcatcaccatatctcacttgtagtcattattacattcaaggttattgttattgtcatctcacatgtataacataaagctaggcttgaccccaacatgtttgttgtttatataaaacaaatcaaataatgagttaattactcacttttataaataagtgaatctgtacaatttttttttataaaaaaaatatgtcaaataaaatt

SEQ ID NO: 129852 - DNA, 613 bp, Cannabis sativa
catgctgcattgggatgatgttgtacatcatatgatgtttaataccaatgctttttaaaatatatatgtttcgaattattagataaaatgctagagatatacttattttgtatatatgcactaaaatgaatacatacaattttgtggtatatgaatagtttaagttaagatgcaagataaatcattatgtacattttagagtaataatacgtggatccatacacaaattatatataatttgatacatagttatgtgataaattacttattgtaaatctaaagtaacaacaccaagattctaaaattaatctacagtgtaaccaaagattttactagccaaattatcaaacacttaataattttataaaacaaagatagaaatcaaaagataagagaataccaatttttctcctagttccgatcctcaagatcaaatatgatccctgactatacttcaattgagatacatcatcaaattttcattaatagagcttaatcgactatgaactcgagactcacacagagaacaacgatcacaatttctctcacccaaccccgagtacaccctcaaactcttaaacgatcacaagaacttgattacaaagctctctca

SEQ ID NO: 129853 - DNA, 1057 bp, Cannabis sativa
tcttctttattcgcaattgcccaaacatatttaatcatcgctgttgtattccattcggcaatctttttcagaccaatcccccaactttctttggttggcaaatacatacccaagctataggagctgctcccactgacacatgatgacccttccacaagtaggctcgacaaattgcttcaatatctctaatagtcttcttaggtaacaccatgatttgactccagtatgagtgaatggacataagaaccaattgaacaagtacagcccttccagcaagagacaagttccttgaactccatatcttgatcctggctgtcattttctcagctagtacagtacattctttccctgaaattcttttagcacaaatagggatacctaagtatttgaaaggtacctcttttttgctaaacccagaacagtcagtgatgcgtcgaatctcattctcagccataccacaacaataaattgcagacttatgaggattcggttggagtccagaagaacttgaaaataacttcaggccttgtaggacgtaatatattctcttgaaatctccatgacagaacgtaataacatcatcagcaaacatcagatgattcagtttcagctcagcacatctttcatgaaatttgaactccgggttagaacctatcttcagtagaattcttgataggtactccattcctagaacaaataggagaggagacattggatcaccctgccttagctctcttttcccttcgaagtaaccatgtaatgatccattgaacatgagtgagtatctaggagtacgcacacagatcattattagtttgataaacttctcagggaaccgaaaagcttgaagcatttcttccaaaaaatcccagtcaagagtatcataggctttttggatgtccaatttaatcatacatccaggtttggagcctttcctgccatagtctcgtatcagatcctgacagatcataatattgtgtgctataaacctgcctgtaataaatcctccctgattctgagcaactaaatcagataagataactttaagcctggagca

SEQ ID NO: 129854 - DNA, 1199 bp, Cannabis sativa
tccgtgaaagtacaataacgggacaaaatcatatccctatataatatttaaatattttgattctttaggtatatacttaaagagaaaaatttgcaggggcatttatgtctatttttttataattcaatttttttggtataacaatttacattctacttatttagaaccttttataagtttttataaaattttattaaaaataaatgttaaaataataaattttgcacgtatatacctgtatataaaacttcaaaacaatttagtttccttctcgacacataaataattaagttataataatataataaaagaaacttatacacattataatttataatcttataaattttagaaaaaaattaaaatagtttatattattaaaaatataaaataaattagtttgaagctaattatattcattatcagtggcggaaagacatgaagtaatgtaaggacacatgatctcacctaattttttaattttttttatatgtatatttttgttatatatttgtatttttacttctataaatttaatttttattttagtttaaccattatatattataattttgcccatataaatttatattttttttatttttatcttcatatagttttatatttattctcctatatcaattcctctctataaaatttatatttttcttcataataaaaataatatatttttataactataaattttttccaaaaaaaaaaatttgcccgctaatatttccactgttgattatatcaaaacaaaaaggctatgagtgagtaaattaaaagtagaatgaccaacgagataggaaagattatttaaaaagccaaagtttttctttcctacatcaacgtcttcttttatgagtggttcaagagcagttgtctgagaatggttcggttcggctcaactacgtttcagatttttgttttcatttattaatttactattattagtttaattccatttaatattttttatagagttagaattattgggagttcattctttaattaattttaatgctatcatcgtgtttatgtgttgacactaatttagttttttcattagtcttgtcttttgacatggttttttagtcttgtcttttaacattgttttttagtgttttccttttagttttttctagtttgagtcttgtcttttggcatgggttgtgtagctcagaattatcatg

SEQ ID NO: 129855 - DNA, 1112 bp, Cannabis sativa
tgatccataaattacaaaataattcaactgttttaaattatacaccaaaaactattaactataatatatattgttcttattatttgtcatattttaatctatattacattattaaataacataacgagatacaggtgatatctatgctcaaaatacaaatttaacttattgacacctcaaattcctgtgtttataatgtgccgcttagtgattgctactgtaggcgttattatattatatgcttcaggagggtttgtttttccttttcgaaatagtctttgttacgtgtaaatctaccacttccactattatagtcaaaagttgtcttcttattttacatcatcacttatttttaggatatttctttttcatatataaatatatattcaaatatacattaaaattaattagaattattaaaatcattggattaaggatcaaatcaagaaaaacattttccgtatcttacatacctatatctttgagagtacttctttcttgatatcaaataaattaatgacgactatctacaagggcatacagatacagtaagaaactatccaagtactaaaccatgagccttttatttttatatattaattattatcaacaaatgtgttaatcaaaggaataaagaaggctgtcacacaaaggattagtatatgttggccaaagaaagtcagtttagaggacaccagctggtttcaaaacttgcaatccgaattgtatgtataaatttaaagtaaacatgtgtacataattatatagatcatattattttttaggcccatagaggtgctatttgcttgtaaaaaatcaaatttgaacaatacaaactttgctcattcattaaaaaaaaaaaatctattaacaaatatgaccatacaaataatgtggccataaatatcttaatagaacacaaggaataatgcgtgaaaactcaacagaaaaaaataaaacttggtgccttaataaatttccttaatgtgtagtcctttgatagtttgatgtgtaacaaaaacttatataaatacaagttcttcattggagtttgaaagaatcgcatgcctcatcaagctgacacattcattctctctctctctcactctctc

SEQ ID NO: 129856 - DNA, 856 bp, Cannabis sativa
gggcacaaaacccaacagtatcatcttattcttaataagcataatgcttttttcatcaaaataaagagataattttatagatctccagtaactaataatatacatctatgtaaaaatatatataagaaaacacctttaactatatcatatcacaagttattgtgcacaacaagtatatgcacaatgcaacaacgaccaacctaatcaaagtatataaatttttttataaataattctatttcaagactctaattagtcaatgcaataaataaacaaatcatcttttaaaactaaataaaatcataaccaaatatcctacctaaatcaaatttttatccaaattctatatttaatcaaatagagactgaatcgagccttcaaatcagccaaaatcaaacaatagagtgagaaagagagtgagatgtgtgagagagggagagaggtattatagaattaataaggcatttgatgcagaaaaaaaaccatgaaactgtttttcaatatgagttttcccatcactaggcaaaaaacatgtatattatcaaaagctacataaaccaattaatataacacaataaactttagataaatgccatcagagataaatacagaaagcaacaccaccgaaagcaaataaagatcatcatcatcatcataatcaacacaaccaacactactactaccactaacacaacagaacataaatgagactataccaacagaacagaaaagcacacaagagaattcaaagctcaagcaaggaatcaagtctctttgagctaggggtgtacaaaaattttcgtaagccgcccaacccgaataacccgcccaaaccaaaccgacaaaaccgataaaa

SEQ ID NO: 129857 - DNA, 955 bp, Cannabis sativa
tctttgagttccgctggagccatctatatggtgcttttgaaataggttcaactccaggtgcaaagtcaatcacaaaatctatttctcattgtggcggtaatccctgcaactcctcgagaaaaacgtcgagaaattctttaacaaccctgactacctcaggcccaaatgttttgggtctgctggagtcaatcaaaaccgctaaaaatcttacacatccactgtgtagtaaatctctagccttaagactgaaataatcaggactcgagacccctgaacagatccaacacaaaaaaatggatctttgccctccggctgattacctttactaatccatattctaaaatgcagtctttacactccctccaattctaactcttcccacccctcttattcttggagtggctcacatttaattttagaacctccgtcttttgccttgactatctgggagcgatactgaatctggtgtatgccactccaaacccagagattagtttgtgtaggcacatgtccatagatagcaggtccgtaaactgtaggagttgtaaacttagtactcagtagcgtgacgaccacaacagaaacttgcattgtgtaactgggtgttgtaactagtggggttagtacacaggcgactctaaaagacttcatataagcatcttccaaattgatgatcccttgggccctagacatgaaatcagacaaggtgtcagacctttttccttgcattttgctccataaaaaggagtttatagttagtccggatggagggccatgagcttcatgtcattgctaactttaggtttggctacttcttccgtcatttgttggatgaagctcttcaggcttttgtctggctgttgtttgagatttgttagggatctgacctccatgtcgtaatccctagtgttgatggaatttattttaccaagatcttagatctactcacaaatat

SEQ ID NO: 129858 - DNA, 984 bp, Cannabis sativa
aatcatagtgtggaagattgtgaagaattctaacatttaaagaagaaccaggctcagatcttgttattactctgcgacaagaaaggacaaggactatagatctgagtagaaggagccatattattccgctgccaccaatgtaaggttttctatagctttatatgtgtttaattcattgttttaagaaattcatgtttaggatgttagattatagaatataatcaacatacttgttagtaaatttaaatcctggtaaaataacttttaataattatattctaaaaaaatcactaaaaattgctacaacaaatattgaggacttactatcataatatatgtattataaccattttactttcaaataaatttaaacaaaattttacatttacataaattgtatcattatatgcgcataatcaagacattatcaatcatcattaatgaaagtgatcttctttaaaaattaatctctcataaaatattttatcactagtaaaataaataaaatttttatattattttatttattcaagtaaatggaatagctaatataaatacaatacacataattatttattgttgttatcgttaattattatatttaattaattaatcatacaaatatttattctatgtgaaatgtagttatgtaacagaatttttagtttaacgatatttttcgggtttctaagttaactctaatagaatttttttttattaatttttataatattatatatatttaaaaataaaaattatatacatattttatataaagaaattttaatttaaatttaaaatacagattttatataacgaaattttaattttaatttaaaatacttaaaatattgtagatatttttaatcatatttttcaatttattgatttaattttaaattaaaacaaaaagaaaaattatgtagatattttatataaagtaatttaaaactttattattatttattttatattttaaattga

SEQ ID NO: 129859 - DNA, 863 bp, Cannabis sativa
  modified_base (825)..(829): a, c, t, g, unknown or other
atattaagctctgattatagaaaacaatcagacaaattatttttctattttgcttttcatgtttcatggttgactatcggcacaacatttctatatttttagttttcaaaaacatttctatatattttgtcaaaaaaaaaaaacatttctatattttttttgatagattaaatgaaaccatatttattcaattactaacattttgggtttaggtttggtagcgtttaaaggtgtttgttataagttttggtttacatgtgatgggcaaaagaattatttgtcgagaaatatgaaacttatgtagagacaggtattcatatgagctacttaaagtctaagtttgtggaatccactacattcctacataaacaaaaatacactaaacaagggattctctttaaatgccccttacattctaataggggtgttcctcaaatcacccaaactgcacaaacttcttgtaccgtaccacaccgcataaaaaatacagtttaaatcttttacgaagcggttgcggtttatatttttatcaaaccacgtgatgcggtgcggtttacagttttgaatttaataattgcagttcataccgcaccgcactatatattataaaattaccaatttttacaatataattttttttttcatataagaataaatctataacatatatgtaaatataagttaagtttgttttggtttactcaagttattttgtctttttgtttagtcaaattattttataattttgtggagatatattattattatagacacttttatttatactagcaaaaatctacgtgcaaggcacgtatactaaatttnnnnntagtttttttctatgttatttgaaagtgatacaa

SEQ ID NO: 129860 - DNA, 1162 bp, Cannabis sativa
  modified_base (901)..(901): a, c, t, g, unknown or other
  modified_base (1002)..(1007): a, c, t, g, unknown or other
  modified_base (1083)..(1091): a, c, t, g, unknown or other
ttaggggacatcaaggcttttgcttacagtcgctaggcgacaaaacttttgtattaaactagcaaacttttgtaaatgtattttgtaacgggatcccgaaatcttatggacgtattactttatattttaaattcaataagcaaattttaattattcacgtttttcaataacctcattgattagcaacaagctgcacagtatgttaaaaatcacgctaacacgcatatattagttagggtgttacaacttatctagtcggaaaaaccccaatttgacctattattcctcatgggatttgccttgacacagtaaaagtaaatgatttccttcggggaaggaacctctagtttattaatcttgtagaacacgtaccacccagccaagagtctgtaggatgaaggaatcagactcgcaaaataagtcctcaaagggaggttagcaccgctagaaatatgggatcaactccatgcactaaacccatcaacactggtggatgcagattctccaaggacaaaaagcttatgccacattagtccagggacgttacggaggccagcgacttcagagtacgcttgtaacattccataagataaaaaacaattggcttttcggtccatctcccatatggactcaggacggaccagcaccggcaaaggaatttcccccctttcgctgctcctgttgcctacaggaaggcctccttcaatgatgagttcaccttaggggatggttcctaagatctccacaagctgaggcattgccatgaaaactttggtctggtcctatcccacggagaacctttggacgagctgaacaacttctccctcgacaaacctggctactgtcggaatatattttaccaggacctagatttactgacaagtatgtttttaacatcctnaatatgaatttctaaaacaacaaaacttaaacacatacaaattatgaaaaaccttacattggttgcagcgaaatcaaaaatgactccttccgctcaaatcnnnnnnccttgttcctttctatcgcaaagtttaatcaagatttgagcacgactcctgcagttgtttggattcttcacagtcnnnnnnnnnatgattgaggactaacttgttatgggtgggcatgcactcaatcactaaggctcaaatttttatgtgaagaa

SEQ ID NO: 129861 - DNA, 1639 bp, Cannabis sativa
tcttcaaaaatctctagcatttatcacatttcattacatagaccttttaattttccatcattgtcgaccagagatatccttcccatagtattttcttcgataaactttatctcacaacatggttaccacagaatccttcatgtacctcagacaagagtcgtgcagcctcttcttttgtacacgtctacgtaatggcatggagaaacctctcctatacatcacaccttcaactatgatatattgtgtagcctttctcatcattttttgagctttgttcctgttgtttggaagttctccattgttgagataggctgctatgcgtatcattcaatttggtgttgtatctattgtttctatttcttccgcgcagttgatgcttggctcttctgagaattgaattgggactaagttggccttatctgttaatgtcctgctcgtaagctgtgccaaggcatcagaagttgtattttctttccttggaatctgcttgagggtgtaactcttaaattgtgcgagcaagttttgaatcttgcttagatgggccatcatttttcctccacaggccatgtactctcctgagacttaatttactaccaattttaaatcactatagcctcaatgtattttgcgtgtacctctagagcaagttctagcccaactatgagtactttatactctgcttcattcttggaggccttgaacccaaatttgattgctccgtgtaggtgctgcccccaagtgtgatgagggccattctcgcaccagaaagctggtcagtagttgattcttccacaagtaacttccaaataggtctgtctccattcttttctggtaagaattcttatacaggctccatgttgtcccttatgttgccctattccttgcctatacattcaactacaaagtccgccaaggcctgccctttaactgttgtacagggttagaagattatttcatactatcctaactctattgcccactttagtaatcacccaggggcatcaggcttttgcaacacttggcgtaaaggtttgtcggtatatacttgaacaagataagcttggaaataaggccttaacttccttgtggttaagattagacagtaagtgagtttttcgattagaggataccgacctttggcttcaatgcgtcgtttgctgatataatagattggatattagacattattttcttctcttaccagcacagggcttacagcatattcggtgacaaccaaatatattcccaattcttctccatccagaggtttagagagtaaaagaggctttgcgagttatccttttaattcttagaaaccattatcgcattcctccacatattcgaacgttttattacctcggaggatgttgaagaagggaacacacttgtctattgattttgaaatgaatcagctaagtgcgtatccgaccaattaagctctgaactttattttggtttttgagttcatatctaggagggtttgtattttttctggattgccttattttcctcgagcattaacaataagtccaagaaacttacccgagctgaccctaaaggaataccttaagggattgagtttcatgtagtactttttgaggattttgaagcattcatcaaaatcttctatttgcccccc

SEQ ID NO: 129862 - DNA, 983 bp, Cannabis sativa
  modified_base (663)..(666): a, c, t, g, unknown or other
ggaatgaaagagactataacaccatatttatttagtattagtgcaacaccaaatttaggtattggttgagataataaaaacataaacataggaatataataaaattgtaaatgcataaaaataatataaaaaataattatttttcttttcttttcttacattaaattttttttaaaaaaaaaattcaaaacggaatagtcattctacaaaaataataaaaaaattattttgaaatttcaaacaaataatgaaataaaaatgaattcatttctatttcataatctccaaccaaaaagtcaccttagtgttgatgcctttggcctaaaaaattgttgatgccctaattttttattattattttttttaagaaaaaaaaaatggaaattgaggcattagctcccaatttaaagaaaataagggaaatttgcggcaaaagtcctcaaaaagttcagtttgatacagataagtccccaacctcgaaaaatagcagtgatagtcctcaagctcatgatttttatttgtccattagtcctaatgttaactgctccgtttattttttaaaattgccacgtgtcaaaatattattggtccaaattattagtttaattttaaaaaataaaaataaataaataaattaattaaaaataattttctttttctttnnnnttttcttttctttttctttcttttcttcttcttcgtcttcttcttcttctcactgctatagatgcaaccaaaccctaaccctaattctaaccacaaccctaaccctaattctaacaactctgcagttgccgccaacaccagcagttgaaacggttccagaatcacagccccaacagcctcacctggagcgacggcttcacgaccagaaccagtaaaaggagaaacggtgcctcccatgactcggttttgggtttctaattcctcacagacggtcctattagatgcagcgagcacactcactttagttagtccacctc

SEQ ID NO: 129863 - DNA, 1101 bp, Cannabis sativa
attaataattcaaaaccgcaaacctcaccgcaccgcgcggtttagaaaaaattcaaaccgtgatcgcaccgcaaagaatttcaaatcgcatttttttgcggtgtgggcggtttgatgaacaccagtgctatctctgtaaatttcaacccctataaagtaatgagcctgtcctaagtctttgagtgaaaaagatttgttgagattagaaataagctcggaaatcattgcatgattggagcctattacaagtatatcatcaacatatactagtaagattattagagatgaaccagagtcgaaaatgaatagagaactttagcccttgaactttgaaaaccccaggagacaagattttgtctaagtttctcattccagacccttggagtctgttttagaccgtatatggccttatttaacttgtagacatgattaggctatgaagcatctttaaaccctggtggttgactcatgaatacagttttagacaggttaccattgaggaaagcattcatgacatcaagttgtgtaacatcacaattgttagagacaactaatgagagtacaattaaaactattgtgggttttacaacaggactaaaggtctattcaaagtcaattccaactgtttgtaagtaccctttgggtgcaagtctagatttgtacctgtttggattgccatctgagttgggctttattctatgtacccatttgcaacctatgacattcatatctttttcataaggcactaaatcccaagtctttgcattgacaagggcaatgatttctttcttcatagcaccattccagcgaggattagccattgctgccttgacagattttggttcagacttgaatatggcatgcttaaaggacatttcttacttttggggattgatcagatggttgatgccacgttagggtacaaattattaaggttcatggatacatatttcaattacaactaaatcaagatgcatgtggcagaccaagaacacattaggttccaaatggataaaggagtgaactgttacatggtcatgccaaacaaccaatgtaaccacccagttgatggttgtgacgtcgcatgattttagacgagtg

SEQ ID NO: 129864 - DNA, 2135 bp, Cannabis sativa
  modified_base (1170)..(1170): a, c, t, g, unknown or other
gtgacgcgcgttgaagtgtcactatagacttttagagttactcaatgtgtgtcactaaaacccaattttctagtagtgatttgtatatcgttccccaagtcgaggatccacatgttcatctccaccttgggaggttccctatttggtaatgtcgtttcccttatccaaactctgactagaggatacttcctattatacccaaaatttggctggaggacacgtgtcaagataaaaggaatgtgaatcgatgtggttgctcttatggaataactcattaattacataagagttagagtataattgtaacccgctgactgtaagatctaaggcgagaaatcaatgtacaaactgacacttagtatattagcgagaaaccatatgtccctaaatgcgaatagtgaggcaccaaaggaagtgacatgtatcaatcgtgagtccttagcgtacgatgaacaaactatgtgtaaaagttagatcgactcaagagcgagtaaaacgaggtgaccatctcgctatgggaagacttcctatagcttcatctagctaacgggagagaggcttacaacccttgcgagtcagaatgaccctttgaaagaaagaaccgcggtcgacatcagacatacatcctcaatctcggaaggaagaatagccccagcttgcgattggcatcactataaccaagtttctatcgagacaactccagatacaacaattaaaagacgtgtttaatacacgataattttgacccaatgaaaacgggaaaatcacatctatatgatttcaaaatcaaaaccgcatttacactatgtgatatgtaatcaagtcccacgattttagggacgatagttgtaaacatattcttgtcaattttataattaacttagcattgtgtaattataaatagtggtagttaagctcaaaagagatatgaaagatgccctgaaaaatactcataaatctgaataagattgactcgtggactacgcaaaattttaactgcaaaaccacgtaaaaaattttatgctcgtacgttatttttttgtgtgaaatcaatattgtgaggatcaattttagttaacgaaaatctccaacgccgatgccttagcaaaattggcctcgctgaatgaccaggatgaattgaatctagttccggtagagatgctgagcganccaagtatatgtgaaaccgaagacgtcgagatgatagatagctctccaacatggaggatgcctattatcaatcatttactcgacgggaaacttccaaatgacaaaaccgaggcatgaaaaactattgtatttagtgcctcgctacacaatgatcgaaggtaaactatatagaaaagggtattcaatgcccctactttggtgtgtcgttcttgcagatgcaaatgaaatcatcaaagaaattcatgaaggcttctgtggggatcatgcgggctggaaaagtttgtctaagaagatcattagacaaggctattactgaccgacgatcaataaggatacacatgagtttgttaggaaatgtgataagtgtcagaggttttcacatgtacctcacataccgccaacagaacttataatgatgacctcgccctacccatttgctatatgggggatagacctaattagggcattacccactgggcgaggaggagctaagtatgcggtagtagcagtcaaattcttcactaaatggacgaaagtcgagcccctcgttccataacttgcaagaaagtccttgactttgtcgtcaagaacattatctgtaggtttagaattcccatgaagatagtatccgataatggaacccaatttgatggcgacttgttcactgaattctacgagagaaataaaattatcaaaagcttctcgtcagtatccaggcctcaggaaaatggacaagtggaagtcgtgaataaaaccctaaaggatactatcatgaagaagttagacgctgccaacggcagatgggctgacgagctacctcaggtactctgggcccaccgaactaccgagaggacatctatgggacacactcctttctcgctagcatttggctcgaaagcaatgctgcctgttgaagtgaacatatcgactcacagaagagggttttataatcaagaagaaaacca

SEQ ID NO: 129865 - DNA, 913 bp, Cannabis sativa
ctcttccgatttttttaaaaaaaaaaaaaattcgtcccataataaaaaagaaaaaaaaattaaaattttcaatatgtagtgtaaaaaatcctatttttatattaaattaaatgaatatcctaatataaatatttattttattatatatatattaaaaaaaaaaaaagacttttcaagttcaaatctaatctataacctttataggttttttcaaccttcccttccctaccactaaaaaaagagtagattatgtttgtgaaaataatcataataaaaataataataataaatatttttttaaaaaaaaaattagacaaggatgtttgtcacatcttggtggtgctatatatgctatgctatttatagcactattttacaaagaataagaaaaagaaaaaaagaaaaaaaaaaaagtcacgtgcggagatgagaggactgaagaaaaatgtcacgtgcaagatggattataatagtaagtaataatactttctcatctcatcagactcaggtgagaatatttactctcatgccgtatacggtacggtgtttgaataacctcatacgtggcaaaatattattggccagtaattgaagtttactgttggtattagttgcatttgttttctttattataatcagagtgggcccaacgcactgttttatgggccccatttatttgtcttgttttgaaaattttgatccaaggccaacggcccaacttacaaaaaaggtcatatattgttgtagaaaaatactaaaagtgcttatataattattggtgtgattaaataccgaatcttaatagagtaatttccgatatagatatgtaagtttaactctcagttacaaataaatacctaagtttaatttttagcgataataatacttaagttataattttggaacttctgta

SEQ ID NO: 129866 - DNA, 596 bp, Cannabis sativa
aggttctggtacgggtctgggttgtggtcaaggtcttgggtcacaagtccagggttgcaggttttgggtcccaggtcctggcgcaagtgtcagttcgggttcgggtttgggtcttggtatcgatcctagtttgggtccgggttcatgttctggatctgattttgggtccaggtccaattccagttccaaggtcctcattccaattcttgttccaattttggatcccgagtccgagtctggatttgggtcctggtctagaaatggttccaggtttgggtcttggtacgattccaagatcgagaaactgactacgggttgggtccaagccctgggtcgtgggtcaagatttggatcccaatcttgggtccccgtctcgttccgattcgaatacttggtcctaattcgtgtttgtgtccgtgttcgtgtccgggtctgagtccgtgtcgaggactgaaattggggtcgggtcttggatcccaatcccactcctgtgtttggattttggttctaatttcaagtttggttccccaatctatgtctgggacttgggtccaagtctgagtctccaatcccggtccgggttgtgcgtctgggtt

SEQ ID NO: 129867 - DNA, 1352 bp, Cannabis sativa
  modified_base (170)..(180): a, c, t, g, unknown or other
  modified_base (1307)..(1313): a, c, t, g, unknown or other
aacctcctccactcggatacccctattgttaagattccaaagaaatttcacccagtcccagacacgaatcccattgccacagaccggatatatgccccaaggagaggagtgccaaaggtgcaacgccacatcgcacgagagaaaaaggtgttcaacagattcctcccccnnnnnnnnnnnaggacagcttgtatcctctatttggaatctccttccaatcactgatctgacagggagtgcctctgagagtatgcaccaccaaaggatcttatgccgctcaagcactttgctattccataacttgttccacagcattgggaccaccacacaatggctggctctttcctgtgcttgagctaggtaagctgatttacttgtgaatctcccgttagactctaaggtccaaccccatttatccttttcctgcctcgatggattacctcctttcaaaatagcagagacagtatctttgtcgaacaaactatttagtttagaaatgtcccaagagccagaatttgtgagaagatcagccacacagttcaaatcaggcagtatttctcccattggtaaatggatcatcttttagtatgaagatttgggaactaaattatgaaaataaagacgaatatgacgaagattgttcgtagaagttagttcatgacattacgatggaatggtaatggtaatgtgctgttcttgttactttgacatcgtaatcttttcgaatacaatatggtggataagaagttgaaaagaatcaatggccaactagtacttaatccatctacgagttggttttgcctacattattttactcttgtgcatcctttttgacctacttcaacttgttattactcatgttagagtacaaacttgttcattccttgattaatcactttgttttgttttaatttaatgatatgaaatattatattattattatttattttatttgttgtgacaaatttatcgagatctccaaaattataaagaaatttaacaaccccacaaagaaattttctagtaaaaatagaacataatttagtgaagggaatttttatttttatgatttttaaagtataagtttataaaaatatggtttttttatgtaatagaacataatttagtcaagggaaacttaggtcatccatcctgagattacctcaggccaaatacgcttaaccatggagttctttcgtgataggctaccgaaaaacaagatgcaccttgttgatataggcggtatcaattaatccatttaagccatcttcaactatgtagttccatacctacacagtctcagaatnnnnnnncttgaccttccccaagcaatgtgagattgtacagcttac

SEQ ID NO: 129868 - DNA, 634 bp, Cannabis sativa
tcgtgaatggctagaggatggagattggttcaatgtagatatggggaagacaatcttttgggttcttgcttctagattgccaaccccttatcttaatggagtcaatactcgtacgttggctgctaaagcagggagattcgttcggagtgatttagcagatcaaagaaccattattagaagaggatttttaaagttccaagttgaaatagatacttctcatcagcttacgtcaaggttcttcctggacatcaagaggggaagaaaggaatggattcaatttcgctatctcaagctgctgaagctctgttacaactgtggttatctcagacatgacaaaaaatcgtgtttccgaccaacatcctttgcctatcctccacaaggtgcatcggttcctgcttacagcccttggatgaaggcggaatcaacggtttttagctattttaacacccaaaatcagcttgaatatttcagagaggaagatggccggacttctttgccgacaagaagaccaccagagtctgactcgagaaacaaggagaaaggaaagcaactggtccatgagagatgcagggagctgttgggaataatttaccaggatttagatttactaataagtatgttgaattaacatcct

SEQ ID NO: 129869 - DNA, 778 bp, Cannabis sativa
tctctctctctctctctccttttgtctcgtgcgattaagaccaccaccacgccttcaaagatcaagactttctttccaagctcaagttcactttcaaagatcaagattcacctttgaatagcttagctctgataccaattgttgacaatacgactgatctcgatcaccacggacactcacaagaacaaacactaaaacacacacactttacacaatgtgtacttacaaaactcgaacacacataagcactttaatggtgtttaacacttggaaattcttgaagctcttggagcattttatctatcttaacaattttattacattaagggattaatagacttgacctcttacaacaatatcagttttaactaaccctttaactaactgctactaaccgaatagcctgtcaactaaaagctaacaagtgtcaatatttaaatacaatcaacatcaataactaccttgtaaaaaataacatcattaactataaaattggaaaattaaataaaatatcacaaagtctaaatttttaatcaaatatagtttaattattgaacataatttatgtaaaatattatattatttaaaaaaaaaattgaattcatttgggttatattaggtaggttgaaataatttacaacctacccaatttattaatgggataaatacataaagtactattttttgtaaaaatattatatttttacgtttaatgatttattttttatatttttacggttttctgtaaaaacagcataaaaacaacaagaaaactaca

SEQ ID NO: 129870 - DNA, 769 bp, Cannabis sativa
agcatacaaaagtatgtatggtgattggttaaaattgtgttcgaactatcgtttattgacaaaagattttaaatctctttctcaaagaaataaagagcttgaactaaatgttaaaaattttaaaaataagattgttgagaaaaattatgaaattaaatgtttgtccaataaaaaatgcaataatgccaaattcagattcttcaatttttgaagaggttcaacatataggttaaataaatcgtgttgggtttagatgtgatgaatatcaatctaaattgaacactaaatttgttaaatatgaaaatatgccttctagtttttctgatcttacactgcaggaatctgtttttacaattgaacctcttgttcctaaagaaagggagaagtcaggtaagaatgagaattttcataaaagaaggtaaaaattcattcccgcgtgtcacttctgtggtgttaaaggtcacattcgacctaggtgttttaccatgataaatctattcaaaataaatttttaatcattatggaaaacaatttgttaggaagaaaagatcaaaattcaagaatatttgggttaaaaagataaatctaaatgtccttctaattttgcttgtcatactgcatgtgataataccagtgctatacatatttctaaaaattaagtcaacattctcatgcaaaatacattgatatgagacatcattttattaagaaacttgttgataatcaaacattacagttggaatatgttgatactgaaaagcaattggct

SEQ ID NO: 129871 - DNA, 996 bp, Cannabis sativa
  modified_base (40)..(40): a, c, t, g, unknown or other
taggatgttaatgaaacatacttgatagtaaatctagatnctggtaaaatatatccaacagctcgtacatcaactattaatggaaaacatggcattctcccatgcaactcaagatctggaccatcttgatagtgacggagcagtctataggcagagctagaaaggcgtggttacccaaggtggtgtcaaggaggtctgttgtagctaatggcttttgggtgatagtttgaagaagacgcatctgcaagatggaaataaggctaagcattttcctattttagatgtaaatttaaaattatttataggggaggacaattgtatgaggatgtgtggtgatgatggggttgactcgatcaaccttgaccattttgaagactttaatggacttgggactctcttgggccgtcagagttaggtgatgtaattgtgactttgcctcaaagtcaaacatcccacacggctaatgcatacgggccaaagattgatttatttcctattgggccgaattttgttaaacaaagtatgttgggtcatgagccaactcaaaggcttttactcactgggccaatttaaaattagtccgagataaatggccagagcaatattttttctaagggtgattcgagtaattctttaaaagaacaagatatatttgctcatctagacgaaagaagaaccttgtccaaatttttccaagcccaagaaggttacatccaagaacttgaagcattagagtcatcaggttaaaacaaaaggaaagcttgctttgttgacattggtgtacatccttcttatgaaattaatgaatgtaccacacctgtgaaaaagtggaggttggaattcgaaacttactcacttgggaataagcctaacttatctattagaaggtttaagaaatggtcagagactatcctcgtggtgttggtccagcggtgacaatgtttaccgtaaactctgaacatgtgtttgtgggatattcggagtaacttctggata

SEQ ID NO: 129872 - DNA, 1750 bp, Cannabis sativa
  modified_base (243)..(246): a, c, t, g, unknown or other
agtcgacagactcagtaagaaaagcataaacaataacatagctataacccgaattatgatcggacgcccatacccccaatcataaccctatccccatgacccgcacggtactgagtttagaacattcgtacgatagtactattgaccacaatatcagcctatactcggtacactaatcatactctagccataacgatatgatactgtcaagtagtacggtactatcgaccataatatcagccnnnnctcggtacactagtcatactccaggcgtaccgatgtgatactgttggatagtacaaaagccaacatacatatctaatgtaatctaacaagcttactaacatgcaaactaaacatgtatatacatatgcatactattacactaatcttaccttgattctgaatttaggtgtgccggccaacctgagtggaacaactgctcagcgaattacaagctcctaaatcacatcaatcataacataggtaactgacacgctaaatcacttttcggggacttaatttttaaactaaaagtttccctatcgataaaaaacatagcaataccctaaacatcaaaaaaaagggaaaaactagggttcccaaaactgccccaaccggtagaccggtccccaactggaatttcagttctgcggggtttcttagggaccaaccgtaattctgattcctacaggtctccctgaatcgaaattccggttcagtgcaggaaacattaaaaaatatcataactcaaccagaacaaccccaaatcataccaaaccttccagacctgttccatatatcccaaagaacataaacaaggccacaatacacctcaacatgtacagaaacaagtttcaccattaaagctccaagtttgagttctaaaactcaaaactttattaaacctactaactgccttctaaacatgcttgaatcaacaaaaataaccaaaaactaactttggaatacatcaacaaacaataatagcaactacaacccctaaactcatactttcaagcaaaattcataacttttaacataagaaccataaaatgatgaactaaaaagattacctaagcttgaaaccccaacaaagatgctgtctagacccagaattttttacgaaaaacccaaagttcttactggtttctagggctcacgaaagagagaagagagaaagagtcatttcatgacttttctattttttggataaaatgaaataaagaaaggttttattaattaacgtaagttaatattaatctaaaaatcagcatattaactcctctatagtccactaaaggacaaaaatctaatgagacaaaatggccattttgcacattccaaactaaataccataaaaggtcacttaggggtattttggtaacttctaaattctcaactattctcgacattctcaatgtctaactataccgcccgctatactaaaaatactaagatgtgattctaatagccaatcaccgcgttccaatgttgtcgggcactgaaaatgcaaaattataaaatttctacatatgacatataaaatacattctgaattcaaatagatcatcataaattaataatttaaaattaataaataatttccataattaaaccctaattatctgctaatttccaagtgtaagctaagcggtctttacatgacatttgtatcttgttcatatagattttgacaagatcattatctgcaaagagaaaatatgcctatatccacttgaaagtagga

SEQ ID NO: 129873 - DNA, 1249 bp, Cannabis sativa
  modified_base (800)..(807): a, c, t, g, unknown or other
ggcaaaatcaggggcaacacaacactaaaacaaacaaaaaaactaaaaaaaaaaacatagtatactacagtataaaatttataaaaatacacaataaaaaatagaaaatacctcctgacagtatttttgtaaaaaaatggtaaaagtcaatatattatataaattctccattttgtaggggggattatttcataaatacttaaaaaaaaaaattaacaattttacaaaacaatcagagtcaaaactgtctaaaattgtttttttttttctttcgtttttaagaacataaaacagtaaatctgtgattagaaaaattgactcaaactaattaactttgattgtttccttctattatattaatttaaataatatttttaaattaataaataaatttaaatactattaatattaatattatgatttactataaataaaacattatgatatatatttaatttgtgaaatcgattttttttaactgagttatttttatgttattaataataacatatatatattacataaattttttgagaacagtgtatacaaatatgttattagtgataacatatatatatatatatatattacataaatttgatgagaaccgtgtctataaataacataacgaataacaataaacaatatattgataaaatatatagatatattcattttaaattaataaaaaatacaataaaatttaatattttttaattaataaatatatttctttaatataattattttatttgtatgtataattatattatataaatataataaaaaaaatatttttnnnnnnnntttttaaaataatatataagattcatgtattcaacccaacagtataattcaattatcgagaatatgattacatattaccttacatagtcaaacacaatttgcacattttcctttaattatattctcttttataatatttcctataatcaaattattttaaatacctcgtaccaaacggccccataaagtaaaagaatcaaagtagtacttagagatgcacatatataggacaaaaaattaactgagagtgttgtcttatttctatctccgtttattttccattaaaaatgagacgaaaaatttcttactgagagtagagattgaatgaaaaattcttaataaaaaaaattataataaaaaatttaaatatataaaaatattaaattacaccttacacattaattttttttttttttttttgataaacctgatgctttcatta

SEQ ID NO: 129874 - DNA, 924 bp, Cannabis sativa
  modified_base (859)..(867): a, c, t, g, unknown or other
ccaaatacccacaccagtcaaaaattcactgcagaacagctcttgaatatctgcacctgaaaaacaaatgactatgactctcctcttcaatgttgcaaacaagacaaactttaatctctaactcaatgtgaaacatggtaaagttgtctcttgtgagaagatgaccatgaaccacctaccaaaggatgaatctatgcttgggcagcgataaattgcatcaaacaaccttataataacaatcaatatcctgttgtgagagaccattataaagccgagatgctctaaacttcccatttgtagtagcagcaatcagattgtgcttacgaaatctcttccttagttggcatattttcctccaataccaacttacatcccccttcaactcatactcccaaaaatctgcacccttcacatatatatattgtttgtccatttaactcaaagaatgtccaacttattcatgagagcccaaataaattttcccaaaatagatctatatatattgccatatttaatattgcataatttatacataaatattgaaaaatcctttattcatacatgagactgtgacttgcattataggaagaattaatatcacatagccatgaatatatagtcagcaacatattaaagttgaggaatctttaataaccagttgctagtgcagttcagtgatgcccattattcggtgcaagattgacctgaatcctaaataatcatgaacacatattcatcatattaggttattcgattcacacgttaatgtttctcaaagaagatgtatcatacaacttcttttttaggaatctagtaatatagatgaactcctccaacatggacaagctcgaagcagaannnnnnnnncatgaacggaatctgattgcaataggtccccctgggtttgcaattcataatcagagg

SEQ ID NO: 129875 - DNA, 784 bp, Cannabis sativa
ttttatttgttatgtgatgtaattttttttccatcttttgcacaacaactaatgtgtattgcaagggtaacaacaaaatatttctgccattttgttttggtgttgaggaagtgaacagcaagatgtggttccacaacctaagctatcctaattacttcctttcttcttctgtaagttttttttattgttgtttgttgttgtttgtatttcattttttttcatttgttgttttgtgttgttctgttgtttttcaatttattaaacctttaaaatattcttatttgcaacacattgacatcattttctactatctttgcaagaaaattaagtttgccaacgagctgaaaattagggtcaaaacaactgattgtctttttaatgttagcataacaaacttgtatgataagtttgttaaacaaataatgatatatctattttgtctgttgagcataattttgcacagtacatccgtgatagtcagatattatgtgccactccttggcacttggtcgatcacgttattatgcctattaatgtgaaactatacgatcattggatatgtggtcgattaaacatttttgagcgtcagatatacttatacaatttcttgaggtctggcaggtttacatcagttgccaaagaggcttgtacgccttttttttgtgatcttaccatactatttctctatgttagactctcgagacttctacaatgaatagtatagcactatggaatcgtttccatatttctgttgatgggttacttgagcaggtcacagcgtaag

SEQ ID NO: 129876 - DNA, 821 bp, Cannabis sativa
aaatgatcattttttctttgatcatattggttgttgtgtctacacttcttctctctgttgttaatagcactttctacggttaacaacactttttgcagttaatagcacatgagtaaagattagcgtacacttgcgaaaaattatctcttcctattaagattgacttaacgtgataacttttcatatgattgtactcgtatttttagatgaaaaattcgcactatatatatatacaaaaaagagaatggttacgtaaattgaacgtatatacaaaatataaatatttattgtaaatgtaaatttttctataatattatatttttttttatcctactaattaatgtaattaataaaaagtaataacttttattttattcatatatatatacaaaattattcctagaaaatgtttatataggatttaaatttctaaaaattcaaaaatatcgtatctagttttcatggttattctgttcgtcctctatttaaatattgtatcgtgtgtttcaattttgaacaaataatatttatattatacacattcgaaaagtataaaagaaaatgatagagtggaagaaagagaataaattaaaagaaaagaacaaacaacaaaaactagccaaaaaagagtttagaatatatattatatatgcctttttttttctttgaaaaagaaaaaaggttattggcaaacatggtcctaaaaattaagccttattgaaacttttaaggctaaccaattgaaaatatgagtgcaatatctattctatataaagtgtgtctatataaccgaattcttaatttatgagaaattcatgggt

SEQ ID NO: 129877 - DNA, 1303 bp, Cannabis sativa
gataatattctggtttcgtttgagatattacactacttggaaaggaaaaggaagggtaaagatgactacatggctctgaacctggatatgagcaaggcgtatgaccgagttgaatggagcttcctcgaagctatgttgcgaaaactagggtgcactaactattgggttcacttgatagtgaggtgtgtatcatcggctagataccatgttattcatggaatcacgagataggccctattattccgtttagaggtattcaccagggtgaccctttgccaccatatttatttattctttgcgaggagggtttctcagctctccttcaaaaatatgagaactgtcggtggttgcatggatgtaaagtggctaatggggctccccgtatatctcatatgctctttgcagatgacagctacttatgaggaagcgatccggatcaaaaaattcttcaaaaatttaaattggcttcgagttagaaagttaactttgcaaagtcctcattaatcttctttagttccaactctagtgcagaaataaaagagagccttgcagagctgttaggtatgtgtattgcaacggagggtagcttgtatcttggtctcccaagttctatgagtcgtaataagactacggctttgggctatttgaaagaaaaattacagaagcagcttcaagcatggggtacaaagtttctctctcgggcgggcaaggagatactaataaaaactgtagctcgagctctccctagctatgctatgagcatctttttgctccctcctgagaatactaaagacatggaaagtatgatggttaagtattggtggcaatcttcaaataattcatcctctatcattcattggatgtcttggaaacgactttgtagccatgaaactaagggaggtatgggctttcaaaacctccgtgactttaatctttctcttttgggtaagcaagggtggcggctcatggtcaatcctgaatccttgtttctcgaatgttcaaagccagatattacccacgcagtacatttctaacagctaccatctgttcgaatccaagctttatttggcggagtatattagaagcgcaatctctagtgaagaaaggtacccgatgggttgttagagatggtaaaagtatacctattattggagaaccgtggttaccagatgaggaaaatcctttaattatgtctactcacccaagcctctataatgctaaattctgtaacctcctgacagtggatggcttggggtgggaagctgaaatccttgaggacctgctggtgcctcaagatagacaa

SEQ ID NO: 129878 - DNA, 551 bp, Cannabis sativa
cagtggaactcctcatctccatagtctttttttgctcttggtattacgagaagaagattgagaactttataagctaattgagactttttttttttttttttaatattaatttgttcttttgaatcttaacttgattatctgtccctgcatataatgaagggaagacatagtcactgtctttgattatcgatatgtttgcagaatactttcatgctaatcaagttgaaatctgaagctgtttacatgaaattgttgcatttttatttgtatcttttgttgggtttccttttgtgttgtttctctttttctctttggtcatttttcttccatagaaatttgttgggtcttttttttttttttgtatgagtgtgtttgcgcaattgatttggttgtggtttggtttttgggttcatcaatataattttgaaatcattcttattcgcttgatgggtctcattacttttctctgtttttctgtggccaatttttctggtgtatttctgtcagattatttactcagttgtcagaattgtgttcgtatttaagtctaa

SEQ ID NO: 129879 - DNA, 1310 bp, Cannabis sativa
tatatatttttaaaattttataaattaaaagaaattacttgttaatttttttaatattttttaaaaataatatttaaaatttaaaaaaattgagaaacataaacataaagattaaaaatataaaattgaatacactaccaatattaaaaataataataataaataatatattaatatttatatgtttttaaattaatctaaaaattggtataaattcaattaacttaaaacaaatattattaatatttctatatatatatatatctaaattaatttaaaataataatgttaacacagatatttattaaccaaaaaacattaaccttttttgtaataaatgaattataaaattaattatagaaataaatgaacaacacaaagtttttaacgtggttttaaagttagtttttcagtccacgagtccatcttattatagataatttttggaatacagaatatatacaataatatcagttgtaataatatcttgctttttctctttagatttgtcgttcctttaagcatgagtttcgtctctatttatagatgtctagggtaaaagttattttcttagaatttattcattcataactgctcatgaaacgtggacattctccacgtttcattaatgtgcatatgggatctcattaaagaaccattcaactcctcttttattttatccataattggttatgttgacttttttccgtctttgtaagaaaacttctaagtataagtatacaacgcttctcatgattctctttttccattttaaatggtattatcgaggcggttacttcaatgcataaagagcgagatgaatggatgttgctgtcactctttgaacatacgagtatgtaggtcaatgagttgcaagctcttactcacaagtatataggtcaatgagctggaaaggtctttatttactttgcttgaacaagcttcattatgtattttgttcatcccgagatgagcttattgtctccctaatcttattcattaatagtcattattcttatctcgcttttgcctatgtgatcaggagttcgaatatttttatcaactgcgattctcgagacaagttatttaatgtgtatttaataatgcactgctttattagttgattcaaatttcttcgctggtacacatatcagcttctcattattagctgaaattaaggtataacaaatagtattaataattgttgtttcagattcacttatttaccccttaagttgtataacactaatcacagggtttgacaaatatacccttacatcagatacaacaaatatcaagactaaagaaca

SEQ ID NO: 129880 - DNA, 2867 bp, Cannabis sativa
  modified_base (51)..(54): a, c, t, g, unknown or other
  modified_base (388)..(400): a, c, t, g, unknown or other
  modified_base (869)..(879): a, c, t, g, unknown or other
taaatgttccccattccaataccgtggtaccagaacgagttgcattttttnnnnatacttacccaatttgtatgcttccgattctagaatttcgattacctaatatggtccctcccagttaggtctgagcacacctgtcgtaccgtctttggtgtttaagaatactcattttaggaccatatcttccacaaaaaatttttgagccttcacttgttgttgaaatatcgagctactttttgctgatgagccatcagttttatgtttgttgtggttcgcctctcttcaatttcatcaagtgattcggcaaggagtacatggttagcctcttggctatacgttaatcttctgtgggatggtagttcaagttctacgggcagcatagcttcannnnnnnnnnnnntggcaaatggggtctgtccggttgttgttttctcagttgttcggtacgaccataaaacttcaagaagttcctccggccagtttcctttagcatcctcaagtattttctatagtgtatccttcaatgtcttgttgactgcttcaacttgaccatttgcttggggatgcgccactgcggagaaacttttgatgataccatgtttcgcacagaaatttgtgaagcataggctgtcaaactattttccattgtccgagagtattttttacggcaatctgaaccggcagattatgttctttacaacaatgtcttgaacttttttggatgtaatggttgctaacggctcagcttctgtctacttggtgaagtaatcaacttcaactacttcatattgcatgcctcctttacccttgggcaattgtccgatcaagtcgatttcccaaatggcgaaaggccaaggactttgcatctnnnnnnnnnnnttgggcggtgctcgaggtatcttcaaaaatctttggcatttgtcacatcttttaagataggccttggaatcttcaatcattgttagccagaaataaccttgccttagaaatttgttacataaactctgcccgacaacatggtttccacaaaatccatcatgtacctcagataagagtcgcgcagcttcttcttgggtaacacatctaagcaatggcatggagaatcctcgcatgtacataattccctctactatgatgtactgtgcagccttccttctcatctttcgagcctcaattcgattatctgggagttccttagtgttgaggtaggttgctattggcgtcatctagtttggggaagtataaatcatttcaatatcttccatgctagtgatgctaggttcttcgagaaactgaataggaaccagatttgctctatcacttacactactactcgccagccgagctaacgcgtcagcaattgtgttttcttcccttagattttgcgtgagagcataacttttgaactgtgcgagtaggtcgtgtattttaatcaggtacgctatcattttttctccccgagcctcgtattttccaaatacatggttcaccaccagctgcgaatcactacagatttcaatttgttcaaccttcatttcccagactagttttagaccggcgatcaaagcttcatattcggcctcattattggatgctttaaatccaaacttgaccgcagtgtgcaggtgctgcccctcaggtgtaacaagggaaattcctacaccaaatagttgatctgtagctgacctatccacatgtagtttccaagtcggcttgtcttcattgttactaggctgagatatttgttctagcttggggttgttttctgatacactttcttccttgcatgtgcattctactacaaaatcttctaaggcttggcctttaattgctgtttggggttggaggtaatttcgtactgagtttctctattagtgggtattggccttagctttcttgagtaagtgagtttctctattagtgggtgttggccttcagcctcaatgagtcttttactaagtaatagaccggatgttgaatgttgttttcctctctgatcagtacgacacttacagcatgctccatgacagctaaatatatccaaagttcttctccgtccagaggtttcgagagtataggaggttttgtgagttgcatttttagctcttgaaaagattttcacattcctccatccactaaaattgcttatttcctcgcaggatgttgaagaacagaacaaacttatctgttgattttgaaataaatctactgactgcggcgatccgactagtcaaactttgaacttccttggttcttgttggcgatttcataactaggagggcttgaatcttctctagattggcttcaattccttgggcattgacaatgaagcctagaaacttacccgagctgactccaaaggagcactttaagggattgagtttcatgttatatttcttgaggactttgaagcattcgtccaggtcatctaagtgccccccagcctacctggatttgacgagcatgtcatccacgtacagttccatgtttcgtctgatctggtctttaaacattttgttcaccaatctttggtatgtcactccagcattttttagaccaaatggcatgactttagagcaatatcgacccatatctgttcagaaccttgtatattcttggtctggtggatgcattttgaattggttgtaccctgaataggcatccatgaagctcaatatttcgtgccctaccgttgtgtccataagttgatcgattcttggaagtggaaaatagtctttggggcaggctttgttgaggtcaaggaaatcaatacaaactcgcctttttttgttcggcttgggtaccagcacggtattagcaacccaagccgggtagaaagcttcaattatgaaattgttgttccgtag

SEQ ID NO: 129881 - DNA, 910 bp, Cannabis sativa
atacaaactgtggtgcttagaagagggtcatagaaagtgtataattagtagagatgttgtattcaaggagcatgagatggctatgaaaacagatgcaactaacaaaagagaaactgacaaggagatgactggtttagaaatactaagtggtagagaagaagcaaatggttcagatcaggtggatactcgaggacactcacatttagagatagatgaacaagtaattgaagaagaaagtttaccagttgattcacaagactacctgctggttagagacagagaaagaaggcagattaagccacctgaaaggtttggctttgctgattgcacaacttttgctcttgcatcagcagaagagattgacacctcagtacctacaacatatcaagaggctatcaactcaagaaacaaaaggaaatggcttgctgaaattgatgaagaaatgagttctttacacaagaacaaaacttggaaaactgtaacaagaccaccagggcagaaattaataggctgcaaatggatttttagggaaaaggaaggattgccaggtgaagaaaccagatttaaagctaggcttgtttcaaagggattcaaccaaagagaaggtgttgattttaatgacattttctctccagtagtgagacaaacatctataaggattatgatgactaaagtggccaagtataacttagaaatggatcaaatggatgtgaagacatctttcttacatgggagacttgaagaacagatatacatggaagaaccagatggattcaaaagtaataagccaaaacaggtttgcctattacagaaatctctttatggcctcaaacaagctccaaggcaatggaacttgagatttcatgaatttatgatgagcattggatacaacagaagcaactatgatcca

SEQ ID NO: 129882 - DNA, 517 bp, Cannabis sativa
gagaaccttttatgtaatggccgagaggtctaactctatttattaatgagacattcacgcttattttcaaaaaaaataaaagtggaataggttaaaattaaattattttaatgttggttaaaattaataatcaaaatttaaactatttaatactggtggaataggttaattttttttatctcaaaacttactaacatccttctatttccttcttgctctttctctatctttcgctctcattggttctcactaaaatacactgaaaatccattaaaggatccaagaccgccaccactgcaaccattcgactgagaccacaccaatccgactgatcgagaggggttcatttcaatccgacctagatctcgccaatcccttcttcaaccgcaaacgaagaggccactagatcggaagagcgtcgtgtagggaaagagtgtagatctcggtggtcgccgtatcattaaaaaaaaacaaaattttcagtgcaaaaacaactgcggccaattctaaatcatga

SEQ ID NO: 129883 - DNA, 535 bp, Cannabis sativa
taggccagattcaagttacacccagttacctactggatcagattcagatttcattaatttaacacccgaaaaaaatcaaattacacttgaacccactctaaactcggatatatataatttattttattttctttgttttttttttttatacattttctgaaaaataaacttaaaacgagaaaaaaaatacataattctaaataatatatatcatttttattttcttctacttttattttctttcttttcattttattgatttttttttttatgaaaaaatgtataaaaaaatgatattttttttttaaaaaaaaaggccaactaacccgaaacctagtcaaaatccacccgcatccaaaactcaaaaactcagcaattacacaaacggacgggttaggtatgctaactctatacacttgataactctatggtatagagttatttttatgcttttaaactaaaagtatcgagagaagagtagtgaaaatgtgtttatttgcttaattttaattagttttagtgttattttctattt

SEQ ID NO: 129884 - DNA, 1401 bp, Cannabis sativa
  modified_base (191)..(200): a, c, t, g, unknown or other
  modified_base (226)..(227): a, c, t, g, unknown or other
  modified_base (280)..(288): a, c, t, g, unknown or other
gaagatctctatttaaaaaaaaaatgagtttaaaaataataaccatttcttttttaattttagagaatggaagagtttttaagaattgttgagagtcctaaaatctttacttgtattagttatagattttgtaaagtcatttagtggatatttctttaaggctaattaagattttttttctccgaactttnnnnnnnnnnaaattatgcccctgaacttttttggnngttaaaaatttcccctgaactattaagatttttagatttaaggacttttgtcnnnnnnnnntcaattttactattttagtgattatttatatactaaatcatgctcccaaactttaatatctaccaaatcatgtctctcgaactttgacatgtactaagtcatgttccctgaactttcatccatgttaaacttttttttttactaaaattagacaaaagttcacaaattcaacaatctcaatagttaagagggaatttttaacgaccttaatagttcaggaaacaagatttagtacatgtcaaaattcgagggaaaaacaaatactaattaacctttctttaattttgtttctttcatcaattttccgttgtccgttaatttattatttcttataacaaatgccacatattgaagttcataggttttttttttttttttttcttaaagataaagttcatggttacgcatcaatacataatcaagttataataaccacgtcattgtttaaatatattcaaagaatgcgtatctatctaatatgaataaagcgaaacgcaatgtgaactgtccttttatattatatattttacttttaattgacaaagtccaaatatataaattcaaataagtaataaacctaactttgtgtggatcataatgtaacacataacaccaattaaagagattaaaaataataagtacggagagaaaatagcacaattatataacgacatagaattattatggaagggataagaccaggggagcgaattagcaattattatatataaaatataaattgatattttatttataaaaatatctctataaagtgtggacaacatttatactttttatataattttaatttttaaaataccacttacactattatttacacaatcagacaatggttttagtgtggttgctgcgtagttgcgcagtagttgcatcaaatgaaagtttcaatcagacgataattgcagggtggttgctgggtgattggtcgaatattgcatcagacgaaagtttcaatcagacaaaagtttctggatagttgctgggtggttagtcgaaatttgcatcagacgaaataactgttagcaaaatgtttatgcaactgttgtgaaacattaaaaatcggaactgtaaagtcctttttttggcaagtta

SEQ ID NO: 129885 - DNA, 1048 bp, Cannabis sativa
  modified_base (42)..(50): a, c, t, g, unknown or other
catatttagggtgttaatcaacttacttgtgagtagatctannnnnnnnntaaaataatttccaacatcctctcccttggccacgcatattcaggagaaactaaactccctgactgccattggatctgactgagctaccctggcttcttgtattcagcctggcgtccattctaatagaacagcctgcaaaattaagagctagtcgagtcagatcatgatcaagaataatttacaattaccacttattttagaaattaaaatatgcacttatctagctatgaggctactaacatgctttctatcaggcttttcttataacatactaatacaataaaatactaaagcaataaaggcttactgaaccgtgagtcgaacttatctctaatgatgattgtacatgtcgtgacgatctttggaagataacccggcgactctgataccaaattttaacacccaactagtttaggcgtgttatcgtgattttatattaactgtacagtttattgataatcaacgaatttattaaaaatcgtgactaattaaaattttgcttaattactaacaatattaaaaataaattatttttatataattgggattctaagtttaaacagttacaaccgattcaaaatacttaatacaaagttgtcgcctaatgactatacaaaatataaccagatattccaatgattgtacgctctaggtctaactaccccgacatgtacaatcttcattgacccgctctcacggctgctcaaccttagccttacccttacctacacatgcaaacaataactatgagtcgaaaaactcagtgagaaaagcataatcataatcataaatataacttggattacatttaggtgcccatacaccgaaatgaaccctatttgttgggaatattttaccaagatccagatttacgaaaaagtattatgattaacatcctaaatatgaattctctaaaccaatgaaataaacacataaagggtttaagaaaaccttacattggttgcagcagaatataataactccttccgttcaagat

SEQ ID NO: 129886 - DNA, 913 bp, Cannabis sativa
  modified_base (37)..(48): a, c, t, g, unknown or other
  modified_base (883)..(886): a, c, t, g, unknown or other
tatttaggatgataaataacatacttgtgagtagatnnnnnnnnnnnntaaaataatttccaacaagtacatggtctcgtgaactaaaaatcaagcatattttgtaattggacttttaattccttcaattctgccagtgccatccgacatgggaccttataaactagttcaacccctggtatcaaatcaatttcaaaattaatctctctttttgtaatttttgtaaaaattaatcaaaaaaatcgtaaaaatattaaaatttccgtaaaatcatatttttgtaattttttattatttttgtatatttgtgaaataatctcttgtttaattcgtttcaaaagaatgaaattaccttgtttaatacaatttagtgcattcaacagtgttaaaactttgtcgaagcacaatacatcattttggttcctccaaatgtggtataatactattgcagcagccatgacagtgttttgtattctttcaaaaaaagaaaaaaaaaatcatattttgcaggatttcttatttttcatattattttttcccctgtacatgtatttttgttctcttgtaaattttccaattatttaaattggataagatccaagtatctatattcagttgagaaatgttagtaaataactatatttctaactgtagtgatagttaatgttcatttttaaaaataataaagcaaatgtccttttttactttttaatacctaaaatatccttcattatataaaaagtattataaaaataccttagagtaatatgaatataacatacaaatactataccttagagtaatataagttattatgtcattttttattttttttactgatatgtattttgaaattctgaattttaatattcccagtttaatnnnntaattaagtgattaattaaatgcggaa

SEQ ID NO: 129887 - DNA, 995 bp, Cannabis sativa
gagatggtcaccatctcttggtgtcgagatagtacccttggatggcatgctaagatggtcacaatttcttggtgtcgagatggtacttttggagggcatgccgagatggtcaccatctcttagtgtcgagatggtgctctaggagggcatatctcttggtgctgacatagtgcctttggatggcatgccggcaccatatcttggtgcttagacggtcttaaagactccttggctatgatgtttgagactttaaggcttgaatagtcttgagatctgaagcttgggtcttcagaactcaagtcttgaggcttgcatcttgaaactaaaagcttgaggcttaagattttttcgactcgaacacattgtccttaatttgttgatgagactccattaatggtgtattgtacttgattaatctcgaaaattagcctttttaatttttgggattcttataattatgtagaaaataataataataaaattaggaccactcatcattctataagaacaataatatccccacactactacaaaaatagatttttgcttcaattttaaagtgacacataaacaatttgtgtcggttggggtaaccgacacaataaccgtagacgcaaatagttatattttttctttattttagaaccattgcaaaatgttttttaaacgaggaaaaaaaactttttcttcggttcataactgaagcaaatactagtgcactgacgctaattaattttttgcttcagttatgaaccaaagcaaaagaatttaaaataaaaataaaaaataaatctaaactaatatcacacaactaccaccaccacactactacaatcctcctcctccaacaacaacaacagatactcttaccacaacaagctagcagaccactgcgcgccatatcgcattggaccaccaccatcccatcagaccaccactaatgcctacaaaaaaattagagagagagagagcctgaatgagagagagagagagag

SEQ ID NO: 129888 - DNA, 523 bp, Cannabis sativa
  modified_base (27)..(36): a, c, t, g, unknown or other
acaataaaaatgtaaccattgaaaccnnnnnnnnnnatatatatatatattacaatattggttataaattcctaaacatgatataaactaatgtttcccatgtacttccattatatttttgcacatatattacgagaatattatatataagtgttgatgaataataattaatataaagagtaatatttatctttaatttttatataaaaaaaaggcctattttttaaattttgcctcaggtctcttctcaccttgagacggccctgccgatgccataggtgccacgtgttgaacaacgactgcgcacctatggcgtcggttaataccaaataaccgacgttagagggttaatctaaagccacttattttaccccaaccgccaaccgacggcataaaaaaatataaattttatacctaaggtttttaccaaaaaatcgcctctaaatgtcaatacgggtattttcacactctttaacttccttttttataaaatgggttgaaaaaggaaaacttacaaaaatac

SEQ ID NO: 129889 - DNA, 910 bp, Cannabis sativa
ttattccggtttcttcggttccggagaaccttttatttaatgaccgcgaggtctaattttgcttattaatggtacgattacgcttattttcaaaaaaaaataaaaaaataaattagtcttaaaaaaataaataaagaaaaatctagtttaaagtaactgtaagttttgattgaattagtacctgttttaaaagtgggcccaaccattctatgtttatccacaactgtattttaaggttaaacacaaatattagagagtaaattatattttatggtgcttctacaagtacatcctatcaaaataggtgtactgatataatttttaattgtttcggtatttataagaattttttagtgtaaattttttcatagttgtgtacgttatagttatttaagatattttgtaaaatttagaataatttacaacatagaaaatcaatgtttaaaccgtctatttcacacgcgtataaaataaaaaattcacgcgtacaacagactctaacattattttcgacgtgttaaattttttcgaatttctcaaaattttgtcaaatgtcttaaataactataatgaatacgattataaaaaaaaatttgactgagtagttttttagataccgaaaaagataatggtgcatcaatacatcaattttaggtccattttattttatctttaattttgacatctgttgcccctaattttgtccaaaatacgtggaccaaccagattaagacacgtagactgaaggggttcaacgttgggataattcagctaagtctctataatcaaagggatcaacatctaacatgcctcccggagaaggcatgtgagtttcacatactcccggagagcaaagctacaacaaagcatctccgggaggtatcagatcctatctgaactgtcacctcgc

SEQ ID NO: 129890 - DNA, 701 bp, Cannabis sativa
cttgtaatagagattttagatttgttaggggattggttgaaactgtattactccacactgtttgtatgatctcttgatactctttgttgtccgcccaagcttgttcatagtgaaaccgagagcctcttgaagacctgcccgttagaactaaattactgatttgagccgtgagaaccaaaggtctatgatctgaatttctccaatccagtaatctgaccgagttcattttgaaactatccatccattcagagttgcaaaaaattctatccaacttttcaaacacaaggttagcagctcttccattacaccaagtgaatgttcctccctcagtttgtatttcccgcaaggaacaatcagaattaacttttatgaaattatacataagatattccggtttagtgtttcccccttttttctcagaattccttgtaatctcattgaagtcgccaccacacacccaagcacctttaaacatcggttgtaaccgctttaataatttccaactttcttttctacctcccgggtccggacttccatagaagctagtgaaacgccacgtaaaccccaaattattttccaccaaagcatcgatatgagaaaccgtgaaggatttgatctgaactttgacagaatcagaccaaagaagagccaacccgccactcttacctttagcatcaacaaaaaaacagccatcgtaacca

SEQ ID NO: 129891 - DNA, 1563 bp, Cannabis sativa
ccattaagaagtgttacatatatatatatatatatatatattgttagtgatgtttgtatttattaaaacaatagcaataagaagcacttacaacaactctaatattaattttaaaagtaacgtctatagaaatgtatagtgttaatttatttattatatattttcttgtttagcatgtagtattttatcgaaaaaaaacagttacaaactataactttgtatgattttagtaaagaacataatttataattttatcgaatactcgatgcaattatttatataacaaataattaaattaatttttaacttaagaaaatatcatcttttagttccaactttaattattattgttttgaaaataaaaattaaaaaaacaattaaagacttgtataataattgaaaataaataattattatagataatatgatgcaactcaaccaactaacactaaaaaaaattatgataaaataacactaaaagttatttttaaaagctaataactatttttgtatcattatcatcatgactagaataatttgtcttgttcttaagaacatttatataatctctataaaaaaatttcaaataattgaatatgctatttcaagaattttcatctaactcaacatcttttgacaaagtaaagaactctcactcaaaaaattcttaaacataaaagactaattgtttttattgttgcgggtattaatttttttttttttttattgaatggaagtgtgcattaattttgatattatacattttcagtataaaataattgagaaaatattaaatggaagaaataatttttatacaacttctcttcaataaaaatcagatcaattctcaccaataattttctcttaaataattttttggtgattataagcttctgtaataaacctcttctaccatcatatttatcatctttgtcttctctttttcagaaatttcgtctctatctgcataaaacatacaatatataatcaagaaaagaaagttcaagagataaaaatcagtacgtgaataaacttaattctttatcatatggagatagccaatatatattaatactaaaagcaataattgatattcctatacaaattttagtatgcaactaaactaataaaataaaatgaatgaaacggtaataaataattgcagaaacaaaatctcattcactcataattttttttgaacaatgaacaaaatttcattgaaaaaaaaaattagcgttaaatacatcataaacaagcaatcaaagatcttccattcaaattagctcaccatccaccataaaaccacactcatcattgaggcattcccataaacaaaaaaatttaattaatactcaacatgctgtacatatgaattcaatactcaaaattcaataaatcaacatgtaccccaaattaaaatcaacatgttctattttgatgagatttaaatagaaataaagaatagagagggatataagaatattttatttaaggaaatatatttctatttaaagaaataaatttctatttaaggaaataaataaataaataattttctagatc

SEQ ID NO: 129892 - DNA, 1258 bp, Cannabis sativa
agagaggccactttcgtatttcataacctagagtgagatgaaataacacttccgaacacttcaacgtgtacttgcaagcacaaggggttgagcctccaaaatacttctccaaacaaaacttggattaacgcctaatttagcattaagaaaagaaccctgaggatagtaacgcgctttaaacatacgacctactaatgaattcagttgggtaaccaacctccagccttgcttacctaaaatagcaagattaaagtctctaatgctacggaaacccaagccacccgcatatttgtgtctacataagcgcttccaactcatctaatggatccctttagagttagacattcctatttgccactagtattttgccatcaatcgcttcaactccttgcatgtttccataggcagcaagaaaacagtcatagcataatttggcaaagcttgagcaacagtcttcaacaaaacttctttccctgcacaagacagaatcttcccttccgaaccttgaatacgcctttacaatttatccttaagaaaacccagcaaggccgtcttattacgacccatggtattaggcaggccaaaatataaaccactcttatcagcttcaaaaatacccataagatcacagagttcatcccgtaaagactcacaagtattagagttgtagtaaatagatgacttgtcaaacacacggagcaattgaagaacatgagtagctttcaaaacattaaccttacaataaatataactgtcattcgcaaagagcatgtgagaaactctaggagccccctagcaactttacatccacgaataagcccaagacgctcatagcgttttaaaatcgcagaaaaaccttcaacacaaatacggtgaaataggatcaccctaacagatccctcgacctgggacaatcaaccctaactcatcacccccatggaccaatgtataacaaacatttcttgttatcaatgaaatccttatctcaatttcccacaatttcttgttgagtaagaaccttaactaatcttctcttagcatcacgaattacacaaagaaacctcatcttgtcccctttgaaacatctcctccttgcaacgcttaatttgtgctttaaaattatcagtgaaatccttatctcgattttccaaaatttcaccacaataccagatcttctcctggatataaataaaaattcttaaaatagagtgtatttataaatttttgggggagtaaataaaattctcattttaaaata

SEQ ID NO: 129893 - DNA, 655 bp, Cannabis sativa
atttatcatataagataattttaatataatatttaaaattaaaaagataataatatcatttaatttaaaatataaccagtattaaaatatctaatcttataattaaataatctgtaagttttaaaaaattaataaaatttttaaatctaacaataatttaaatataaaataaccaatgttaatttcaaaattcaaaatattaaaaattaataataaactattaaaataattaaatattattaatttcaaaatttgatatttaagttcaaatattaaaaataatattttatattgatatttatggttttaaaaaataattcaaaatttggtgaaaaaatcacaaaaaatgaaatctttgggtgcaaagcccttgctgcatgcacagggtgcgtgcaacctcatccgcgggcagaggaggttgttggcagcctcgtccgtgtgctcaggaggatgtattgcagccttcgtgtgcgtgcaataggtgctcgagtaggcttcagacatgggcgatgggcttcagacacgggcgaactagaccatcttgtccgaatttctgcgcatggtgctcgagtgacgacactcaatgcaaaaaaatttcaaaacaccatatctcactcgtttttcatcaaaatcgagttccgtaaaaaacaaaatt

SEQ ID NO: 129894 - DNA, 1664 bp, Cannabis sativa
  modified_base (194)..(210): a, c, t, g, unknown or other
  modified_base (344)..(355): a, c, t, g, unknown or other
  modified_base (1236)..(1238): a, c, t, g, unknown or other
  modified_base (1605)..(1616): a, c, t, g, unknown or other
gggcataaaacccaacactatctctctcaaattcgaatccttctctctctctctttctctattcaattttgaaaccttatagtgatagagtacatgcccacacatagcaatttgctactcaatcatagtgtgtaagactgtgaagaatcctatcaattgaaggagaatctagctcagatcttggtgatactctnnnnnnnnnnnnnnnnnagggttagagatctgagcgaaaggagtcatttgattttgctgcaaccaatgtaaggtttcttgaactttatatgtgtttaaattccattattttagaaattcttatttacgatgttaaacaacatacatggtannnnnnnnnnnncctggtaaaataatccccaacagctccttcaccggcttcccgaggggaagtgttttgaaggtactgtgcccaagccacgcaatcccgggcttattcctcttctgggacaggaagttgctgccaagaagaatacttagggtatttgtaatcaaaagtaaactccttttcagtttggagatccacaaaccacagattgacgtcatttagaaggaaatcgaatgacctaaggccgtaaggaagagtcaacaggagcttatgctgctcggccatcttaggagtggggctaggtcttttcgagatagttgtcgaaaacaaaacaaaatgttagtctgttaacctaaattaaaagacatggattaatttaaccaagtctaatgcaagcaattacttacgaattatacggaaagtggttgtgccaattggagagagctcggtcgtccaaaagaagtcgtccatggaggaagttttgtttggcaaatccacaatgattttgtgcttgccagagtgagtgccgagatagtaaaagcctcctgcggtattcttcctccctgggacagctttaatagagtggagatactctatttccagaggtgtggggcactcccaattcaaaatgttgtacagaaccctcagacttacaaggattctgtaggagacgggatttagttgaaatggggcaagcctgaggtgatttacaaagtccttgacataatcacgaagggggattattgcccctgccctgatgtgatcaaggctccaagtgcctataccagtcgagccacttgtactggtctcgccactggccccctcagaggtctcgcctgtaagatgcacatgtgggtaacattaggatcctggggagtctttgatttacgtggctnnngagacattatttcaaaatctaagtgacctggttcaaaagcaattgtgactttgggtaaaaacaaaggtttagccaaaggaatagaagacacattgggaggttcaagccaagcagcatctcgcaagaaatgacattttccttcagtaatttcttgcaagaagcgtctatggcgactagcaaaatcttcctgatgaattctcactaagtgttccctaattctttcatcgtttacctttaacttagaggtgggttttgaaattgtggctttgtaagggatggaaatttccgtaggaaactcaatttctaaatcttctggacgataaatttctaagccagattgggacattgtgttggaaatattttaccnnnnnnnnnnnntactaccatgtatgttttattaacatcataatatgaattctaaaacaa

SEQ ID NO: 129895 - DNA, 677 bp, Cannabis sativa
aaatgtaataaacatatcaaaccaccagcatgtaaaattcatgcaaacatcaatcacttcaaacttcttatattgataactaatcagattgtaaagagttttacttagggcataaaacccaacactatcacgtgccaactgataacgttttagaccttcctgtctaaatctttacgaaacccctatttggtctttgttatcttctagctcatcattaactttcgtttgtgcatcatcttctggttctatactagctttcggctgtgaatcttctaccaagtgtttcaatccatattccatttccatacgtgtagtgttattgtttcctatttttcctgcattacacgaagacacactatgtttaccaaaagtcaagtgaggatttttcaactcattgaaaataacatttctagcaatcataacctttggtctgccattgtaataccttaaaatttaataaccggattagcaaccctaactgagttaattaagtgttaatgagaaattatattattatatgatttaatgtgtagaattattgtgatttattgtgttttaagatcctgttagtatgtcaggcgttcatgtatgttattttgtatatgctatgtgagaaactgagattagggttattaccataaaacttagcggttatgtgatctagggttattactcta

SEQ ID NO: 129896 - DNA, 1011 bp, Cannabis sativa
atatatataaatataaaaaattaaatagtagattaacttattttaaaacaaataataatatactaaaaaaaactaaccggttagaagagacacggtggaacacggtagtaacacggtggtgaaatggtggtgatatggtggtgaaatggtaaaatacggtggtgatatatctgagagaaagagagaaaaaaattgaaactgaaaaaaattagagaaggaacaaaatggtgaaaccggttgggggaggtatttatagaaatctattaccggtggggtccgtcagtaataatataccccctggtattaaaagtattagcggtagacacccgtcggtattggttcgccgctaaaaagatttaaatgcaccatgcgggaattttcccgcacttattgtcgtcccactaattgcggtaggttgtccgccggtattaacttaagcccgcctatattgctattaattttatatattttttttttattttcaaatttaatacaccctaatattaggggcggatgtggcccgcctgtattgggtccgccggtaatgactgcaattgttgttgtgtcaggaagtgaactatccaagtaatactgaagcatgtccttcccctttatggcctccgtgcttagcaccacggtggttgaagaattcttggtctaaccagacccatccgagcttccccttttggaactcttggacttagatactttttggaccgggggatccacaacaggcactacctcagagaggtcaattacttcaccgactggcactttctccttggacgaaacctcatcgcctctagatctctcgagcaagggagtctgaccccgagctatcaccaactctcttttttagagcctggagtactttctgggacatgactgcatataaacaagataaaaaaatttaaaagaaaatatgatgcaaatcatgttatgaagtaaataaatgcaagtcaaaaataccctgtacgtgggcaggagcattggcccgaacaagtaaagacg

SEQ ID NO: 129897 - DNA, 581 bp, Cannabis sativa
tgagctagcctcaagtggttaatggtaagtctattcaatatttgtagtatgggaacattaatatatatacttaaatttaaatagcaagcacaatttggccattatttgacagcgttggcactgtaaaatatttgtcatgtttattttaattggtcaaagattaaaataaacaagaaaaatatttgaataactttcataaaaacacaaagtctcaagtaaatttgaattatttttacaattctcagcaaaattgaattataattaagtgttctttaaatttgagattaaaagtgggtttcccttacaaaataaactccatatcttcatagaatacatgatcacaaattctcaaaactaccaaaaatatttgaagatgtatgaactacgttgatttggttcctttcaaaaggatacgtaggcaacctaatttccaagattgagcacatttgcaatttctaaaaaatctcaaacaaggttattcacctcaacaaaattcaaatgaggtcatctacctcaaaaatcccaaatgaggtcatttacctcaaaatatcaaagtaagttaattctctacaaagttatcg

SEQ ID NO: 129898 - DNA, 699 bp, Cannabis sativa
tgatgtttatagttttggagtggttcttgtcgagcttttgactggacaaaaagtaatatctacaacaagggatgtggaaggaagaagtttggcgacacatttcgtgatgacaatgaaaaagaatagcctctttgacattatagatgctcaagttctcaaaagtactgcctcgaaagaagaaatcttaattgttgctaacctagcacaaagatgcttacatttttgtggaaagaatcgacctaccatgagagaaatagtaatggagctagagatgatacaaatcactgataaagattccaaaggtagtcattataataattatggagatcgagttggaatgtgcatacaagatgaaattgttgactcttggaatgtttccacttcgtcaacagggttaacttttgatggtactgttactagtttcaaattgcatgaggaattgccattattgtaagcgtttcttattttagttttagtttttcttaaaaaaaaaaaaaatacaagagcaatattctatcattatatctaatatgttgtctcttattaaaaaaaataagtattatttttcatttgttatgactcttagaataaatataaaagattgtttattttcattcaaaagtctcgaaaagttagtctatgatactctttacgatagtttgtccaaataatttataacctatttatttaaatatttat

SEQ ID NO: 129899 - DNA, 788 bp, Cannabis sativa
  modified_base (137)..(140): a, c, t, g, unknown or other
aaaggaaaggcgaaggctgaataggagtgagctctgagccaggatgatgttgtacatgtcatgtcggcgcgacctgaaatgttcgctctcgggacatctagggttttattttgtagtcgttgtgcgacctgactaannnnattttgaatattttgtaaaagtttcatgagatcctgactgttgtaaataattgaataaaagtttataaagtttagcaattaaatttaaatttttaatttgacacgatttttaagaaaatttctttgattagcaaagatagcattataattgaaaaattactgtagcgtgcctaagtatcagggtattacaatttcagtatcagaaccgctaggtttgtctatcgaagattgccaagacatgtacaatcatcatcagagaaaagctcggctcagggttcagtaagcctttacttgtttagtattgtatgtaattggtaaagcatgttaggaagcatattagtttacaattgtttattttaatgcattgccttaaaatacataagagcagtattaagttttgtgatcgctgtctgacctacttggcttatgggttcgtaggctaagtcatattgaatggatgcccagcaaattataaggagtcagggtaataaggttgataccgaaagcagctagggaaatcaaattccccaaaatccccgtggacgcggcagtagctgtggaagatttcagggtggtcgacatgtgaacccacctcaagctcctcttgattgggagcagagattcgtggatatgcaagatcgtattcgc

SEQ ID NO: 129900 - DNA, 1248 bp, Cannabis sativa
aaccgcgatccacacccccacgaaggttgcagagcttcatatatggacttcatatatggaaggagagttttttattattcatttctctttttatatattttgtttttgcttgtatcgttatgaagatatatatttttgtgtcatcttcgatcaattttttcttgctagtgctcaaaacaaatgaaacttagtttttagtcccattgatgccactctaacgaaaatatgttgttcatttaatcaaaataatctcaaattctctcacgactccacacattttgaccaaatcttttatctttggtcacattattgttaaataatattcatcacaccatctatttattagatttttagatgaaaaaatgtgtggggtatgtacattgggtgttttctaaaaagttataatatattataagtcttgttaataatactcctccaaatataacttttacaacaacttacattgtcattttatcatattatagtcaattttgttgataaataagtgaaatagtgaattatagttgatataataatataaattaaagactcttcactcttttcatgttactgaataataaaataaaagtctgtctttctttaaaagagtaatttaggacataaattcacgacggtcctaaaaacaattttttagggactgtcgctaaaaaaattatctaaatgcttataaccgaaaataaaaattggtatccccgacgatttataatagttcctaaaaattaggcgacgtttttcattaaaaatgcaaaaaaaaaaaaaaaatgagggattatacccgacggtttaaaaccatcaggtatagtatagcggtcgaatatagtaaaaccgtcacctatagtatagggcacgatttaaaaccgtcgcctataccctgttataggcgacgattttaaaccatcaggaagtccacattagcgacggttttgaacagttgcttattctgtccgttttgcgacggtcgtataggtaacggttatagaaactgacaagaatactttaaactatcaaaaattaaacttacgtatctatctgcaaccgagagttaaacttaggtatttgcgccacaaattactctttttataatagtttatatttttagttttaatttttaattattaaagtaaaaaagggtgaaaggtatttaaattattttctatctatttatcaactatcatttatggcatcacttattagcgataaaattgaatagaatatgatagatggact

SEQ ID NO: 129901 - DNA, 1205 bp, Cannabis sativa
tttttttttttttttttcaggttctctagtttatgagaaatcaaggtgcaactgtcaaactatcgcttgatcctgaaatagagtagacttgtaaaaagaacagaagaaggaagaaattagaaaaagcggcaatagagactgagcaagaagtagtcatggctgacaacgccaatggaggagctgtagaagaccagtctaatggtcacaataacaatgaccatagcctaagggactatttgatgccagacttgacaggggctcgatcctgtataaggccacttgccatggatcccaccaatttcaaaatcaagccagccatactacagatggtccaatcttcagtccagtttggggggctaccatcagaagacccaaacatgcacctcgccaacttcgaagagctttgtcagacattcaagatgaacgaagttagcgttgacgctaccaggctaaggttgttcccattctcactaagggagcgagccaagagttggttggtatctttgccatccaattctatcaacacttgggaggaattggccctgaaattcctttccaaattctttcccattacgaagattgccaagctgagagctgaaattaacaactttacccagcatgacaacgaatctctttatgaagcctggaagagatttaagaacttattgaggaagtgcccgaatcatgggatggaaaattggttacaagtgcataacttctatattggattaatgagcaacacctgaacactgataggtgccgcaactggtggggcttttatgaggaaaagtgctaatgaggcctttgaattacttgaagagatggccataactaatcaaaaatggtcaacaaagagaggcccaactaaaaaggttgcgggaatgcatgaagtcgatgccataactaagttgacagcccaagtggagacattaacaaagctggtgactgcacaagcaaaacaagctcaagttgtcaggttgttgtgtggaggatctcatgccactgacacctgtcctatagatgtcaacagtttgccaatggagtaggcccaagccattggaaagtatcagaataatttatggtcgtcagaagaactttcagaagtagttttatccccagcaaaatcaatctcagcaaagccaatagtatccacaacaacaacaacaagcctcgagtggagggtctaatcctcaattagacacatt

SEQ ID NO: 129902 - DNA, 890 bp, Cannabis sativa
  modified_base (26)..(27): a, c, t, g, unknown or other
aatcactgaaacagtaaaattgaatnnaattagacaaaagtccttaaatataacaatctcaatagttcaggaagaatttttcacagtaaaaaaaagtttaagggatgtcaaaattcggggaaaaaagggaaaaaaaaaattctaattagcctaaatttaaatgtgaatagttatttatatacgttacttggttatttctcccttaatgctgattctgtaattaatattacgaaacttcatttatgatgacacatataaatgtagtaaaactacaactattagataagctagggtcaattatctctaataaaataatgataaataactagactaatttgttgatactaaaaacaaatatttttactttttataaattacaacgaagaaccacaaattaatttattatttaaatacatgaagaaacaaactgtatgtataaatattacaatacaacaatatagcatatatatatacatatacattcaggggcagacttacatgtaggcgaggtggggcagttgctccctaaaaacaatcggaaaaaaatatatatgtaatttagttagttacgacatataacataatcttagtttagaataatggttaaattagattatacgtacataaggtagaggtcaatggtttaattccacattatttacttttgcctccctcactttcaatcctgggtccaccactgtatgcatttacttagagaagtcgtggagataaaggtggaatgctctgttcgtaagaaattagtcggatcaaccttaattttcactcgaactaattttttaaattttttattgaaatacttttttgggtaaatataattttagattctgtgttttacaaaaattaccgattgaaccctctattttgttaaa

SEQ ID NO: 129903 - DNA, 1271 bp, Cannabis sativa
  modified_base (185)..(188): a, c, t, g, unknown or other
tgttaatactaaaatcattggaatttgggatccctgaaccaatcccacaaaaataaacggttccttgccctcaggttggaagatcacaatcttccgtttactgtcaatactagttgagtacttggatatgaaatccattcaaattataatatcgaaatccactaaacccatttctattaagtcannnntcaactccctatcctcaattctgatcggcatagacctaatcaatcttttggagatgactaattctccgtcaagcattattcaaaaccctttatcataactatcatgcggtatatccaactatctaaaaatccttgctgccacataagactaagtggccctagagtcaaacaatacaaaaaagtaagagttgttgaccaatagctgacatgtaacaactaggggctagcttctgtatcaaccttagttaaagcaaacacccttgctggagcggggtttgcagctgtcttctgttcctctctcttaagttgtggccaatctcttttataatgtcctggcaacccgcactgcaaacatccttgccctctacactcactcatatgatgtttcttacaactgagacactccgagtaagtgtatcaagttttagattcaccctaacaatttcctcggttccctcagaacctcttattttgacatgaaccatcgggtgcaaatggtgccttttatttatgttcagtggtcaagtgactacaaccccttcaaaaataaggggtagcaagagtaggggctccacaagaaacctgagtgcattcaactatgcccctacctcgcagtgcctttccaaccatgtcagcatacgtggtgttgtcgtcagtagtaatcataaggtcatgctttatttttgtattcaagccatccaagtactttcctttattgctgaaatttgttggcacaatcccgaggccaacctagctaattagtcaaactatgttgtgtattcagtaacactcatattctttttctaggtcagttgagtaaatttatttctttttgcacttctaaccacttcgtgatagtactttgcattaaacaactcctggaactattcccaagtcatagtagtaacatcgcaagcaagggacaccatgtccccccaaaccacggcatcctcctagaactagaatgtggcacaagccactctgtcattgtcggtgacgcccataaaattaaagatccttgtaataactgtcagccactactcgactttcatcacatcaggacctcccaagaagattggaggt

SEQ ID NO: 129904 - DNA, 1324 bp, Cannabis sativa
aatacatataaaaaaaggtatgtttcaaataaaaataaaattagaggtaaatttaattaattgattaataaaaggggtatttttcatcttacccccaatatatttgtgctttgttatggcctaagttaaaggtgatacccactaaaaaaataaatttaaaaaattcacaccaaatactaatttttttaaaaaatttgaagaaaaaaaaattgagaaatttttactattattataaatcaaagatcatttacaacaatagagaaaataggatgtggaatttcccctatccaacagacgtcttcattcaactctagagcatactttgttaagtcgtgggcagcttgattagcatacctacgaacatgagcgactgtaattctaggaaaaaaggacaaaagacaacgtacatcattaattaaatctgaaaaacaagataagtctttgtgtgaagaggtcaaagtagaagacactcttaaagcatttgtttcaacttgcattatcgagaattgttgttgaaaagcccaattaagactgtggaatagagccttagcttccatttcatcacttctaaaacagcattgtactagtttggataatgcagtcacaacttctcctttgtgatttctaattactgctccaattcctaatattttttccttgtcattcactaccgcatctaaattcattttaaaacaatttatggttggcggctgccatggagtcatatctgttgttgtgcattgtatgtttgctggtgcagcacagaaacatttattcgttgctagtgcatgtatcctgggaatgacaatctctgttggcaagaagagagctactcaggttggcatgtctaatgatgctaattccacattttgttgccggtgtgacaatgaaccattgtggatgtctttacctttttgctttataaatctataattatccatataattgacagcatgtgttgcaagtgcagaagcatcatgttttactccaccatgaagtagtttatttctatcattccaaatgctccacattagacaaattaggagttcaaaattagccttatccataattgttgagagatgaatgaagtagtctccatcaaacatatcatgagcacaatggaaatcaatgttaaattttattgacttccaaaccaattttgcatgtttacacgtgaataaggcatgccctattgactcccaagcactcttactattaagagtcccacattactaatgtgtggaaataaattgtgatatataagatgaaagggctactcctcccattgccaattggttttggaatggaacctcattcatcttat

SEQ ID NO: 129905 - DNA, 1160 bp, Cannabis sativa
aactgtatttttatgctccaatcagttcaggcctgtcaattcaacatattggtccgtctttcattcacactaattaattcctctcatccccttgttttaaacaatctattacatgtacctaaaattacaaaaagaacaaaaaaaaaaaaaaaacttgcttagtgtctctcgttttgctcatgataacaatgtatttttttctttttcatgttgataaatgctttgtgaaagatcaggaaacttaagccaccattctcactgggacacaccagaatgacctctatacttttaagccttctcaatttcatgtgcaatcacccaatcttgtcgctgttccaagtgtgctaacagtctctgtgtcacctagcactgaatcaaattctactagttgtactcactgtaataaatctcaaatctcagattatgatttgtggcacaatagagttagccacccctttgaaaaaattgtcaacgctgtactttaatgttgtaatataacattcaacaataaaaatcccttgtctgtttgctctgcatgctgcttaggcaaaattcacaggcttccatttctaaaatcctcatccactgtttacactgagcctttacaattagttgttgctgatctatggggccctgtcaaaacaaattctgttaatggttacaagtattacatccattttatagatgcatattctaggttcacatgaatataaatgctaaaaaacaagtttgatgccttaaaaacctttttgcaattcaaaactgaatctaaatcacaactaggtaaaaagattaaatgtcttcaaactgattgggggaggggagttcaggtcctttactgattatctaaaacaatttggcatcactcataggcatccttgccccaccactcatgagcaaaatggattggttgaaagaaaatacagacatgttgttgaaaatggtctcacacttcttgctcaagcatccatgcctcttaaatattaggatgaagcctttagaatatctgtctacctatccgataggttgcccacacctgttttacaaaatgtgtcacccatacaaaagctctttggtatcacacgagattacaccactctaaagacatttggttgcaaatgcttccctaatattagaccttacaacaaacataagctcca

SEQ ID NO: 129906 - DNA, 556 bp, Cannabis sativa
  modified_base (482)..(483): a, c, t, g, unknown or other
ttagcccaactgcctgactataaggaggatctaaacattctaacatccccccgggcgttagatgattttgggttcaactttgttgttaccccttctagcggagtaggggaaatcctgcgacccgtgggacctccgatgctggtactgaagccatagcgaaaagcactatgcccgggtgttctaagaaaaggccaattagggagtgtgactctcttggtgatgatactatttgtctttgaggatgtcggagatcttccatcgaatgccactgaagaccatctaaaggatattttcaaagatttccagagtatggtctctattcgagtctgtagggactctcagactggccgctctctccgctatggctacaccaactttcttaacgccaaagatggctccaacggtgtgcatgatttcttctccggctccgatatcgtgtgccccactttctcaagcctagatgtgttgggttttatgccctnnataaaactcatttcaatacaatcagatttacttattaatatagatcagatataacatttaatgttgcatggtt

SEQ ID NO: 129907 - DNA, 2262 bp, Cannabis sativa
aaaataatttccaacaactatttccaacaagaagttcatccaattggtaatgaattgtattacaacttctaggttctccttgatgtttaatggcacattacatggcttttttgaagctaagagggggataagacatggggatcctatgtctcccttgttgtttgtcttgggtatggagtacttatctagactgatgatgaaagttggggaaaaagaggatttcaaattccatggtaaatgctctaatcttaaactcaatcatcttgcatttgctaatgatgttctcttattttgtcatggtgatttcaggagtatactctacatgttacaggcactaaaaaatttctcacttacatcttgattgcatccaaatgcaagtaaaactgcaatatattgtagtaatatgcagagtggagttgtgaatcatattatccagatttcaggtttcatacagcaagacatgccttttacttacctaggaattcccatttgtgggaaaaagatatctgggaaagaatgtgaactcttagctgagagaatgactgctagaattaaaagttggagttccaggattctctcctttgttgggagaatcactctaataaactctcctctaactgctatacaggcctattggagtcaaatgatgatcttgccaaagaaagttttgagatcgattgaagccatctatagagcttttctttggaaaggtcaagcaatgttccaaggagcagggtcagtagcttggaataatgtgtgtcaattgaaggcttcaggtggtttgggaatcaagaacatagaacattggaataaagctgccatctgtaagtatatatgggcaatctcaaataagtaagagagcttatggctaaggtgggttcatagtgtgtatattaagaatcaagagtggtgggactactcttcttcagtacattgtagctgatactggaagaagatggtagccctcaaagatcatatcaaattgttaatggatcctactatttttcagaggcaaagatacactatttctgcaggttataatctgtttttgccttcctcggatggactgaactagtgtagggaagtttggtcaaggctaaacaccccaaaacatagtgtaatcacttggttggccatgttcaataggctgaaaactcaggagaagtggcacctcctgtctatgtaatcttcaacctgaaaaactgccaacatatcttttttgaatgtaaagtggcaggtgcttgtttgcttgaattgaagaaatggttgaattgacatgcccaaaccagcaatgtccaacatctgatcagatggatcgggagagccaaagtgtcaaaattcagaaaaagtgtcctagctgctgctataacaggtttggtttacaacctatggaaagctaggaatgagtcaatctggcaaaaaatagtggtcaatccggttagaattgttgaagaaacaaagtggactattaaggtccgaattgaaagttttatgccccggaaagtcaagtagtgatagagaatggggttttgcattataatacaattgtaattgattgtatagattgattttgcttgtatatagaattcggcccttaagggtgcacatagggtgtaaaaatcttctttgtgcaatacaactcattgaatcatcaaaaaaaaataataataaaaataaattatagtatttttattatgtttatcaaatgtaaaaaatattataaactcaaatatataagaaaaaatctaggttgatgttgtttgttaatattaaaataaaatataaattatcttttttttaaaaaaaaaataagagatttaataattattttttatttttttaatatataataaataagtaaatatgattttagcatataaaaaaattattatagccttttaatcaaaacagtttattttaaaagttgagttagagcagctttaatttctctaaaaattcttcaaaaagttattttttgactgcttaccaaacatatttttatcacagttttttcaaaaagtaacttctaatttttccaaaagctgtgccaaataggcctttataagtgtcatatttaagtaaacaacttttaaaattttatagagattgtaatttcttctaaataaaataaatgttttttgaacgtagtaatcgacgtgcgtaagtcgaaatattaaggggttagttgaaaaataccacttttattaattaattaatcaaatttacctctaattttatatttaattgaaacatacctctttt

SEQ ID NO: 129908 - DNA, 857 bp, Cannabis sativa
  modified_base (805)..(811): a, c, t, g, unknown or other
gcatcatcttcttcgttacctaaaagggtcaccgggacaaggaattctctacatcttcttctcttcatctgcgtggattccctgattttgattgggcctcccgcccaataacacgaagatcaacgacaggtttctgcacattcattagattttgtcttatctcctagaagataaagaaacatcccataatctcaaaaagctatgctgaggtagaatatcgtgccttaactaccaccatcagtgaaatcacatggctccgatacttgttacacaatctttaaatcaagcaaccagctcatgcattcatttattgcaacaataagtctggaatacatatcactaacaatcgaactttcataaatgtaccaaacacattgagctagattgtcactttgttcaagaaaagataacaaactcatcaatttgcctcattccagttagtaggaaccttcaactagcagatgcttttaccaaacctctaccttcttctactctatcatctcacattagcaagatgtccatacatgacatatatagtccatcttaacagattacttgtctcttccacatgtggttattttggttatgttagttaggagttagttaatattcggttattacactataaaattttttacttttatatagttacaacaaaatatgtggctaaaaataaaatagttgtgactaattacaaattatcattcctatattgtgactaaaaaatttgtggttaaaagtattagtcacaaaaataaattgctgtgactaaatacatgtatttttagtcacaatacttgttgtnnnnnnnattaaattagtgacaacttgtataattaaatactatattttagtca

SEQ ID NO: 129909 - DNA, 801 bp, Cannabis sativa
ttaacaaaacacaaggtccaattggtaacttttgtaaaacagaggatccaaaatggtatttacccttttttaaatatgggtcgtactgtgtcatgttcaaaaaaaatatgggtcgtgccatgttaatattttcaaatggttggcccaacacgacccattgacctggtattttcgtgtcagtccgtttttcttaaataggttagtacgttttgatatccgggcttgaattcttactttagctttctatatatatatatataaatatattacaattaatgagttaattattaaattatatgtatattttatagtttcaattatatttatgtaatttttcaataatattttagagacaaatataaaaaaataattaaaattattaaaatttgaatatttattttataaatacttaaatttttatatcatactctataaaagtataacttagttttacatttttaatggtttagttataaaattataataattagttttatgtttaaattttattattaatttaatttatttataattgataaatatatatatattattataattattaattatagagttttttaatgtttcgtactctactttttggacttgtcatgtgtcgtgctttttgaattagtctattcgtgcttacgtaccatgccttctgtgcttttcgtgttgtgtcatgtttaatcacatattttttagtgaaaattacatgaaatatgggatttcataacaaagttagaaaaatatggcatttttaggtttgccacttttctatggcattttttcacatttaag

SEQ ID NO: 129910 - DNA, 771 bp, Cannabis sativa
tcttcttgttccaaaaggtcatcaagaattgattcagaaactttgagctcctccatagtgttggcagatctaataacacagttgtttaaatcagcaactcgagtttgtgcttcagcaatcgttttcttcatgcgtccatattttccaatgtgccatttttgtaaattagtagcacaggagtcaaggttgtgtaacacattgtcaaaaggtgtatcagtcaaatggcagtgatcaaaagaggctctaaagtctgccattaagagttcattacgcaggggacccccttccttgtccgcatttgataaaatctcattaaaatctccaattactaaccacggttggagaggagcagagtcaaccaacctatttaaaagtgtccatgaagcatgtctatcttgtgcggcaggggcaccataaaaagctgtaaagtgaaaagacgggccatcttcaaaagccatgaagcagttaaaaaaagtatgaccaaaatgtaggagcttaacattgacattgtctttccataggagcatcaacccaccacttaaaccaatccttggagcctctaagccattattgaagtgaagaatattacgaaaatgagtaagtgaatttgaactaagttttgtttccatgagaaacaagacatggggcgattgttgttgaacaagaaatcgtagatgtctgaatgcatttgggttccccaaacctcgagcattccaacttaggattttcatggcgattggcggggttacgtagcaacctcccctgttgaag

SEQ ID NO: 129911 - DNA, 757 bp, Cannabis sativa
  modified_base (160)..(170): a, c, t, g, unknown or other
caaataaataagattttggaaaaataaaatttttaacataaaattgcttcaaaaaaaatttaaaattttgtgccccctttccatagatgggataattacatatattaatttttgtaaaaaatttaaagtttaaagtttttttttaacatttttacagtannnnnnnnnnntacaaaaaaaaaataattaaaaaactccatataagaaaaccacaacaaaacaatattaaaacaacataacaaataaaaaaacaacaacaaaataagaagagtataatataaaaaatatataaaaagattgtatttttaggtaaataaaatctaaaaaaccgtaaaaatattaaaaattttgtgaaatagtatttttgttaatttttattttttttttataattttttgaaattattccaaagtagatcctgtataggaataagatatatagtatgtaatatgataaaataaaaaatttatctcacaaatttatcatatgattattatgatatgtgtatcacaaattatactaatatgagattttaagttaactttgataaatgtgataatttttttttgtttatttttatagttttacggcatttttttttttattctggtatttaatttgttatgtttttttaatagttggtgtaaaagtccatatttatatatttattatagaggaaattatattttatatccactttattttatttattttaatttttacctctatttttatatatttttaaatatacctactt

SEQ ID NO: 129912 - DNA, 712 bp, Cannabis sativa
aactctagccacatctcttttaaggataactcccctccccccgaggataaggtttcttttttcatcaaggaggatggcacttgggactctctcaaactcaacaatttctttccccgccatatagtggactccatcctcaaagtgcctatagatcccataagcaagggcagtctcatttggggtaatagtccttcaggcttattgactctcaattctacttatcacttggcaaattccacctctcctcaaccatcttcctcttctcctgaaattttcaaaccctggtggaaggcattttggtcttccaatgtgcccccaaggatcaaacactttatttggagggctttccaccatctcctcccctccaacctcaacctccactttagtaaagtccttgatagctcttactgctctttgtgcctcaaccgaattgatttcaacactcactccctagtaaatttctccagagcaggtaagtattggaaacatactcgctttagtgttttcttcaacaataataaatttagtgacattaaagattttttgctaaaaggctttgaaagttttcaaaaagaggatcttgcaatattttttggaatcatttgggccatttagaattatcgtaacaagtttcttttcacagaaaataagaatttttatatgaaaatagattattctatggtctcttatttacaggaatacaaagatgctc

SEQ ID NO: 129913 - DNA, 886 bp, Cannabis sativa
  modified_base (431)..(436): a, c, t, g, unknown or other
agcatcttccatggtttcaacgaagaggttgaggtttcttgggggagggatgtagagagtcaaagggattgcagaaaaagctgctgtgaaaaagaactgtaacatggttttgttctttgttcagagatgaattgaagattatgagatcatgagagagagagagaaaggaaaagggggttttgtttaggaagagaagaagagaaaggaaaaggggttctcgaatgaacaagaatcgagagagaaagagaaatggaaggaaggaatgaggtcagatgtgggcattactggttggtgggtttgccttgggttatgaccttcaaattagggtccataaattgatcaaatttaatgtcgatccaattataatgaaaaatgctaaaggccactactagtgcctagtaccgttactaagtatcgggtcccatataatnnnnnntaataatttttagggagtatcgttaaccaattgtaacgtgacatgtcgaaaaggtgctaccactcgtgccttatagcaatgttcaattataatcgacgggattagattagatgttatttttaagtattcaatttagatcagatgttaaatatccaattcagattggattgaatgttatttaaaaattcaatacatttaatatctaatcgaactaattaatattttgagataatttcaaaaaatcgtacaaaaatatataaggtattttaagtaattattaatattttcatttagtttgaataagtaattaaattttatgttcttatacgcagtgatggacccaggatttaagttaaggggggcgacacttttttttttataagtgaggggtgcgtctttttttttttttttctacattgcataacatgttaaaaattaatgtaaatttat

SEQ ID NO: 129914 - DNA, 1138 bp, Cannabis sativa
cacaattttctctcatttttacttaagtaatgaaattaaattgcgcgcacacacacaaataccatattacagctctctttcactttaaatgaggcccagattcatagaaactattatttcagactaggcataaatataatctcataaattatactccaactgttggtcttgtttgtcaaaactatagtggtttgtttggtgtttttgtttctaaatgataatccagtctttttaagtggatctttaaattaatgacttggaatattatttttctaaccagtctacgttttgatattgagattatatgtattgtagcagtgatatgcaaacactaagcataataaatttactcccatcacttttggcagatttagaatctagtacaggtgtgtctcttatttctatactgtagagctgtaaactccattttctctcataaaccagcaatgttatgagaattttggaattaattactactaagaatattgctttgaaagggttctgacaaaaatgctaaagtttggcaaattgtttatttgataaaatatgatatcgtaatgtataatggttatagagaaaggggataagggatgcaacaaaatctttgtgtgatttattgtgtgtaatttgtttttgctcattttattgtcgaactagttttgctttaatttatgtatcagtgttaggttctaggtgtggttgagtcatctcgttatttaattgtggacccggttctattgaatttatttattagtatatttggaattgattttctcttatgttttaattgctttatgagttattgtgtgttattttttttactcattttattgtggaaccggttctattttattttgtctctatgtttttatttttaaactaattcaatcttaattatttttaaattataaccggtttctgagttattgtgtgttatttgtttttagtcattttgttcttgaaccgagtctattttaatttatgtcatctggttttgtaggattttaccaatttaacctacaccaacaaaacttattaatatcagtatacaaggttaaaattgacctttccttgtctaacttagctttagacaaaaaacgacaacatttaaacaacacgacaccaactcttgtgtcgt

SEQ ID NO: 129915 - DNA, 760 bp, Cannabis sativa
aattatgagaatggattagcaaaaccctaattagataattatgtattattgaggaattatattattaaataatttaatatatgagaatttaaatgatttatgacattttaagatctcgttggtgcgctaggggcattttagtaattttgacccgagaatggtaaaatagtggaattagtatatgtacatgcttatggaactatattattatatagtatgtccgtgttgtctttttcaagtgtgttttgactggttggcgcggtattcacaaccgggtatttcaggccgaatcgggttcgggcccaaaatgcaatttggattaaattattggtattttatttattggtgattaatctgaaatttatttgagtttaaatatgtatgaagtgacttaaatgcccttgtatgtgtgtaagtatgttatttggccctaggggcaaaatggtcattttgacctttgtgttatatttgataaaagagatggaattcaagaaagaaaaaagaattttttggttcttttactcctcaaacccgaacctctctctctcccaaaccctctttctattttagctctgattttgttggaaattggttgacttggtgctaacttttggagcttggatttgggggattgctcttgctttactttgaggtagtaattatagtttttaatttgaaattcattgcttaaatgttgggtttgtgccctaactaaaacttatttcaatataatcaggtttactagttaataaagatcaga

SEQ ID NO: 129916 - DNA, 1356 bp, Cannabis sativa
  modified_base (749)..(750): a, c, t, g, unknown or other
tcaacccccgtacccgctccattaggggtaggtacccgtgggtacccgaatttttcatactaaaagtattaatagtgtttagtattatataacgtgctacgtaccgctacttgcaatccacaatgtgcagtgacagacatccacaacgtgctacataccgctacattaaattacacaattacaatatcattacgtgattagaaaaacatgcaatactatgtaattacattcacttatacctaatttcaattccttttgacttttcaaacgtgttcttaatattattaaattatgtaattacttattatttgcaaaacattaaaatataataattcatatttgacatctaaacacgtattatattttagagtagttatatctatgtcaaaaagtatttattggatcaaatctaatggatttagacttaaccgatccaatctaattatttattggatatttgttttttttttcattcgatccaatcggatcgaattaagtcatctgatccgatccaattaatatattagattggatcggttctaactattagatgcattaattggtttttattagattgaattggatccatcaaatccattttagctatgttgagaatcatgaggttccatctcaaaactaattggcaatgagtggagtagctcatattcttatatgtggctcaatacttttacatttaatctatgtgggacaatgttctccaataagctaccatttaagttgatttcatnnaaaagaaaaatatatataaaaaaacataatttaaaacttaataatccaacatacataataaataatagtttagtcaaacctaattctcacaatcccataataagactgccaaaaaatgaaatttattcaatacgcacaaccaattttattagcgtttaggaacatgagaatcaataatttagagctaaggtttttattctttaatctcatgtgtcaaatatatagtaaattaattactatattttttttaaataaaatatgctaaatatataaaattataaatgtatttaaaaaatatataaatataattagatggccattagatgataattggatcgattcagttcagtttggctatccacgcgctaactcagaaagggtatttttataatttttttagctgagagtatttttattattttacataattatggatttaaatatgtatgaggtttttgtgatgatataatatttgaattttattggcatgtgcataatgcctaataaatatatatatctggatattattaaatgaatatgagatttggtttgattttggtgttgggttttatgccctaaataaaaatcatttcaatataatcagat

SEQ ID NO: 129917 - DNA, 1632 bp, Cannabis sativa
  modified_base (1572)..(1572): a, c, t, g, unknown or other
aattaaattatactgttaaatattaattgggattgtctgtatatacgtgattacgggtggacccatatataagcgaggtagagcaatcgctcctctaaaaaaatagagaaaaaaatatatatgtatttcaattagttacagcatatatttgtaataaaaggtgatatttacaagcataatattaactttggtctaatgattaagctacttagcatttaagttaaattagaaaataagggttctaatcctactaaaagcatttttttttctttttaacttttcttttgtaccccctcactcgcaaaaaaaaaaattacaccccctcttattttaaatcttatgtccgctactgtacatgatattaaaatctcaaaatttgtctacacagtgactacatagtgatagtttagttggcaattataaataattaactcattaatcattaatttataattattctgtccagggtggtgcctcaaaaaattagggctcaagacaacgtaaaattgtagtctatttttttttttaaaaaaaagaaaaaaaaaagacaagaaaatggacattaaaaaaaagtactatgagaaataaataaaaaaacctaatttttagaaagttttaattaataatatttgttatcagacaaaatataaatatatatgtataggttaatatattttaaagatataaataatatataacttttgtgttcgtgataatatgctaaactatgaatcttgcaaatattaattatgttgtgcattatcttaaaattaatttaaaataaattctagaggtacatattttatgttttgggtatctaaatagtgataatgccaattttttttagaaatttttacataataaattaaaaattcaaaaaaatatatataaaaatacattaacacatgtaaattttattttgatgttgtgactttttttatttataaaaatataaatttcagtaaattgttcaatttttttagctattttttttattgttttataatttttttatagtttaatttttagttattgtgatgttaatttattgttattttttttttttagtttttgttgagaaaattgtatttttataattttaaaattttaaaattatatttttatagataaaaattttaggcggtcaaattataaataaaacataaaaaaatttcattttcttatacaacgatctagctagtaaacagtgacaaagccataatttttattttgtggaggcttatttatcataaaatatatttatatttatattataattactattactatatttatttaattttatgggggcttttttactattttagttcataattattaaattaaaaaatttatatttaattttttaattattagtggggctatagcccccacaataatataactaggtacgtcactgctagtaaatgtatagagtacgttgcaaacatgataatttataggctaattagcaatttttttttacaaactttgacatatactaatcatgccccctgaacttttttggcccctgaaatattaagatgaatagatttaaggacttttgtctanttttagtaaaaaaattataacatggatggaaattcagggggcatgatttagtacatatca

SEQ ID NO: 129918 - DNA, 1194 bp, Cannabis sativa
aaaaattcacagcccctagtttcgcgattgacagccatgtcatgagagaaactataagagagaggcagatgagtggttgtcacgagatggtgacttggtcttgtcgagggtttcgaaaagatggttgtaattattattttatttctttgaggtgccacatcattagaacccttcgaggtatgtgcaggcgtcttcactggtaacttttggattgagagaccttaggcattcctttaccacgtgtctccatcccaataaatgagggataccggtatttaaggccccatgatacaaaataatccttgatcatttccctctcatttccatctctccccttcccttactcaattttcaaattctcaaaattcctcagaaattttgaatttcttttaactgaaaacgattcgaaggtttcactacttacagatcatccaggaagaactgtatttcaaggttagtgatttaccttttctgtaaccattttatttttcttaagaattcgtatgcgttctgtgtttttaggggtagaaaatgcatgaaacaataggatttgctacttgtttttcgtagtttaggcaaaatactgtgttttttttggaaaataaatgcctgaaacttaaatactcctgggtttcaggaagaacacttcaaatattcgcgagttttaagaagaacaccttgaatactcgcaaattttccttcaaatattcgaatgctcaaaataaccttatctaaccaatagctaaactttgtgaccccgttttttagagtttttaactcttatgccttttttttttagcttttagtttacatgtattttttctatgaaaactatctaagttcttgaaatggtaggtgtgtcacatcaacttaatgttcatgcaatcatcgcatgccccttgagatactgcaaaacgtgccagccatttcttgagacatacggctagtttttatttttctcggattttatttatttgttggaactgactagattctcgaaatggtgggtgtttctccgtgaattaatgttcatgtattgatatgacccttatgacactgagaaacaccagccatttctagagatacatggccagttttaaatttttttataacgcgggtgagggcacttaactcattcaaattgcactcacacaacactgaaaagattttctatctttcagatgagcgacttgt

SEQ ID NO: 129919 - DNA, 915 bp, Cannabis sativa
tacatgctcaagtagccactcaacatgcatgcccgaacaaccagtcgacatgctcaagtagccactcgacatgcatgcccgagaagccactcagcatgcatgctcaagtagccactcggcccgcatgccttgcatgcgtctcgacaggtccatgcttaagaatcctgaccagcatgccttgcatgcatctcggcagtatgcgtcacatacatctcgactatatatcatgccttgcatgtgtctcgacaaccccatatgctgaaacgtctcagcaattccatgttgaagcatctcagtttaatgcatcgcatgcatctcggctagtatgtatcatatgcatctcggctagcatgcaacatgagcatcatatctagcatgcaactttagcatcttggctagcacgcaacttcaacatctcggctatcatgcaacatatcaaatagaatggaacatgagcatctcaactaggatacaacatgattatcggctagcatgcaacaatagacacttggccacaagggctctcggccactcgaccacaaccaattaatgtatataattttaaattttagttaacaaaataatttatatgatgtatgattcattgtattagctatttacctcaaaaattattgaagctaacctttgagattagtcaacgttaatccaagagattagtggaaccaactttcagagttagtcatgaatgaaccacttggcatgcgcacccttaaactactcgacatgcatgctcgagtagccactcaacacgcatgcttaagtatccactcggcccgcatgccatgcatggtcttggtagacccatgctcaacatctcggccagcatgccttgcatgcatctcggtagcgtgcatcgcatgcatcttggccatcatgccttgcatgcatctcggt

SEQ ID NO: 129920 - DNA, 908 bp, Cannabis sativa
atgtttaagttttttttttttttatgcatggttctcttttttgtgagtctctgttttgtaatctctgctgggttttaatatttaaatgagtatttatttattacttttgtacccctctctatgtttcatgttaatccatataagattggagaaatttcggctctattaagtgcattttttttattaaaaatggatgcagtaccttggaaagtgaaaagacatatatgctcctcaagccgcttctcgcaattcgggtatacgcatttgcttgacacatgtcccgattttaatgtcgaagtggcttttcatttccgttcttgtggcatccctattaattgcatgtaggcttcttcacatataaataagttttcagtttagccatttccttctaaaaaccctttcgatactttttctgagtaagcattctcttcttagggtatttttttcatccccgttgccctatcgcttcctcactaaaagatcaagttcctcactcaaaagatcgttcttctttctctaacattttttcaggcttgcagcctatggaccctgcttttctttccctggatcctttttcgagttttcgtgactttgaaccccttacggttcccccattgcacttctaagaggtctgaagttgtccttgctttgagcaggctgcattgggcttggggacttacgcctcttctcgcgctgagcctgcgccacctttagcattgtgcccttttgccatttttcctcctgctttggcacctgtcgaagaggttaaggaggatcccgaggtaacagaagggagctcgactcagacgacggcagcttattatcctgagcttgaagctactgcccaatccgaaaattttgaagaggtccatgtctcaaccgaggattcgccttcggttttttgcata

SEQ ID NO: 129921 - DNA, 1060 bp, Cannabis sativa
aaaaaaaaaaaaaaaactagtttgaagtgtaaaaacgaaaaaactcctaatttaaataataaattatgtattatgatatttatttaaaaaattgcatttaaagtaaagttacatttagatcatctcattaactcattatatgattttaaaattgttatcattattgtatctttattatagtcattactacattcagaattgttgtcatcatcatatctcacttgtacatatcgtccaaataaaatttttactcttcaataattcttattcatgtagtttttctttctcgaaattaaattaatatatttttaagaaactataatagctttataaatttacacactaggctatgtagacctgcaaaattctttcactaaaaactaggctttaataaataaatataaataatataaaactataacaagataacaaaattattacatttccattttcgttagtattagttgctcagttagttattatcgttatgttaggggatatatttactatgtttattgtcatttagtttaggtagttaattttctttttcagctgaggtcttttatttaaccttcgtgtatatatagctagcttagaattgtaattcatttattcagttcttcaataacagattctcatttcttcactcttaatttttttcatttcgcaatatggtatcaaagcaggaaagagatgctttcccctgatcgatcctaattctttcttcctcctctgctttcattcaccgtgtttcttcctctgatgaaagaatatagcctttcttttctctcaaacactctattctgttccaatctctaactttcttttctcccaccatgtcgagtgatgatcaaaccttgtctcatgtaggaacaggagtaactacaccttccactgcctaaattttgatcatctaaggaactcagagtctccaaatgatgactatgaagagtcatcttgaagatcccacaaatccctactatctctgtaacgtccccgtttcaggcctctattgggcccttaaacccatagaatgagtggctcttatacacgggtacgc

SEQ ID NO: 129922 - DNA, 633 bp, Cannabis sativa
  modified_base (471)..(479): a, c, t, g, unknown or other
gattactttcagcataatccaatattgtccagtccagtccaatccttttcagtccaatccagtccaatcctgcgtaccaaacgggtcctaagagctagcaaactctcatccctctaaataggacaaatctaattgaatttggtaaaatttcatcttatatccttaaaaaaaatatctcttaataaaatttaaactcctaattactttatacaattaaatgctattattttcaatttctattgaaaatgtcctctttttcatttctctctctgtctcttccttttcctcgctctctcttcctctttctcacaccaccgatacacccagactcatgcaccgagaccaccaaccacctccaccgaatctcctctcctccaccactgaacctcccgatctaccaaaactcatgaaatattatcatgcgaaccatgcaacatagaatcgatttctgatcttatattaattagtaannnnnnnnntattgaaatgagttttatttatgatacaaaacccaacaaaatcatggtgggtgtgaggccgtcaagctccatgattaaagcaattgagtcttttgacccagttctagcaaaaacggagaaagcctctgtcctctatctgccacactggtccagc

SEQ ID NO: 129923 - DNA, 637 bp, Cannabis sativa
tgctttcttttcctctggctactaagatgtttccgttcgccaggttgtctcttgccttcccatggattcagcagcagttcaaaagattaacctattcgagaatctctagatctccgcttatttttaactctacgaagcatttcgtataccagagaacatgcattagttaattaattatttgaatatgtataaacaaactactaaataccgacatatatataaaatatgtctatggtagaaattattattttgtctttataattagaatgtttttataactattgataatagatttaacgataataaataaataaatgtaatagtaaatatttagaatgttagacataaataataatttaataaattaagaaaatattatattttccctcttctctctttttctttgaccattatctctttttttttctcactcctcttctcttagttattaggtgtttatccaaattttaatgacgatgacatattaagagtagcaacatgtggcacgaaaataccaagataaaattaatgaagaataggtaaagtcatgatcgttgggatgaccattaatcatgaaagatggtcatgaccgttagaatggaagtcagatggtcacccttacccctagcttgagtaa

SEQ ID NO: 129924 - DNA, 642 bp, Cannabis sativa
aaagggcacaaagccaaaagagtcgtgaacaaaacaaaaaatcagtctttgagaacagaatgtaacttaggctatcaaatttgataaacatctaaagataaagaactagaacattataactctgattagaatgtgagattaaaatatctaagaaagaacaaagatatgcatttgtaatatcctgcactaatcagagacaaacaaatatataacaccttaatccttatttattaatcacaatttttatttatattccattccatcatttatcattgattttaaatattgttaaaacttaaaaattcgttataattggcaatatatataaataattatatatttattaaaagaattattaaatagaaaatataaattaattaatattgtatttataaaaatacccctctaaggcgtggataacatttatatcttttatgagattttaattatcaaaatacttcttacactatcacttacacaatcagacgataattgcagggtggttgttgcgtagttgtgcagtgcatcagacgaaggtttcaatcagacaatagttgcagggtggttgaccgaatgtttcaatcagaggaatgtttctaggtggttgctgggtggtttgccgaatgttgcatcagacgaagg

SEQ ID NO: 129925 - DNA, 1425 bp, Cannabis sativa
tttatgagattgagattgagatgagatgagataaagttagtgcaccgcaccaggagcttgctttggaatggaaaactgacagaggtaaaaaataccactgaacccgaaagagagagacaaagagcaagttgaaagagtatatatatacagataaactaattttttttacatttataatattattaatattaatataataatcatataacttttatatacattatatatacatacataaacttttaaattaaatagcatatatataaatttatttatattttctataaatttggtcggtttcagttttttcggtcggtttgctaccaaaataaaaaccgaccatttaagggcagttttaaccgttaacagtttttttggtttttggtttgaacggtttcagttttagcggtgttcggtaggttagttaaaatggtttgaactattttctggattttatgctcatccttagttcacgacacctttgttcatagttgcttacagatcgggtctttgagtagctttcaaactgataacttcatgagttacttataatctcctggtctacataataatgttgagatctacttccatctcgcgtttgtctacttgatctactatgcatgcgggatcacgattgttctgtgcttgagcttgcttcatctcgtgttggtcttcttctttggaagagattagacacacgtcctctactcaagaacgagtgcacgttttctctatccgtgcgagaaagacattgaggatgtctcagaggaagactattggaccttggtttgtttccagggtttctcttattatcacgagaaaatccatgattccctggtcgaggctgcctcgcctctttattatgcgagatgattctggcatgttagttcattcattcccttggttttcaaatccatgggaagtttgtggaacatctcatcgatgttcttgattccttgtattattaggattcagttgattatccattgggacatcccttgtattcttaggttgttcctcttgggtatttgggggattcccttggtttgtttcttgtctcctggtcttggagcctcgaggtcttcctcgcggtctccttacagtaggatcaagttggttttgaggaactatcccttgtgtagccctggttgctgcagcttctctctccaactcagtgtttcgtatgtttgattcagtcaagcattgttgaagttacatgttctctaactctaccaatggtacatatctagtagaatcataggcgtcttcactcctcctttctaggattcgatcaccattagcattgaaattactctcgtttcttcctgaacgtggtgtttcaaatgtgttaggtctttgagatcctataggttctttgccaggttgatgtgttgtttcctcaggacgattatcgttgtgttgatc

SEQ ID NO: 129926 - DNA, 921 bp, Cannabis sativa
tccgatttacataaaatgtaaatttcatattttaaatctaatttaatccgcacaatagctcaaatctaatctaatccaatccacaaaagtgcgaattgaattagttactttataatattagattatttaatatttatgaaaaactaccaacgaaataaaataaattattgttattttatgtcttcaacaataaattaaaataaataaaataacaataacaaattcaaaagaagaaaaaaaattatttgtataaaaaaatatttttaaaaaaattatatataagaatgaaatatacatttgacctattattttgaaatataattgtatcatatgtattagacttttaaattacttttttctttacattaaaatattaattatgtatatataattttttaatttttttaaattaatatgtgtggattgaattagatcggttacttttacatgtcaatcagcatccaattcatacaagtgcaaattttaaatttttcaatccaatccaatccgcacaagtgcagatatccgcactttcctaattgaattggattaggttatacaaattaaattagattaactattttatcaacactcctattacctctattattattttaaattgatacttttagatttattattattttcagatatgaatgttaaattaaaaatataaagtttgctaaaaatataaagttaaacatttggagagagaataatattttgattattaatttattattatttttattagagagaaagaatgatattaattagttagagtgagaattgagtaataattaatgaagtttttgcaccaaagaacctaattttgcacttatttacggatttggcctcgctttaaataatacggttttataccgtttttttttcaaattttttatgccacgtataccgttt

SEQ ID NO: 129927 - DNA, 978 bp, Cannabis sativa
  modified_base (58)..(83): a, c, t, g, unknown or other
tatatgtgtttatttcatcattttagaaagttcctatttagggtgttaatcaacatannnnnnnnnnnnnnnnnnnnnnnnnnaaaataatttccaacagaaacaccatggaaaaagccctagacagcggtgggagagggtcaaacatcaagatttgatcacgagcaccagcataggattcattgggacccgaagaaattgcaagatttgatcacgagcatagtgatcttgaatttgctgcatcgcaccacaagaacatggcgtgaatggttgaaactcattaagttcgtcccatagtgactgtagctgagtaaaataagtggtgacagaattggcgccttgtttgatgcgagttagagaagtcttaagataaaaaatctaaagaccattactttgattgacccgatcgtggagattattccacatagcaagggtcgattctttaaacataatacttgctgcaatttcacgtgagaccaattgcaaaattcatgccataaccatactattacattgagctcaaacaaatctatacggatgattaatatgctatcaatgaaacatgaagaaattatattgtatacccactctatttattttaatattatttccacattttttaagatatatttttattgattatgtctctattatattttttagattgatgtaaattatgtgctaaatttaaatggaatgtgagggtatatttgacaactcactcagaaatgtaggcattttttaataaaatataatatgaatgtattttttattaatgaatagaaaaaggagatcctccacttatcccatgaaatatttacaataccacttgttgggccacctatactttgcaacattagggtgttgcttttgaactgaccaaaggcaaaatgtatattttggttagggaaatttcaatttttgaccctaataatacaagccatttcaaaatttatacccttccttaatttgtacaaa

SEQ ID NO: 129928 - DNA, 733 bp, Cannabis sativa
gagattctacaatgaagaatatcatcgaccaagattagtacttagttatctattatcaagtggggaagtgttttactttaatttacttctgtttttgaatatctacctttctcttaagtagtttgcattggcaaagtaaatgggtgcatcaatatgaagaatgagaactccaggaacactgttggcaattgggtattgatcagtgcttctgaagatcatggagttgggaatgttgccaagaacagtcgttcttggtctagcaataaacagaagaactctcataaacgaaattgtgacctgcataaaccaacaaatcatcccaattcagatttcattttcaatcagttcaattattcattgttataagagaattaagtttggtacttactgcaatgatcagaccaatctcgacactggcgaagaccacacccaggtatgctcccatgcagatgacaaagtcgagtttgtcaatcttccagaggtgaatggcagattcgtagtcgatgaggctgatcatggcgacaatgataatggccgaaagaaccacaagtggagtgtagtggaacagtggtgtcaagaacaagagagtgatcatcactgccatggccatgacaatgttggagactgctgttttacatccagcgttaaagttcacagcacttctagaaaatggccctgcaaaatcatgcattatattattcttctattcactaaatttatatatatatatata

SEQ ID NO: 129929 - DNA, 785 bp, Cannabis sativa
tgctatatggcttgtggaaatggtccgacttggcattttactgctttttatggtgaaccagctactcataatcgtcatctcacttggacacttttggaacgtttgaaggatgttgcacctttgttaccatggctagtaattggagattttaatgagatattgtcaaatcaaaataaatcgggtggggctcttcgtaatgaggctcaaatggataaatttcgacatgttcttgatcgctgtcaccttaatgagcagcccttcgaaggtgatccattcacttggatcaaaggtagacttacagctgatgcattgaaagtgagactggactggtgttttgtcaacaattcatggagtgatacctttcaacaagttcttactcagcatcttgattactatggttccgaccatagagttatctctgtcaaagtcttgcaacactcggtatcacaccagcaacaacaagtgcagcgaaggttcagatttgagaaaatgtggttgaatgaagaggaagcggctgatataattacacaacactggcagcaggctaatgcaaacaatgttactgcaatcttcatcgaaaatatcaagaattgtgctggttcccttcagcagtggcataaagagaagtttggaaatcttaaaaaaacaatttccaaagtgcagaaaaaagtttcagcattgaacaataccacagatcgcaccaatgttgttatacatgatctaaagtgtgcagaaaatgtcttggatgaccttctagctcaagaagagatgtattggcaacaacg

SEQ ID NO: 129930 - DNA, 775 bp, Cannabis sativa
gctattttggttagtaatcccgattaggagattagggtttcataagcatttttgggtggcgtgcctaattattttagggcgttacacattctaccctgacatcttaaattcacaatttcctcactgatttaagaatccacatgtctcgcaatatgatggaaccatagatccagtcgcccatttaaataatttaatactataatgcgatcatgcaatgtttcaaaaaacttgcgttgcatattatttccaacatcctatacaggagctgcgagtagttggtttgattaattcaccaaccattccataacatcctgggaacaattgttgaaggatttcaaaaagtagtttcaagctacaagagatcgttggccagaggcatcatctttgattaacatcaagcaacaaccaggagagtcccttaaagagtacttgagttgcttcagtacagctgcagcaaaagtcagagacttcaatgataacacacttaacagcccttcaagctgaaattgcaactaatttatctactatagggggtaaattacgggatgatttgcaaggtcattctgcgaggaatatcaatgaatttaataaaagagcacaaatttttgtgcataaagaagaagcacggaatgaaatgaagttataaaagactagcttaggagataaagccaacactagtactgcattagcgagcaccgtgaccacgaaggtagaaaatcccaatggataatgttatcccaaattttgcacgctgacgtggcatcacgggaatggt

SEQ ID NO: 129931 - DNA, 745 bp, Cannabis sativa
ccaaataatatacgtcgtatgctaccgcacacccaatgcttcctatgagaaaaataaattatatatattgaacatatattatattatcatgtttataatatatatatatacttattaattaagcttacccaagattctaaggtacaatcattaattgttgttggttgacaagtaaaaaaaaaattccatcacgaaactaactcgatcatcatgcttagttgtcaaaattacaacttgatttggatttacaaacatccacaagtgttgtctattattattgacaagccaagtatataaataactatataagaaaataatatgaaaatatagtgagctaactttatttgtcaaatttaataaataaaacataaatagattaagtttgaactatgataccttaagtagcagcaaatcataccttgccttatttcatcctctgctagaaattcaaaatgatgagatacataattcgaagattgatgattaaacaagagaaagattgagaaaaaggggatactaccaaaaaataactttcaataataccaaaaaatcttatcaaaacataccataaaaccttatgaaggattaagaaaagtaatgctatcagaaatcatacaactttacacattttctgttgtgaaaacagtacctcaacaagaacaaatgtagaatagtaaggccaatgaaaaccaaaatgacaagtgcagaattatgcagtaaagattaaaccagaaaactttgagca

SEQ ID NO: 129932 - DNA, 589 bp, Cannabis sativa
ccatggtgattgcaccagtatctatcccacctataaacatatcctgcaatcacagacacattaaattagtagtcaagtcatgattagtgaaatcgagttttcaaaaagcctttctgttattaaaaacacatttttatttctgtgaactagaagcttttcagaaaacaattaaagaagttacaaatatatatttagcacacttctatagtagggactattagaagcttagttagcttaccgttaagttagttaatctgttgctaactgtattagaaggttgttaggattctattaagttctgttattccattcttgatccatgtaacactatcatgtgtaaatactctgttttgggtcacttaataaattaattcattcacttctaatagggaccttattttgtccctatgggaagggtgagaacatttttattgtacttagattaagaatctaaaggtgataaaagaatagggtatatgaaagtgaaagtagagtttagctatgttaacatatctccttcttaattttttaatagcaaaaaaaaaaaaaaaaaaaattgatattactttacacaattttttttaccttt

SEQ ID NO: 129933 - DNA, 882 bp, Cannabis sativa
cgaagcttgaggaagagaggggattttctgggttgacaaagaagaataagaaatcttcccccactttgttcatctatttctgtttttatttcttatttatttttttattggaaaataggaagtgggttcgttgagctatggagggaaggagaatttgttttttgttggggtcatgaaattttgttcacatgtaattgatttgttccacaaaaaagaaaaaagaagaagaaaagaaaaggaaagaaaagaaaaaagcaaaaaaagaacttcttttcctggtttttaatattttaaaataatttaaattatttttctaatatttatattattaatattaggtggattaatgaaaatttgctactgtacacttgtgtacaccatgaccgtccactttggtacttaacagaccaaagtagacggaaggactacatagcaaaacgattggagagcttagggagttcagccataatttttccagtctaagggtttaaccgtacaaaacttcaaagtttagcgagtttagcagcaaattacccttttataatgtatatataaattgtttctatagtagttgactgagaaaatgtgtaaatgtaagccaatatatctaattatttaatttaatactttggttatttgattttattcaaaaaaattaaaaagccctacaaaataaataaatataaataaatctatatctatatctatatatataaatgagaagtatgaggcggtgacgtggcggtctaaaattactttaaagtcattttttttctccttaattctctcttttctttaattttgtattaatttcatatatatatatattaattaatataaaatacattttttccttaatttattctttttttttaaaaaaaa

SEQ ID NO: 129934 - DNA, 522 bp, Cannabis sativa
aagcatctggccagttcagcaaaaaaggtggttgttggagaaggagcgcgtccaaatgctcaaagatgaggtcgaatggcttagagccaatgacttcataaccgaggcattctacccttagtgggtatcgaacccaggactgatgccaaaacccaacaagaagtggagagtatgcatcgactttacgaagctgaataaagcatgctcgaaagacttctttccattccccagaattgactagcttgtaggtgccatagctggccatgaaatcttgagttttatggacgcgtatttgggttacaatcaaatatagatgtatccaccagatcagaagcacactagcttcatcacagacctaagcctttactactgcgaaggcatgccctttgggccaaaaaatggaggggccacatgtcaaagactagtgaacatgatgctcacagatatcatcgaccgcaacatggaggtgtatgtggatgaaattcttgtcaagtcataaaaggctggggggcacgtgctgga

SEQ ID NO: 129935 - DNA, 2466 bp, Cannabis sativa
caagttaagtaaagataaagggaatcttctccccgatcctacagcctatagaagtctcataggcaaactcatatacttgaccattacaaggcccgatatttcctatgctgtgagccacctaagtcaatttctaacttgtccacgggttccacatctccatgatgcacatcgtatcttgcagtacctaaaatcaacccccggccaaggaatttttttcccttccaacacaacagccactatttcagcatatgccgaaacaagcctttccccgtccaatgttcaagtatcctttttttttggatgccgattggagggcttgtcaagacacaaggcgatcaatttctggttattgtctcttccttggcaactccctcatgtcatggaaatcaaaaaacaacaaactgtttcccgctcttctgctgaagcagaatatagagcaatggctaattccacttctgaactcacttggatcatcgctctcctcaaagattttggcgtcaaccttgctactccagaactgctttattgtgacaacactgctgccattcacattagtgaaaatccagtttaccatgaacgcacaaagcatgtggaaattgactgccatttcattcgagagaaggtccaacaaggctcgatcaagctacttcatgtctcctcacaaaacaacctcgctgacgttttcaccaaagcgctcttaccaactcacttctccaacattatatccaagatgggcttaatcaacatgtacactccatcttgaggaaggttcttaggattagctttggattaagttagttaagctttggattaagttagttaaggcttattttgtttgttacaaattaacattacagctgtacatttttgttacagcattggttagtccttactaaccattgattgtattgagctatataagctcctttttcccatctgtaaaatcagttcaggataataaaatacctaaagctctgattttcctctgtttttctctctattctttctcataaacattaacaaataaagaccaaaatataaatttgagtgtcaaggcaaagtggctccctgatgtatccccttcttgcaattaaaagcttcccccataagaattctagtctatcatgggacacattttaaaaaataacattacatttgctagtaatgctctagtctgtgctgtgtaaatttacgagtaaaagtgtccaatcttgcaaatatcctaccaattaaatgatcttacttttaaggattcctaactagaacaataatcaaatacgaaccagccatcttggcagattagacatttgacgtttcattactatcttcttggttttcgtcacttaaaccatcatttttgccttacaaatatgacccgtcaataatcttaagtcgggcctcctggtaaccacaatccaatgtctccactgtacagtgaaccatcaccatcaatgacttttctgctgattcatgaactgtataattaggttagtcaaattaactattattttagctcctagaaacaataacacaatcaagttggttacgtttgaacattgtctttgtaatagccacagaaaactctgggaccccttgacacaaatttctccatgaggatgaggcttatcctctgaggtataatttaattctggaacatccacaagttttattcctaaaagaaaataaggaaaaaataaaggtttaaacaacatagtacaaagcaagaaaatcatacagataattaagaaaaatcaagaagatgataattctagagcaacaagttcaatttttttttgtttttgtgtatattgtacttttctttcaaactttgacaggttttatgcatgccataaccaaaacaatatgctgctacaagaaaatatggtgttttgtgttctgtgtgatatatatttacatgcactgagtaaagaaactcaccacaggtagaactatatgatcatcgcgtaaaacgtctcagtaccatatccttcaaccaagttacatccaaaataaagtgtaactttgacatgtttagcatccaaagttaagtgtgtaatttagacatgtttcgtgtctaaaatagtatttaattttgatatgtttggtatcaaaattattgagaatttgagttatgtgaaaattaatcttttatgattgaattttcaaagcttaagtacttaaggagaataatggtcagcttaaaggtggacactatatttggctagcatgatttgcttggaatcaaaagtgtgagtttaacaaatcgcttcatcttcatacaagattaaagcatgcatttcgaggaatggaacctaaactcctcccttagttgttttggttattgatggtaacctatcttaacactaatgaaaatcaagttttaagttcaataggtaataacaagtcaatagagtgaatgtggtactcaattgtctcatctatggatgagtacatgtagtgaaaatt

SEQ ID NO: 129936 - DNA, 1209 bp, Cannabis sativa
tggatactttcttttaatatatgggcaagattccattctttggtaggtgtcaaaagatctgacactgtcatatttgtatctgagtggtgtctaaggtaatgaagtttaccatatcctggaatccaggcattattgaagatggagattgtggtaccatcaccaattgatcttcgaagacctgactggagaagttctttgcccccagagatactagtccaaataagagaaggtctatggccctttccagaatcaaggaagctagtgtgtggaaagtaacgagatttgagtaaggtggcaacaagtgagtgaggagactgaagaagccgccaagcttgtttggccaacatcgcctgattgaaagctttcattgagcgaaatccaagacctccatggaattttgaaaagcaaaggaaagaccaggttttccaataaattttacggttttgctccattcctctccacaaaaaacgagccatcatggattcaagcttagaatgaaaagaggcggggagcctgaagcaagccatagcacaggaggagatggcttggacaacaaattttaaaaggagttctttacctcctttagaaaaaagcttggaattccattttgagaccaaacccgatctttaatgtaattgaagacattcttttttgttcttccaaatgtttgaggaaggcccaaatatttatcaaaggtatctctaacaggtatgccgaagatagtaatgatgctgattttgatctcagtggtggtattcggcgaaaagaacaaggccgatttgtctaccatttttttctttctaatttctttgttaattttaacttgtaaattgtaacacaatgtgaacattaattttcactaattatcactatctccaatgtaaaatataaaatttgtgttaaatttagtacaaaaaatagtgtactagtatatttgattaactatttataattatatttcaatacacaagatatataataaatacaaaaataattattattggtcattatttatattatattttattaaaaatataatttttttattattttattatttaaataataataatatagtagataaaaaagttaaagttaggggttttttcattagtgtacaacaaaaacaattatattacaaaaaatgtgcaaaaaaacacaattttaaaaatgtacacatttgaaaacatatttacaaaaattcataca

SEQ ID NO: 129937 - DNA, 1627 bp, Cannabis sativa
atattctgttaaaccaagaatgttaaaccaagaaatgccgttagatagacacttttaatatataaagatatagataaatttttcctttataatttaaaacatattctttacttagagcggaaaaataaaagaaagttaaaactttgctaaaagaaaaatacataatttagggccatttagtatttataaatttttaaaaaataaatattatatacacgtgaacagctaatacaaaatttaaattcaaaataaaattcaaattataaaaatcagtcaatatataatatatttgtgcatcactcaattaataagtaaaattagattaataagtacttaaaaaaatatttataacaattatttagcatataattttaaaattaaattcaaaatatataaaaatatcttacagaaaaatatcatagttataccctttaaataaatatatataaaataaagattgaattcaaaatgatattacataattataaattgaaataaaactattaaatcaagttgaaaataaaatttatcaaataataataataataataataatttagcatatattttatatgatgatgaatattatagtttttataattatgagtattattattgtatatcaaatatttcaccactaggtatactattgtaaaaaaaaaatagatgatttagaaataacaaaagatcattatttatatttttatttgaataataatgttttaaatatatctttaattaaatgattataaaaaaattaaatattgaataagttaatatctaaaacctagaattgaatttaaattagattagatatacaattctataagtgaaatatggtattaatgacaatgattttgaatgtagtgtcaactacaagtgagatatagtaataaaaataattttaaatgtaatatcaactacatataatgatgacaacaattttaaatataatgtcaactacgtacaagtgtgatacagttatgacaacaattttaaaatcatataatgctgagttttcaataagtttattaatatttatacatatttttaattcatatttaattttttaaatacatttaaaaattaggtataataatatatatctagaatggcttagttaattaaaaattattgtttattaaatttaaatatttgaaaaaaataaaactctataatatatatatttgtgttattaaaagtaaaataatacaagtttagtaatttttttactaattaatattattaaaaaatatatatagaaaatattatattaaaattatcatgaaatattatagaaaaaatatcactaaactatatacaactatacgtgaaacgcggtttgtttcctaattatctatatatatttcaaataaagtgtacttacatttaacacaaaaatagataaatactaatttaacacaatatttaagattgcattttaatatgagttataactataagctaaattattgagtaatttgcgacataaatatttatgtttaattttaagttgcagataaatacttaagttgagttgcagataaatacttaagtgtacctaatttatatcactacaacaaatatagttattaccggcgggtttattgccggcggaactcacccg

SEQ ID NO: 129938 - DNA, 901 bp, Cannabis sativa
  modified_base (857)..(858): a, c, t, g, unknown or other
tgctaaaggacgatctgaccattagttggtacgaaccttcttcatcatgtggcgtatagctgctgtgaggacttttgtacgattcaggacacacgtcacgtaaaggtttctcctttgcaaaatactctctaaccaggccgttgggaaaaaagcatatttgagggtgcgtacgtgcactaccatgatctgacacgagggacaaaatctggtcttgtgttagaaaaaggtgtaaccgtctatggagcgactttgcatgatgctgacgtggccaacgtctacgagacttttatttcgctctgggtcctttactaaaggaagttacttccggaggtcatctgctcttgttacttcccaagtgcgggagacattctttttctcagtatcctcaaataattgttatcatggttgtattcttccctctgatcgtgccacgtgtcttatttgtgaagacttagataacaattatcctaggaagttgatatagatagttagacagaagagtggagattatccaagcttgaagatgaagctcgtctttattattattgaattaattattttatttatcaaacaatttagtttcaattattagtttatgaattttattccctatttcatatcattgcagacaattcatgagagtattaatttaatttttttctctttcaaagaattatattatgagttgctattatgaaattgagctttatatcctataataattatgctaatatcgcattatatttatatgtttatcatgttttttacatgtttaaagtttattattgatacataatctatggtataataatctttgcgaagatataataccacatatgtgacagtcagtagtcccnngatccgtaaggggaaatactgggtaagctttgcaatcccacac

SEQ ID NO: 129939 - DNA, 886 bp, Cannabis sativa
  modified_base (853)..(861): a, c, t, g, unknown or other
actaaaactaaattagtgacaaatatttgtatttaaatactatgttttattcacaagtaagtcacaaaaaatttatattgtgactaaaaattattactaaaataatttttttttggtagtaataaatctatccctttgtccttcccaaacatgtctagcattgccttcaaatggacccaacaaaggattatagcaaacatagcaaacccgtcttgcaatgcctttcaaatatttgtaatatagtaattttaattgtgtatatatatatatataataagtaattaaaaagaggttttttttttactaaatttaactcatttgtcatattatgcatgcattagagatagtgtaaaataaacgagttgtaactatcaatatatattcttcccattattcaaacttacttttcgttttctattaattattattgtttaatttggggtacaacaactgtacaagtacaacaaataatttagtttgtccgtacgacgttgtttgtgttgaataaataattaacattgcatgtgatttataatttcaaaattctctgtacgtacttttaaagtgctcacatgacgtctatatatatacattaatctcaattttgtatatataataccatgcatgggtacaattttaatatatacttcacatatgtttactaataattaaacaatgggaattaataataaaattatcattacttataaatttgtttttttgtatatatcagatgagtatattattacagctcttcaaaccaatttctatctttttgtgatacttttattcttgtttatttttttcattatcttgttgatgaaagtatttttttattcttttaatgaaattnnnnnnnnntttcaatgttgatgaaactagtttt

SEQ ID NO: 129940 - DNA, 1432 bp, Cannabis sativa
tgtggtacttctctatgttataacttcatacccaattggacccttcatttattcgacaaatggctgtttaactcacttatcttaagtggtcctagaaatagaagctatattctactttgtattatacttgggttgcttcactatgattcatgacagacatggaaaggttacgctgatacaaaaccctcaagtcaaaagtattgtctttcggttactttgcttcgaatacaatacaaatactagtctctcagtatatcattcccaatcttgtatttttattcattacagctcaactacgatactttaatattataaaccataattattgtacgtggatatgcacaaaatatacatatacatacacatggaaacaaagtatggaagatatgaaaatacaaacttactattaaaaaagttgcatgaaagatggagtaacgaggtgatacttggcgatgggtgcaaggtttccatcaaagctatttgtatgagtcccccttatcatctgttttatatcacaacaaataagtctgcaatgaagttatctaattgccacgtgtcttttttagacttatccaacattctttttgttggggatgctttgaagtttaagcttggtaggtcatgattatatctgtgataataaagctttcttaggctctcttagcctttctaatgagattacacctttttgtttgataggtatgttcaacataattccccaccacccttttgaggtactttaatttgatcacaaataaataagcattaaaagtaggaaattggtcaaatcatcttgtaatattggattgtgatattaaaatgaaagaaagattgttacattttttttagagtgcttattacagatttttatttaacttttgcgcttaaaattatatccaaatattttttttttgaattttttttcatagtgatatttactataattacaatatttcaataaatttttgaaatttttgaaataatttataataccaaaaacataatttctaatattttagtttaaataacttcaaacctattttcaatatttaaatttttttaaaaatttgtacgaataatgttatgactataacgaacattgccgtgagaaaaaatttaaaaataaatatttcagcatgtatttttaggcacaaaaattgactaagaaataataataaaaggttgattgtagcaattttttttttccggtaagatagttacatttttgtaactcgtgtttttgtaattacttctctttgaggagaggagccactcttgattatattgttgttagagctttgctattggctatcagtggtactagcaattctagacatattgtcttgtgattgactagcgatactctttaaaatttattacattaaattatatgagacccaatatttagtttgactaatagcgataataatat

SEQ ID NO: 129941 - DNA, 547 bp, Cannabis sativa
atgcagcactagaggtggggcaggggccctgatctgttcagctccgctcctgaccagctcagatccgcacttcgactgttcaagcctgttcgagctccctcttgagagtctttagacttagtcacttttggggcagaagggtccacaatagttggtttctcgcagaggtcaataattgcttcggtcggcgtcctctccgtggatggggtcgtctcaccgcttctggatctcttggccggaggagataagcacgagcttcctcccactctcttcttcagagcttcgagcatgttctgagacatgtctacacgaaataaaagcaacatggttagaggaaagcgctagaaatatgaaagcataataattaagaaagttaaaagcaagacgaaccatcttgcacttcgcaagaagtatttgaccgagcaagacctgatgtctcatcatcatcagacgagtctctttgctcctccaggacggctttcccctttcctactacaggagtggatggtcgagcaggcatattgggctccctgatcagaatcttatg

SEQ ID NO: 129942 - DNA, 1574 bp, Cannabis sativa
  modified_base (688)..(694): a, c, t, g, unknown or other
  modified_base (911)..(912): a, c, t, g, unknown or other
  modified_base (978)..(980): a, c, t, g, unknown or other
taattaattgatttttcttttaatttcctcaacaacaaaatgctatacttagctgaattattaaaaatggccagctgccatgctaagaagaagtcatctaatccccttaataaaatgaccaaaatgcccttgttctttagacttaagcaattttaaacctaggggtaaaatggtcaaaaaccataaccccgcacaaactcggtattctattcatctcaaatatttatcccactaagaaaaagattctagacttacccatgtgactctaacgagcatccatcgcattttccgtcatcgccgagcaaaaaccataaattttacataattcatatataacacaaataatacttctagagtttaataaaatctctgaaattgagaaattataactctaatgcccatttctaataatgggatccacaacataataaatatatgcataattctaaaaatatcaataatcaaggacaattgtctctactaatccatattctaaaatgcagtcattacataattagaaggataaaatggtattttgactaattctaattatgaactaataatttgagggtgaggtacgtatattgattatatcaatagactacaagtaagaattctgtaaatataattctatattatcaaagagtgcaattccatatttaaagtggagtaataatagaattaatannnnnnnttattctattgatgagattgatagtaatcttgagtttattggagctttaaaatataggtccatggtccccaagtcacctctatacaacactatacatgggaatgttttatttgatgaatggatttcgagtgagaactaatttccatgagaaataaattcttaagggaaaaataataatttgtgaaattattgttttgattaattatggaaattatgnnttgtataattaatagtatttaactgttcaattttattgaataaaattattttaattagttaaatannntattattattaaataatattaaagagagaaatatattatattagagaaaataatatttatcttaatccttctaaaataagagattaatgagaattaatcaattattatttattgatagaataaataataaatcttatttgtggcaaaattaaaaaatcaattttggaccttaaactatggcccacacgtgtaggctcattctacacgtgtagggtgacatataaaggtccataattaatttggtttaattaatttattgattaaaataatttaaattaaattaagttgattatcttttatttattaattaaatacaatatggattattgtttaattaaaaagacaattatcaaactaaaagatctactaatattttaatattcggttattagatatttatatttgaatgtaaattttgaattcaattcaaattagatatttatcttttattttaaataaaggattaaagactttatttagaacactatatatagtgatatataggatcataaataataattgttaataaaataatgaaagagctcacaaaatagaattgggtttttttatccctattctctctctctctctctc

SEQ ID NO: 129943 - DNA, 530 bp, Cannabis sativa
gggcataaaacccaacagtatagaccttcttgaagcctccctctcagcagaacttggccagtggttttgtccttgacaaaataagaatttttatgaaatttaagaaaaacactattgtcattagttaattgagagacacttatcaaattttttgtaatagaaggaactgtaggaacagaattgagattaagagatgtgtgagaggaagagggtaaggaggtagagcctatatgagaaatagccaatttcttaccattacctacagccaatgtgtcatttcgagtatagaccatagcagtttcaagattttcattggtattggtgacatggtttgtagccccggtgtcaacaaaccacccaaagtcatcaccaaaattaggaagaacttgaggagagtagctggtatgatcctgatcagtttccatttcagcaagataggcccgaggggtgttggcattgggtttgggggtaacccaattcttatcgaatctatagtgacatacaactattgtatgaccactttttagaca

SEQ ID NO: 129944 - DNA, 786 bp, Cannabis sativa
ataaatttctgtttgctatcatatataaaatttaagcacatttaaattatgtcttaatacatatgtttctgttgttataaattaatattactttgttatctatacttactactaatatgtagattaaccagtgatatatagtaaatgttgtgagattaagtgtacttcatatacaaattttttagcatacatcattatcatttgcttcttacatgactcaatgtacaaaaaaaaaagcacctctctatttatgtttttacatacatatttaaaaaacaacactagcaaaacccatctaacatctctttacatacacatcaaaatatactaagaaatatccaaaaattaaaacactaagtaaaaatggcaactcagggagttcttgcttcggtaagtctattaaaatattagctttcttcaaacatcttgaatcttcctgcaaacaaagaatcaaaccaaaaatatcagcaacaattattagtgaacatacatttatacgaaataatatactcatagaatccaaatcacattcagagttcaataaaatatgtatatgaatgcgaaaacatactgagtaacacaacatctccaattaaagtatgagcaattggaaaccctcgaatcaaagtacatggcgtctgaatatgaaaaggcaaatatataattaggattctgaacctaatggttatttattgcagtttgtttaaatgtgattttaatgttgtataatttcgggctttttttttcattctttttacaattttattgatgtttgtttgaatgtgt

SEQ ID NO: 129945 - DNA, 1857 bp, Cannabis sativa
taaatttagtttctaagttagttaatttttttccttgcataagttaaaaatttataattttgtgtatttaaattttctatgttatttttatcttataagggagttttatttacattccaaaaacataaacctcatttcaataattttcttttacattcaatatatatttttaattatattagttttttttttttaatttttcttccgaatcatttattttaaaaaatatatattaaacaaaaataactatagtataaatattacaaaaaaaatttaagaaaatatacgtgaaatttattaaaaaaattatacacgatttaaaaaaaatgaaaataaaattaaaataagtactaaaattaacacaaaataatatgagaaaaaaatttaaaaaatattaaaagtaattttttaaaaaattatattaaacttatttttttttttaatattagagtatattttttattttgtggagcacaaatagaactgtcctatctcatatcaggggcgaagttagaaataaaattgaagtgagacgattacatattttatatgttgtctagacttcaaaatttcaacaagattatagaattagatataataaaacgtatttaattatgttaaagtgacttttatagaatgacattctatattttcatccaacacagtttctaggtagttcaaatctcaacaataatattttagttattcttaaaaaaaatagtaaaaataaaaataaaaaaattaaggtgtggagtgttgaacttgtgaccgctttaacttttaaaaggatcttcactactacatcaaacaaccttacttaattttatttgacctcaaatatttttgtataaagccctaaaaaaatttatttagacctaaacttcaaataatttaagaccggtcttgatattttcatctgaggtgactgttctacctagtctacacctagtatcgcccttgtctcacatagttccacttttatttgttaatgtaacatttttagtatcatctttttatgttagtagaatattctctcttccttctaaaaatattacctaaaaaaatagtgaacttattctttaacttacataagtacatacccaatagtaaaaatgctctgagatcgagctttcttcttggaaaattgtagagaattgtttcaattgctctgattagtttcgcgaccttttctcatcaccatggatcccatgggaatcagtggcatctttgaagacacaatacaactatcttcggaggatataacgttcagcctaaatccaggcgaagttgatgaacctcaagaatcaaacaaagtccttctaggcaagattattagcatgtataaactgggaaaggctgctatccaaggctctttaaaactgtcttggaatgcgatcagaggatggaaatggaaagaaatagaaggtggcattatccagttcacattcgccaaacgagaagatgttatgaacgtactagcacggtgcccctggtttgtttgtggagcgcttcttgtaacgccctaatgctaagacacgctacagtgctttttcaattacagtgcaatctttgctaatcagagaattttcttgaaaaacatgtcaaattaaaacttttatattaattaataaactacataatatattaaaatatttacaagtgtcgggatcccgtttttcaaactttttaaagttaatatcccaaagtacaaatattataggtcgcacagcaactacaaaatacaatccccagatgtcacgaggccgaacactttaggtcgcgctgctttgacatgtacaatcccatcctagctcaagttcactctgttgggttttatgccttaaataaaactccatt

SEQ ID NO: 129946 - DNA, 1317 bp, Cannabis sativa
tcgtcggatagttgtcatcaattttacttcactgctttttatggtgctcctgaaactcacttacgcattaacacttggaacactttgagtagtcttatttctactactccgcatctgccttggttggttttaggagactttaatgagttgctttcaaatgatgacaaagatggaggtcccccacgaaatgatgctttaatgaacaactttcgcactactattgatctgtgtaatcttcggcctatcccgtactgtggagactctttcacttggactaataagaaccatcatggtaacattttaagggaaagacttgatagaggatttactaatagccactggtcatctgtttttgctgaggaagatcttcaccacctagatttctatcattcaaaccaccgagccatcgcctatactgtctctcatccaaatcaaccggtttatccacagaaaagaaacactagattccgttttgaacaattttggttaaaggatcctgactgtagaagcattattgctactcactggaatgcatctgctaatgatcaatctctgaatcctttgctgcaaaatattgcaggttgtgctacagctttgcaaaaatggcatcataataaatatggcagtatgggaagagatatagcagccgctcatcgtaactcagctctgttacataatgtgaaatcaagtgcttctgatcatattcaacaaatggaaactgctgaccgaattcttgacgatttgcttgagaaagaagagttgtattggcaccagcgggcacgtgttgattggcttcaaagtggcgattctaatacgaatttttttcactcccgtgctaaaacaaggaatgctgtcaataagattaaaaggattcaatcttctactggggattttgtacatacagaggaggaaattagtgcagaaattgttaattatttttctggtttgttctcttcaaacggggtcgatcatgaagctttgaatcatgtactctctacagttcatacagccatcactccggaattaaaccagcagcgacttatgccgtttactgctacggatgtggacaatgctctcaaatcaatggctcccgataaatcacctgggatagatggcatgtcggctatgtttttccaacatcattgggatatagttgggcctcttgttactcaaaatgtgctgaaaattctgaatgaaggtgatgatatggactcaatcaattcggctttaattactcttatcccaaaggttgatcatcccaagcttgtgagtgaatatagacccataagtttgtgcacagtactttacaagttagtg

SEQ ID NO: 129947 - DNA, 999 bp, Cannabis sativa
  modified_base (951)..(952): a, c, t, g, unknown or other
tttttgattcttgtcacgatgaatctcaatctccaaaataaaaaatgtctctccaagatccttcatatcaaaattggtagtcagaaaaactttagtctcatttaataatgacatattttattattatattggagatacgagagtaaaaacaaatctttaaagtgagcattatataattttgaacattcttttcttttttctaaaattattttttctttttaaaattttgtagcatgtctttaataattataatgtgcataattatgacaaaaaaataattaaaaaaattcttctaaacgttaaagcactagagggtgtattggtgtaccttttttttttttaaaaagttacaagtaaatactttctacaatatatatactactactaaattcttaacctgtaatcatttaaaataaaataatataaaataagaaaacttagagaaaatctgtagtatacacccttaaagggatgtctttgtaaacccattatttatttcggtatttaaaagagtgttttagtcaattttttttttcttgattctctatgttgtagttatttaggatcacatataatttttttaaaaaaattaaataattttacaatatcaaaagataaagttcaaatagtttcttaacacatgtataaaaaaatattgtcatgcgtagaacaaaatattttaactttttcttttatcatcgtaaactattagaaattttgtgaaaatttaaaagtgttcttaaatacattattaagcttaatattagtgtatgatatacaaattaaacattcatattctaatattgccgatggactttgattactgataactaaagaccaaatcatattctaagcggatattgaaaaatgacatttttctaaaataatttttataaagtaattttaaggaataattacataaggcgtcattttttgtaaaatatttacatnnttacgttcaaagaatatttttttatatttttacggttttccaaaaaa

SEQ ID NO: 129948 - DNA, 1370 bp, Cannabis sativa
gtttcggtttcggtttttttgacatggcggtcggttttgatttttgaaataaaaaaaatagttaaactaaaaaaccgcccaaaaccacccaaaaccgtccaaaactgccaaaaactgtacggtcagttttatacggttataatttctaaacggtcggttacggttttcgtaaaataaaaatcataaccgaccggtcggttataaaattgtaaaaaccgaccataaccgaccaattttcacctctatttggaggagtttcttaaggatcataaacaccatggtgtggaccaatttttcatatttatgtggaatattattccccattttcatttcttttatttttctaattaaatcctagtatattgatattaatatcatcaattaaatgcattataaaggcttgaaaagattatgatgatgatgttgttgaattttttttcttctctgattattacatttcaatattattcatttttaggggaaaaggtagagacattccctcaaaataatgataggtcctttttattattattaatgtttgagaaggatgtttaggttgttggtcttcttcattcattgttaaattaattaggctcaatcaagatgaacaagaataccctgctaaaaaaatatttttcatttgttaattaacataaatcaatttccatacatatatatataaaaatcatttccataatttttttaaaagattattaccaattgtcatattgtttattagtgtaattaaatattacattccatgtattttagtttaatatttagactcaaatttatccaatttttcatttaatattgaaaaaaagttcatttccataatctagaatgttattttattaaaaaaaaatagaagataagtaataagaattaactctattataaaggtataatacatcaaaatttgagagagataaaacaaattataaatatagcattgttattgactacatgtgagcattttttagaaatcacattttacgattagttgatgacattttataaaaatcaccagatacctaattataccaacagtaatacatgattaaaatactaaaaatactagacatactagacacaataatatcttttaacatttctcttataaatatatgtggacaacaaacctaacattaataatatgctaaaaaagtggctaaagttaagaatttttaattaaaatacttatttatttttgaatattaattgtatttatttttatagcattgctattattcactagtagtgtagggcaccttctagacgtatcaccttatgattggctagcgatactgcctaaatgttattatattaaattatagggattatttcacaaaaacataaaaataacaaaa

SEQ ID NO: 129949 - DNA, 1038 bp, Cannabis sativa
gtgggtggtgctcgccgtgcgtggccggtatgggttttggatcctgggaaatttgagagaaaaaagaggaagagagagggacggttgggaaaaatgggaggggtattgtggggttttggaaaaaactatcccatttataaaattatgcatagtattagtttagggggttaatttatgagtttattaagcatagaaattcaaatttccctttgcttttttgtcattttgtacagatattcttttttttattttttgtttataaatatttttttctaatgtctctttttacatattagaatatgccaaactctcttctcagccgacttctcaagcaccgttatttttctaacaacacttttttggaagcaagagttggacactccccttcacttacttggcaagctatacattggggacgagagctattagttgaagggttaagatacaaaattggaaatggacatactgttctcgctggtgtagataagtggctgccaggccataacaatttcaagccaattagttactccggccctccaaatgttcatgtctcatgtttcatcactgaggaaagagaatggaatataccactcctaaatgagcattttcaaccaattgatgtggatcgaattctctcaataccacttagtttttttccatccaatgaccgttacatctggcatcacacgacaacaggacaatatacggtcaactcaggatttcacttggctgaaaacttagctgaaggaagagactctagtggttcaaacaatcatcgggactggtggaaaaccttctggagcctaaacctcccaacaaaaatcaaaatctttgcttggcgagtgatgcaaaatgcacttcctgttgccacagaactcagcagaagaaaagtgttaacctcagccacatgttctttatgtagcaatgcgtgggaatccattggtcatgctatgtttaattgcacaactgctcggaaggtttggagagaaactaaattcaccattgaccatacaaatgcacaaaatatgtacaatggtg

SEQ ID NO: 129950 - DNA, 1077 bp, Cannabis sativa
gttttctcaagtggttgagagattcccttataaatattagtaacttaattcggaggtcttgggcgtgcgatgttatgttgatgggcatcacacttcgggatacttctccagtttataaaaattgactttttgcttgttggttcgcataggatgaggcttaaaggtgtaatagagtaaaatctcttccgaactcgggggttctaacttccccatcttacacagcacataccaccctgatagaagcttgtaggatgctgggatcatttgaaatgatgcaatcatgaccccgagcacaaaaattggcaaaatatgctctcaggggtaggtgcgccccacaagatatgtggccccagctccaagagctaaactcatctttactttaagaagtagatttacccataattgaaagcatataacataccaagccaggaatgttgtgaacccctctatcagcagacaagttctccttcatactataattcccaaaattttgtgttttggtccatctcccaaatggagtcattataaacggtggagacaaaaacgaagccttactttacccttcgccatggttttcactctgccctttgttacaacctttttacttcttctctctgggatagcctcatgagtagggtcctgacagggcccctctacaggggcatcaacccttgtatcctctatatttacgactccaatgttgaaatttccattaaggtcagacaatgaaaaggaaaaggaaaagagaagagcccaagcaattaaatacccaatatcttaaggacaatgcgagtactagggatggtctcccttgaaatttcttggagagatccccaccagacctattactcaaaaagtgtcacccttaggaagtcacacctcaaagcaataggtcggagacccacaagaaactcactggacaatataaaacccagaagttaacctcatcgagaggtttaccaactctagatgggcagacgggtaaaataaacctagaacttccaaagaatcatctttgttgagtttgagtttttacacccatttcccaaaaaaatgctgtaaagaccgcttagttta

SEQ ID NO: 129951 - DNA, 666 bp, Cannabis sativa
  modified_base (404)..(410): a, c, t, g, unknown or other
taaattaaagtttaacatagtaattatataaaaatatgatatataatccaatacaatacgacctaatacgacgttctaaacgagccctaaacgagctattacacgcacgtctattttattttatatagacaattagaattttattattttatgtattataaattattttgaatttctcaaaatattacaaaatgtcataaataaatacaatacacactatcatataaaaaaattgagattaatactattaagatattaaaaacatgaaagtgctgcatcagtgcacctatttttgagagggtcgaccctaggctaaggcgcacgggctaggcttgcgcctaaggcccacctctatcaggggcccaaatgatttttttttaataaatatacatatttttttaatnnnnnnnaaaaatattatttatttttataaaaaagggcccaaaaaataaagtgaaaattacaccaaatatgagattctataaaaaagtttcataaatatgatttttttaactttaccacccttagatagtatttgtcaaaatttaacgttttttatggtattttctttgccacttttttgtaaatttaattttaaatgccatatttaggtaaaaaaaatcacaatctcaaaccctaaacggctactctctctctctctctctc

SEQ ID NO: 129952 - DNA, 798 bp, Cannabis sativa
taaatagaaatatatttccttaaataaaatattcttatacatacatgttatttacgaagaaactatttaaaatgagagttaagaaattaaataaattagtacaagatggagatataaatttttatgtgattcacgagtcacttgtatttagccaaatgatcttgatgtattacaataaggtttacaagctcaagaaccttagattcttgttatagtgttttcttacttacaagttttctaaccttatagattccaaccctttgtaatttgtatgaaggtgtgaagtaatatttataagctagaagttggatttgagcatacccatgacccattagggtttttttgtataagttagacctactattgaggtaaatacatgactttaggctcactgatagaattctagctcgtggggcgaaggcgcccgtgttgggtttttgtgcctaaaactcaatttcaatataatcttaatttcatttatcaataaagaatagaatttatttcattatttattttagtactttgcttgttttacatgttattattcatgatcatatgtttgatatacaaattttattaaatttctatcacactattattcatgattattgtgttatctacacagtagaaaataatcataattatgtgattaaactagttagtctcatgatttatcgatttacaatgatatgataattaacaatgtggtttatttacacttatatatgtagaatgtcttttccaagacattagtaaagtaaacttgtgtaacaccctaatgctaaggcacgctacagt

SEQ ID NO: 129953 - DNA, 985 bp, Cannabis sativa
aatttatataattaaagacactttaatcgataaaattttattgaacaaatttaaatttaaactatacatacattaaattaagcacacacacccttaatttattttatctaattatttgattactatgtaaagcctgatacaccttattacacttcttaagaactttaacgaaaaaattaaaaatgagaattttcgctgctagtaattacagttaaattgaatataaaaaattgatatttttacagtattgaaatgattccaatatacagaatatcagtttgattgaagtcttagaagtatttatattttgttcactttttactaaacattattaagaaataatgagaagctgtgaaactatttgagaatcatgcatatatttgttcacgtaaaaatgtcacgaacccatgatttcgacttcctaaatagatggtaagtgcaatatttgtgtatcatttcaaactagcaaatcagcttaaaattggggctacacgggcaaatataacaatacatgtctctcacatgctaacccccaccaacaatgaattatgagttatctcatagttagatatgtagtcttacacaacaatgaacaagcatacaacaaaagaagatggcacaagacgacccaagaaatacaacaaacaaataatacagcagtcgtttggtacgtcgtattgtattgtatattgtattgttatcttagtattatttaatataatactatatttgatattgatttgtattaataagttgtgtaaagttataatacgttttcaataaactcgactccaacaccgactctgggtcgagtccggtcctgtcagagtctgtgttcgatctgtatctgggtcggagagattggggttgaccctaaattctttataaatattataatacaagctaatatggatcatttattatgtattaaataatacaacttacattaatgtattaaaaaatttaatacaatacattgctttat

SEQ ID NO: 129954 - DNA, 980 bp, Cannabis sativa
agtaataggtacacaaccttaggtgttcctagttccttgtagtaaagacaagagtcaaattttgaccttgaaaaaccaatactctgaacaaactggttgaacctttggttccactgtttgggttactgtttcaacccatacagtgatctcttaagcaggaaaaccagatcagttttgccattttccacctgaaaaccaggtggttgttccataaaaatctcttcatccagaaaaccatttaagaaagcagttttgacatccaactgctcaacttccaagtcattgtgtgcaacaatagctaacatcattctaatggttttgtacttcacaacaggtgagaagatatctgtgtaatctactccctcaacctgtgtgaatcccttagctactaatctagctttatatctaggtggctcaacctctgtcattccctctttttctttgaacaaccatctgcaagagaaactttcttgtcttttggccttggcaccaaaattcaagttctattcttctttaagggatgcatctcttctcccattgcagcaagccatttcttctttgatttgcatgcaattgctttttcataggtagttggttcaagttcactatcagattgtatcacagccagggcataggctatcaaatcagctttagcatacctgctgggaggtctaatttctctccttctcctgtctctagccaattggtagttggttaaatctggttgatcatcatgactggtttctagagattccacctcagttgtgtctgtaccaacctcttccatagcaccctatgtttccgcctcagtagatgtccttgcttctggtgtgtggggtaattcaatggagacttcaatcccgtcagtgttgatctccaactcaacaaggtcatccctgttagtacctgcaacatcagaacccttgccttccttggctgtcaagtgcatgaaatcatgctcattaaagactacatcccta

SEQ ID NO: 129955 - DNA, 2172 bp, Cannabis sativa
caagccacctaattccctcaattgaagttttcaagcgaagtctattttcagcaatttcttgtgatgtgaagtttgcaaaccttcttgcaacatgtgctggttggttcacaagatcagcaagtactctctcaacatttctctgaggagaatttatatcttttccaatatgtgctacaaatgcacaattttttttcctctcaccttattctatgattgaaattcgttaatagtaaacacatctaatccagaggttccatctttagcatgaaagagaaagcatggtacacaaatgctgcatttactttaagagagtattccaaccataatggaaatagcttaaaccaggatgactgaaaactacgtgaatgtgctttctctgatttttgatagctagaaagtataatctgatatggaccagctttaatataagctctacggacttcatcacgcttctcaggtggatacccccatattgatgggcgtattccaggatcaagttctaacgaattgatatcaaatccttctttaatgtcaagtcttaaagattttgcagagcaattttcaaaatttacatgatcaatatctacaggtgaaattgatgacacattagatgtagaagcttcactattttttttcttaaaaaatgtgtcgattgtagctgattttctcatctacatataaaaaaaatcacataatgatataaattaatcaaattattaactaaatcgattaatagataaataacatcttaacaacaaaaagaaaacatcatatacaaaattaaaaaatcattttaaattgaacttttattcaattaaacaattaaaagtctatcatgtaaaagaagggtataaatatcactatcaaaaaatatatcatagagatcaaaaaagtttaatcatttaattcaaaataagaagaaaacagtcttttaattgtagatttttttttttaattattatagtagtaattaactcaatttcttttatatataagttataatcaataaaataataaaatttaaaatacataaccatttatttgagtaaagaacaaatttaaaatttagaatttagaatttatgacatacctttgatttgatatcaatcttttgtattgtatgtagagtggaggctgacgagtggatctctaatgtcaattcaaaattataatcaattaataaattatatagatacacacattattttctgtatgcatataaataatagaataataaaaaaaaattaacttcaatgtaaataccttttactgcagaatagtatcttgctgcaaaagttttgaattgctaaatgtgaaagggaattcagaaaataacctaaagattaatctaatttttttgttgccattttctttttcttatttgcctaaagaaaatataaaagtagtaggctttgaatataaatggtaatagttaaataagtataatattaaataataaatattcattccaaaagaaacaaaaaagaaaagaaaagataacttctcttttaattatatagtttgatttttctaaaagtggatccacaaaattatttatatatataataaaagtggacattgttttacaaaatagaaaaaaaatctatatataaataaaaaatagttaacaaattatgaaagtttgggggtggccaaggccacactacatatatatgtacctccgcccctcattaagttgttattacgttcaatgcacgtataaatagttttatttttcattaagtttaattaaattatgttaagtgcaatatatgtatgtttaatttttttttactattgctacatttatgtgttatttgaatgtgattatatatgtacgtattttttaaatttttaaacttttttaattcagtaacgtatctgataattatgtaaatataaaataaataataataaaattaaaaatatggttaaaaatatttataatattttaaatttaaattttttatataaaatatctacataatttttctttttatttttatttatagccaaactaataaatttaaaaatatgattaaaaatatcattaatatttgtattttaaattaaaattataatttctttatataaaatatttatataatttttatttttaaatatatatatattgtttacacaaattttaacgacgatgacgtgtcaagagta

SEQ ID NO: 129956 - DNA, 658 bp, Cannabis sativa
gaggtatgtgttttattgtctttgatgctctaaataaatactagatcttggctttaatgattatagattattgttagttgatgcttttgaatgctcataatctgtaactgtttttcaacataatagacaaatcaagaccaagatcataaaagaaaagaataaagtatccagatatctatctttggtactgttaatctagtacaataaaaaacgaagctacataaccttttaaatgctctttcaggggaaaatgtttctccattgcgatcaaacactaacatactttagtataaaacaaatgacaggactgctcttatgagatgtattatatcaactcaagttttttagaaacaaaaatctgggatttaatttctataatttggaacaattttgcatgcttaaaaaactgaaatgaatgcaatattctgggtttccaaataagaatcaagcattaactataaaactacaaccatcaagtgcaacagagaaaatgaggttcatgatccaaattatatgagattatcaggtttatcaatagtgaagcttatacgtgcaaataaaacacaaattcataagaaacctaaatcaatttatgttatacatcaaaacttttccaaaataaaataagaaattagaaatcgacattaagaaaatctaa

SEQ ID NO: 129957 - DNA, 890 bp, Cannabis sativa
  modified_base (856)..(856): a, c, t, g, unknown or other
tatttttttatattttttttacatttaatcccgattttttataaaaatcgagataaaaggcctaattttattctgatttttacataaaaatctggattaaaagttctttgtatcccattttttataaggcattttatcctactagcatatatcttgatttttaaattagcaaaaaccggtatataatgcccctaaaaattgggataaaagcctacatttgtagtagtgacttatttaggcgtgctacaatgttttccaaattaatgtgctgacctttgctaatcagaaggattttaatgaaaattgtgatttatttaaacttttgtagtcaaataaatataaacatatattttataatttctaggatttcgtatttaaacttttaaatatttcaaaatatattataagtaaaaggtgtcacccagcaactacaaagaataagcctatttcgtcccaggaaactatgctctccaagcctaacaatcttcatatgtacaatcaccaatgagctccagactcactgtttctcaactttttctttttctttccatacacatgaaaccatatctatgagtcaacagactcagtgagaaaagtataatttcgagataggttggtgtctcgtcaatataggcattaatagttttgtatccttacctcgcctaagactgtacaattagcgagttataaatatactctattgattccatatgtaatgagttatttctttttgcattaaatgatataactgatataacgttgttatatcaaagtggttcatattccacttaattaacacgtgtcactctttgaagtgtagctgaatttcgggtataactgttggaatttattttancaggatcttagatctactcaagatcggaagagcg

SEQ ID NO: 129958 - DNA, 904 bp, Cannabis sativa
aaaacagatggtccaattgataacttttgcaaaacacagggtccaaaaggatatttatccatttaagaatgtgttttaagattttatttcttcttaaaggttgtatttttaggaacattagaatttagaatatttaagtaaggtttcgattggatttttttttattgacttcagtggttactgcagaacaaaattatcaaaataaactcactcaaacttgcccattcacctctcaactcaaccaaaccagtatcaagcaatcaatttcaacttaaaataaattcaaaaatcaaacctaaccctaacaacactaaaaacctcaaattacatgccacaactaacaagaacttaacgaaatcatgaaataagagtttgtaaagcttacttccacttgatacaccctgaattccttgctgaattctagcaaaaatgaaagcttggctgggttttctctggtttgtgtgggagtcgagcaaagggagagagagaaagatgaacctcttatttttcttttgatttttcttaaaaaaaatggtaattaagggtaattgataaaaattgtcttatttctcttagtggccagctcccaaccttggagcaggccacctaatcctcaagtgtaaaatacaaaaatgcccttttcttatactttaagtaacttataagcttaggggcaaaatggtctgaaaccataattcccgcttaaacccgacattctaaatatctcttatgtttgtcccgctaaaaaataggttttaaacttacccgtgtgactctaacggccatccatcacattttccgtcatcgtccagcaaaaatcaaaaaattacataattcatatttagcataaataatattttttcataaatgtacaacaaaaataaaataattacaaaaaatgtgc

SEQ ID NO: 129959 - DNA, 681 bp, Cannabis sativa
  modified_base (182)..(184): a, c, t, g, unknown or other
aacaagaatgtaaaatataccgatataattaaatataaattattattttaataaatgtgcttataaaaacaaaataaaaatttaagtacaatttaaataaaaatattacaaaagtgcgtaatatttgttatgatttcaaatagtaagtaaagttttcattataattattataattattattnnnattattattattattttgtacaatatttaaataatttaaatatagaaaaggtatttgtgactaaattgtagattatgcatatatttttattaaatagatcaatttattaaatatgatcgcttagtatatataaaaatttattagttacataaacaaatataaaggttatcataatattttttaaaagtttatttagtaaactgttttgtgttttcttgtattgtatattattgtgtgttgacttgtattgtattgtattctaagtcttgttcttttctattgtagagtagtaacaattactgaacctagatctccttctttaattcgataaaacgataaatcttcataatcttctacaaagatctagtatcacattgaatagtgtgtgttgacattaaaaaatgaagaaacttagctcattagattatcgagatgattaataagtttaagtaaataatttatagagatacacaaaatttatagtagttcacccctat

SEQ ID NO: 129960 - DNA, 1678 bp, Cannabis sativa
  modified_base (1650)..(1652): a, c, t, g, unknown or other
tgtgtaggtatgggactacatagttgaagagggcttaaatatattgattggtactacctatatcaacaaccttgtaaaaacaccaaagactatcggtaaaggaactccgttggatacggttatggaggaagtcacctctcatgcagccgacacgcatgtggaaaataatggagaaggcacagctgctactgagaaccaagagaggaacaccgagaatgatgcagagggccacggtgatggccaaaatgcagaggattatgaagaggacgatgatgattactactataaagatggtcgttattatgagcatgaccctagtctagtgcgagtaatcgcacagttggaggctacaaaggcagccctagaagagcaacaaaggcttactgctcggatgaaagaaaccatggagaaactttggagcaagtttgatggttcggctgggacggatggagaaccatctgtagaagcagtgattgaagggcgagcccgtgagcaaactgatgctggaacttcaagccatcgcatggataagggtaggggcaaggtgaatgaacctccatagaaatttacgcctaagcctccacgtagagatgcaaccttagttagacaaccctcgaggacgcagaaggccatcggtgcttttgagcctggacacccctctaacccttgaggcaaaatcataccgaagggaccagccgcaaagcttcccaaacctaggagacaagtagatcctcctagtgattctgtcaatcaagacgggaggattcttgtcagccattttggagacagttggtccacggtagaactacggtagcagttggacgctaaatacgagaggtacaagaataagaaggggaggccacgtgtggtgacctaagaaatcatttgagtgacaagatgaggggacgtgatctcccaaaaagtgataccaagaggttagaaaaacaaattgctgccttgactaagttggtaaaaaagcatagtggatcattgttagattctgaggatgaagaccaagaaccctgtgtcgggagaatcacgaagactccactctcagaaaactttaagatgccccacatcaaattacatgatgggaaaaatgatctgcgagcacatctagccaaatataataagatgatgtaagtttcctacattagtgatgattctaagtgtttatgtttttccctgactctaaccaagcccgcaaaagactggtcgaagtggttagctccgagatcgatcaacagctagacggatttacagttggtgttctacaaataatttattgtcacgcgcgagaagaaaatggaagtcagtttcttaaccaatgtcaagcaacaacctaacgaaagtctgaaggctttcattcaaagaatgatggaggcagccgccaaaaccaagatcagtgatgatttgaagttgatggccctctagtcgggactagttgtaggttccttgttatgaggagagatgcagagaaagagagctgagaccttaagcgaattcatggctaaggcacagggcataatcaaccttgaggatgcctacattcaggcctttagagtccctcctgcaccaactccgactacggatgctccgagtttcgcatccgaaactcctgtccaatctttatgttgggttttatgcccnnnataaaactctttacaatctgattagt

SEQ ID NO: 129961 - DNA, 881 bp, Cannabis sativa
ggggttttaccgcccaaatttaggttttgagggttaagtgaaaccaaaataaaagttttggaggttttgccgccatttacccatattacaaaaatatggaatattttgggaatattctatctggagtgattttgaccatgagttgagattcaatgagttgagatgctccattttgaattcggatgatgatcgtttatttttagacgtcagatcgtgtctgttggattattttcgagttatctgcagtaaaaatcacacttcgacttaggagctattttttgacttaaaaactctagaattgatgtatgagtgtgatacatgcgtagaaagagattgaaaagagctttctaatgcacttgtaattgcttcaattggagtagtattgagcgaggtatgattattttactgaaggttgtttaggaccctatgaccaggttgacaatcctgtgattgaaaagttatctgatgtcaacctgggcgtctgatatttggaaaatcgtaatgtagtcatattttatgacttttaaatgatatgattgcatcagctattttttttttttttgctttggtgaagttgttcacccattcttggaggttttgctcttttgggaaatcgggtgacttgggattacccaacttgcgaatagtttcctgggtgcttcctctaggactctcctggagtcgttttggtacttccattggttctttaaaagtcaatggatcatctttttctgtatatgatgcaagaacgtgtggttttagttggtagcgaatataggttgtgtgacagtcaaagcaccgtgatccgaaggggaaagaccgagagtcgtacaatcccacatcgcctaggaaaggtcatggtgatgattctgagactgtgt

SEQ ID NO: 129962 - DNA, 930 bp, Cannabis sativa
taatatatttacctatattattattaatatacctataataataggtacacaaataattaaatatgctcaaggggactttttgaatgctgaaataggctctaacccgagcttcatttggagcttaatggaagctcaagatgttcttaaggctgggttacgaatgagggttggggatggcttatctatccggtttgctctggatccgtggcttcctagtgatgagtctccaatacaaacttctgatttaactgcctacaatgatctaaaagtccatagtttgttcaaggttggaagcaaagagtgggatgaagaggtggttcgggatatctttaatgaaagggaagctgatgttattttgggcattcctttagctattagtgatgcttgtgattcttggtattggttgaaggagaatcttggttgttactcagtgaaatcggcttaccaattactcatgaaccgtgacaccaacgttgaaggaagggctggggattcaaagttttggaaggagctatgggatgttaaagtgtcgcctactgttaaagatgttctttggagcgcagcggctaattgtctcccaactaggaagagactttttgaaaggaaggtgcctttggattatagttttcctttttgtttagtttccagcgaaactatagcgcattgtcttcttaattgtgactttcctgctgcgtgttgggcgaagcttgctgtgtgtgatgggggtcgggtttgggattcgtttcggtactggttgcagaatctaatggatacagttgatgctgataaagttgcacaggctggtacattatattgggcaatatggaaggctcggaacgaattggtttgggatcagaaaagtcggagtgctaatgatgttgttcagtttgcattaagatctattgatcaatggagaaaagctcaattggg

SEQ ID NO: 129963 - DNA, 607 bp, Cannabis sativa
gaccgagtggaaattcaagaattcgaagtcagacacatccttgttcttttacagagataaaaatgtaatcatccttgtcctaatctatgtggatgatataattgtcacaggaagtagctcaagccatctaaatcaatttgtatctcaactgaacaacactttctcacttaaggatctcgggccccttcattatttcttgggaattgaagttctaagagatgaaactggtttgtatctatcacaaggcaaatatgtggctgaacttcttcaacgattcaacatggctaacctcaaaccaagtcctacaccaatggttgcaaataagcaactgtcattgcatgatggagaaccaatggccgaacctgccatctacagaagtgcagtgggtgcacttcaatacctcagccatacacgccccgatatttccttcgccgtgaacaagctcagccaatttttaaagtgtcctaccaacgtccactggaatgccacaaagagggtaatgagatacttgaagggtacattacggcatggtctacacatctcaccctgtgatcggttaaccttgactggtttttcagatgccgattgggcatgctgcccagatgac

SEQ ID NO: 129964 - DNA, 703 bp, Cannabis sativa
caggcttttgaggaagaagaaacaaaaaaagaaaagaaaaagaaaaaaaaaagaaaagaaaaagaaaaaggaagaaggaaaaagagaaaagaaaaaaaaattattttttaaattgtaaattttttttaattatatatttaaattattattaatattagatagactaaaaaatatttgacatatgtacacttatgacagtttatcttagcacttaatagatcaaagtggacgaaaaagtagagacaaaaataaaatcgaattgtttggggagttttacccctaaaaattcaagaagggggattgatcgtgtcaaactcaaaaatttatgaaatttgaccgtaaagtacctttaatattataggtattagtggtatccaacaccactatattttatttattttgattaattttctaagcaccatttccatagtttagggttcttcattaaaaatctctaatgactgaattggattttgaaactaataaactaaattttcagctaacattgaacttttatttgggttagattggttatagattaaaaaattagatcaaatatgataatgttgctattctcaccaataatactatcaaaatttctatatattgaatatatatagggtaaattgcggcataaatacctaataatgtttcagattttatacacttaaatacctattgtttatttttggaggcaaaaata

SEQ ID NO: 129965 - DNA, 1467 bp, Cannabis sativa
gattaccttgtagaccacattgcagagagagatcgggcggaagtgattaggtcttttcgggttctgcaccttgggaatcaggacaatattagtggcattgactcctttatgcattcacccagacaagaagaattttgaaattgcatcacagaagtcattcccaaccgagtcccaatagtgtttgaagaaaaggactgacataccatcaggacctggagctttgttactactcatggaaaacagggttgtccgtatttcctcgggtgaaggctttcggattaggtcattctgatcatccagagataggcgatcccgaaccaggtcattacaattaggagtagtatcatttttaggtcccctaaagataccttggaagaactccaagaattcttttccaatgagctcccttttggttatccatacattgtctttgttaagaatgctttcaatggcattccttctacctttgatagaagcggacaagaaaaagaatttggtacatttgtccccttccttcagccaggaatttctagccctttgtttccaatacacttctttcctagtccgagcctcgtttagggatttgcgaagctccttctccatttcccaatctctagatcccacaggcagcttctgaacactatccagtcttctttcaagatcacgaatttgggcatctaagttcccaaactaggatctattccaatgcataagagcgacccgagtagccccaatcttcttaaaaatcctggccggtggccaagggaaggaaacagatttccaagcacaatcaaccacaagtttactacgctcatcccgggtccaggcttcctcaaacctaaaaaatcttctgacattctcccctaaaccaccagcatacagacacagagggcggtgatccgagttggctgtctgaaaagaacagaggacagccttcgggaaaagcctaacccaatcaccattagcgagacctttatccagggctgacttaacatgattagatccagaacgatggttgtcccaggtcaaccggtctccctggatgggcagaggaatgagcccccgggcattcaccgaattcgagattacaggaatgaattggtctttacctttagatcccactcgctcagaactactaaggacaaagttggtatcacctaaaataaaccacggaccaccaaacctatcccctagcaacattagattctcccagaaaactttttttgcatggaaatacggtgggccataaacacaggacaggagccacgggtgtgaggaagggtccgaatacacaagaccagagatgtgattttgggagcactcaacacattcaaactcaaaaccaattttccacgctaaaataatacctcccgcagtacccacagccggaacaataatatgaaagtaaaaatgaagtgagttaagaatacgtaccaaatgtaatatccagattaaaatagtatttaa

SEQ ID NO: 129966 - DNA, 751 bp, Cannabis sativa
  modified_base (699)..(704): a, c, t, g, unknown or other
ttaaacttattattatgggaaactcttatacactttgttttttaaaattttataatttttgtatacaataaaatataataattgcacaatataattgtaatccgaaattttggccttgacgacgtgcgaactaaattgtaagtgttatttgcgttttttgtattggacacgtagactccaggtcagcaccgtagacctatcaatgggaccctcaacaaaggagaagtgggccaatcccacctagatatatccttccatgaacataccttggtttcgcagtcgtaaagccttatgccttcaataatttgtaccctgaagacatgtctggtattacgagaccggagagataaaaccatgcgttcccagaaggcccttctaatttccctttatattccaacgcacaaataagaaaactacatttgttagatcacaacagagtatcgtatcaagattaaagggaaaactttctataacaaatattagaactaagagtaatcaaacttgtgataactaggagtaaccaagcttgtggtacttggtttgatccacatgggacaaccagttgaagtaataactataaactagaaccgttattatgttccctactttccgattatctccataaatagtatattaactaaacttgttattattatagattttttaaaaaaaaaaattgtaattgttgtatacaataannnnnnacgtgtgataagacatcaataatatttcttatacattgaatccaaaa

SEQ ID NO: 129967 - DNA, 1489 bp, Cannabis sativa
  modified_base (41)..(47): a, c, t, g, unknown or other
  modified_base (617)..(621): a, c, t, g, unknown or other
ttgcctaattaggcaatgcaatacaggattatcctatttannnnnnnacttgcctgattaggcaacgtgttattatgaagatggttacttaatgaggtatcatatatataatttatatgattaaataaatatgaattctattattggtataatggtttcgtattaccaaatatctatatacttatgtttattcatagcaaatgccagtagtaatttggatttcatcttatgaacaatgtgtgatagtttgattcttattgtgtataaatgaaaatattcgaataataaactatatgattattattacttttcttgttgagttgttgtgtctcacgggtgctatgtggtgcaggtaaaggcaaataaaagctagatcaaccacgagatgacagtcttctccagcaatgtacatattgacctcactggcctgtgcgccgagttgccaaaagttgttttgggctagttgtatctactgtgtactttgattttgtgtttaaatggttgtcatatatatttctttggcaaaaccttttataacagagatccccgaaacacactttttatgtcgttataatgtctgtttttagtgtttttattttggtcaagtttttaatatnnnnncggtttttaataattaattaatctattagtattaaactagcttataaaatcacacacgtggcgtccctatagattagggtgttacaacatctcacaaaaacctcatcaagggtggagtaaatttcgcgaatctcttggattacatactttgactcttcctcttcatagagttgctttaactctttatgaatcttcttgacaaacctccctaagtacataggtctactcctcacccaccaacgacaataccaccatgtacattgacccatacgagtcatcttaggtatatgaaagtgaatgttgatattcctccctaaaattaaaacccaagctttggcgatatcttcgattccacattgtgtcctcctagggatacataagcaaaagttctttaagggaacaccttgttcaaaaccaaattgacgatcaaatctattgggataataaggttccctatatatatatcactgccaactctaacgggtaataaagcagagcgcatcgacattaacaattcaaattttttgtcaaactgatcttcattatccaaatagtcatgatcttcctctgaaggaaaataatatggttaatgtataatataattctctcccctttaaatatgtcgagctctattcaaagtcgggtgcctagctggaatcccagcatacttatttaaatgagataaatcgggaatgagatcccaacatgataaagataacaaaagtgctcatctaaccaccccaacacatagtgcataggcaagaaacatttgccttattcttgacaatgtaaggcagaattatataaagctcgatatatatagcccaagatagaaggtgcaagtgaaactctaaccccgtgtgccatt

SEQ ID NO: 129968 - DNA, 862 bp, Cannabis sativa
  modified_base (47)..(54): a, c, t, g, unknown or other
agttgcaataaggatttctatgtaaaatttcataaaaatgcaaaaannnnnnnnaaaaaaaaactgttttaaagtgtacaaatgaaatgcccctaaaagaatatcaaatagtagtagaaatatggcttagttaatttttcaaaaaaaacattaacgttattatgaatttaatcaatgccctaatcttagatttacttataactaaaagtaaaattataaatcatgtcttttatttaatgataaataaaagtaaaattatactgatttttcttaattatttaaataattatttgaaaagttattgtacgtaataaatttttacttctaacacattttaattagcttgataaaataatagtataaaataaataaattaataatttaaatttttttatttgtggttaatttttttttttaaaaaaaataataatattgctgatttattagtttagttgtgaatatttagaattaaatttatttttaaaacatttaatttaaaaaaaaatagctttgtatatagttatatagatattatgaattatatataaatgttaatttaaggtttagttatggatatatttaaaaaaaaattgaaaaactttttgaaaataactaaggtagtttagagtaatttaattaaatagttatcataattaaattgaaactataaatgcgttaaaatatatttaaatggttcatgtttaaataaaaatcataaaacttagaaaattattaatcattaaaggaacctaaactttaaaagaacctgaaaaatgtatagataaaatatctatttgattatgcattttaattaagaaattgatctcatctcatcttttttttaagcgtttatatattataa

SEQ ID NO: 129969 - DNA, 1217 bp, Cannabis sativa
gatattcaaactaccgaagcaggtggtacacgagattgaagctatatgcaaagcctttctttggaaaggacaacacatgatgcaaggagttggtttaataaattggtctaatgtttgtcaagcaaaattagagggaggatcgggtttcaagaagctagttgaatggaacttagcagccctctttaaatatgtatgggctttgacaaacaaagaagaaaatctctaggttaaatggatacatagtgtatatctcaaaggaggagaatggtggggatacctagttccgaatcatgaaagttggtattggaaacaagttgtgacagcaaaagacactatcaaaaagcttactgctatacaatagtttgcacaaaataggtaccatatttctgaaggatatagcttgctttgtccaattcaaaacatggttcattggtgtgataaagtttgggggagattcaatatccccaaacacagttttatactgtggctagctatgcagaaaaggctcaagacaatggattggcttcagaaaattcaaatcatttcagatgcggtctgtttgctctgtttgtagcaagatgagtcaatcgagcatctatttttcaggtgttcttatgcacgatactgtgtggagaaaatcaaagattggttgtcatggagaacacaagcttatgatctacatcaactcctcaagtggattcacaaaaacaaattcagcaagtttaaaaagaaagtattggcggctgccattgctcacttggtatactcaatttggtttgtaaggaatgataatttgtggaacaaacacatagaaaacaaagatgtaactgtacaaagaattaagaatagtgttaagcatagagtataattagtttggccaaaaaagattggtcaaggagatagagaatggtttcaaaagttgtaaaagttgtacaaaagtagttttgagatctttctaatcaaagatgctctcttattgtaatagaatgtaaaagtttgtggatcattaataaacttgctgatttattaaaaaaaattgataataaggttgaataattaaataactaaaaattgaaaaagcatgaaaataacaataaaaaagtgtaattaactatggatgaatatttaaaaatatgaatctcgttagttcagtttcccaattgttaatgtttattattaattttctccctttcggtgatgatagattatcaaattaa

SEQ ID NO: 129970 - DNA, 798 bp, Cannabis sativa
tattttacgtaagtaagggcgttacaattgccaatcaaggcttgaccacccgcctctaccgtcgtcagctccgcatgccacacctgaaaaaggaaaagagattgagagagagataggagtaagagagagatagagacagagagagagagactgagagggtgagagagagtgagtgatcttgcctttgcgatgattggagcttgtcggcacggtcggtcctaggttaatttgggccttaggcaaaaataaaaagggaaattttcataaatatgagaattgagtatatagtttactttttatggcataaataaataacattatagggttatggttttttttttattattttttcacatttatatgggttttttatgttatattttcgttaacaaaagtagaaattctatatttgtaaaataacaataagttttgttggaaaattcgtcggtaccgaaaaaggcattggcatcggataaatcaatgtcgtcgaaaagtcaccggaaaagtcatcatccccgaaaaagtcaacgttgccggaaaagtcactggaaaagtcacaagaagtaaatatctcagatataactaaaaatataaccggttatatgaataaaaactaataactcaaaccggttataattgaagtataaccggttctgtaacataataaataaatataattaacataaaataactcaacctagttataattaaaatagaaccggttctataatagtgttataatgaataaaaataaataacacgaaagaactcaattaactggttataactaaaatagaa

SEQ ID NO: 129971 - DNA, 688 bp, Cannabis sativa
ccttaaaatatctaatagcgatatataatagcgatatataagcgatatatatatatatatatttatatatatataggttacttgtgttggatgtgtttctttcttatcatatggtcaatttctatattatgtattggtcggtcttagatcatgtttcttctattattttcttctgtcttttccttcttcacaagatgaggtgggttcctttgatgcgtgcccataaaaacttcttcaaaactattttatttttctaatattttttttaaaagaaagaaaataaaaatgattaattaattaattaagttgccctccaccataaatagaggtccacaatacaaaaatataccttcctggcttcgttgtttctcttacaaccaaatgatcagctatatatataattatatgtcatgatcaataattcaattatatctttcgcttttgtatttcaatgagaaaaaaaaagaaaagaaaagaaaagaaataaatatgcatgtttatgtttatacctttatataattttagtgcttttcgaaccaattcattactaggttatagctagcaaaacgactattaatcatgtataagaaagagttttttcataaatgtacaacaaaaataacataattacaaaaaatgtataaaaaaaaattattttaaaaacttataaattttgaaaacttattac

SEQ ID NO: 129972 - DNA, 760 bp, Cannabis sativa
gcttgctgtagcaattttttcgcaaaaattcagcaaaaatctttctgactgctcatttaacttgtaccactgctagatttttgctaaaaaaatgctgctgcaggcgaacttttccaaattaacgacaaaagccttttttcatacccaatttttgctacagaaaaattgaatcaaaaaattagaaaaacttcaaatccccaaatcacatccaaaactccaaattgtgctctaaaaatacctcaaacgccaaaccaagtgtaaaatctacacaaaaataataaatataaactagaaattgacaacagaaattaaacataattatttttttctgaaggaaatcaactagagttataagactaaagacaaagttaagaaacttgggttgcctctcaagaaatgcttgatttaaagttgctagctcaagttttggagaagtgctcatcaaagagcagcttcctcccataaagagcagcatatgccctcacatatgggtcttcattttcaactccctcaagcttggggagatatggaatttgcgagctctaatgttcaacttgactcttcttaaatgattgggcataatggaagccaaggaatgatgctaatggaggtggactgggtgctagcaaaaatagattttcatatgtgtacttatccattaccattttctcattatattgatacccaattacttgttgtatgagcgatggtggtggaattagcgtttcttcaatgctttgctcaaataatttctcaacac

SEQ ID NO: 129973 - DNA, 1081 bp, Cannabis sativa
tttttaagaaatcggtactgtataatgtgtattggtccacaagtcaaatgattttgtttttggtttcttaaacactgtaaactttgcctacttgatatacaagatttctacacattttcctttgacatttctacttatctagaattctaggcttcaagtaattatggctcgtgaatttttaatctttattacacttacatgtttctcatggagtcctcactctaatcaagcaagttgataagagcatttctcttacaactacatgactcaggcatgattattgagattaccgtgtagttaatcatgagatgaacaacacatatatataataatataatatccatttcagctgttttctactattttatgatctggtttaggatctgtacatgtttgattctctttcaccttcatcaatcataattaattcactttttgttgagacaaccttttagtctctttttattattattatttaatttgtttactgttaaacttattatattattttttcctataggtgatcgagataatgttgggatggagaggatggagagatatgagtcggtgcaaataataaattgatgatgaatgttacaaaatagacttttaactcattagacattacatgagctttgaccatattattttggacttagaatacatgtattggatattttgataatatacaaaatacattagattttattaaattgtaattacgttatttggagacattataaaatttaatagttttattataaaaaaacataaaaaataacattaacaatgttattattaaaaaattataacaatattaaaatgtaatattttttagtatataacataataataatgtaattaaaaattatatgattatattttaaaatgttattaaatgaatataacataagagaaataataatattaaaaaatagttattattaagaaattataacaatattaaaatgtaatatttttttatatgtaacataataataatgtaattaaaacctatacgattacaatttaaaaatgctattaataaatgtagcataatgaactataacactaaattaat

SEQ ID NO: 129974 - DNA, 1374 bp, Cannabis sativa
  modified_base (26)..(57): a, c, t, g, unknown or other
  modified_base (625)..(626): a, c, t, g, unknown or other
tggtattggataccacatggcctgannnnnnnnnnnnnnnnnnnnnnnnnnnnnnnngggaatttctgatgtttttcctgatgaacttctgagtttaccatccctgagagaaatatatttcattattaatttagcacgtcgatcaaaaccagttttcaaggcccagtacgaaatggctctagcagaactcaaagaattcaagattcaacttttgggggtgctttatctagggttttctcggcctagtgtgtcaccctagggaactcccgtattgtttgttaagaagaaagatgaatccttacgcgtgtgtattggctaaaaggaattaaataacttgactattaagaaaaaaaatttgttacctaggatcgatgatttattcaattagctttaagggaagacagccttctcaaagattgatctatgatcgggctataatcacttgagagtctgagaggagcacattcgaaagactactttccacaataggtgtgggcactatgaattctttgttatgtcctttggactaaccaacgctcttgtagtttttatggatctgatgaatagggtattcaaggatttcctcggcatgtgtgttattatatttatcgatgacatccttgtnnactctcaatcagaagaggagcacaagcaacatcttcaaatagttctgtagcggctacgagaacaaaaattgtatgtcaaagttaagaagtgcgagttttggctatctcaagtgtcttttctcggacataatgtctttaaagatgagttcaaggtcgattcagggaagattgaatccatcagggattgggcaagattgaagaccgttttagaagttagaagttcctagggtctggctcgttattgtcgtcggtttgttgagggtttttctaaaatgtcgacatccttaaccgaactcaccaaaaagaataagtggtttttatggacagacaagtgtgaagcaagctttcatgagttaaagaagaaattgagtacaactttggtactagccctaccatctaataaaaaaatgttcgtagtttactgtgatgtatccaaacaaggtctggggtgcatagtgatgcaggtcgatcaggtcattgcttatgccttttgtaaattaaaagaatatgaacagcgatacccaactcacgatttagaacatgtcgtagtagtgtttcctttgaagatttggcggtattatctctacgaagagaaatgtgagatttatacgaccataaaagtctcaaattcttctttacccaaaaagatttgtatatgaggcgcagacgttggttggagttggttaaggattatgactatgaaatcctttaccatcttgggaaggccaatgtggtggctgatgcactg

SEQ ID NO: 129975 - DNA, 942 bp, Cannabis sativa
atttagtattagtagatatcaaagtttagggactagggaccaggaccatggtttagtacataaacaatcagtgaaacagtaacattgaatgaaattagacaaaagtccttaagcctaacgatctcaatagttcatgaggaatttttaacgaccaaaaaagttcagggggcatgatttggtatatgtcaaagttcgaaagaaaaaattgctaattagcgaaataagaattttgataacatcacgtttatatctaataaattcatatatacactcgtctacactaattaaatatgaaagtgatgataaaattttatttttgttttattccattgataaaaatctctctttttggagggtatatatgatatagttacaaaatattttgatcaacttttcacagttttggaagaagattattgggcttatcccatgttttatccacgattccaactacaacttttcacagttttggaagaagagtaatcagaaggagagtgctattgtattatctcattttataactgatattggatcatttgattcaggcaaagatagcttgaagaatatttttgttggagataaattgatagttgatgggcttaatccttttaaaaatgagattggatataataacactagtgagcagtatttgaagttcattcaatggttatagcataaataaatatgaaaaggtaattttagttttttagttttttattttgtgttttgtatatatgtgtttttgttagctttctaactttttctttattttttttatatgtagcactaagaagaaatacgcagtcgttgatgataagattggccccctatggactttagttttattcaaattgatgagaaaatgtggttttacaggctctatacttgtggaaagttccttttagattctgtaagtttttttttttaattgttgtcttatac

SEQ ID NO: 129976 - DNA, 1414 bp, Cannabis sativa
tcaccttcattctctccataacaatcacaaaacagatttgagacaaagaagagagagtgagacagagtgactagggaaggtcaggagctagactcctttatatttgaccttaccggtttaaatcaaacactttgtactcataattgcttcatcaataaagaattatatgctgattgtttcccgaggatgtaggcacagattactctaatttgtgtttgaacctcgttaaagaaaggtaccattttagtttctgttcattaccattaaaagttcagtttataattcatgcttgattgattatccattgctggtttttgagcttacattttcagttctggttttatgttaatgttctttgttgtgtatgttcttgaatgaggtgaatttggatgcactacaaatggtatcagagcaaggtggagaagaggtttaacattcaagaactggttcaagattcaaagaactcaacctgaaaatgtcatcagcaagattcgaagtagacaagtttacagggacaaacgaattcagtctatggagaatcaagatgaaagctttacttgttcatcagggcatttcaaaagccattgatcctactcgacttgcagaaatcacaattgaaaagatcaaaaaggacactaaatcaaaggctcacagtgccattttgttgagtgagatgaagtcttgagagaagtctcagatgaaactactgcttcaggtttatggatcaaacttgcttccacctacttgaaaaaatctttggccaataaattgtatctaaagaaaaaactctatgccatgaaaatggatgaaagaaaagaatatcatttggatgaatttaacagaattgttcttgacttgaacaacataggtgtcaagattgaggaagaggaccaagccatcatcttgctcagttctttgcctaaaacctatgaacactttgtagacacgattctctatggaaaggatacattgactatgtcagaggtaaaggttgctcttaattcaaaagaaaatagaggattgaggggattcaaatgatgatggcatgtacattgtaagaggtagaactgacaaaagagaatttaagaataagttcagaagccatagccaatccaatgcaaagtccaagttcaagagtggaaagttttgttactactgcaagaaggaaggacattttcgagatgaacgtagagcattaaaggccaagaatgacagaggtaagagcaaagaaaggggtgaaactaatgttgcagaagatggatatgaatcagtagatgtgttagttgtgtctagcaaagaatctggtgaagaacggatactagattctgggtgctcatttcatatgacacctcacaagaacctgttttgtgaattcaaggacatacaaggaggaaatgttctcttaggaaacaac

SEQ ID NO: 129977 - DNA, 1430 bp, Cannabis sativa
  modified_base (27)..(29): a, c, t, g, unknown or other
actaatcagattgtaaagagttttatnnngggcataaaacccaacagttggcaggtttgaagttaacaaaagaagtaggagcccaataggtgaatatttacagtgattcccaactggtggtgaatcagatatccagtgagtatcagacaaaaggcgagctaacggctgcctatttcctaatgtcgcgagaattgttgccaatatttaagagttacgacatatgacacatgccaagggaacaaaattcatttgccgacatgctagctaagctggccatagatatagagatcgtacaacacgcaatactccttgctggtcatctgtaaaaatttagcattgacgtccacggggtgaatgccataatggataattcacactcttggatagcacctatttaccagttcttgagcacgggggaagtccctactgatcgggctacctgcagaaaaagccaatatcaagctcttcgttatgtgatcatggatgggaagctatatcgtaaggggttgtctatgccatatttgaggtgcattactgggatggagattagcgaggtaatccatgagctccatgaaggtttctatgaagatcatacttttagaccaagcgtttccaagaaaatccaacggtaagggtatttctagaccaccatgaagaaggattacatggaatatctaaagaagtgcggccatatgtcagagattcgctaaagtcctgtgtgcaccacacactaaaatcacacaagtgagaagtccttggcctttttcagtttggggcatcattttagtaggttctctccctgtaagtaatggcatagtgaattatgccattatcgttgttgactacatcacaaaatgggtcgaggttgaacctattaatacgattacctcaaagaaggcactagattttgttgtcaaaaacattgtttgccaatatggactcccctataatattgtgtcagacaacgagaagcatttcgacagtcaacatttcacaaacttctaggtacaacacagaatcgtgaaaagtttctttgtagtagcccgaccacaggccaatggacaagtataggctgtcaacaaaatcctcaagaccacgttgtagaagaagatgcaagcttgtaaagctcaatggccagaggaagtccctcaagttagctaggcttatagaatgaaagaaagaattttaacggggcatatgtcgtacaaaatggcctatgggtgcaaggaagtaatcccagtagagaccatggtcctatcccatcagtgagatccttacgacccttctcgcaaccactctctaaactaggactcactagacatgacagaagagctacgggaacaaccgcaagtctagctcaaaatgtaccaaggaaagatcgcccgtcacttcaagtcaaaggtgaaaagttgttccttcaatatcagtga

SEQ ID NO: 129978 - DNA, 865 bp, Cannabis sativa
actttcaactcttttcctcattttatccttaagaaatcctaacaccgcatttttattgtgtttcatgatgttaggcagccccaaataaaagtcatcatctccagcttcatgcatccccataatagagcaaatgttgtcccgagtagacaaattagtattcttgctgaagaatatggacgacttttgacgattcactttcagactagaagcaagttcatacttctcaagaagtgtcataatcctttgtgcttcactttctagagcctgacaataaaggtagctatcatcggcaaaaaacatatgagtgatgtgagaagccccccgagcaacttgacaacctttaatccaccctttagtttcatattttcgaatgagagaagaaggaccctcaacacaaataatgaaaagataaggggataaaggatcaccctgacgtattccccgagagggagcgataggacccaaatgttgcccacccgagatgatcaagtatcggacagaaacaaccaaagccataatcaactgcacacatctgggatgaaaccccagcttcaagagcaacacttccagaaaaggccattcaactcgatcgtaggccttactcatgtctaaacttcaaagccatttgtcccaccttgcccttgcttttccttttaagataatgcattatctcaaaagacaccaaaatgttgtctgtcataagtctaccaggaacaaaagcactctggttctcagagacaatatcagtcaaaaacaacttgagtctattagccattaccttagagatgaccttatagaccacattacaaagagcaattgggcgaagatcacccatcctttcaggattcttcttcttaggaatgag

SEQ ID NO: 129979 - DNA, 1283 bp, Cannabis sativa
acactagctcctaaatcaagtaaagccttgttaataatgtgatcaccaatgatgcatgaaattgtgggacaaccaggatctttatattttacatgagttttgtattgaattatagagctaacttgttcagttaaaaacgccttttttggaacattagtgtttctttttatagtgtaaagatccttcaagaattttgagtaggcaggaatctgtttgatggcatctaagaatgggatgtttatacttacttgtttgaaaacttctaagatgtcactatattgatttcctttcgtgattggaagtaatctttgtggaaaaggagcttttggaatagtaggaagaattggaacatcatcttttggtaagtcatttatattagaactttcaggttgactcttttcttttctttatctttctcaacttgaggtgtataatcaggtttcacaatattctttccagacctaagagttaaaatagatttggcttcttcattgtgactaggcattcctatttcatattgacctttcatatttggaatgggttggctaggaagtttgcctctttctctttcagtgacagtagttgcaatttgacccatttgagtctcgagtttggcaatagattgagactgattttggaggatttggtgggtagattgcatgaactgttgtagagtgtcttctaaagaaggttttctttgttgagagtaagactggttttgttgggcatgactttggttcggcatgttaaattgttgcccttggttgatttgaggctgattttgcctccaagaaaaatttggatggtttctccaattaggattatgagtggaggagaatggactttcaaaagtcttcccatacgaatgtaaagcattggcttctttagaaaatgtttcatggaaagaaggacatgactgggaattgtgacaacgacataaagaacaaacatctttcttagattgcacatgataattcatagtttgacttattactaaggcttttacttttctctctaatttttcaattgatgttcttatgtcaaagtcattttttacaacatattttcctcccctctttggtgaactgtttgatctagacctaggatcataataattccactgttgggaattaacagataactcttcaagagcatcccatgcttcttgcccttgcaatttagaaaattttccaatatgcatagattgaatcatttgtcgatttgtaggggttaaaccatcataaaaatattttactaatctccatttttcaaaaccatgatgg

SEQ ID NO: 129980 - DNA, 865 bp, Cannabis sativa
aaaactagttacattttctatatcggttcatgttagaaattatcttaaagttgattatattaaaaaataaaattgttaaaaattgagctaatggtcctatttttacaattttagaaaatgtagggtcaattttttcattaaacaaaacagatggtccaatggtaatttttgcaaaacacagggtctaaaatgatatttacccttgtcacaaacaagacatataaattctaaatcattgagtgtagatgaaaacatgtacagttacttcaaaatcttcttttaataaaatcaaaatagattacgaaactagagaaaaattatagttttacaaacattgggtacttatgccgctaaaaaaattattaggtttatgtcgtttacaaactcaaaactttggtacttctgctatttaaccaaataagtatttgtttattatttatattatatgatgattctgcatccctctaaaagaattgtacttatttgtttcagcatctaagataaatatagtctatttttttttttatgtatgttacaattatttaagatatattgtaaaattttgaaaaatttagaataatttacaatgtaaaaaataatattcaaacaatctaattttacacatatataaaatgaaagagtcacacgtacaaatacaatagacaatttgaacttattttcggcgcattaattttttttttttaatttcttaaaattgtgtaagatgtcaataaaaaattagtttgaaaatcctcttaaatttaaaaacagatagcaatgtatcggtacatctttaaagggctcgtttggtatgtcgtattgtattgcattgtgttggattgtattatattatattgtattagta

SEQ ID NO: 129981 - DNA, 847 bp, Cannabis sativa
ataactgtatttggaaattttgatgggcttttatataaatcaaatgattattacaaaaaaaaaattctccaatgttcaaaatttgaattctacacttaaaaattgattttgcagtttaatacatattcgtaattaaagtaagtttcggccaaattctctaattttatatttttatatgtgactgaatttttataatccgcaagtaatatatcgggtaaactacggaatctcacatcgcttggataatgtgaaatatgataactctaaaactatatatagatacaagactacacaattgaataatggttaaatagggattgatgggtattacaagatgcttcttctttcacttgaaaactccaaagttaagtgtgctgacttggaatagcatgatgggtgatctactgggatattttcccacgatgcatgcgagtaaggacaaaacacgctggagggactcattttagtttgtagtgctagtcgtcattcccaggaacagtcaaaatgacatactcgtgcataagagtcataagtttatgggtggatgcccaatggaggcttgaagatggacactaaaaattgttatcaaaagccttgatgtagtcggaagtgtggctgaagaggacgttgaaccccataaggaaggtgactgtgacagtcagaactctatgattcgctagggaaaaactgagtaagctatgcaatcccatatcgcttaaggaaagttaagtttgatgatcaattcttaaattgtgtaggtgttaattctatttttggcatatttaattgaaaaaatattttattatttattattattttcggatggtatgtttaatttggtttcctt

SEQ ID NO: 129982 - DNA, 608 bp, Cannabis sativa
aatttgaatcacaatatttaaaaatgagaacaatttctgttacatagttatatttaatataatagagatatacattatatatatgtatctatatataaacgaataaaaaaaaaggacttactatgtatgagaaaaatatgaggtattgggtttaatgaattatgtgcatgtgtatacaatcttaaagaaaaccctacaacaaaaatatatgttgacaattggcgaaaacgtagctattactatatattagttacctgaagtattcttatttgggactccaataaatgagcattgtatatataattatcatttaatatctcaattatatgtcattcaaatataattatatttgaattattaaatgataaagatatttgataatttaaatatctcgtactgcaataatatattaagtttcaaatctcaaagttaaatttaaatctaagatattatttaatatatgataaataattattatttcctaggaagtaattattaaaaatagaaataatcgctttatatataatgataataataagggtaaatactattttagaccttgtgttttgtaaaagttactaatgggaccttctgttttgctaaatgat

SEQ ID NO: 129983 - DNA, 792 bp, Cannabis sativa
  modified_base (28)..(51): a, c, t, g, unknown or other
  modified_base (719)..(736): a, c, t, g, unknown or other
gtaaaaaataccgcctggcagtattttnnnnnnnnnnnnnnnnnnnnnnnnataccatgtaaatttcccaaaaaataataagtgcagaattcacacactcaaacattgatcttgatggttgtaatgcaattaacatatttatgattcctggaccttgtgaaaaattcaattcaaactctccatgtatgatgcaaggtagttgcacaaaatattccccaaaaaaatttaatgattaaacaacaatagacacaaatgacttttcaatctacaaacagaaaaataaaggtatccacattgaatagaagtattctctggccttccctttttcgagactgtgtcaccagcccttgtctccacagaggcagtcatggtggtaggcacacattcgggttgttcaagttattagtaggtggtacttgaacatgggaatcaactgcaattgggtcacgtggctcaacagatgttgatcttctcgtctacaccatttttcaatgtagattgtgtggattgcaagggattttaggatcaagtttgagagtaattttagctttcaataaaattagaaaaatattgactccatttttagtcaacgatggaaaattatgaaatacgacgatgtgattgtaagataacaaataaaaataatttgaatgatcaacgacataggagaatttatagaggtttggtcttagttatttatgttgggttttatgtcctannnnnnnnnnnnnnnnnntgtaatctctatcatttaaatatcaataaagagacagaagtattttcatcacttat

SEQ ID NO: 129984 - DNA, 771 bp, Cannabis sativa
ctgaatgccatgaatgatgaaatgggagccttaaagaggaatgttacatggacttatgtacctcttcctgatggtcgaactcctattgggtgtaagtgggtgtacaagataaaactaaatgctgatggaactataaacaagcttaaagctaggttggttgccaaggggtttcatcagcaaccaggttttgatttcacagagactttcagtcctgttgtaaaacctgtgaccattcggattgtgttgtctttggctttggcaaagggttggtgcattcaacagctagacattaataatgccttcttaaatggtgatttaaaggaagaagtctacatggtacagcctcctggttttgaattgcctgaagcacctcatttggtttgcaagttaaacaaggcaatatacggcttaaaacaagcacctagggcctggttcgagaagttgcagacctgcttgttgtcttttgggtttgtctcctccaaatctgatcacagcttgttcatcttacatacatcaaagtctatgattcttcttttggtgtatgtcgatgacataatcatcactggaagtgatgctgatcaagtctcttctttgattcaagctcttgacaacaaattctctctcaaaaaccttggcacattacattattttctgggtatagaggttcagcacacagattctggtattcatctttctcagggccaatatgttcaagaactgttagctaaagctcaaatgacagatgccaaaccagcccctacacctatgaca

SEQ ID NO: 129985 - DNA, 673 bp, Cannabis sativa
  modified_base (345)..(345): a, c, t, g, unknown or other
taacttaattgttagatttagggccattttgcatcttggcccatttatatatgatgagtttatgtgtgattttatatttttttcttcttatcattttaattttttgacacatttttatgcgtaatggactaatatcccataagtatttgggataagttgaaaactactcatttttattacatattaaccaattataactttaaaataattttaattgataaataccttcttttataatcaaagtaccaaatataacctcacaaaacttatcaaaattagacttcctaatatacataatgggaatataacttataaaagtaggtataaattaaagagtagtaaaanaaggtaaaaattaaaatatgaaacaaaagagggtatacagtgtaatttcctctaagtattttattaatatgttatttttaacaattaataaatatttttttaataaatgttttaaggtgtttgtacaatgcaccacactaaaataggtgtacctacaaccctttactgtttcggcatctaaaataattttttagtttaatatttttcgaagtcatgcatgttataattagttaagacattctgtaaaattttgagaaattcgaaataatttacaatataaaatttaggctaattagcaattttttctcccaaactttgacatatacca

SEQ ID NO: 129986 - DNA, 1014 bp, Cannabis sativa
  modified_base (955)..(974): a, c, t, g, unknown or other
ccacagccatttcatgaccaaccctttgtttcgcatttccaaccttccaatacccagtccacccttgtccctgcttcaacaaacttcatctcatgatactaagtgctcaccatccgtggactcgctgccttcccaaaaaaactccctcaacatcttttccaatgctttgatcacaacctttggcgctttgaacagtgataaaaaaaatagatctggagtgaagatagaacaaattgaataagcgtcaacttgcctcctttggataagtaagcacatttccacccatctaacctcttagcacacttatctaaaattggttcccaaaaactccagtttcttggcgatccgcctaaaggcatctcaagatatttcatcggccagcttcctatgggacactctcctctcatacatgcgaatccccagcaattggcttttactcaaaattcactttcaacctagaaatagcacaaaagggactccactaacctcaccattataaataatgagtcctcatcattaacaaatattagggtatcatgtattttttcttttctcaccacagagccagaaaagttacctgattcagctgctttctccatcattctcccaaggacatctactaccaaggaaaacaagaaaggagataatggatctccttgtctaaggccccgaggaccgttaaatttttccctcggccttccattaatgaatattgagaagcatgtcgaagagacacaccctttaatccatttcctccaagtaactccaacgcctttgttacacatgactgaattcaaaaagtcccactcaactcgattgtaggctttctcaaagtcaattttaaataccattccactcttgcctctgcttttgtagtctttgactgagacagagtccagtatctgtctcccttcaataaaagtcgattgagtttccatgatagtctcctccaatnnnnnnnnnnnnnnnnnnnngagcaccttagcaatgatcttgtaaacacttgttatgagg

SEQ ID NO: 129987 - DNA, 699 bp, Cannabis sativa
tcatcttggaagagacattctggaaaagatagtggaacacaggctggtcaattcttccagagcattgagggaccctgacatatttactgacgaaacactcattgttaagatccaacaaattacaaaaactcattctatccatgggattggtgttaggagaagacaagatggaagacttggcaaagttgaccagttgacccgtggcacgattgtggatggagagaacacatgatagtgttgtttcctaggtgatctgatgtacctaacatcctttgttacactaaaaatgccctttcgcattttgtacattggttatgaaatgaactttgtccctataatccatattcatggtgctatcgctatctcgtctgatacttccttgcttagtctgtttgtgttaagagggcaaagaatatcgatgcgagtgtaggaggacgggcgcaggcgagcggaacgcggcatgggtgcaggtgcaggcgcgcggctgagtgtgagcgtgcaataggggcgtgggagcgggcggtcgcgtgggcacaggcggcgcgagaataactccaaatattacacttagtaatctttgaaggtcaacacaacttcatactttattttttattttttttttctttttgagttagtgacagttaaaataataatttattttttaaaagttaattgggcggtttgggtcaattttcaacc

SEQ ID NO: 129988 - DNA, 720 bp, Cannabis sativa
attgggaaaactgaaatcacttgtatgttttgtgagtttagttaatttcctaagttcttgcttatagtgtatcatttgtatgaaattgatattatgcttaatctttttttatgttgactggaaagtgcgtcttgcttgatctaagctaggatataatttaaatttttgaggatcatgtttggttttttctgagttcgttttgcaaatctcataagggttgcttctgttagcattaacaatataagtggtatggtatggtaacattttatatcctccttgtgcttcttacggtggattctttttgtagtctgtccttgaagtgttatatgttgaaatgcttgtctatgtgtcatttaggttgtataacattgcactgcttgcttttatctcattttttttagcatctccatcaacagaaatttaactatatattttcaaagctaataattttacctgtgaattatatatatatatataatatttatataggcggttgaaaaatgtatttactgcaagctcttctttttgatttattattaatatgaagtctcttttaatcttttaataataattataagtagagttcataagtacttctaatattaccaattttttagtattattaataacaatgtgtatatcataaatttatatatacaattatgacattcttaacaagtatttttataaaacaaataataaaaaataatttacaattaa

SEQ ID NO: 129989 - DNA, 894 bp, Cannabis sativa
ctaccccaatcaatctccgaagctgtgaacaactctctaaaataatcttccttttttattttcattttaaattagattacaatatttttttattattattgttattgttctgattttaataggtacctaataagttcccaaactcaatgggaattctgctaacccgaactcattcaggattaagcaaagcaagaacatgggcggggcagagatgggatcataaataggaaatacaaacgggattaagaagtacattactcgttaatatccacccaattttcattcctacccaaaattgttacaagtacatagcttatgattttttattttttaattctatcttgtttggagcgaccacacaattggataaattcattcagtgttgtaattaaagcgttcggtttttgataacagcatgaaaccattaggagctgaggaggcaggaggttataacacaatgttacaaatagatacgaatagacacaattatggaagtaacaatatatatttatttatattatattaggtgtggttatatatataacaaaaaaaattattgtttttttaaaaaaaaatattacaatttaagcttaaactcactatgtatatctctcttatcttttattttatattaaatgtatctatataacttaaagttttttttaatattgcaattcaaatataaactccattacacatatttttaaaaatatatttctatattattatttaaaaaaaatagaaaaagtgtataatatttcaaaaataataaaaagtaatatatataaaattaatagtgtcatgataattaaactaaaattataattaacaataaatttagaatattattatattttatttttataaatgacacttaaattaaatatttttttt

SEQ ID NO: 129990 - DNA, 997 bp, Cannabis sativa
ataaatttattatattatattgtttgctttttctttttaaattttgtaaattacattattattacattgagtcttgtaatgataattatatatcaaaagtgtaactctcattataattacacttcattataaagaaaaaaaaaataatattgtaataaaaatatcgtaaaaagtcaaaggcttatattactttttttttaatatttaaatttttttatttataaaaatatttcttcactaaaaataatattaaacagttttttccatttatagtttattaagagttattaaaaaaaattatagttaattttttggtattgtaaaactaattttttgttgtatttttagttgtttttttattgaacaaaatatatttttataattataaaattttacaaaattatttttataattaaaaattacaaataaaagtattttttaaaaatttctcaataatatatacaaagcgataaattgtagtagtactatcatattattattattattattattttgaacatactatcgaactattatttagtcaatgtgaagtttaatattgttgtttgtttagctctgaaaaaacgacaaaacgatgtttgttagacagacaaaccacttgtggctataaattttcaattcttttttttttttttgataataataaaatcaccccattatatatttatatatataattatgaaagatgttataggacattggtgtcaaacgtaataaaatgtagagtaattggtgtcaaacgtaataaaatgtagagtaatttgtgaaataacgtttttaactggttaggtttttaccattaatttttaattttaaaaggagaattttcataaatatgggaattgaggtatagtttacttttttatggcataaatataaatagttatgtgtttttatttttttatttttttatatatttatatgagtttttttatgtcatatttttgtaagaaaaaaagtagaaatctcatattaa

SEQ ID NO: 129991 - DNA, 688 bp, Cannabis sativa
ttatgtgtctagtaaaaagtttagtagctacaggtatggaatcggaaagcacatgccatacaaaatacttcaccttagggggcacaaaagaagaccaaagctttgacagaaatcgcttattatcattaaaagaagaggaggagggaatatctctagagctcacagcaagatgataagcagtttttacactaaaaataccacagctgtctttccccgacaccaggtcatcattatagctatggcaatcaatgggaatatctaaaatactatcaataacgttgtcatcaaaataatgtctcaagatgccaagatcccaggaaccagagggggaaataaaaaaagacagattgggagaagggagaggatgtaataaggagttagaatttagaccaaaatcaggaagcaaacgatcctttattgtattgatggtatgtccattccctattttccaattaagccctctctttagcaagtccctaccccaaagtatacttctccaggagaaggaaggactatgatgacagacaacatccaaaatggaagaatggagaaaataccgagctttcagagttagactgagcaagaaatttggacatttaagaattctccaagcttgcttagcaagcatagattgattaaaatgtgtcaaagacctgaaacctaacctgttgaattttgtgccctaaat

SEQ ID NO: 129992 - DNA, 961 bp, Cannabis sativa
ttattttatttccttaattagaaatattctaataagaaattctcattcacattctctttatctcttcttcttctttttataacaattatatttttgttatcattaaattctctactctgttggtttccccatatggttattattattttgtttttgaacaatacgtggatggaccatatggtatgttgaatgtatttatgaaaattgtctagcaaactcaagagaaaaacaaaaaaagtttatctagcaccttaacttctgtggtccgtgtgtatctgccaagatagaacgcaatcttgactgactcaataaaaacaagcaaggtaggtgtttttgtttaaaggttcattttcgacaggaccacccataataatcgtcgagacataactatggcagaattagacttaaaagaatatttttctatgcacgtaataagtactttaacatattgttgtaaatttgatcaattttgactttataccatcgtgttttggtgttggtacaatagatgaggtcaacacactgcattggtacctcttggatctttcatatatatttggggtcatctctgttgtggccctaatctaattgagatgatgttggagatgaggagtttgcattacaaaagttttgagaaaacactgttggattaaaaatcctcaatataagctcatatgtatattagtgtattgctatttaaaggttggctcaaaaataaaatgatcattttagtaattgtgggtcattggatattaaagtttcatgggctaaatgtgcagatactctaagcgatatttctaatttaagcgatatttctaattagcccctcaattagaaatatcgcttagggtatctacacattaagaatacttaaaattaataacctagctatgagattataaattggtagtggtccccaagaaacaagagccaatttctattctcatcttcccccatcaag

SEQ ID NO: 129993 - DNA, 969 bp, Cannabis sativa
aaactgcccaaaatcacgagggcgggacgcaccatgcccaagccatgccgcgacacctggacgaacccccaggttccatcagttggggcaggccgcaacatgcccagagcatgccgtggcatctgtgttccaaacccagaaaccagcaagctcaaacacgatttcagcaagaaaaatccaatcttttcaccccaaattctcaacagaacactcagttaccaaatattgttgctagcaatcaacaaggaattaaaactcatgtttcaaacaccaagttccagcagtaacaacacacaaaactcatgcttcaaaactagcaatactcaagctcaagaacttgagctaaaaatcaaatactcacaaatattttgcagcaactataaatcaaaatagcatgaatctcaagctagaaaatactctaaaaattacaatccaagctcaacaaacatgaatcaaacaatctctcatccaattcaccaaaattaacaccaaaaccatgaacatgcaacaatacagcacaataacttaaaacatgctttaaccacaataaattcaacaagaattcaacaaacaatttcaaataattttagcaagaaactacctcaattccttacacaagctatttccaagtcttcaacacaatttttcaatcaacacttctttaattcaagctagctcttcactaaattcaaattgaaaaattgagagggtttgagagagggagagggttggccaagagagagtgaaaccaaaatgttcctttccaattctcaaaaattcaacttttattaaaataaaacaattaaggtcaaaagaccattttgcccccaaggccaaatatcaagctttacactcacaagggcaattatgacaattcatacataaatagatcccaattaaattttaggttatcacatatccaataaaatgccaaataaacaaatttaatttgcatttcgagcccgaacc

SEQ ID NO: 129994 - DNA, 679 bp, Cannabis sativa
  modified_base (636)..(653): a, c, t, g, unknown or other
caccttggccataggacgacctgaggaagcatcgccagacggctcttctgcaagatccctcattctggaagccatgtctacaaaaaaagaagtgacaaagtcagaatacaagttaacaagtattaaatgtaagaaaaagtaaaaaagtagtattaacaactaccatccaagggaggatcatccttggaggaggaattgtctaagtcgctatcactaatggttgccttgcccttgcctctagaagcacgcaggggcgagtaggcctagcagaatcctgacctataggcctaatcattaaagaagcatcactaggagtacctccgtgtgccaaatgccggcagaggaccttgtccctcctctccatgatcttagcaagcctggagaggggaatgtcatcattcgaattaggtgtatgcatgcccccgggaaagtttcctctactaccggtaggggtgttcatcaaactgcccaaaccgctcaaaacgcgcgcaccgcaccacaccgcaaaaaaaatgcggtttgaaattctttgtggtgcggtcgcggtttgaatttttcaaaccacgcggtgcggtgcggtttgcggctttaaattgttaatgtgcggttcaaaccgcaccgcaccgcacattatannnnnnnnnnnnnnnnnntttatttaggtccaatatgtgaattt

SEQ ID NO: 129995 - DNA, 946 bp, Cannabis sativa
aaacagacagccacgggttcgggtggttcacggcaaggggtggggttaaaggttcgcggtgaacctcatatcttgttcgctccatctccttcggggctcaaatctccagcaatctctctagctcttcagttctttctatccccgactttatttctcatgcggattcggtgtgcacgacattgacaatgccagtagcactgaagtttttgtcgagaaatggcatgccgatttcccggtggcagagatggcggaggtggtcatgatagttttgggtattggatttctcggtgcgtaatcagattagaaatcatggggctagacttggattataataatgaaacccacccattttgtatttatctttttcaagttttggataataattagtttttgcttttttcttaggctagagctcaagagggatattcttcaaggaaagaagctgagtcgcttgttgatgaggaaaattatcaagaggaagtttatgataataataataataagcatattatttttactgatcaagttgtgcagagatttcttgtttgtaaaacttttattatattaaaatattttaatctgttattatttttttaacttggaatgtaatattaatggattattaatttttttttatttctatataattgttgatatgtattgaatctcaaattggtatttattaattatgtggttgaatctaaattggtattattaattatattaattatcatagtaaattttaaatttgaaaataattttatatttattaatttatataaaaactatttaatattaaaaaaaaaggtgtgttttatgtctagtattgttggactaagaaaagaccctttttatgtcccaggctattatgtccaacacaaaagggactcgaaagatttatctagtccaatgttgatggacttaaaatggggtttttctagtagtg

SEQ ID NO: 129996 - DNA, 946 bp, Cannabis sativa
tctatgatttctggaaggctaatcttgaaggaaattttgattaccttggtgaatccaaggagatgtatcttaattactgtgcgggtcaagtggccaaaagaaaccctgaggcaaccacttttacagctcaaactgactagagcaacgaaacccctgctactcagagtattaaacctccggccccctcagaccaaagtgattcgtaccaagagattgggactcctgccgtctaaataattttctctttttattatatatatgtctgttcggcccataggccttttttgagacaaaaatgacagtccaatcaatttttaaacttggcttatgttttttgtattaagacaactggctgactgggcagcttttaatcccagatttaccgtgctgtgtcatatttttcaatgaatatcgtcccttgttttgataattgtctgtgcaactgtgtttgtttcttcttgagcttgttattcacttttaccaacgctttgtacgtgtatagttaccccccaagtgaccgagcagactgttgactctttggtcacttgtattttacaagtatagtttgttgtctgttcggtaatttggatttgagaagacctttgtacgcatttagtggtaaattaataacttgctaatataattgacacgagcagaatttaaatatacatctttattcattcattggtcggaatatttttgttaccgtagtaacttacataaaagatattacattgatctaatccgatctttagctaaatttaaataaaacaacatgcacttaaaagaaattgtactttcaaaggtggtcaccgacctaagtacttaatcatttcatccgaacctttagacggggtccgcccagaaggccatttacttaaaagtaagtaaatgttctttaattttgtacttagagtggtcatccaacctggtacttttattggta

SEQ ID NO: 129997 - DNA, 658 bp, Cannabis sativa
acaataaaaatgtaaccattgaaacctcttccatatatatatatatgctttggttcatattttttggtatagtgcttttttattttgtttacttttatatatttttttttataacatgtaattaattattttcatactaccacaactattaattatttttgtcatttacatctcatctcaatttttatgttttttgtcatagcttaatatttacaatatttttaaaaagaaaacaaatggtgtaaattattttcttactaccatatttttgtcatagcttaatatttacagtattttcaaaaagaaaataaatagtgtaaattatcttgtttttcgtcactttagcttaatgtttacactatttttataaagaaaaaaaaaataaaattagcaaagataactataaaataactaataatatattttaattattcatttcatatatttcaataatattaattattctatttacaaaacagtattattatcttactctttgagaaacatagtgttgggttaataaatttaaagatatttataatcttctattttgagagtaattctaccttttattataaaatatatatttatttttattttttaattatgttatacatgctattttttttttttttgaattaatcaggagatttattaa

SEQ ID NO: 129998 - DNA, 1100 bp, Cannabis sativa
ttgttgacggttttaaacagtctaaaataggcatagccaactattttctaccgatgcatattatttctatccaattttgtgatagtataaaggttgacgataatattataccactgactatttttaacagtcaaaaaatcttttagtattaaaagtttagatatataaaaaatcaaaatttattttcttacactgtattgactacaacacttgctagactgaaggtttttttttcaataaagagtcgaagtcttatgttaatttaatcaaattagaaaaagtatacgtaattgctcttaaatgtcaaaaccgtgttgtgtgtatagcaaaacataatcgtttaaaatatttatagtaaagcactctacacttttaacaattttttttggtagggtcatacttttagaaaaactataatttaaatttgttaattatcatagtgtatatatatatatactgtagtaatataagaaatcacaaaggtgtttttgggtaaaattatgaataattttatggtattcaaaatagactttaaaataacttttacgtgcttatataaattaaacaagcttcaaaatatcagtttcagctttttagcatatgaatggattacaatccaaattatatatatacatatatttgagaaaatatagtgttgtaagtttgtgcgtgttgtgctgactcgatctatatttatttgtgtttttaaaaaatggatcctatcataccgtgtcacaaaaaaaatataggtcatgtcgtgttgtgtcaatatttttaaaaggtaggcccaatacgacttgtaagcctggtattttcatgcagtgtttggaatattcgtgacgtgatttgctcataacggccggtctgtatttcttaaataggtcaactcgtttttatatatatccggacttaaattcattctctactttttttttttacaattactaaagtatatatattatagctttagttgtattcatatcacttttaaacaatattttacagataatcatataaaaaaaattattaacatcattagaacttaaatatttacttataaatactcaaatttttacatctcaccctataaataaattaat

SEQ ID NO: 129999 - DNA, 709 bp, Cannabis sativa
gcaaaattaggttgcaatttgcaaatctctattaatcaacttattgcaaatttttattaattgaattttcttgagtggaaaagttagattgcaaaaggttatgatttttttggagtgaaaatagaaataaatatcataaaaaataaaaattagtatttaccatcatatatatgtgtgcaattgaaataaatattatgaaaaataaaaacaatttacattgaaaatgaaaacaatttaatctttaaaaataaaaataattgtacctcaaaatagaaacaactaatatttaaccttttatttcctacatatattaaaagagtcaataaaaacgattgcatcttttattcctttcatgcacctatatatatgggtaaataacgtcataaatacccaaagtttcaaatttggaagtagcataatcccaatgtttatttttagcggcataagtacccaatatttgtaaaactataatttttctctaatttcgtcaatacaaactctgttatttttttaaacagaccacatataaggttgagattcttcatcattcggtctagacagaaacatgtagtatcagtaacttccaaatgtacatttaataaatccaaaatggagtttatactgacaaaactagaggaaaattacagttttacgaacattgggtacttatgccgctaaaaataaacattggatttatgccgcttacaaa

SEQ ID NO: 130000 - DNA, 741 bp, Cannabis sativa
aaaataatttccaacaataatccccttgggttgtctcgtgaagtccagcccacgaaggagacaattttctaactaaacagatcagatttgggctgatttggtgaacattgtgtgctttgattgtggacaattagctatgaattaatttcttgattttcgtttcaagaaacttccccatttaatctaatatgatgcttaatcgagttgtagcatttcttatttccttatttgtgtgtaggaataaaaagggaaattgaaagggtcttctaggagcaatatgtctcactctttaggtctcatggtaccaaaccttcttctgggaacgattctccaatggcagaaggctctatggtcgagaagctgggatatgttcctaaaaggacttttccattttggcttggcccagtttatcattgctgagggacctactaatgggccttggattctgacttagattccacgtgtccactactggaaacgtggataatatttactcctaagctttctagaatattgtgtatggtggaatcttgcttcactccttcaatatggacatgtggaggttgaggcataaaattatgaatttttagctgttactcgatcgtggaagatggcttccgtctttgagtttggtacatccacgtgtgaatcgtctgatggtggaagataggaatgtcaatggggcgggtcagatctgatccgactatgatccgaccaaatcaagatcatgtacgaatatgc

SEQ ID NO: 130001 - DNA, 1765 bp, Cannabis sativa
  modified_base (1715)..(1717): a, c, t, g, unknown or other
tggtggggcatttcaagaaagattgccatcagacaaagagagaagaataaaagccagaggcgaaacccgtacctgctcgggtgtttcccatcactcaagccgacgctatagtcagtccttctctggtgacatgtcagctttttgtcaacaactcctttaatactttgttatttgactcaggagctacacactcatatgtggcgacacagataattgatcttttgggtaggccatgtgattttattggaagagggtttggaaccctatttcctattggggagttagttatctccaataggcgagttaggtctaagttagttatggtcaaatatagggagttgagtgctgaccttaaagagctggaattaacagaatttgacatcataattgggatggattttttgtccaagtatttggccagcattgactgcaagcagaaaattgtaatttttcagccagagggtgaggatccatttgtttatgttggatcggttcaggggtgtcgagtccggactatttcactgttaagggctagagatctaatacacaatggatgtgtaggattttttgcggttgtgattgactccagtagacctgaaacatttgggcctgaagtagtcagagttgttagagattttctcgacgtatttcccaaggagttgccgtgattaccgccacaacaagaaatagattttgtgattgccttagcacctggaattaaacctgtttcaaaggctccgtatagaatggctcaagcgaaactcaaggagctaaaattacagcttcaggagatgcttgatttagggtttatccgacctagtgtaattccctggggagctccggttctatttgtgaacaaagaaggatggttctctcaaaatgtgtattgattatcgggaactgaacaatatgacaattaacaacaagtatccatttccaaaaattgatgatttgtttgatcagctttagggaaagactgtgttttcaaagatggacctgcgatccggatatcatcaactcaatattcgagaagaagatataccaaggactgcattttaaactagatatgggcaatatgagtttttggtaatgtcattcggattgacaaatgctccagcgacttttatggatctcatgaattgagtattcaaggatttcctcaataactgcatcatagtgtttatcgatgacatcctcgtatactgtcaatcagaagaggagcatgagaattatctttgaatggtattacagtgacttagggatcataagttgtatgcaaagttcaagaagtgtgaattctggttgtcagggaggtatcttttctagggcatattgtcagaaaagatggaattatggttgacaagaggccaaaatcttgtgacgaaaatttgaagttttctcagtttagtagggtattatcgacatttcattgaaggattttctaagatttctatgcaactaacagagttaactaagaaaaatcaacgattcataacatccgacaaatgtgaagcaagtttctaggaattcaaacagtgattgataacagcaccagtgttggctctaccatcagatcgagaaaagtttgttgtttactgtgacgcatctagacagggtctgggatgtgttctgatgcaagtttacaaagttatagcatatgactcccgtcaactgaaagattatgagtagcgctatctgttgggttttgtgccctnnntaaaacccatttcaatataatcatatttaattaataaagattagaaat

SEQ ID NO: 130002 - DNA, 923 bp, Cannabis sativa
tagggcacaaaacccaacaaaaggaagaggaagatcctcgagaaaaatttccagagtaaggaacacgattagaggagtaattggagaagttaggagggagaaaattttggtatgaagagtagtattgacctctttggggaacatgatatttgaaattcctgttgaaatgagcaatattagcttcaagttgcaaaattatcagatgattttggtgttgaatcagcaacagtaagattaacagtgtgatcaacttctttgtcaaatttctcaatcctggactctgaggctaagagcaaagcttcaatctcagcaatagagtattcctcaattcgagtgttggatgagattatgaacgtgtcatattcactcgtcaatcccttgaagattgctgcaatatgatctcaagctgatagagtctctccaacagaggccaataaatcaacatgttgcttgactttcaatggatactcatctaacgacagtgtgcctttcttgagattttgaagtttggttttgaactccagaatcttagaagagacttgaagagtgtaatgcttttccaaagcacgccatatctgccttgcagtgctgcatccaaccatacgaataataagactctcattcatagatgacaagagccatgagactagtagctgatcttgaatctcccaattcaagaattccagattatatctctatgctgcttgatcttcatcagacagaaattgcgatggaggagaaacatcttgaatgaatctttgaagttgatgtccaccacgaatcgcagcaacgactacttgctgtttccagagaagaaaattatggtcattcagctttactgaaagtgtatggctgaaatatacaacacttcgagttaggggtgagcaaaaaatctaaaaaaccgaccaaaccgaatacaccga

SEQ ID NO: 130003 - DNA, 1320 bp, Cannabis sativa
  modified_base (1258)..(1258): a, c, t, g, unknown or other
ggaagggattatgtgtctatggtacagatcagatgcaacaggaattaaattggagagtacacgccagacacaatgtttgaccttaggagggacacgagaagaccaaagttttgacgaaaatcttttattatcttggaaagaagaggaagcaagaatatccctagaactcacagcaaggtgataggcagttttaacactaaaaatcccaatactatctttccccccaataagatcatcactataactatgtccaacaataagaatgtcctatatgctatcgatgatgaaatcatcaaagtaacatatcagactatccaaatcccaagcacctgaaggagagataaaaagggataagtgaggggaaggaagagggtttagcaagccagtatgcttgagagcaaagtttggaaaccaacggtcttcaattgtctgaattctttgcccatttccaatcttccaaatgagacccttctttagaagatctctaccccaaaggactatgaccactgacaacatcaagaatggaagtatgaggaaatatctagctttaagtttgagactaagcaaagaattagggcttttaaaaatcctccatgcttgcttggctagcatggcttgattaaagtgaactagagacctaaagcccaaccctcccttaaattttgattgacaaaccgctcgccaatttttccaatgaacagaggtgcgatcaggagaagagccccacacaatggactcaatttccttacaaattttagtggggagacgaaaacaagccatagcatatgagggaatagcttgaaggatagccttgattaaagtttcattgcgagctttagaaaacaatttatgatgccaagactggacaacagataaaattttatctttaagaaaggtaaatgattgatattgaggcattgaggaagaccattctgtctaaatataagtacatgtgatttttttaactattatctaataagtaaagttaaaacaaaaataaaataataattaagaaaaatttgtgaaaaaaaaataacaacacaaaaaaaattaatatcatatgtatgcttgtacagtcttatacattattatatatttacaaataaaaataaataagaagaaatatttttaaaaaaataagcaaaaaaactattaaaaaaactcgtaagaaaaaaagtaaaaaatgttcagaaaacttaatatatatatctttatatattaaaagtgcctatataacggcaattcttggtttaacgantcttggtttaacgattctttttttgtttagtcttacatgattaacttaacagactgttaacg

SEQ ID NO: 130004 - DNA, 1953 bp, Cannabis sativa
  modified_base (1765)..(1768): a, c, t, g, unknown or other
  modified_base (1901)..(1927): a, c, t, g, unknown or other
agcttgttcggttttgccggtgaagtttccctttttcccattcccttgtctattgttgttgctggaacgtttaccgtttgagcttcaattatttgggtaatgagagagttgggcgaatgtctcagtagaaggagcttttggcttgccaggtttttgctcgccttctgctcgctgaatagctttttcaagtttgatgaagccttcggcacggtcaagaaaattgctcattgaatctaccgggccgttcttcgttatgtctttccagagctcatcgaggacttcaatgccccccagtatcgcggacaactttccatcttcagttactcttgaaaccttagtcacctccgtcatgaatctgctgatgtaggcccggagaggctcccttggtctttgcttgacttcaacctggtctcctaggtgcaacggaagttggtgggaggaggaaaattatgcatggaattccgaggagaaagctttccatgagttgaactttccaggtgccagcttgaagtaccattgctgggcggcttccgagagggtagcaggaaaaattcttcagcatacatctccccgtattccttgtagatccatctccatctcaaaatacttgaggtgggataatggatcttccttcccagaatacatcttccaggttttttaaacttgtggggcaacgccaagagattgatctcgagggagaagggggttccacgtgctcggtccaactcgagatcattgtttctctgaccggccatgcctttgaacatattctttagtttgtcaagttgtgcctgcacaactggactaacctgttcgacatttttgccggcctgagttacgtcagaatctttttgagctggaatttgagcacaggttccgggatgcatgacctgcgtgtctagctgatcatccattcctctcctcctattcagatcgtttttgagatcatgactcatccccaacctttcgaatacagaagagcctggctgcctcagtgattcgatggtttggttaatgggctgaatgacacctttaacatggttggaattactgggtatgacttctcccgatgaattactagacaaggtttttccacctacttcttggcccataggcggaacctgtgaccggagatttggtagctgaccatttatagtctaagaggtattcatagttggatcttcgtctgtttcacctagggggatgacattcgggggttgttgcccggcagtcttgtaggccctccgtatcaggcacaatggcttgccaactatggtcatcagtgactgcttgctgagcccttaatgcttccatctcattgtccctccattcagcaaacatgcgcctctgctcttcgaactcgagattcactgcagcgcggagttcctcctgatcatgatccaaggggttggtatgaccctgcatgagtccaagagcagcatggaggttttggatctcagtgtcatccccaatgattgtctgaacattggtggcgggcggaatggctgtggtatgattgccctggtcagctgctgaattggtattcccagtctcttgcacaccaggtgcgatttcatccacaggattcgtcacactgtgaccagcggttgacggctgtctaggattaacagctggcaaaaacttgtgtttcccgatttctgcagtgccagatccaccgcctgcaaattttttggatttaccacgcgcctatgagtctgtaacaccatcgtacttgtgatgaaatttggaatgaagagcgatcctnnnnttgaactctcaatgaaagcaccaaaatgtggacctcgctcttagccaacgacagtgagtctaattttgtaagcgacaggtagtttataaggacaggaatataataaaataatataaagacacaagaattttannnnnnnnnnnnnnnnnnnnnnnnnnnaatagcctaatcctcgttacttgtat

SEQ ID NO: 130005 - DNA, 776 bp, Cannabis sativa
  modified_base (730)..(737): a, c, t, g, unknown or other
gatttccaccgtaggaggttgatcgagatgcacaaccctagttcaaagggagtgagtttgattgatgagtgcttcaatatcctcctaaatccagtggttctgatggcttcaaggaattaatcgtgagaactgggggtggtacgcttagttttaaccatgaatgaattcgaagaagaaggtgtagaaactcgtcgaaataatgatattcaccagaagaaattttgtcttttctctctcaaaaaattcaaacgtggaatgaaaaatgggcaaaagtggtaaacaaatgattttcactttatttatagagtaaaaatggtgattcacatgttcttggatcgatggcttagattacattcaagaaaacacaaactgcatctaacaatccagaaagtggaagggttagaatttaatgactcatatggaatcaaggtaatttgaaagatgatattctcctcacgacactcactaacatgatcaaccactattttgcaaatccacgttgcacgcgctctttcaatgaatgtaatcttcacaaaccaaagagataattccatgattttcacttcaaaaaacaagaagctgtcaaccacaacttgtttacttaaaatttaaaaaggtcttcacttttttagcatccacatgtcctaatgccatctgaaagaaagattgcaagcctccaaaaccccagagttcagaatgcttgggggtaaatgtaacgccctgtccaacnnnnnnnncacatgtgtgcaatttaataaaattcttatatagatact

SEQ ID NO: 130006 - DNA, 968 bp, Cannabis sativa
attttgccaaaccatcgacaaacaacaagtcaccaacaagtcaccatcgacaaacatccattggagagccaaaaaaactgcttttgtctccgcttccagggctgagaaagcagtggtattccctgtcctgaaagcccacaaaccagaaaccagatctaccatgaccacagctacaccagccgagccatccttccacaaagcatctgtcatcaaaactacagaaacttgtttatggagcaagggaaaacaaactttgtttcctttaaacaacaacttatttctcacagaccaaactagttgaaacagacaacccatgtagttgattatggaagttctatcaccagatggaaaaatagataataagttctcaacatattcaatcatactaccaccctggtatattagtgctatataatggaatttcatgatctgaatcaattcaatttatgttagtactattttagctaaatcatgaataataacatttgcacaactcaagtattattttatgttattttaaaaaatacaggatttaattaatttattatataacaaaataaaaagttgaattaataactttttaaaaacataatttattaaaaaaaattaaaaaacataaattctaaaattactcctaatttaaacagtgactatgactttattaatgtgtttatcttcgtctatactatattgtatgttaatttattggcctttgttgttccttgcttaccttttggaatagtaatttttcaatttgcgatatgactatatttggacattgaaaaattattcttgtatgcttcgatcgtggtggatacaatatggagaggacgcaatgataaggtacacaagaatgttcagggtagcattatacattatattgattctatctcttcttgttacgcagattatagttcttgtttacttacctcttcgaaggttgatgggtctcctgtttgggttcctcc

SEQ ID NO: 130007 - DNA, 515 bp, Cannabis sativa
acaagaatgccaacttttgccggctctattgggtaattgtgtcggcattagttgacatttgccgacgtaagtcaacaatgtcgccggcaaaggaagtcaacattttttgcccacctcaaacttttgctggcgactattttcgccggcagtagaatgtaccaattgcgccggcaaacgttggagccaaactgccaaaaggtgggaattgttggttgtacaatttccacttttgccagcgcaatgaactgcgccggcaaaactattaagttaattttttaatattatttacttttaccagcgccaaactgcgctggtaaaagtagggaaaaatttggcggtcaattttccctcgcagttagaagacgtgcgcacaaaagtaggtggggcttttgccggcgcatatcagtgcgccgacaaaagtgggaggacgttgaggctacactcattcagactatatgggatagaatagtgataatattttaatttttttaataatacatcaaacaaaatcatta

SEQ ID NO: 130008 - DNA, 3570 bp, Cannabis sativa
  modified_base (2285)..(2290): a, c, t, g, unknown or other
tttttttttttatatatattttatctcatttaaaaataattaagttttaataatggcataaaatatgtagagatattagcagttaaattatctccagtttaaattttttaacatttaattacaaaaaattgaaatttaaaaataattttaaatatttaattttttttttatcaagaagaagaaagtacttcattaatcaacactccaatacaatcaaataaacttatcaaagagaagcacaaccacaaagcctactaattacaaatcaatctttgtagtaaattcttatccactctagaacttttcctatctttgatcaacaagagcttatatttcaaatcacttttgattttgttcactatacatatgatagagttagaataaaaagagaataagcaagtgtttcgattgctccataagtggtaaaccacggtggccaataaaagaattctcacattatccacgatgttcggccttgtattgcccagccaaaccgtccagctatcaaagtttcttgaccaaccatcaaacctcagccaattaaagagcatagatagcacctgttgggaaaagatgcaactgaaaaagaggtggtggtggctctcgatttcactgtcacaaaccacacactttttgtttggaataggtatgttcaaacgactcaacatatcccttgtcagaagcttggattgagcagcttgccaaagatgaaatgcatgttttggcacatttaaattgctccaaattgcactagcagccgagaaggcatcctggtgtagcatacttttgtacaacctgctcacattaaacttatctccacctgcagcaacaatttcatatttggaaaaagtagggcgaagtctacaaagcttcctccaataccaactagtatccaagctcatcctataagaccaaatatcactccctttgagataaattgagttaatccacttaacccaaaacaaatcttttttattcatcaagtcccataaaaatctagctaaggaagctttgttccacttagaacatccttgaacccaagccctccaagagcttttgggaggcacaccctctcccaagttatcaagtgagttctaggccgattgtctttcaatccccaaaaaaaacctctacacgatttctcaatctcttttatcacactttgaggaaggaggaagactctcatccaataattccttaatccaatcaatgtagattggactaattgaacacggccaacataagaaagatgcttattagcccaagaatggaatctgtgtttcatttttttcaagatcaacccacaatcatcaagcctccattttgttggtcttagaaggatcgcaagatacttaagagggaactcaccaatagaaagatttatcttttgagcaagaggaaccggttgggaaactccaccaaagaaaacttgagatttagcgaaattgatggaaagacccgaagtcttgctaaattcatcaagcatagccttgatagcacttagagagccctcattccctttacagaagatgactaaatcatctgcgaaacaaagattagtaagtttcatttttttgcaaaaagggatggtacctgaaatccttttctctggctgcttgttggatctttcgagaaagatactccatgacaagaacaaagaggaggggagagatgggatccccttgtctgagcccctgctctcccttaaaagaaccctggattctaccatttagctgtaaagaataggaagtattcctcacacaattcatgatccagttgactaacttagcaggaaaacaataggccaccagaagcttttcaagaaaatcccaattaaccgtatcataagctttactgatatcaattttgattgtgcatctgggggagcaattcttccttctgtagttcttcaaaatgtcctgaagaattagaatgttgtaggcaatggaacaacccttgacaaaagctccctggttctgactcactaaagcaggaagcacattagcaagccgagagcaaatcagtttagaaacacacttgtataaagtagtgcagcatgcaataggacggtaatcaatcgctttcgaagggctatcaatctttgggataagagagagagagagagagtcgttcaatggagctcttccgggaactgattagtgtcaaaaaaatgagttatagccctatggatatcctttcccacctcatgccacactgacttaaaaaaccccgacccaaatccatcagggcaggagatttagtattagggatactaaacatcgcannnnnnacttctttgagagaaaaaggttttaagagatgaacctgctgatcgagggtgaatttggggcccatggctatgcaatcagcttgtatctccaaggtggtaggcttggcttttcccattatgcctttaaaatggccaagaaagtgttgcacaacgtctggaaagtgatcattttggaccccttgctcggtagtaaaagaaacaatcttgctatcttcctttcgtttcttcaacatagcatgaaaataagctgtgttaccatctcctttttgaatccaatttaccttgcttctttggtggagaaagttcaagtacattttctcctggatgtgaaattggctagcagccgcttgctccaattcaaggaaaagattgttgttcgggttagcttgacattggaactgagcctccttgtagttgtccttagccttctcataagcatctccaatatttccaatcgagtgtctgttgaaagcttttaacttgtgtttgagtctcatggtttttaaataaatccccttcaacccaccacatctaagaggcttgccccagctatcaagcacaatgttcttatagtcctgatgatcaatccagaaattatagaaccggaacggtttgcttccaatactttctgtagcaaccgaatgaaccacacaaagacaatgatcagaacagttctcccaagagaaatgggcagaagtatttggaaaatcatcaacccactcctcgttgtgaaacacatgatctattcgagagaagatcctattatcctgcttattggaccaagtgaaattcaaacccgtgcgcttcataggccccaccaaagactaggcaatccatttattagagtcaacaagctctgagttactaataacattccccctgcctgtcatcatgatgaaaaaacgcattaaagtcaccaaggatgatccaagctttagacacatttatcatggatagggcggtccaaagatcacttctaccttctatggtgttgggtccatagataaaggtagcaaagtaatcttttttctgccctatcattttgatatgacaatgcacatgttgcttggattcctcaatgatttcaacattaacaaaaatcttcctccaaagcaggagaatccgaccttccaccttattgctagaataaaagtcccaacacaaatagctaattgccatcattttttgaattttttctcttaatcttggtctcaactagggctccaatgccaactttattaactctccaaacttcagcaactttatcttgcttctccttt

SEQ ID NO: 130009 - DNA, 516 bp, Cannabis sativa
tttttgtagttttttaaatcatttttctaattcatcgaaagatcaccaccaatatcatcatcataatccctccgacgtcgtcgatttcagacagagattggctttcatcaatactctcttaaggtccgaaatgacgcttcatcacgaacccacagaaccagaccacttgatcgaaatgtctcacaaaattaaacatctcgaagcctcttatcgagactctgattgttcttgcttaaacgataatggagaggcccaaaaaaaactacaattgatcgctatataaagttgtttaataatgaatgtacacactacatttaataaaaaaaacgagagaataatttgagaaagggggaactatcttaattatacttagcaacttgattttaatagggttatttttaaaatcatgggaaaaattattaaggttatgataaatatggcataaaaagtaaatgccactaaatatggcattatttaaccaatcaaactaaaaatatggtttttttagaaaaaaaa

SEQ ID NO: 130010 - DNA, 577 bp, Cannabis sativa
atcccaatcagcattggaaaggcaccagttaagacgctctttggtgtgatatggttgtttttttcggtttaaccaagtgaagggactaaccaaaggacaatgagggtgaagctcgtagtcatcaacgaaagattgaaattgagcagacggactacgagacatgtcacccctaattttctccgataaagtaaggtaatcattaaagtcacccattacgagctaagcgggtaaacgagggttagagccaagacaattgagtaatttccaggagtgaggttaattttgggagcttggcgcatcgtaaaaagcagtaaaagtaaaagcaataaaatttggaaatttaatataacagtgaaagtgacttatattataagaaagcaaagttacatccacatcatgtgtccagagcaacaaaagaccaccactaagcccgacacgcgggacttctagaccgttaggaaatctaagatgcaaagcaaatttatttaaagcaccaacagggagtttagactccattatatacaaaatagttggacgatattgcttcactaaaagggagagagaacggaatgctcgt

SEQ ID NO: 130011 - DNA, 939 bp, Cannabis sativa
aaagaaagtacacgaacaggataaaattaaattgaaattaaaaatttttggttttagctttgataccatactaaaattataagatggatgagattgcatctcaaaactaattggtcataaaagaaacagcacatgtatcttatttgtcatgatcgagccctaagtggtgacagatatgtgatatccataagttgaatggtcaaaagtcacactttaatccttgttgaaaaataatatttataaatgatcttttaattaatattataaaatatataaaatatattttttaaataatgaaatacctcttagaatgaatagagtataattgtaataaaatacacttgttaatattattgtaaaattctttcttggaatacttgataaaatagacaaaaatagtgtttatgataatttcgaaattggttatgtatttccatttagttatttcaaaaatatgttcactcttagtgtgaaaagtcttttaaatcagattgtgactattatcctaaattctgttcgcttgtggcatgtccacatagtcaagactaaggacacatagaatacaggttgccaataacaggacaaagtcaccgtacacgacatgtcaaaattcaagagttctaaagcaatcaagtaaaactgtcaatcaatgagtgaaacgagttaagcataccgttaagatcctaaacaaccatgtctggctggtcaagattccataattgtagatcatgttccagtcattcatattattaaataattttaagaatatcttttctgaaaaactttaacgagtgaattaaagaaattaatctataaaagtgtccattctttaacatatctaatattttgtttgaaatttagagttgagaaaaccaacctacaaaataaagtaaaaaaagaaaatagataagcagatattcagctttttttttttttttt

SEQ ID NO: 130012 - DNA, 2250 bp, Cannabis sativa
tgctaaagattaaacaacatgttgccctattatcatttgttggtgaagttctctcagctcgagattacattgtcgcaatctttaaaggattgttgaatgaatatgatacctttatcatatcatccaatactcgaatagaatgatacttaataaaaaaaattgaggctcttctccttgtttcaaaatctaaaattggcaagactaaaatgaggttgaacccatcatcaatcttgatgttgctaactttgaaccaagtcctaaaacttagtggcaataggaataagtcttgctcactttatcaggaatttcaagaatttaggagtacaaagaggttagttctactttaattactaaaattttcaccttttaattcctttggattccatgcgaatcgaggctcgtattcttgaaatatgtcacaagttggatcatcttcttacatttctaaaagaggtacctccaatgctgcacgaggtgtaagatttcctaccacacagactagagctcaatgctaactctatgacaagattggccacactgtgattgattgcttctgtcatttcgataaaaatttcataggtgtttttccagcttctaatcatcctacaatgtaagctaatttggctcaaaatactgaagggatgatggaaatcggtaccctgactctggtgctgcaaataagtgtacacctaatctacacaatctcatgagtagtgctgaatataatggccaagattgcatctatgttggtaatggctcaaatttgtctatccaatatactggtcatactctaattgcctttaatagctctcaaaaaacctttgattcttaataatctcctctatgtgctagaaatcactaagaatctattagtatgtctaaattttctcttgataacaatgtgttttttttttaatttcatgctaatgcttgtgtaatatcctagaaaatataatgatatttaatttgacatattttattaaatatgtaattatgtgggcatttgagtaggattataatcttacttaagctaattacgagttaattagtaaaatatgaataaacaaataaataaagcgtaatttataaattacagagattttatcagattatgggagtactgtagataccattttcaaaataaaatatctttcgggttcggtggccgtggaaactcgacggagtgatcaaaaatttcacgacaacacaagatgaattgtattggaattatatcacaccagtttagaattataagttgtcggtttggcgggattagtttgaaatgaccaaattacccttacattttattttaggcataagtgtttatttggaagggcatataagtcatttgttaagattataattttatttgtcttattaaggaacctagagtatactaggctgaaaaataactttcttttattgagttattagaaactaaattaggaattaaggaattaatcaacagaaccaagaaaaaccatgttctctccctcatctctcgacagccctagaaatcaacagaattggagaaatttcttcatcatatttacctattcttagttgatttagcaaggtttaagagtttttcaaacttagagggaagttttacatcctttccctttgaattttctaagtttggattaggttttggttagggcttttaagatttcaggtctgtgttgatttatgaagttcatagattgattttggggttaaattaggttcgtttagttgtgaattgaatgattaccatggctgttaaagttagaaatgaaggaattgatgtttaagaacttaactttcctcgatcatggtgttttgtttattttgatgaatttctgggtattgattgattggttacaatgtttttatgatatggaattgttctggaaggtttgagcatattttgtgaagaattggttgggttttggagcaacaaactagagtttcccattttttcagcagggaaaactggttaaccggtttcacaggcatagtgaaaccgatcaaccgattttgctagcaggggaaatcctagttttaggcttcaaaatcagttttgttcggggtgtttcccagagcttagaataggatattttaacgacgtttgagttattttgaaccagtggggagtaagatatgttcagttacgaagttagagttggaattttcaataagttatttattgagctttgttgtcgtgacataggacccgggatcgttgagcatggttccacccaggtcagc

SEQ ID NO: 130013 - DNA, 1233 bp, Cannabis sativa
aaaaaataaagaaagaaaaaaaaaaggagaagcccagcccaataggcctagttctcttttggaccccgcctgcctcgtcagcgccagttggcgtagcatcattcgtctgaactacttgcatcagcgcctatgtggcgcctctccttccttcagcagcacgcccacgtggcgctgcgccattggttccgcctacttcagcaatcagctttctctcctttctctgaagcccaagtgtccatcaatcaaccttttcctccctttcacgccagacccatacctatgatacttagagcattaccaatgcaagccacttactttaaaagtggctaaaaaacttaacatcatttaatattataaatattttattttttctttcgtataatttattattagcaactattttctaaaaacactccaacgctgaagtaacactagaaatagaaataactactatggtcccacactctaattttaaccagtagttatcaatttgtatacattaaagtattaatttgttgtttgaaaaatgcataaactgcgatgggggcagcagctaccttagctgccttcaatttttcctcaaatgctaaagcacctttaaaaggtagctcttcatctgacactacctgacaagcactacactaattttaagcgttggagttggcttattcaatcaattgaaatgtcaaatcatgattttgtcaataacaaaataataataattattaatttttttattattatttttttattttcattgttttagagtgtaatttttagagtaaaaaaactataacaaaaatttctctaagttttcttattatatttttttctaaaatttttaaagagcataatgacctaattttttcttagaagattaggacgattttatatgcaatgtgagattattttgtatatttaattcattttttgctgtaatatttatttgacttatacaagttcattcttcacttttatttttattttctccatccatctatgctactatatatgttattatatactaaatatgtatatagacttagtcatgctatttttatttagtgattatagtaatggtagtaatgggtccgataggggtctaaaccatcggacccatagtccaaccatcagccccgcccgacccagcctccatctctcttctctctttcaaactgaaaaaaaagaacccaggggtccgatggttcggacccctatcggacccatcggacc

SEQ ID NO: 130014 - DNA, 1026 bp, Cannabis sativa
tgctctaggggttattattactctatttcccatctaattaatccaaaccagagcattaattgcttccatccctccttctcttcatctttccatcttcttcatcatacctttttgtcttctcctcatttactcctgatcccccaaatcttaacccaaaaaaacactcttggagattgcaatttggaggcgaacgattggattcccgaagctgctcagttcttcttcattattgtggcctccatggaagcgactagggatgtgactagggcagttttgagacgagttcttcatgcgttttggttcttcctatatataactaaactcaggtattgctctcttcaccttcccacttcgattttcactttctttactgttgtttctggagtttttctttctactgtcatggatgagtttttaaacactgtttctactactttagctcttcccctgatgaaactactatttttacttatgatgttggttcttctagttcttcccctgccaccattagcattcttcttaagatccacaccattcgaccttataatcatccttccctcatgaaaactctctctggcatctggtcatcgcaatgctattttcctgtttctgtgtctaagcatgctgatggaatgttattggttacttttggctatgagggggatattagaaggtcagccttggcatttttcccaaagcatcactatctttgctgctcctgatagttcttttcctcttactcctgacaatctgcactctgttccattctggattcaagtttatggaatcccgtttatgtgcaagtcctatgatcttgctacatttatagccatggaagtaggtgatcttattaaggtagataaggataccattaaggagggtactagaccctacatgtgccttcttattctcctggatgttaatctgccaataagaaggggaatgaatatcaaattcattaggatgggacgagagttcattaaatggctagactttaagtatgagagactcccagacttttgtttt

SEQ ID NO: 130015 - DNA, 2037 bp, Cannabis sativa
agggcataaaacccaacagatttaggttcaggtctcatgtctcggtctttgtcaaggttacagtccaagttcttgtctgggtttgggtcagttccagtcctaggttcaggttctgggttcgggtccgggtctaggttcaagtactggtccgagtctaggtcagggtttatgtctagatctaggtccgggttcgggtcccgtgtcctagtctgggttcgggtcccgagtccgagtttgtgtcttggttctgttctaggtcagagttcgggtcccgggtctgagtttgggtctcaggtccaagtctttgtttgggtccaggtttagctcccagtttaggtcctagttcaagttcaagtctcaggtctgggtctgggtcttggtctaggtcctgtattttgatcccgatttgtgtctcggtctgggttggggtctgggtcttggttcggttctaggtccaggtcttgatcctggtcgtggtctaggcctgggtttgtgtttgggatcaggtcccgggtttaggtcgggtttgggtctcaatcccagtctgggtttgggaatgggtctgggcccgggttccaatcttggtttgggtcctaggctatgttcgagtttgggtcctagtcatgatctcgatcctattccaatgtcctagtctggttctggttcaagtttcaatatcgagtgtcgggtctgggtctgggtccaggtcctagttcgagttcaggtcttagtctaaatccgagatccagacaccgactacaggtctaatccaagcccctattctcggatcgcaggtctagatttggatcccaataataaatcccgatatagttatgattcaagtctcgggtcccgatttgggtcccaggttcgggtttggcctggttgagagactggggtctagttctgggtcttggtttgagttcagggtcccgggtcatatttcatgtttgggtctaagtttgggtccgagttcaggtctcgagtccaactcaaagttttgttccgggtttgtgtctatgtttgagtctaggtcctggtcccagtcttgctccatggtcctggtacgcttcaggttccggttccacttttgggtcacggggtatgggttcatgtttaggtttagctttgggtctcggtatggagcctaggacccgaaaccaattctatggcccaggtcactttctcaatttgggtttgggtttgtgtcctagtctaggttctggtccgtgtttgggtttgagtctgggtcctagtcctgatctgattacttttccagttgcaattctgggttcaggtcttagtacgggtcaggcttcgagtcctgatctggatcgggccaggtctgggtctaggtccaggtttgagtctcgggttttgatcctaattttggtctaggttcgaatccaagtttgagtcatgagttccgatcccagtctaggtccgagtccaggtccctaaacagtaaacccttaatcctacaccctaaaccctaatccgtaatccgtaatccctaaaccctaaaccctaaagccgaacctaaaacaagaaccaagactagaacccggactcggcccaggaccagaaaagggactaggacctacattgggactgggacccagacccggaccctgacccagactgggactaggaccaaggacccggacacggacacagactcggaccaagacccatacccagacatggacttggacctagacctagactaggaccccgacccgaaccctaactcagactcgaactcggactaggactcacacccgaacctaaacctagacccagactcagaactagaccctaacccggaccaaaacccaaactcagacctagaccagaactgagctcgcacgcaaacccggacaaggacacaaactcgaatctagacccaaacctagaactaggaaccaaaatcggagccagaaccataccgggactcggactagcacctagacctaaaattggaatcagacctaaaccttgtaagaaccattattttctgtagtgacaaattatgtc

SEQ ID NO: 130016 - DNA, 1141 bp, Cannabis sativa
aaggtaacagatcatgagacaatatctttctgagatgaagaccaaaggttgttgtgccagtaatgtatcttaggattcttttgacagcttgttagtgtgttgtaaggggcttttgcataaactggcacactttattcacattgaaggacaactctagtctggttatggtcgggtactgaagagcacccacaattgatctttacatttgaacatcgaccatagggtccccttggtgagctgataatcgaagtccactagtcattggggtaggagatggtttagtccctgccatttgagctttgatcaacagatctctggcatactttgcttgacatatgtgaataccatctacaatatatgttacttcaataccaagaaaataattcactgtctctaagtccttgagagagaactcactgttcaaagcagcaatgagccttgtaacaacctgtgaatcactcccagttacaagtatgtcatcaacatacacaaggacaattgtagtagatattaaagtgtgtaatatgaacagggagtggtctgattgagaggacacaaaacctagagatgtcatgcacttttggagcttgtcaaaccaggctctaagagcctgtttaggcccataaagagctttgctaagtttacaaactagttgctcttaaccaaggacctcaaaccctagtggatgtgtcatatacacttcttcttgcaaatgtgcattgagaaatccattgttgacatctagttgtcttacttcccatcctttggacaaggctagagttagaacaactcgaatagtgattggtttgaccactggactgaaagtttcagtgaaatcaaaccctgcttgttgatgaaatcctttagcaacaacccttgccttgaaattgtaaagtgagccatcttgattttctttgactttgtacacccacttgcagcctatagcttgtctattagggggaagcttgacaagaacccaagttttgttcctagcaagagcaagaatttcatcactcattgcattgtttcaatgctcttgatctagggcttctttgattgtcactactacaaaaaggggtattttcgtcagtttctaaatgacatataaagattttgcgtcggtttataaaaccgacgtata

SEQ ID NO: 130017 - DNA, 700 bp, Cannabis sativa
taataatgtgagacttattatattctcatttaaaaaattacaccaaacatagagtcgaactcatattttctacttatcttaacaatttttcctgtaacaatctcatatattgtgtttttttgttgttagaattattagtcttgatttatttttttttttctaaataattataatgtataaggtattttttttaacttcaattataagtaaaatttagtactattattggcagttaatttctctaaaatatactcttacataatttattaaaaaaaggaaaaatatcaaaattaggtattatcttttgttcaaaatttgaaaaaaaaagaactctttaattccaatgacaagtaataattgttccaaaaataataacaataaatacaattaaaaactactccaaaatttgaatgttatacttgaatcaacttctttcacatcacttaatgtaattcatcgaggataaagaaaaatctaccattctaaatttgaaacaagcatcttttattgattcttttctcgattcttaactagaaattttttcgatcatttttaaatcgaatttaaaattttaaaaattaaaattgacagaatagaaataacactttaatattataataaatggccatcaaaatgaacaaatattttttatttaggttaattataatttttgtcccctaaactttaacatatatcaaat

SEQ ID NO: 130018 - DNA, 706 bp, Cannabis sativa
aaaatctctaaactaataattaagtttgtgttatgtattattgtgttcagatccgaggtttatggttcatattagattcaacaacttttttgtattaaatatgttcttattatcttccgttgcgactctaatatgaaccctaaaaaccaatagacgtatgacttggcacacagagctctgcttatctgattttgattttatcttgagcatccgtctacgagagctatgaacatagacaagtcaaattcacaacttcatattttcattttttttggtaaagtgacttagtcacaaatcaggtagtttcgagtccctattctgcaaaacagtatcatcttcgagaactgatgaacagttttaccagaacaaagaaattgactaatggatgtaaaaatatcagttatgcatcaaaaaatacatcctcaacatgttttctcactcatccagtgtccaggatgatgtcatatgtcaacctgagtgctgatatcagagtagtcttcagtaaaacgtccataactcactcaataatgatttgattggtgcaattcaatttgtgttttgaagctatttcaatgaactatcaagatgcgtctcacactaccactgtaattctgaaaatatcaagtccaaatttcatccttaagagagttacgaatttcaactacaacttacctgaaagtgggtctcacagacgcgattcaagctc

SEQ ID NO: 130019 - DNA, 528 bp, Cannabis sativa
gcccacccaaaaattaaacaaaaaaccaaattttggggttgatcggacccccatcgggcccatcggaatcgacccccaataaaaacaaaactgaaaaaatttaaggggtgccatcgggcccccatcaggcccattggacctgacccaccaaaaaaacaaaaatgaaaaattttaggggtaccaccgggcaccccatcgggcccgacccccaaaaaaaataaatctaaaaaattttaggggtaccatcaggcacccatctagcccgaccccaaaagcaacaaaactaaaaaattttagggtaccatcaggcaccccatcgagcctacatcgggcctatcaagcattcacccctttcaactattttgacaaggcattgagccccccatcagaccagcatcagaccccatcgggccagacgaaaaaaaattgcagaaaccatgaaaaatccagttttcacaggcagcaaacattttaacacaaaaaacagcaaaataacagcaacaatccacaaatcaagcatcaaaacaa

SEQ ID NO: 130020 - DNA, 794 bp, Cannabis sativa
aatcattacccgttcaataagttactaattaattaacaaataaataattaattacacgacattaaattattttgttcaattaattcagtaaatcttataataaacttttggattaagatctaataatagtttacatatgaaaaaaaaaaaaaaagtgatcattacatataaatttattatgatcttattaaaagataaatacacatggtagcaaaccaatacaaatacaataacaagtaagagtcttgataaatcatttggatcaaaaacatcttttagaaaccctaattttgagtccatatttcatgctaaaagtgaaagtcaaattagggcataccggatgtccttccacaacatgaaaacaataatttttaagaacattaactgccaaaactttcatttgaatcaaagcaatatctttacccaaacaagtccttggaccaatgtaaaaagatggaaacttgtgagatggtacaaaaacaaacttattaccttgctcacaattaatccatctctctggcttgaactccaagcaatcttttccccaaacttgttccattctccccgatgagtaaaaagacatgaacaccatttgatttggttttacatggtgaccacttggaagaacatcttctttgattgaagttctatgattaaaaggtactggtggatatagtctaaatgtttcatatattgttgcttgtaaatacaccaacttactcaactcctcaattttgtaataaccattgttattattattattattattacatcctaacttttctttcatttct

SEQ ID NO: 130021 - DNA, 768 bp, Cannabis sativa
tctacctacctggtcagtggatggatttggataatcccctgcctgatccggtattaaatgtctgtctcttattcttcctgtttcactcgagtacaactcgagatacggaagatctatcaactaggtctttgattgctatatattttgcttcctatttaaacccagttctaggtttagggcaaattaccttttttgtgctttatccatcattgctttcttcgtttattcctttattgctgaaaatggaagacttagctagatctttttctgcagcccttcacctcactgatactgaaaacacaattcactcccttgctgagcatgtcgacccaaatgagggacttccaccagccccaccccagtttcaccttatggccacccttttcacaacgaaaaactttaaccataatgccctcaaaaattttctggaaaaacactggaagggacggtttctagtgagtgttaaggaaagagcacccaactccaatctttaccttgctgctttccattgtgaaggagatagacgtagaaccatcctcaaccaacaatgggtctttgacaaatgccctatcctgcttgaaatccctgataccgattccactctatccccagaaaccatgaaaaaaatccccttttgggtccaggttcacaacatccctttctctcgaaggtctatctcccttgccaagttgttgggccaaattgctggcactctccttgaagttcatcagccctctttgcttgaaacttggggctcttaccttcgag

SEQ ID NO: 130022 - DNA, 548 bp, Cannabis sativa
cgctcttccgatctagatctaagatcctggtaaaataattccaacagtaactaaggggtcattattggcagaccccacattgcaggcgagaccaacacaatgaccctttaggggtaacttagggttcattattggcagaccctatgccactatctctttcacaaaagaagatgctgcttaagtcaacttccagcacaatgaccccttggtcattgttgcacaaatcaggaatatgatagttgcacggtgcatggtggacaatggagcctcctctaacattctttttggatttacatatgatgagatgaggcaccaaataaccgatttggtaccctactcacaagtaatgtacgacttctttggccaaagcattacgcccatggggtacatccaattgccgctaatggctggagagaatccaataactagaacattgatggcatagtttgttgtaacatccatctacaacctttgcttaaagttcccaacaaggcatggggtaggatgtttgtgtcctaaataaaatccatttcaatataatcaaattt

SEQ ID NO: 130023 - DNA, 840 bp, Cannabis sativa
  modified_base (407)..(418): a, c, t, g, unknown or other
aaaaaaaaaaaaagagagagaagttaatttgtagaaattcatatttgttacaaacacatcattgaaaatattttaatgtacataataaagcaaaatttcaatataacaatcattataaaaaataactacttttagtaacaattttttagtaacaagataattttttttgtgattaaatgtaattttcagtcgcaacaataagttagttgtgattaaaacataatatttagctacaagttgtcactaatttagttttaatcacaataaatattgtgactaaaaacacatttagtcacaataaattgtaatttttgtgacaatacttttagccacggaccttttagtcacaatatcggaataataatttataattaatcacaatctttttttacttttagtcacaagtnnnnnnnnnnnnaaaagtaagattttttatagtgtaccttgtacaagcaataacccatgttctctttttaatctattttgtttgatccgttgcactctttttcaatctatttcgtttgatccggtgtactcttgcttgctaagagattattttttctttttttaataggatatgttatgagaaaaatctatatatatatatggaatacttctcaatgggtattacctattgatggctactaaataaatttaactataaatattaaatttaaaaatattaaactattaaattttgatctgatggcaaataataaaagaaattttttaatttttatgcttaatttagctatttaaataaataaaatatcacaaaatatttttttttacgtacattatatcaaaaggaggaggtttcaatggttacatttttattgt

SEQ ID NO: 130024 - DNA, 1065 bp, Cannabis sativa
  modified_base (1038)..(1040): a, c, t, g, unknown or other
ttgagctgatgactcatgatgcgtcaggctgaattcgctaagtgttgatcactctgcacggctcgctgaatattttattccggatgtgccagcgaggcgtcctactcggcctatcgttccgagcagatgctccaagcagagcccacgtgtcaccattctcgtgatgccacgtcagagtgtcaaatttgggataacaatgataatagtgatggttttggggtggttgtggagataattttggggtgattcttttgggtattttcagaagaagaagaagaaaataaaaataataaaaaaatgaaagaaaagaatgaaaaagaaaaagaaaagaaaaaataaaataaaataaaataatatatattttttattatttttatcattttaaattattaattttattttaatattatgtgggccactgccacgtgtattttagtatacttcaatagtccactgtggcacttaattgaaatttttagacgaatgggtaaaaatcataacagaagtaaggtttacgtagttttacccttaaaaaatgaattgatttagttaactgttaaaaaaaataaagttcgagtggttttgtcgccaatatcctttatcaaaatgtagtgttttgccattgttgactaagaaataactgtaatatagcactgtgggaaatggagataggtcaaaggagacgagcaattttctttaataaaaaagggaaattgttagaagtaatttttttttatgttttatttataattttacggtttaaagtttttatttataaaaatacgtattttaaaattacaaaaatatactttgcttaggaaaaattaagaaaataactaaaaagaaatcaaccttcacaataactataaataaactataaaataataaaaaaaaaaaaaacaaatccataacaattataattgaagaagtataaataaattataaaacaactaaaaaatagtttattatttttaataaaaaagtatttttattactgactaattagtaatttttcccctgaacttttttggccgttannnattccccctgaactattgagattgt

SEQ ID NO: 130025 - DNA, 1021 bp, Cannabis sativa
aaataaaaatattttcatgttcggcgaccctggagacctgattggaggccaaaaatatcacaacagttttagtcagaaatgttgatgaaattattaggataagttgatttagaaaaaccggcgtattttagggtactcgaagtggtcaaataccctagaaatatagatttcttagtggctaagaaataataagataactgataacaataaagtttttcttaatattattattaatattattattaatattatactattattatattatatctataaatgaacgtataagtttatatatattatatgtttttaaaaatagaagaagaacgaaccctcgttctcctcccttcgacaaaattctctttttatatgttgacctcgcttttggcaaacgatagtgagtcttgattgtaagcgacaagtagtataatatatatgcaatataatgaaatgaataaagaaacaagagttttatagaggttcggccccgagcagttcggtaatagcctactcccttcgtttgtattgagttaagaacaaagaatataatgattccttttcttagagctcttacaataatatctgtgaatagaattgttagataagttttttcaccctttgcccagtgagaatggatcactatttatagggctttatgctttgagggaagagtttcccttatgattacaatagatataattgacaagattacaaattaaatacagaatacactgataaaaggatttggatagcttgccatatctcggtgatatgatccaaaaattataggaatttctttagtgattcacgatgcgagtgttgaaggggctaagtgttggcgtgcggttcggactactcaccgccgggttaagaaggtttcacccctgcgaatatatgtggtgtttgttcggcatatctcttgtgaacagatatgtgaagttgattccacgtgtcaccatcgtgcgatttgatgtgaggctgaccaagcatctcttcagtttttggctaattaatgttctga

SEQ ID NO: 130026 - DNA, 686 bp, Cannabis sativa
  modified_base (26)..(28): a, c, t, g, unknown or other
tacccggtgtttccccttacggatcnnnggactactgactgtcacactaatcctctttcattgaatactgttttttagaatttatataactgctgccattacttaaatattctcccactaacttaagtatcagagaatttttatccagatgtaccttaagtttctgcacaacattgataatgatcgatgtgattttttatgagaatcgaggaataaagacaaatttagcaaaacatcttcatagtggaattgctactgttgatgattctaccccgagcgaattccacatcaacagtaagaccatctccttaaatgataatctattgaaataattaagttcataattttttgaataataagtatatagttagatataaaaattattttaatatttattcctaaaaaattatataatacttgaagatttttatcaaataattaaatataacattgcaatttgcaacatagaattcagactatattagatttctaaatggaagatatgccatttttacttggtaaggaaatctttatacttactttaatgtgattttgtcaaatttagaataaaattttatttttatatgttcgatggtttctaataaaagaaagtattgttacggtggggttacttatttatttatttatttatttattttaaataaatatataatttagggacataa

SEQ ID NO: 130027 - DNA, 1187 bp, Cannabis sativa
  modified_base (578)..(589): a, c, t, g, unknown or other
ctaatcaaacaatcgataattttagcacctgctatgccatgtggtacattataattttcttacctcaagttttgattcagctatgttggccgacctactttgagtacaatcgatgatcctgggccctatgtcataagaatgataaaccaataagtttttatcgcaaaacactgcttaacagttgtaaaggacaacctaacgtttcctaccaaaccccgtagtttaaatacactaaaataatacttatattttggctctaaaacatataccatattgtagagctcattgcaagctttgaaacaatatatagaatgtccgaaatgtacacttaagtgaaaagttatggcataaatgcgattctcaagttctcgtggttgctcgaaatggtaaactggttggccagaacaagttgaacggttcccaaccggttggccggtgtgtcagggacaaaaaaagtgattttccaagtttacgcatccacctaaatgctactgaaacctgtccaaactacccttaacttcataaggcacatgtataccatacttacgtaatagaatctaaaatcgagcccttaattnnnnnnnnnnnntagtgttcggacttaagttataaaaagttccaaactcaattctaacctaaaaccacatgaatttcagcaagaaaatatcagaactagtcccatgactacccgagaataatcctacagggtcagaacctccataactattctaattcacaaaaccactatatagaactaattgtattcgacttaaaacgaaactaattcttatcttaaggtctccctcttcaattattctctatactgttactaccagagcttagattgctcagtttcaagttaaaaatcgaagaaaatgaatataagaggagagggtttttgttgaaggaggaggagggttcgtttgttttcggttactaattataaacttatagcttattatatatataatatactgataaaagttaattttattattaataatacaataataataatttaataatataatattaatataatattattaataatattaatagaaactttattattattcataattatcttattatttcttagttactaagaaatacttctacgatgctaagtcaaattccacatactcctaattatctcaatacttatattatcaacttatcataat

SEQ ID NO: 130028 - DNA, 1467 bp, Cannabis sativa
catgttagttgacgacattctcaaaactataatccatttggctagatttataacttacattaaacgttatattctcaactatatcaaaactaagttagacaaaaaaattacaaaatatatttataaacaatttgaacaacaattctcctattttattaaccttaatcatttgttaatttcaactgtaaataatcaatcaacacagaacttctcaggtaaagcatgttgtaatatataaacgcttaaataaaaaaaaaaaaaaacacagaacttctcatcattatatcatcatatcacacacatttcacaaatcctaaagagaattagagatttcactcatcaaacaaaatatttctagtaagacctataaataaaaaataattaaatatataaaaatataatacaaaaaattaaaatagtttaaactattattcaaaaaaaaaaaatagtttaaactatttattatttaaaagattattgttatttaaatataaattaaaatttacatatgaagtcatttatacttcaataaaacaataggtatttttttgataaccagataaaacaataggtatttttactatacaataaacataaaatttcagtgaaaaaaaacatgagtttttattttatttatagaataaaaggaaattacacccaaaaaaattaaaagaatattacaattcttttttttggttgaaaaaacagaaatttttaccataaagaaaaaaaaaatgttttacaataactttactatgcaaagttattcattataaaaaatagccgttgggctttaaaatgaaaaaatggtttctttttcctcaaacccattattacctcactctcacagatcaactcaatctctctttctctagctctctctttcgctctctagtgctcacgattaaagctctgtggtgatcaccagatcaccaaccaacgctcgttttcttccataattgttatactaatcctgttttcaatcctgttttgcaggatttttaagtgaagaagaagttctttgttattattaattgtttgaatttcaattttttattgtttttatttttttgcgatacatatatatatatacataatatttgtggttattatggatgcaggaggaggatctcttagttcttcttcttcaacgttgaagacgcgttctcgtttccctcttcataggaagagttctcgcgataatgtaagaattgttgaaatttagatttttaggcttgttttgaaattattaaggctttgttttgtttctgtttagatttgggagagctgctgttgaaatattgaatatcgttttgggatttttcttttaaatttattcatgaaatcttgattgattggggtctctgaaattatttgaatgttttgattttagcgttcttgatttagggagcttcatttaggtttgttctgaaatttagggtcaaatttagggctttgttttgtttc

SEQ ID NO: 130029 - DNA, 1448 bp, Cannabis sativa
agtgcggtgatcgaacaaaagacaccgccaaaatacaaagatcctggttgtcccaccatttcatgccaaattgggactcatgaagtcagccaagctttgcttaacgttggcgcgagtgcgaatctcatgccttactctgtgtatccgcaacttggtcttggagaaatgaagtcaacatctattgcgctacagcttgctgaccgctccatcaaaaagcctcggggtattgttgaggatgttcttgttcaaattgagaaattctattaccccgtggactttcttgttcttgatacccaatctgtggtaaacatgggataaaaaattcctatcatccttggaagaccattccttgccaatgcaaatgctttgatcaattatcagaatggtctaataaaaatatcatttagaaatatgacacttgaggtcaacatctccacattgggaaacaactccaagaggatgatgaatgtcatcaaacattcatgattgacaatcttgttttggaggagattcaattgcaaagaagtttttttaatcttgatgaactcttctctcactttgaaaataaaaatccatgttttgttgagttcgctctagctatttttgatcacttggacacataaataagagggaagaaattttggaaatcccactttgaagcgctacctcgtgagagggaaacactaaaatattctgttgaagaaactcctaatgttcaattgaaccaactttcggagggtttgaaacacatttttctaggaaatggcaaaacctttccagttatcatctcgtccaaccttcaaccttctcaagaattgtagttactcgagttactgcaaaaataaaaacttgaaataggttggacgcttgccattaaaaacatcatataaaaaccagcattgccaaaaaatgaccgaatgtctttgacagtcttaggggtaggaagtttagagatgaggtcaattttagattgatcaacctaaattcctctttcagaaacaatgtggcctaagacaatgccggaggataccatgaaatggcacttttcccaattaagcacaagatctttctcgatgcatcattttaaaacggcttcaagatggagaaggcatgcgtcaaaagattttctaaaaacagttatgtcatccatgaaaacttccatggtttgttcaatcatgtcactgaaaatgctcatcatgcatctttggaaagtggctggtgcattacacattctaaattgcatatgccggaaagcatatgtgccaaaaggacaagtgaaagtagtcttttcttggtcctctaatgccatctcaatttgatagtaacttgaataaccatcaaaaaagcaatagaatggatgaccagtgatgtgctcaagaatttgatcaatgaatgggagcagaaaatgatctttacgggaggcggcattcaattttcgataatcaatg

SEQ ID NO: 130030 - DNA, 1104 bp, Cannabis sativa
gtaaaataaattccaacagatcgatccctcatgatttttgccatggttttgatactgtccttcctacccaactttgctacatacctctctgggtccaggttcattatgtcccgtttggttctcgttcctatggcctggctcaatttgttgctgacaccattggagatcttattgaggtgcatctggcctctctttatgatgttgtcactccttttatgcgtgttcatgtccttctcgacactaccaaacctctccaccgtggcttgcatgtccatttcagaaagttatccctcactaagtggctcaaacttctgtacgagggtattcagaattattactaccattgtggtaagttggaccacactttcaataagtgtgaaaagttcctccatcattgtgatcatcacccctttcctcccaaccttagttacaaagacattctacgtgcccctgccaagtccatctacaaaaaaaaagcattttcgagctttccacttctatccctttcgaggaacaaccctctctctccaatactggccatgctagcctccaggaaactatggaccatttcattgtcccaactatggctgaacctactctccctactgtcaaccatacagctcacactacacttgtccattcccccactttatccacaccaactactatcatttccactcaacaacgtcccacacactccacggtccactgcacactttcctcacgtcccataatgacttccactgtcactccttcaacttccaaaggaaaggctcctatgtaccccgaaccctccaggccactgtccatcaatcctccctcatccaccctccacaaccttaacactccaattgcccctacaaccacaaggaagcggtctttcactagccagagctaccaagtgggttcttcggttcgtagcatgctgaaacgggctcgtgcctctcattctgattttgtagttgttccttctatgtccgacaatgaggaaacagcgggtgttgcacagcaaccccaccgagaaaaatgagtcttctcaattggaatgctcgtggattagggagttcccgagcattctataatttctccctcctctgcaagcag

SEQ ID NO: 130031 - DNA, 953 bp, Cannabis sativa
agaggtatgtttcaaataaatataaaattagaggcaaatttagttaattgattaataaaagaggtatttctcaacttaccccttttattttcctaaggcccacccaatttcaagaccaactttattcttacatggtatgtccactcgtgatgttctaagtactattgaaaagtattatattattattagtgcgactcaatatcaaatctcatatattttaattactataaaagattactaattacttattattataatatcatctcatactaatattaaacactactgatatctaataagattgatatttatcaaatacttaataaatatgcatatcatgtttgtcaaatacttagtagatatttatcaaatactagatatttatcaaatacttagtagatattgttatacatgtttttgttgacatcatgaattgttgcacacttactatcgtgaacaagtccatcaacaatatgtgagattttatacccatatttgtcttaacttgtgaaaaaagattgtagaataagatatttttttatttttatatataaatatttatatgggtgagtatttttatgacctgctataataagtaaaaattttattttttagatttaaattaattatataattaaaataaattaatttgtaattaaaatatttattaaaacattttaaaaaattaatatttatatatttttttattttaagaaaataaataaaatcaatttagtattaaattataagtaatttattaattatttttagtaaatttttaaattaatcacagttgtttaataatgatctaaccactaaaaaataaatgtaactatcatagttatataactattgaaacctccatcatatatatatagggaaatttacaaaaatactggaatttaggttaacttttacaaaaatactgtcacacggaatttttttcaaaaata

SEQ ID NO: 130032 - DNA, 664 bp, Cannabis sativa
acaacaacaacaacaacaacatgccgtgtctacaatgcacggtatatatgccgtgcactgtagagaatctacaatttgctgctcaatttgatacctctttggatcaattatatatactaaactatcaatttgcagtcttcttggagctgctctaaggttagaaaaataatgctgtatatatagcttatattacaacacccgcaacgcctataatgatgtaatattacccatagaaaaggttaagactaaatttactaatcaccacacataataatgtaaaatattaacttttagacaaactaaggttgaagaaagagtgatgtatatatagcttataatacaacaatcgtaattgtttttaaattatatgagattttttcctaaagaactcactcaggacttaaatcaccaaaatttcaaaataaatcaaatatgtaaaaaaattaagaaaaatgataacataaaattatatatttttaagatgccaaattacctttttttgtactttcttttatttaaatatattgatgttattttttttatgcatttaggtcccgtatgggggagttttttaaaaaactaaaatcactttttaaaaaaaaaattatgagttaatatgtatttggtaaaatttaaaaagtagcttttttaaaaatttaagtga

SEQ ID NO: 130033 - DNA, 955 bp, Cannabis sativa
taaataaaatcagagacccaacagtccttttctccttctttccagaatccccatctccatctaagtctaggcaaatctgttctaatcctggatgcaaatttgcttgctatacgagacgcaacttcaccatgaataagcacacccatatttgacaaactggggcatctattcaacatagaagatatgaaggaaatggtggcattcatttcatcaattaacaaataagcagtaatctctttcaagccattcatttctaccctaccctccaaacctccagagctaaatgatgcctccatttctgaccaggctcgaggacccaatgtgagagaactgagattaggaaaagaatcatacagtgttccgaagcttaactttggagtaacatcttgattgtgttttggtatatcaagtaacagaattttgatggttctacttgatccaaacttgcccatgagactgaaaagattccaagactctagctgaagactgtataaacaattgaattctttcacttttaaatgatctgcgttctcaatgattagatggagatcagacaacgatggggtttcaaggacaagagatctaggtctaatacactccagtttgagttcaacaaggctgggagccaatattgttatagatagtggagcatttgagattgtccagtaacataatttcaggttcttgagatcaacttttggttctttaagtcctccaaccccaaccaaattaagaacttgtaaacccggaaaacattcattaactttattcaggtcttcatcatctagtcttagaaattcaagggtcaaacttgtgagattgggcatacaattcaacccatcaactgacaaccatgtgtttttcagttctagtttgagaagattagggcctgaaacaaaataaaacagatgtctcaatcttatgtttgagttctaagaaactcgataccaaacac

SEQ ID NO: 130034 - DNA, 2563 bp, Cannabis sativa
  modified_base (1200)..(1211): a, c, t, g, unknown or other
taactaagcgggctttacactgcaggtcatgaacttctcagttttatggacgcatactcgggatataaccaaattctgatgtataaaccagaccaggaacatgcctctttcattagagatcgaggtttgtattgttacaaggtaatgccttttggtttgataaatgcaggagcaacatatcagaggttagtaaacatgatcttcgcagacctgattggtaagaccatggaagtatatgttgacgatatgctcgtaaaatctcaacatgcaaaggaccatgtcacccacctacaagcaatgttcaaaatactgcgacaatttaagatgcgactcaaccctctcaaatgtgtctttggagtcagatcacgaaaattccttggctttatggtaaatcagcgaggaatcgaagctaaccccgcaaaaattaaagctttggtggaaatgcaatctccgaccaaatcaaaagaggtccaaagccttataggtaaagtccctgctttgaatcgctttatatcacgttcctctgataagtgcaaagagttgttcaaattttaaaaggtaataaaaagtttcagtggactgagaagtgtgaaggggctttttcaggccctgaaattacatttggggcggcccccaattctttccaagccgatgcctggagaaatcttatccatttacctcgcagtgtctaaatatgcgattagttcggtactaatccacaaagaccaggggaagcaatatccagtttaatatgttagtaatcgtctcctatacactgaatctcgttattcgcggatgcagaaattggcattcgcactagaaataacgtcgaggaaattgcgaccttatttccaagcccatactattgaagttttgacaaactaccctctgaggcaagttttagcaaaactagaagcctctggtagattgttaaaatggtcagtggagctgagccagttcgacatcaagtacaatcctaaatccgcgatcaagggaaaaacccttacaaatttaatactcgaatttccaagtactaaggtggcacttatagaagaaagaattgatcctaacgtagcaaacaatgaaggatggactttgtatgttgatggagcctccaacagcaaaggctcagggggtggtatagccgcagtaattttaaggtacatgctgcactaagatttgaattttctgcatctaacnnnnnnnnnnnntatgaggctttgatcgcaggattgaaacttgctctttagatgaagatcgagtatttacaagcctttaacaattcccagatcgttgtctgttaggtaaatgaggaatatctggccaggggagggcgtttggctagatatctcgccctaacttgcgagttgctacagaaattcaagaaagtgattgtttctcgaatacctcgtgctcaaaactctcatggagacgctttggcccgtttggcctcaacaagagaagtcgaattactcgatgcaattcttgttgatgtgctaactcatcccacggttagtcaaaacgaggtgatgcaggtagatacagtcagagaagtcacttggatgaccccgataatggattacttggaaatgaagtcctcccaatgataaaatagaggccagaaaactgcagtatcgagctactggatatgtcatatatgatggcaagctttatcacagaagtttcagccaatcgttgctcaaatgtatagatggagctgagtgcgactacataccccgcgaagtgcatggtggcatctgcggcaaccacactgggggtaattcccttgctttaaaaataatgcagcaagggtattattagccgacactgcgagtagacgcctcaaactttgctaaaaagtgtgacaaatttcagcggatagccatgtatgcccaccaaccaccaagttaatcgaactccataacgagtccctagcctttttcagtcttaggcatagatttaattggagaatttcccaaagggaagggcggagtaaaataagccgttgtcgcaatcgactactttaataagttggctgaagcaaaagcccttgtgactattacagctgttaaattgcaagagtttgtgtacaattccatcatctacagattcggcataccttacaagttgttctcagataatggaaaatagttcgacagtaaggaaatgtgccaactgtgtgatgagttgggaattttaaaggcattttcaatagttgcatatccacaaagcaatgcacaaacaaaggcagtgaataaaataatttagcataccattaagggaaagctcgaggagcataaaggggtatggccagaagagcttccacatgttctattgttgtataacacaactccctgatccacgactggtgaaacccccttctcgctctcttatgggtgctaagccatggtaccagtcaaagagatgaattcaacattagtgaaagtgtattcaaccttagtaaaaatgtagataaacattttcttaaacttgatctcttagaagaaaaatgcaatcaggcccatctgaagaacgcggcctatcagcagctcactatttcaat

SEQ ID NO: 130035 - DNA, 583 bp, Cannabis sativa
tttaaactttgaggatctcttttttaaactttacaaaagttgtcatacgatatttacatcaaaatacattcaagagctctataaaatcaaattttgacaactcaacaccgttagtcaatagataagctgatatgtaggaaaggtctcaaactcatggcatgacttatcatgcacttgcttttatctgtaccacaaagcacctgtgagttacaaaaattcaacaaaaaaagcaataacacaaacattgtatattaataaacaagtataaccaaataaacacattttttaacctataaggaggaatttacattacacaaggcaaacatgtattactacacatttaataagacagtcacttacagttacctaataaagtaataattttattgttgcctaataagatgatcaattcaatttttgttgcctaaaaagacaatcaattctataatgacgtagaagtgaaatgatgatttcctttaagtttgacttaatatatagagataaatggaagagctcttattacaataattatattagtttactgaaatatcatttataaaaaactaagtgttttaaggataaa

SEQ ID NO: 130036 - DNA, 936 bp, Cannabis sativa
tgctttttacaaatgactatcttctacctactttttacaagacctctgccgacaaaattgatgagttcatagtgttcgatagtgacttggacttgtgctatcctaatgagctttctcgaagtatgcttcataattggtctctctacaattcagacttgagattagtttcactagagcttcttcctatgaaaccttgttctgatattgatgttacaatatacggatctggtgttatgattgttgatgatggaagtggattttgtcttgatgatgatctagatcagccatcttcaaagagcacggaagcacatgctctttatcactttatggtatgccgatcgaattgagtgctatgaaagagtggataattgaatttgggtcgttaatggttttcaattcagtccgaacatatatatgacatggtatgtttttttttctttctcttttcttgtcattgtcactttgtaccaagtttagttcctgcaacttaaagtattttaatgaaaacttgctacatagtttttcaatttactttaagtaggtagataatagtcatttgcaatttgatcttcattaagttttttttattattattattttgtttctaggtttgaaattagttttcacatatctattttgtttttagtttttttgttgtacattgtgtttgttttgattatatttgtgagtattttgtgtgtgtatttttctttccatttgattgactaatgacattagttttagttatctttattaagtgtttatcatttatgttttgttatgatttattatagggtcaaaattgatttcataaggttttagaaaatagtttcaatggttcacagattttaattagggatggcgccgcgggttattatacccgcgggtacccgtccctaatggggcgggtacaggggttgactttcgggggcgggg

SEQ ID NO: 130037 - DNA, 1084 bp, Cannabis sativa
tggtaaaataattccaacagctccaaacctaaccaattgttcccaaacttcacaaaacggttcaataacataaaaataaggtattcaaatcattaattcatcacaatcgatcaaatctcacaaaattgcaagttagaaccaaaaatctagtttctaacctaaaatgtctaactataaatctagcagccactagaattacctaatctaagctcaagcacatcctaaaataatcccacaaacatagtctaaactcaaatcaactctccagccctaaaattccttaagccctagctcaaacataatttgagacttaagaaattcaaaagagaaatatcaaaacttaccttgaagcttaggtaaccattttaccccttaagtaatccttaaacccaaaaacaaacttagagtattttagtaattctaattaatccaccaaatcaataacttaaaattataaactagtctagcataatttccattccggtccacatttattatcgtgacatttccgaccactccgccgagttcccacgatcaccgggcctaaaaacattttatttcaaaaatagtatccacaatacccacatattttaataaaatctccgtaattaataaattacgctttatttgtgtctttaatcgcattttactaattaactcataattagcctaagtaggattataatactaatctaatacccacttaatcacatatttaataaaatatgcccacttaattatcataataattttccgtgatattacaaggttatttcaaattgtctcaactcgatagactattttatcaaccttcctaatgcatcaggttttgataacacttgtcgcaatggttggtctatgaaaactttgatgggatgagcttgaaaataaggtcgcaatattttgcaaacatgcaccaagctaagtgcaagttttttgagtggaaggtatctcggctctacccccagtaaccttttgcttatataataaactggtttttagtttttgccatcttctcacaccaatgcagcactaatggcattttttgagatggctaatgtaacgtccccgcttcaagcctcca

SEQ ID NO: 130038 - DNA, 616 bp, Cannabis sativa
tggtttaggtccagaccttcaggattggttcttcgttccctgcgaacacggttattacgacgcctagaatttgttacctgagggttatctgtgcgagttgtgggggctcaaagggggcgtcgtgccctgttctgcccatccaccttggcctgcagggcgcgtagttgatcctggatcgcggtgtattggtcagtgacgagctggacgattccctcggatactaccgccggagtgatgggtggaaagtgccccgtcgttgctgttggcgtggatgtttctccaatttgggggccggcagtttcagggaatagattgagaggtctgacgttacctcgccatattccaccattaatgacatccataggcggcgttctaattcaagacaatggaaccttcattgttccgacgttgatggattcgttgttaacacctccgtttgcttggtttccagccatgatgattttgcttcctgaatttagtaagaacgtagttctcagttcccgtagacggcgccaaatgttatggagcaaaattcgcaacaccaaaagtatgtaataatattaataacaagaagaaattgtttgaagaacaattgcgagtattcaacctaaaatgg

SEQ ID NO: 130039 - DNA, 3226 bp, Cannabis sativa
atgttaggccgaccagccttgtatgacttaaaggttgtcacatcaattttccatttgtgcatcaagttcccaacaaagaatggggtaggatgcctaaaaggaaattagcaagttgcacagatatgctataaccttaccctgaccaaggctaaaaaggaatattcctctctccagagtttggatagggagaaaagcattgccaaataaggagccgcccaaggcggggacgaggatgtggatccccgacttggggaaccaagtacaaatgttgggctagtggaagaattggaagagatagaaattgacccaaatgtcctgaccaggaaactcaaaattggcaaaggtttgctgcttgaagtaaaatcagctttgataaaatttctaagagcaaacctaaatatttttgccaggtcacatgaagacacggtcggcatcgatccttctacaatatcccacgccctaaatattgatccgaacttccatcttgttcaacaaaaaagaagattgttggacaaaggacagacacaagcattaaaagaagaggtagacaagctacgcaataataacttcatcattgaggctttctacccggcctgggtagctaacctcgtactggtaccgaagcccaacaaaaaatggcaagtatgtatcgatttcaccgacctcaacaaggtgtaccccaaagactattttctacttccatgaatagatcagctcgtggatacaacaattggccacgagatcctaagctttatggacgcctattcggggtataatcaaatcaaaatgcatccactagacaacgagcatacaagtttccaaacaaatatttgtctatactattataaggtcatgccatttggtctaaagaatgctggagctacctaccaaagattagtaaacaaaattttcaaagatcaaatcagacgaaatatggaggtataggtggatgacatgcttgtcaaatccaggaagattggggggcatatagatgacctagatgaatgcttcaaagttctcggaaaatacaacatgaaacttaatcccttaaagtgctcctttggagtcggctcgagtaagtttcttggttttattgtcaatgctcgaggaatcgaagccaatccagagaaaattcaagccctcctcgatatgaaatcgccaacaaaaactaaagaagtccaaagcgtcggatagccgcactcagtagatttgtttcaaaatcaatatacaagtgtgttcctttcttcaacatccttcgaggaaataagaaatttgaatggacagaggaatgcgagaatgcctttcaggagttaaaaagacaacttgcaaaacctcttgtactctgaaaacctatagacaaagaagaattaggaatatacctagctattatagagcatgctgtaagtgcagtggtgatcaaagaagaagaaaacgtccaacatccggtatactacatcagcaaaagactagttgaggctgaaggatgatatccgctgatagaaaagcttacttactccctaatcttatgaacaaggaagttaaggccttattttaaagctcatcttgtttggctatacactgaccaaccattacgccaaatattacaaaaacccgacgcttttggacggttactcaaatgggtagtggaattgggtcaatacgagataatctttcaaccctgaacagcaatcaaaggacaggatttagcagaattcgtagttgagtgcacaggcaaagaagaaagcatttcaaagggaaacccagagccagtacaagaacctcagccaagcaacaatgaagacaaacctacctggaaattacatgtggatgggttggctatagatcaactgtccggtgcagggatcgaccttatcacgcctggggggcaacacttgcacggggcggtcaaatttgggtttagagcctcaaataatgaagcagagtatgaagccctcatagtcggtctaaaaattgctcgggagtcacatgttgaacacattgagatctacagtgactcacagttgttagtaaatcacgtgtctggagagtacgaggcccatggaaaaaatgatagcctatttaagcaaaatacatgatctacttccacaattcaagagctacgtcctcaagcaaattctaatagaagaaaatacaatcgcttatgccttagcccaacttacaagtagcaacatagctgataaggctaatataatcccaatttaattccttaataagaacccagtatcacctgtgtagaagaaattgaaatgattgacgcatctccgaactggatgacaccaatagcaacctacctcaatactggggaacttccaaataacggaaatgaagctcaaaagatgaggagaaaggctgcacggcatatcatcgtagaaggagtcatgtatagaagagggttctctatgccactacttagatgtgtcacacaagaagaagctgttcgacttttgtctgaagtacatgatggattctgtggcaaccacgcagccgggcaaagcttatcaaagaaaatactaaggcaaggatatttctggccaactatgattgaagattcaaaagcctatgttaagaaatgtgataaatgccaaagattttcaaagataccccgtgcaccgcccaaagaactaactcagatgcaaagtccttgcccttttgctatttggggaatttatctaatctgacaattacctaaaggtaaagggggagtacattatgtagtggttgtagtggattatttcaccaaatggacaaaagtcgaaccattgccaacaattacatctatgaaagtgatagacttcgtggtgaaaaacataatatgccagttcagactcccatacaagatagtctcagacaatggcacacagtttgacagccaattattcaccaattttttagcgaaccatggaatcataaaaagtttttctacagtagcacaccctcaagaaaatggtcaagttgaagcagtcaataagacacttaaagatactttaaaaaatggctcgaagatgctaaggggaattggccagaagaactacaagaagtactatggtcttaccgcacaactgaaaaaatagtaaccggacagactcaattcattatggccaatggttatgaagcaatgttgcctgtagaattagaacctccgtcccacagaagattcacatatgatcaagaagctaaccgtgccctcctcgcagaatcacttgac

SEQ ID NO: 130040 - DNA, 1038 bp, Cannabis sativa
tatttcattggcttctgttggtaatacacatcgcagtagaggcatggaatatcctcttctgtacaattttcatttgaccatcgtgtagcgaggaatttagtataagagctttcgtgccttggtcttatctgtgggaagttcttcattcaacagatacttaacgattggtgtgacccatgttggtctcgcatctatcatgtcaacattttccttttcacatatacttggctcgtccagtacttccactgggaccaagttcaacttatcaaggtcaaattgagatgctagttttgctaaagcatccgcattagagttgttctcttggaatcagttctatcttgaaataatcgaacttctccaagttcttccgaactttctctaaatatttggccattttcaagccatttgcttggtactctcctaagacttgatttactattaactgtgaatcactgaagcactcaatgatcttaacttttagtgtctcggctattcttaatcctactaacaaggcttcatactctgcctcgttatttgaagttttaaactaaaacctaaatgtatcatggaatttgaagctttctagcgattccactattacccctgccccaagccattcttgtttgaagctctatcaacgaacagtttccatgtttctatttcatttcctgttttaaattcttctcctaagttaattccttctatcaaaaagtcatccaaagcctgtcctatgattgaagtcctcgggtgataagttatttcaaattgtcctaacttaatcgactatttaactaaccttcctaatgcatcaggttttgatagtacttaccgtaatggttgatttgttaagaccttgataggatgtgcttgaaagtagggtcacaatttacgagttctatgtatcaagtaaagtacaagtttttctaaaggtgggtatctcgattctgcccccagtaacattttactcacaagtaaataggtgttgggattttatgccctaaataaaactcattacaatctatagcttctataggtact

SEQ ID NO: 130041 - DNA, 723 bp, Cannabis sativa
  modified_base (664)..(669): a, c, t, g, unknown or other
gcattaaaatcatcatacacaaatcaaggaagagaaagcttacctagagtagcaattaagttaactccattctttttgtacagtaataaaaaattcagccccctgcgcccgaacatcttaagcttacaatgaacgaattgtttgtcttcaacaagcacaacaactctaataaacttagcctgccacgttagtaaaatacggctagaaacaaccatgctaaaatacacctcccaattaggaaaattattcataactatactactaattttgtcatgcttgatcttggtctcaaaaagagcaccaaaacgaacttttccttgttacagttagcaacaatgtgacccgaaattccacaagcaacaaactttgaggggagccactcgtattcaaccaactgttctaccaattattttctcttatttatataggctctcgattttggagggttgtcattgatttccattaacaccctcgcataccgcgtggacctattttgggttattttatccaccataataggtttacctattgtgctaactagaggactaaggttgttctttccctaatattgcaaacccaatccacctcctccacccaactttctagttttggggaagaaccagccacatcgcactcaaccaacactacaaaaaatcttactttnnnnnncaacaaaatttgtgactaaaagtgaaaaaaattatgactaattataaatcatga

SEQ ID NO: 130042 - DNA, 585 bp, Cannabis sativa
ctactcggcataaaacttaggtatttttgccgcaaattactcttatcattttaaaagatttttgtttaaaatattatttaaaaaaagtattattattagacatgaatgacgtagcacaactcaaaattaaaattgaggggaattttatctttttttttttgtttgaggatggcaaaaggtaagctttaaaagtttaaatattaaaattaaaggtgcttatgaaatttgaacatttgacctctattgtatatgtaagttagattaatcatgttacgaaaatataagatatcaatagaagaatgataatatgatgaacaaagagactaagaaaattacaattttatacaataagaaaaagattatataaggaccatagattaagttaaaaaatgttacaattttaaatcacaaaatacaaataaagagaaaaaaaagataagaaaaatgttacaacttaaaacaaaacatacacttaaatgtaaaagtaatgtgagaatatatattatatagaatagagtatatctattctatataaagtgtgtctaatccaaagggaaatttgattttctatacttagaaaatcaa

SEQ ID NO: 130043 - DNA, 801 bp, Cannabis sativa
tattattattattattggaaaggaaaataagttaaacaatttagagcatcaaatattttgttctgcctaactatatgctggagccaacttaaaaattaagttgaaaatattatatactcaaatggaaaaatccaaaacaaaaatctctttgaaaaaataatcaacattacttcacgtaggataaaaacaaatatatcaggaaacaaatgtaggattatctttggtgttaaccatattcatccattcctgttcaagaaaagaaaagaaagatcatattcatccattcacatcaatcaagaaactagctttcgtttctttctttccttttataacacaaattacagattaaaagtatccacatatatataaaaaattatttttaaaataaattaacagtatcaaattgtgctatttataatataaatttgtatatatatatttaatgattttaacacattaaaattgggctatataaaatgtttaccgtccgaattataacttaggataatattttagtagaggtattatattaaaaataattttttgtaaatttatttttaatatgtgttattgcttttttttttttttcatattagtattgtttttttatttattttttggggttttttcattttaacaaaacagtttttttttttttatttttacggaattacacacaaaatagcaactaacggagcaaactaaatcgcaaccaaaatctgtatagcaatccacatagaaattattggagcaactcaaaccgtaaattaaaaaaaaattcactactacaatgttagcctt

SEQ ID NO: 130044 - DNA, 605 bp, Cannabis sativa
agagagagagagagagagagagagttagtacctggacattggaggaggttggttcactgtcgtcgatgaaggggacgtggcctcttagtgttagcattgtgtctcgccattgttgtacacagagagcaagaaaggtagagataaagatattggaagagaagagagaaagaattgtcttattggtattgaatgtaagaatacaagctcattaacttagaattaacaaacttttaaaacaaactaaaccaatcagcgaaaataactaataacttcctttacaatcccccattaacttagaattggtacactcacaaataccaaatttgactctaaacatagcaaactgtgaagtggaaatgaccttagtaagaccataagcgacttggtctgcaacatggacttagtgaacacgaataagctgttgagatagctcttcaagaacaaaatataagtcgagctcgatacgtttagttcggccatgtatcatgggattagcaggtacaagacaatgctgagatgtcacaccaaataattaagggtcgaggaaaacacaaatgaagttctagaaaatagaaagtgcggccatgtaatttcatagacaattt

SEQ ID NO: 130045 - DNA, 521 bp, Cannabis sativa
cgttcgaatccaaaatagagaatcgattaaaattcttcgatgagctttgagtctgaataccaccaccttgagccatggagaaaagaagatgaagaaggaaggataagtgctctaataccatattagttgcacaaagaaaattgagaaaaataaagtattgaaagctctgtatttaattgtattgattgtcatgtaaagatacaaatattgaacttatatagctcaatacataatgagtaagttaattatataaactaactaaaatgatactctaacaactaacagaaaactaacgcatagccacaataaatatataatatacatatagtaatatcgataccctagctacgaatcaaaattaatatcgaggagctaacaactagtgtcacacactaatttttatcctgtccagcaatatatatacatattttgcttttgaatggtctattaattttaattaatatttacaaatcctccgaggtagtacatgtatttttattaggggtttttttatttttata

SEQ ID NO: 130046 - DNA, 522 bp, Cannabis sativa
aagccactagggttagcttagtggtgagggaggatagaaaaaaaggagaagttttgggttcgaacacaaaaattttaagctattaaattattatttgattgtaaaatactattatactacacttaaaaaaaattatttaggactaggcaaaatttgaaattcattttttataattattttaatatttatttttcttaacaataaacttttaaaaattaatacttagagcactcagactcacaatattacagcaatataactaatttatatattaatattttaaagttaatttttttaaattattaactagtgttattttaattaagccattttaaagactaattatatatttagtagaaaatagtggaagctgacgagttcaggtttataaagcataacttaattacaagtttcaatgattttggaagaagaaatgaacatggagctgaacataaaagttttagatcttgttttcagcttttcggaacatcttgaatcgtccaattcagagttgtattgaag

SEQ ID NO: 130047 - DNA, 1281 bp, Cannabis sativa
  modified_base (106)..(107): a, c, t, g, unknown or other
  modified_base (1077)..(1078): a, c, t, g, unknown or other
  modified_base (1208)..(1211): a, c, t, g, unknown or other
gcctctagtcggtattacttccccataaatttgcccatttaattgaaaagagtaccgaactgagtagacacatttcatcaatttatccacccattgttgttcaaannctagctttagcaacattctttctatgaaaacccactctacccgatcttaggctttgctcatatcaagtttcattgcaaagaaatattgtttcccacttgtatgccttcgtaaactatgaagacactcataaccaattaaggcattgtctgttattagccgacctggaacaaaagcgctctgtgtggcacttactacctttgggagaaaaggctttaatccgttgattaaaacttttgagatgattttataaagaacattgcataggcttatcggcctgaaatcactgacagatgttggttcctttattttgggaataagagttactattgtagaattaatcaaagaaaaatctccatttccctcaagacaatctatcatggtcttggttaccaatggtcttactatatcccaaaacttctggtaaaattttgcattcataccatcaggttctggacttttatctgcagacatggaaaacaccctttcttatctcttctgctacaaacggtttccttagtgttgaattcatttcttctgttattacaagtttaactacttgaagtaactcctcaatttttggtagccatggggttcccattgtgaacaactgtccataaaaatcagtgatagtcttggtcagctcctcaaccttcgagcaccattcattattcctatttaaaaagcctacgatgaaataaatattaaaaacataaagaaaactttcccaatagtgttacacattaaagaaaactttcccaattcaccaacgccaaaactatattcaatccgagaatcctattaaattataaaatttatttttccataaggttcaccaaatattaaaatacactactagttgaaacaaaacagtaatgtaattgggggataatacttgaaagatcttcaataagcagaggataaaccatgctcgatactcagatggtccaattgttggaattattttaccannatcttagatttactaacaagtattttgtttaaacatcctaaatatgaacttctaaaacgatattaaattaacacatataaagtatgagaaaccttacagctgttgcatcggaatataatgtctccttccnnnnagatctctaacccttgtttcctttctatcgcagagtatcaccaagatgtgagcccgaatgtccttctctt

SEQ ID NO: 130048 - DNA, 1407 bp, Cannabis sativa
  modified_base (53)..(57): a, c, t, g, unknown or other
ggagtgatccaccgtgaaatgggggggagacaaaatctttgcaacagtggacnnnnnagaccgtgatctgactgaaccactttatttctcttgcgttcattattttttcaggtcttatattaagtatttgttttcccggcttgagtactcgccattttgggtcggatactcgcacttgttcattagtttttattattattataattcatttgttgtgttgtaaaattcattcaacaacatttggcgccgtctgtgggaacgacaatactttttgttgatttagaaggaaaatcatcatggctggaaaccaagcgaaggagggtcttaacaacgaattcatcaacattgggatgatgaacgtcccactgtcaagaggcagggtgcctcccgtggatgttatcaacgatggagtaggacggggcaatgtgactcctcttaatttattccctgaaactactgcccctcacgttggggaaacgtctacaccggcagccacaacgggacatttttcgcctatcacgccagcagtggtatccgaaggcatcatccagttaactactgatccgcaattcaagatcaactacgtgctctgcaggccgaggtcgacggacgaaacagggctcgacgtcctcctcgagtgcccattacacgcacggataaccctcaggtaacaaattctagacgtcgcaataaccgtactcgcagggaacggaggacaaattaggaagggctagatttgaatcaaccaatgtcgaggaaccagtccgcgaggaaccttaaccaaaaggcacaaacagaggaggcacctgagcaacataaccctcgcagcagaccccagccgcgagacgaagataacgacattgagtccggctcttcatcctcgcacagtcgcactcccagcagatacaccagatcagattcggtggaaacaccgcgaggagggcgataccaagtccataagggtgatctccgtgatcatcttaatgctattttcagggcacactcccaaacacctcagaacgtcgaagagcctcgtgatccttaggtgggcgatcagggcataaacaatcataccaacccacctaccgcaacgcgaccaatggagtcaatatcccagcaaacatcgttgcggtaataacgacgcctgcgaaaacacagggcaatgctgccttaacgggaggtatcgatcagggtatgcttctgcaagctttaaagatgatcgaacagcagagaaagcccattacaagctgcatgggacttctcctttcactgttgaagtacggcaagctcggttgcctaagggattccggttgtctgaatctctaaaatataaaggtaccactaatcccatagattacttagaaaaatttaatactattatggaagtggatcaggtaccccaacttg

SEQ ID NO: 130049 - DNA, 649 bp, Cannabis sativa
ctcaagggaacattggacattggcttacatctgaaaccttgctccagtcttgttttaattagattctgtgatgctgattggacatcagactctgttgatctttgatcaacctctggtttttgcatttatcttggttggccaacttggtttcatggagttcaaagtagcaaaagacaatgtcccgttaagcatcggagccttccaaatgctactgcagaaatcacttggcttcaatctctgcttgctaaaattggtctttctttgactcatgtccttacaatttggtgtgataaccagtctactgtgctaatgtctgctaaccctgtgctacactctaggacaaaacacataaaattagatctttactttgttagaaaaaggatactgcataattagctcagagttagacacactccagcccaagatcaaatagctgacatactgaccaaagctttgtcatctccaaagttcacaatgctgagaaacaaactgagtctggtctctctttcccagctcagtttgtgggaggatgttagatagagtgccatctgttagttagcatagtttgtacatagagttagttaagtagttagttaaattcggttatattttctaactgtatatttaactacttttagttaacttatct

SEQ ID NO: 130050 - DNA, 780 bp, Cannabis sativa
  modified_base (168)..(170): a, c, t, g, unknown or other
tctctctctctctctctccgttgccattttttgtctaagcttgatgtgcgatgccttcttttactcgacagaacataccttgaagatttggcagggccgtctcaagctagtgaaaggtcaggaccggccttaggcataggcggactaggcccgcgcctagggcccacnnnttttaggggcccaaataaaaaaagatattttaaaaaatatacatttttttcaataatttttaaaatacaatttatctttatagtaaaggtcccaattttttttttctacggtccatttcaacttagggtcggtcctgtgaggagcctagggcaaaatttaaaaacaaggctttttttataattaattttaatataatatagctttgaaatttaattaataagagtattcctaataaaatattaaatttataatgcattattactatattttagcactaattttataaaaacaattattcaatcgtatgtgaaaagtaatatcaaatatatataaatattaggggtgttcatccaatctaatccgcactattttgctcatagtgcattcgatccgcactaagtgcggatttcattttttggatccaatccaatccgtaaaagtgcggattggatcggttactttagattgattactttttaatatttatgaaaaaaatatttttttttgcacataactagcaacaaaattgttaggctaaaattagtctaagtttcgggtcgtattttcagttagttttcactctttgtttctagttttagggctatttta

SEQ ID NO: 130051 - DNA, 3700 bp, Cannabis sativa
  modified_base (523)..(532): a, c, t, g, unknown or other
  modified_base (801)..(801): a, c, t, g, unknown or other
tgcaacagcagggcatgaaatcttaagcttcatggaagcttactcggggtacaatcaaatcaaaatgcatccaccagaccaagaacatacaagtctttgaaccaatatgagtctatattgcggcaaagtaatgccgtttcatctaaaaaatgctagagccacataccaaagattggtaaacaaaatgtttgaagaccagatctggcgaaacatggaactgcaggaactggaattctattagtccccaagaaccccaccgaattgatcttctgattggtgaaccggtctgccgattggggcagttttgggaaccctagtttttcttgtttttgtgatatttatgttattgccaagttgatagggaaacttttagtttcaattttaagtctctgaaaattaatttagcatgtaactcatcagttttctaaataatgttatttaagggcctataaatcgtcgagcagcagttccactcaggttggccaccacaccttaattcgaaagtgaggtaagattagtatannnnnnnnnntatgtgtttacatgtttagtgtacatgtctattaagcttgttatattacgtggatagcggtatcagtatatgtagagttatattagataccgatagatgtatgtttggctcaaatactgattgatgctatcacatcagtacggctacagtatgactagcataccgagtataggcttatattatggtcgatagtactattgtacaaacattcttgactcagtatcgtgttggtcatggggatagggttattgtttgcatgtgtaggtaanggcaaggctaaggttgagcagccgtgagagcgagcggatgaagattgtatatgtcgaggcagttaggcctagagcatacgatctttgggacagctggacatattttgtatagttgttaggtgacagcttttgtatctagtacttgaaacagttgtaaataatttgtacacgggatcccagttatatatctatattattgtggtattttataagtattttaatattgttttaattaatcacgattttttttaaaaaaattttattagcaacgagcggcacagttagtataaaatcatgataacacgcctaaactagtggggtgttaaaattgggtatcagagctgtcaggttgtttttccaagcctttattgatttagtagtttcatttattagtatgctataagaaaatcctgataggaagcatgttagtatcctgatagctaaacaggtgcatgttttgatttccaaaataagcggtaattagtaaattcttcttgatggcgatctaaccatggtagctctcggttttgtatgttgttctaatagaatggacgctaggggaaacactaatgccagggtaacttggtctgatccagtggcggtcagggagctcagattccccttaatatatgagggtgaggcagagaccttagaggaagggcacgcagttggggagatgcaaacccgctataggtttcctaggaatgggaaaacaagtttgcaacaatgaaagccaaaatcaacgaacaagatggacaaatcagacgcttgaggcagtagggtgctcctgtaatgcctgctccagtgatgcaagtggctcctgctcctgatgtgcaggcggggtcgattgctgcagtgaactgaatggaaccactatatgaaaggatctgtaaggaggcacctccagtctttctgggagggcctgatgtgatgaaagccaagcagtggctgatggtaattacaataattttgaattttattggcatcactggtaatgacagagtggcctgtgccctggtatggtgggacatggttccctaactcgggatgttaccactattgtgtgggaagagttccaagaattgtttaattcaatgtactgtaacgcggcagtcagaagtgtgaagaggaaagaatacctagcggacccataaagagaatatgagtgttaccaagtgcacaactcaatttgaatgattggctaggttggccttgggaatcagacgtaccgacttcagtaagagagaaaagaacctggatggattgaatccaaaaataaagcgtgaccatattattaccactgatgacaacaccacttatgctgatatggtggtaaagtcactatgatctgagggcacagttgagtgcacctagcactcccgagggactcaggttgtcggtggagcccctactcctcctacctctggttatgataggggtagtagtgactcgaccactgactagaaaagaaaagcaccatctgcaccttctggctctaatcagaacaagaggttttgagggaaccagggtagaggcaactgtaaaggtggttccgaaacccgatacacttacttggaatgtcccaattgtaagaaacattatcttggtgagtgtagagggcaaggatgtttccagtgtggtttccctggacggtgtaagagagattgcccgtagctcatgaaaatgaaactgaagacaacaacaaaactttctgcagcaagggtgtttgctttacctcaggatgattttagatgttagcccttcacttgttacaggccagctctcggtaaacaactcttacttctatgtattgtttgactctagggccactcattcttatgagttagccataattattgataaattgggtagatcacatgatagtcatgataaagggtttggagcactactgccaggaggagaattaggtatctcaaaaaggtgggttaggtctatgcaaattagaacttaggatagggagttgagtgctaattgtgtagtattggttttagtaaatttcaatattatactttgaatggatttcttgtccacgtactcagctagtattgattgtaaatggaagatggtgatctacgaacccgagggcgaggaaccgttcatatttgttcgatcagttcagggatcccgaattcaaataatataagtactaaaagctaaagaattattataagatggatgtctagggtttttggcagtggtattggatatcacacggcctaagtcattttggccagaggatatccaggtagttcaggaatttttagatgttttttctgatgaacttttgggtttaccactacagagagagatagatcttgttattgatttaacacctggagcagaaccagtttctaaggcaccgtacagaatagcttcagtagagcttaaagaatagaagattctacttcaagggttgcttgacctaggattttcacggcctagtctgtcactctgcggagctccctgtactttttgttaagaagaataatagatcccgacgcatgtgtattgactgttgggaactaaataaactgactatcaagaacaagtatcctttacctacgatcgacaaccttttcgatcaatttcaagggaagatagtcttctctatctctgatcgggccatcattaattgagaattttagaggagggaatttcaaagactactttccacactaggtatgggcactatgaattcctggttatgtcttttgaactaaccaacaccctagcatcttttaaggatttgatgaatagggtattacaggattttcttgatatcattgttattgtatttatcgacgacatccttgtgtactcttaatttgaagaagaacatgagcaacatctctatatggttatgcagtgattacgagaa

SEQ ID NO: 130052 - DNA, 1212 bp, Cannabis sativa
  modified_base (67)..(76): a, c, t, g, unknown or other
tgaaccatgcaacataaaatgcaatttctgacctttattaattagtaaaatctgattatattgaaannnnnnnnnnttagggcacaaaatccaacaagtggctatggtgagttgggcgatatggagaacttgaaatgatttcatatgacaacaaaaaagttggactgttgccaacaccgttgcttcagcaagaattacccttgatcaatataagttcactcaagaaaggaaaggtctttccttgtctggttttttagataaaagccgaggtaatgagcgttgggttgcacctgttacaaatcagattaaggttaatgttaatggcgcgttgtttgtgcaagagtctagatttggagttggctgcgttgcctgtgatcattgtagacaaatgattgaagctttcaccattggcaaaccgggtcgtgttcaaccggagattgctgaaattattggcattaagaaaactttaagttaggttgctcgacactcctggcggcatgtgattattgagaccgatagcttggtttgcgtcaaagccattcaaagtaatatgtctatgccttctcaatttggccttttagttcaagatgttcgtaattcacttttttgtcttacaatcatattgagttgtgttttgttaaacgatctgcaaatagagtagctcattgtcttgcaaagggctcttatttttcgacaagttgtatgcttcaggtggaggattgttccactgaagtacaatccattgtaatggaagattttatttgttaatgaaagttactagattttattaaaaaaaaaatacatatattatcaatcaaaacagaaaataaatttatattatgaatattatattacactactttttttaacaaattatattacactacgtaattaatcataaacttgatgaatgattttatggactgctacatatctatcattatttcaataattatcactttataataaatatttattggataaatataaatattattttaattaacaatttctataataatatgaatcatcatgtatacataggtttaaagaccgcacgaagcgcaatttcgttctctagttacaatataattgattacgggccagtttggcacaattgtgctatgggaaaaagcaaatgtatttgtgctgtgagaaaaagcagctgcagcagaactgtagaaaaaagctgagctgagtgtttggtaaatt

SEQ ID NO: 130053 - DNA, 554 bp, Cannabis sativa
  modified_base (31)..(53): a, c, t, g, unknown or other
cggtagaaattggtgtactgaaaacgtcacnnnnnnnnnnnnnnnnnnnnnnnaaaacgaccaccttgatgagtagatcagacccatgctaactatttttcaaaacaatgcccagtatcttcgaaaagtcgtcagaaagtagcagagcttcaaaattatcaccgagaaaagtagcaagttaggcgaaataagtttagtggatatttttctcttcaatgtgtgctgggttatgaggtgaaaatggattgtcaaacggaggtcgaaggtggccgaaaaatgcattcaaagtttgaatctcaaaactttgacccgcaatcttggtttaacgatgacgttttaggcgacactggtttaggtgtagggtcccaagaagtcaaaaagtgcactgctctggtgcgtgtggttggatggtgaacggaagagcttggttggtcatggtggttatggtggttttttgatgagagagaaagaaaaggagaaagaggaagagagagagtgatctgcgtgagaatgagaaggagggaaagagattttgataaataaaataagtggtg

SEQ ID NO: 130054 - DNA, 544 bp, Cannabis sativa
atttaattaaatacaagaaaatacgtatagtttagcttagaataaaattctttaaactatggctctcttcacacgttgatgcgatggttgaaaaatgccaaaacctgtagcttcaaaagacaagtaatggttgctgcattggcagcacttgcatacaacatatggcaagctaggaatggaattctatggaatgcaacaggtgctcaaagcaatagaattgtcactaaaaccaaaatagaagtagtgagtagaatcaaaagtgcttggcccaaaaatgtaaatgctaaagatatgatttggtttgacacattgtaattgttattcccatttttgtaagcatgacatgtgaattttaatcaaggaaaactgagaagttattagctaaccaacttcctcaattgatgctttaggaagatataggcactaactttgcgggaggattcctcgtgaacgagagtctcttgactgctagcaatacggaggatattcgtgagctaaagtcccccttgttaagttatttttagtattaattttagattaagtt

SEQ ID NO: 130055 - DNA, 1050 bp, Cannabis sativa
aaaatagtatatagggtaattctcttatattttaagtataacaatataatatctaattatttatctaaactaaattaaaataatagttaatttgattgaatattagaagtattggatttttgaacacttcatccaatattcgatctaatccaattagatatttaaaagtaatatatgatctgatccgattataattagatattcaatatttagtggtcgattataattgaatcgatcagttataattgaatttgattgattcatacacacccctaattatatctagagaagatagcgatgttggtagcccttccgtatttctttccaaaagaagagggagaaaaagaacacaaactcatataattgagatgacattggaagaacattttcaaagcaatggggtcagcctattatttgtataaaatgattcccatataagatattgttgtatctaaattctaattattaacatgtaaattattatatttattgtaactttcccaaattttgattttgagagaggattgattgattataaaaatcatataatcatatataaaagaaatttaaacaagatgtaaattttgtccaatgatcaatctccaacaattgcaaataatgcaattaaaacaaaaaataacatatctccaattaacaatatctctattatatttattcaatttctagtcctagagtatcaacaaaatcaattgaaaatctcttagtgcttaagtgttgaataaatcaaacactttatttaattattttataaaacattaatatttaagttatattctacatgcaattataaattgagaacttctaaaaataaattataaatatgaaatattatccccatatgagattatattcaatattgtgtaacactaacattaataggttctttttagggcattttacataaacgtatacattttgggctcgtttggaacgccgtattaggtcgtattatattgtattatattgaattgcattttatgcaatatttttatgtaaaactatatgtggtattaaatttgatggacacct

SEQ ID NO: 130056 - DNA, 556 bp, Cannabis sativa
gatcataaactttatgcaaaattcaaaaagtatgaattctggctatcacaggtgtcttttctgggacacattgtcagaaaagatgagattatagtggatccaaataaggttgaatcagttatcagtgatcactttacatgcacataacctgagattcattaataccttaatctctaccttcattactagtatatttattttgtttctatacatcattgaattgatagaggaattagcttgcttaagaagctgatagggtcgcttaaataacaaaacatttatcctactaaatttagcacaaattatacatcttacattggagatttctaataaccatattaatattaataattttgtacacgaaatttcgctccaatgtgcaaagagcaaaatagttaaaaaaaaaagttaatatgtaattaatgttttttgaagatgtacaatacaattaatttatgggaaattaccccatatactattttcttaattttttttttcaaatttatgatttgagtttctaaagtggttttttcgatagtttctatgtgggttgtta

SEQ ID NO: 130057 - DNA, 1005 bp, Cannabis sativa
  modified_base (32)..(32): a, c, t, g, unknown or other
  modified_base (58)..(66): a, c, t, g, unknown or other
aaaacagctttatagaacatgtttttgaaaantattttcactttttcaattttaaaannnnnnnnntgattaaaaaagtgttaccaaatggcgcctaagttttcaaagcccataattaatgtttttatttgtttagctaattttatttgtcactaattaatgctagaaaaatcgacagagtttgttgtcggtgtcgaaaaagttgttggagtagctgtcgatgctagaaaagttgtcgaagctatcgacgccgaaaaagtcttcagaattggcattgtcgccgaaaaatcacaaagaaactggtttcttgatgaagaaaatactttcttggtgattttttggcgatacaaatttcgacatttttttggcaccggcagcaacttcgacgactttctgacaccggtagctactctggtgactttttggcatcgatagcaaacttcagaaaagttgtcgaaattttcttgatgaatggagacttttttgacaacgacagttactccgatgacattcttaacaattagttatataaaacatatcgtttataacataatttacaattagttactaaattcttaaacaaaaaccactagaacttatataaaacaaatatttacgtggctcgccacgtaactttcatctagtttatgtaaatacctcaataaagaatgtcacaatagtgggtgtgcgtctaaaaaggtgattgtgtcagaggagtgccacgtgggcctttttcaggacactgactgttcttagccttttcgtattctattcttggatgacccttgagagcaccctcctactaaatgattgttgaatattcaagatttgacgtccaattttattgttgagaaacaataattgagtaaccagaccgtgcgtgaatgggtctggcttccttgatgggcctccatattgacccatgtacttgttgggttttatgccctaaataaaactctttacaatcttattagtaatcaatataagaaatttgaagtgatttat

SEQ ID NO: 130058 - DNA, 1226 bp, Cannabis sativa
tgaaccgctccagaaatgttgcaagagaaatatattagctctgtctctaagtactctagaatgattaattactctagcgagcccgtgcagaattatgtttgttcttatgtcaatacttgctctgctttcaccctagtccttcgtaaattttatttgaagtttctgcattcgggtctgattatcccaactgctgcatattttactttttatcataattgcagcgatatattagttttgacttagtattcatatggctggactctggtattaatatttgaagcttctttaaccgaatctagacatcgatggagcttatttcggaacaacatttcctcatttgttcctgatgacatacgggcacttaaagcaacaaaaggcatcccagaattatgttcccagggtgttcggattcaagcttcacaagccataatgctgaagtttcaaccttcatttttgtcaaagagtttactgaagaggacttgaaattgaagttgcatttgcaacaagcaagatgatgcatttgggaatccagtgaagcttgaaaacccttttcctatttgtcatcataatatagaatttggttgtgttgtggaaaaattgatattttatcattgcatatttacagtcaagtcaagaatctatctaattttcaatattagcttagcttaaatagcttgcccttttaggccagcttcttcttggtgtcttccctttcatagagcgcttttgcttatgtagtgcctcctgcccttttaatttttttacttgattttgtttttgttgcctgcccttcagaatgagattgttattgccaaagcaaatttttgacttttggtggtatcttgagttgccaaagtttttgctaaaatcctcattatcattgcctcttcttgaatctctttgatcttgcaaaaatgttataagcattcatcaaaaaaaatgttataagcacttttaatagaaaagttacttgagcgttaccaacgatcaaaattggccgaatggctcaagggaatgaggaaattatattctgtacttattttttatttcttattttaatttttacaggtcatatccaatttattaggaactctaaatttgataagttacgtgaggttatattggaaacttacaaaaatactaaaatttgggttaatttttacaaaaatattacattttttcaaaaatactgtgtttttataaaacaccagtaaaacgcaaagcag

SEQ ID NO: 130059 - DNA, 1927 bp, Cannabis sativa
  modified_base (897)..(898): a, c, t, g, unknown or other
  modified_base (1319)..(1327): a, c, t, g, unknown or other
gggagttccgcctccaaaatgtgtttggcgcacggttctcggtcctcacagtcagagtctaagtcatcccctttttgtctctgggacactcgagcaataattccctcgctcagcgttcccgtggagaccgtcggtgtatgtttcttttggtccaggtgatcccgtaggtcaccatgttttccgttgatctgatgtcttagattgacgggagggtatctctggttccttgttcctttctcttcaggttcctggtgcacagaaacgctttttcgttcctctcaatcctgagagccaagactcccttattagagtttgcccctctgcggacctttcccttttaggaaatctgagcggacctttcacggatcctgcacctttttctttttctccgggatggaagtaggatttttccactggttcccttcaaagggataccgtatggggctaggctccctagacttatgcttttgggtgcttggtgaggactcttccggtgtttcttctagtcctgcagggatggctttagcgtgtatgtggatacctgctgcctccatggctttctgcatgccgaccatcacctcttgcatccttttgttttgctctttttgggccgtgatttcagcatcatgatcagcagccttctgtctcaagagtagtagttctgtgtaactaccttcgtcgtaggcgttgtattcgtcgaagtttccttcgtattcgttgtcgttggtctctcctcgtacctcagagcccacgttgactcttgaggccacttcctcatcttcagggttttgggcgtcttgaggaggatgaggctgacgtgtgttgcgagtctcgaccattgttgctttagcttataagactattgtctatttgcagatgcttccttcagctctcaannaaagcaccaaaatgttgaccgagttttttggcaaccaacttataatatatatgagaaagctataggaagtttaatgcatgagatttttatgtggttagggcattaatgagccttagtcgacgagtctttaattcttggtagtttttctctctttaattcttatagacccagaattctcgacccctctcttagtgtgtttggggggtatttatagtgttttatttagggtgattcctagaaccgaactacttgtctttctgtgtagtttcagtaggggtacatattcccagcagatacaaaatgggaaatgcatgacctataccatatgtatcttaggggttaagtggatataatcctttatcccttcttgattgatgtgatccctcataaagtaggcgtcactaggcttattaatcatagnnnnnnnnntgcagcagaggggttacgccgtcagacttattgattatggcagttgcaatgcgtcttctctcaagtgacattaaattgcaaggtgactattcaaatggagttcggtacctcctggaggtgccttaccgtagctctgacctccgggagttagtagagctagtatggaggcattgcactgggctgatttttatatgcgaattagtagttaatacaataatttagagaaagaaaattgaaagcattgcataatatataattaaagttactatttcagacaacaatgtaatttaaaaatataaatttgtgactttaaaaaagaagaatgaataatgataatgcatgggtaacgtctctttaaacgctatattgagattgattattccttcagtgacaattttttgaaagcaaaaaataaacattatatagagactgtgttaaagcatatttatagaatttctctagttattgatgtatttgcaattcaatctcttctataaatacaatatgagaatgttatggtgagatttctctcacctagaaactcgagacaagactcctatttaaaggacatgtatattcagatttccaatgaaagccgaa

SEQ ID NO: 130060 - DNA, 802 bp, Cannabis sativa
  modified_base (51)..(71): a, c, t, g, unknown or other
  modified_base (746)..(754): a, c, t, g, unknown or other
tgtaattctgaataactatatgttctggatttaacagattttgtacacatnnnnnnnnnnnnnnnnnnnnnacatgtaaacataaatgatttctaatcttttattgataacagatcagattacatttaaatgggttttatttagggcataaaatcccaacaaattcaacaacttttcaacggctctttttaaaaacaatccaaacgacaatgtcattggtggttgtttaatcaacaacgacattgtcgttggaaaacaaagtttcgttgttaatggtatttaaaaaaactaaaaaaaagaccaacgacattgttatgtcgttatttatattgatatttttactaacgacatttacgcgttagtaatatgggcattagtaatgccccttattgttgtagtgttatacattaaacataatcatgaaataaatcatgtgaaccatacagcataaaggtgatttctgatcttatattaattagtaaatctaattatattgaaatgtattttatttagggcacaaaaccaaacaaactagagcttcagggtttggcattctagctttggagtgacgttctaaaatttctctatcgaatgctcaaaaatcgtgtttatggagatccctcaagatgtctctcatctaaaaagacgagaattaacccagcagttagcccccatatcaagtcctaaataagaaatgcaatgggggttctgttgggttgtctaccctaaataaaactcatttcaannnnnnnnnatttactaattaataaaagattaaaaatcagtctatgttgcacggttc

SEQ ID NO: 130061 - DNA, 1708 bp, Cannabis sativa
  modified_base (1242)..(1249): a, c, t, g, unknown or other
  modified_base (1326)..(1328): a, c, t, g, unknown or other
ctattttgattagtaatcccgtttaggggattagggttttgtaaatatcttgggtagcgtgcctaattatcaaggacgttacagaacaactatatatattatatctctttacttatattgctcatctcttatttcgctaatctagcaaaaaacagtattagctaagtttttgcatcaattttatacatgtgtctcgttacataaaaagaaatgtaaaaaagagatttttatttattattttgaaagagaaattgcataggtagtagtgtgatatacagctgccgttgtggcagctatgaccttttccattttttctttctcttgttgtttgaaaatcgttacaaacaaaaaacaactcttatttatagattacaaaataaagtttttgaattgatatcacctcaaccttttctttttgctcctaagatatccttagtttagtaacacgagttacttatgaaacttcaacttgtgtgagtttcattttttatgtgatgtgggactaataatataaatattcacttttagtggttaacatcttttgccctctaataatgagctcataagtcataaattacaagagtcttctgggttagagagaattagatgaacggagagatgataaatgatggagaatataagagaggaaaaagagattaatgatcttttttatattgtttggtaagaaggatagagtgattgaaggatagataattattaatttataaaattactattttatccttatattattatttttaataatatttgttaagagcatttatgtactttacaataattgaagagggagagttctaatctttctattattggagggattataaattagagatttgagtggattcgctatcttgtcacctctcctttctctccttcactttctcttgtgaaacaaagagatttgttatctcctcctacctctacctcctctcctctccatccctccatttctctctcttaccaaacatagtgtaagagtatgataacaccactaataaattcacacacaattaggagtgtttataaaatagtcgattcaatccaatccgcacgatctccaatctaattcataaagtgcagatatttgcacttatgcgaattggaagttgattgacatgtaaaattaaccgatccaatccaattcacacatatttataaaaagaaattaaaaaatacatatacaaataaaattttaatgtaaagaaaatagtaatataaaannnnnnnncatataatacaattatatttcaaacttaatagattaaatatatattcttatatataattttttttctacatacaatnnnaaataaaattaaacatttttttatgcataatttttttttcctttgaatatgttatttgttattttatttgttttaatatattgttgaagacataaaataataataacttattttattttgttgctagttatttaaaaaaatattttttttttcataaatattaaattaaatattaaaaagtaaccaatccaaaataaccgatctaatccgcacttttgcggattggattggatttgaactattaagcatattggattggatccaaaaaaaataaaattcgcacttaatggggatcagatataccagggccggcccaagcattggacagcttgggccattgcacaagacccatattttttaaggcccattttttttttttt

SEQ ID NO: 130062 - DNA, 635 bp, Cannabis sativa
  modified_base (477)..(478): a, c, t, g, unknown or other
cattttgtaaaacgatcaacaaatatagcggctcactcttttgtgagagcctctatattccaccttaattgatttttcaacttgaacactattccagttgatttgttactaaatttggtaactgaattactcatttaataaaatgatgactttcatttaaaaaaaaaaatacttggaggaaaagtcttatattatagaaattgaatgagaaaattgggagggattggattgagattgttgggctgtttttgttgttgctaaagggtcaaatggggtagatggtggagtcaggcaggagtgaaggcggcttccgttgctggctaagagaagctaggctttagtttggctctttaaaattaaatggtcaacgtcaaagtctactctacccttcttcttcttcttcccttacaaaatgggttagctaacttaataatagtcaaaaacttttttatttttcttttataataataataatannaataataataataataatatgtctttgcatttttttttgaaagtaataagcacttccttaattattatccttcaaaagtgaggataagatattagcagggacaaccatttactaatgagtttttttttttttttttttgacgtggtgaacaaagtca

SEQ ID NO: 130063 - DNA, 1574 bp, Cannabis sativa
  modified_base (62)..(65): a, c, t, g, unknown or other
ttaatagaatcgatatggcatttttaaaccgacgaaataagttttttgtgacagttttaaannnncatgaaacatttagcgtcattttttaaccgacgctaaaagtaaaacagaaaactacgtatttagcgtcggtttataaatgtcgaaaatgtttttttgcatcgttttgtaaaactatttgtgtctaaggtatatacgtcggttttataaaccgacgtaaattctttaagtgacacttaaaaactgacgtgaatagtgaattttgtagtagtgaaccttgattataatcaggcacccatacacccaaccataatcctaattgagtatagaacgttctctacaaagtacgactaactgcgaatccagcctatactcagtaatctaatcgtactgatgtggtagcagataactcatactatctcatagcctagcatatatctgttggcaactaggtgcaactctatgtacacttcaccgatgtcctaatatgacaatctgatggctatagattttcctagtctgatggcaactaacatgtacgctaaacatgtatacatacatatatgcaactattatactaatcttacctcactttcgaattcaggtgtgccgaccaacctgagtggaacagctgctcgacgaattacaggcccctaaatcacattattcgcaaaactagtaagtgacgggctaaatcacttttcggggacttacacttgaaactaaaagtttccccattgataaaaaaacatggcaataccctagatattgcaaaaatgggaaaaactagggttcccgaaaatgccccaaatggaagaccggttcctcaaccggaatttcggttctgtggggtttcttggggaccaatcgaaattccgattcctacaggtccccctgaaacagaattccaattcagtacaggattcacataaaaattaacaacactctcaactcaaccccaaacttaaccaaaccttccagagctgcttaatataccccaaagaacaactcatgcaaaatttaatacttaaagattaagcaaagcaagagaaaagatgctaagaattaccttgagttggacataatcaaaacttgctggaaacttcttgaattggcagaaaaatacaaaaccctagcttgttcttctaaggaactcgagagagagggagagaaaggtatagcttttctcttattatctttttttcttatttttgaataataaagtaaaatgaggtattatctaaataaaacaagggataaaatcagatttaatatgtttactaataattcactaaagacaaaacttcaattaggggaaaagactattttgccccccacttaaccaaaaagtctcaaaaccacctaagggtaatttggtcaattccaaaatcttgaaaattctcgacattcctaatgtctcactatattgtcctgccatactaaaaatactaaaatattattgtaatggccaaacgtcgcgttctgatgttgtcgggcacaaaatatgcaaaaacataaaatttcatatatagcatatataatgcattctgaactcaaataaatctccataa

SEQ ID NO: 130064 - DNA, 902 bp, Cannabis sativa
tctctctctctctctcttcaacttttgagcctcatagggatagagtacatgagcacccatagcaagtctagtactcaatcatagtgtgtaagactgtaaagaatccaaacaattgaaggaaaattaggcttagatcttgataatactttgcgacagaaaggaacaagggttagagatttgagtggaaagagtcattatattctgctacaatcaatgtaaggtttcttgaactttatatgtgtttaaatttcatagttttagaaattcatatttaagatgttaaacaacatacatggtagtaaatctagatcttactaaaataatcaccaacaaatgttatcagggtcatggtaatgatttgctttcataaaatatagatttaaatcaatgattgtgatgattttgatgtgttcatgttggtttatgtgcttatttgataattgtatgcagattatgattttacgatgataaatatttttaatttcgtcgtggaattattatttctagaaagcagattaaaaattaatgaatttagtattttgtaaagctcaatttggatttttcttaaattagttatgattttttgaatttgaatgaaatttctaagatgggatgcacacgtgcgtgcgcggaggtaggatgtcactcggtcaagatcgagcttcaaacaatccctgtctgaggtttctcggacaagggctgtctgaagccctagtcacgatgagaatgctcggctaaatagggtgctctgtcttgcccatctctcccttgcacgcacatagggataatcctcggccaatgcatactccctttgccaaatcttgtttttgtgatatttttagtttcaaaaatcatttttcaatgaaacaaaatttaaaatttagtagaattttgtgtagaat

SEQ ID NO: 130065 - DNA, 1424 bp, Cannabis sativa
aagtaataaaagtacgatcctaaccatattcattaatgatcacatatctaacctataatatagggtacaccctaccacaaccacatatatagaaatatatgtaaactaaaaaaataaataatttagggttattgctttgcttaccttccacaaatctctaacaagaacatgtgtaaaggttgagagtccaatttctctccatcccacagatattgcagccatggagttacctctattccaaaacactaccaccactctttttcttgataatggcccagcccaaacctgcaatgtatagggagagaaaataaaatttaaatagttagttgcacccctataattaaaaggaaaagttgtgacagcgagagtctcgtgattcgtaaagagaaagatcaggtaaaatgtgcaatcctatatcacatggagaagatcaagtgtgatgagtttaagacgtgtagatatagaattacatagttgaagatggtttaaatagattgatgggtgcatatgccaacaacatgtatatttttttggtagtcctgtgaactccaaaattaagcgtgattaaccaagagtagtctcaaaatggctaatcttttgagaagttttgttaaaaaaagcgtacgaataaagacaaaacacgctggaaagactcgtgttggtttgtaaggttaatcattattctaaaaaaaaaccaaagtaacatacccgtgtatactgtgtcggtatgagactatacaactaattagtggagaagttacacatgtactcatgcaattaatagactatttaaatctaatttttgtcatacctctagtccacctttggatcgaattttccttgcttgaacacccaaagggtcttgattaacactaatcacttccttgtttccaaggatttcaagagtttctttgctcaaagatcgaacatcacatccaattagcaatggagcctatatatgccaaagcaagatttttgacaagtcaataataacagagattaatatttagtgttactaattaagagaattaattaagaattaaacataccttcattgctgcccaaatactaaaatgtgatcgatattcctctacattcatgcctccatttcccacttccaacatgtctggatctattcacaaaatcatcatcataaacattaggttattcggaaaaatgacattattttgtttcttttagtaaaatagcatttccaacgcgcccttgccctaatcgattttttttcgaaaatattatatttcacacaaaattatcaaaataagattattttatttgcataataagggtaaaaactattttggactttgtgttttgcaaaagttaccgattggatcctgtattttgttaaatgacaaaatgaaccttgtattttccaaaatgtaaaaatatgacactgagcttat

SEQ ID NO: 130066 - DNA, 604 bp, Cannabis sativa
ggaagctaaattgaatgggttgttagaaaaggatgaacaatattggcggcaaaggagtcgagctttatagttacaatggggggatcgcaatacgaaatattttcatcataaagcatctgcccgtcaaaagaagaatgagattaaagggcttcaagatcatatgggtgtttggcaagatgataaggttctcgtgtgtaggattgtggaggactattatgagaagttgtttacgagttctgatattaatgaatctgtcctaaacgaggtgcttagtgtagtccagccgaaggtctcttcagttatgaataacgacttgttggctgaatttggtgaagaggaagtgatccgagcagtgaaagagatgaatcctacaaaagcgcctggtgctgatggacttccagcacttttctatcaaaagttttggtccaaactgaaagtagatgttgttgccgtgtgtttaaatgtgttgaataatggggcagatctgcaatgtcttaatgatacagtggtggcattgattcctaaagtggataaacctcaaagaattgaggagtttcggcctattagtctttgtaatgtgatttataaaattgtctcaaagtgt

SEQ ID NO: 130067 - DNA, 1732 bp, Cannabis sativa
  modified_base (150)..(151): a, c, t, g, unknown or other
  modified_base (404)..(408): a, c, t, g, unknown or other
aatagttttggcatttacaagattaaaatttgaaaatatggcatttgtaaaaatatcgataaatggataagaaaaatgacaacaatatagctagtgttgggcccacatcatggctagccactataccctatttttgctattattttatcnntttttattccatataattcaatcttaaccctaagtgaattagtataaaaagaaaagaatgttctcataatccaactaatgactcttaacctaatttgtatcttgtcagacaacaagagagtttgagacatcttcttcttgttcttgttcttgttcttcttcttcttctaattttcgaatcctaaagtgttcttcacataaattttcgagcctttgtgaatgagtgcatgctcacccatagcaagttagtcctnnnnnatagtgtgtaagactgtgaaaaagtcaaacaactagaggagtgtcgggctcaaatcttaattatactctgtgatagaaaagaagaaggattagagatctgagcagaatgagtcatttaattccgctgcatccaatgtaagatttctcatattttatatgtgtttaaattttattgtttttgaaactcatatttaggatgttaaaaacatactcgttagtaaatctaggtcgtggtaaaatataatcaaacattataaatattacacatagagtttaataaaatctctagaattgagaaattacaactctaatgcccaatttctaaaaataggtcccacaatataattaatcatgcataagtataaaatttaaataattaatactaattgcctttactaatttataatctaacatgcactcattacaaacataaacaataaaaaaattacgatattgaccaaaagggaattacttaattgctaaatcgatgatgagctataaacaatgataaaagacaaagaataaagaaagaaagaataaaaaaaatcataaaatcttgcaattttttttcttcataaaatagaatagtaaaaatattactgtgttccacgggtcatacatatcatctatgaaagtatccaccagtgttattcttcaaatgaatttgccacaataattatctatttttttaacaaattatatggataatagtgagatatagatgaatatatatgaggacataaatttaaaaaaaatatatttgatatttagaataacacatcataacgtaatgtattgtatattagtaatattttacaaagattggatcattatgaaaattttaaacaattattctaataaactaatttttacttcaattcttattattaattactaaaagaaacaataattacttataatagtaggttatcttaatttttagttttattttccaaaagataaaataataattctttggaattattacatgaaaattcaaaattgacactatatttataaaaatactcccataaagtgtgggcagcaatattatctttaatgaacttttatttaccaaaataccacttacacatattcattcatgttagcccaaaccatcttccaaccattacccttttgaaatccacattcaaaacccgcgaaaaccacctcccagccataatttttgccatctttttcttccaactgcttcctatatcaatttttgtatatatcatcttctgcttctccatctccattgccaaaacaagcttcaaaaacgggtcataaatcagttgttaacaaggctaaagggaaacgccca

SEQ ID NO: 130068 - DNA, 1726 bp, Cannabis sativa
gagagctcaagtatttcttgggtattgaagttactcggagtaaacaaggtattattctgtctcaaaggaagtatgtacttgatttattaactatgacaggaaaattgggtgcaaaaccttgtaatgctccaatgaatccagatgtgcatcttacacgtgatggggaaccatttaaagattctaaaaaatatcgcagattggttggaaagttgaattatctaaccgtgattgatattaatattgcattcccaattagtgtcattagtcagtttatgtcttctccaacaattcatcattgtgaagcattagagcaaattttatgttacttgaaaggagcaacaagacaaggtatagtttataaggatcatggacatacccaaattgggtatttctctaatgcagattagacaggatccaaggtagataaacaatccacttccggataatatgtatttattgggggcaatttgatctcttggaagtgtaagaaacaaaatgttgtgtctagatctagtgctgaattagaatatagagctatggtacagcctatgtgtgaggcaatatagatttatcaacttttggttgaattcgtgtttaagacttccattccagcaaaattttggtgtgataatcaacctgctcttcatattgcctcaaatctcgtgttccatgagcaaactaagcgcattgagattgattgtcattttgttcgttaaaaaattcaacaagttttgatctccacaggatatgtgaagatcatagaacaattaggagatatttttacaaaggctttgaatggggtgcaagtttattatctttgtaacaagctgggcttgattaacatctatgttccagcttaagggggagttagggacagctctgaggtgagacaaaggaggcagccaccttaggtcccccactggttagggcccccattttgaaaaaaataaagtatagtaagtaataaaataaataatactcttaatactaaatatgtgtcgcatgctattggtgatttgattaatttaacaactaagaggttaagagttcaaatcctagcaacttcacaatttcaaaaccctaatttttatttttgcctaaggcccaaattaacatagggctgtccctgggtggagtgttagaatattagttgtatattaattgtaagaattagggtccttgtatttaatagtttcctatttttatttagtcgtttccattagtctcctagcttcgtatattaatatacactattctatgaaatatcatatacaattcgattcaccattcactataaatataatataattttttataagcataaatattgttttaaaaataattttctaagtaaatttgaaaattaaaaaatatatgattagaattaaaatttaaatagacattaagtaaaaagtaaaaaaaattaggtctggagtttgttagttgagcttataatttataatattcaagattaatgataaataaaaaatatattaattatgatgttattttcaaggattaatttgagtcattagattaaatcaatattaataggcactacaaaaaattttatttttagtcgcaacaaaacttgtaactaaaagtgaaaaaattgtgactaattattaattattattcctatgttgtgactaaaacgttcgtatgtaaatgtactagtcaaaaaaattataatttattgtgactaaatgtacttttagtcacagta

SEQ ID NO: 130069 - DNA, 1289 bp, Cannabis sativa
agctttcggcttctaagttgactagagtaacagaattaactaaaatatgacttgcaaacctttaaaactggttacgaactcattaagtaaccggtgccctgtagtgttattactctaatcaatctttatatatcttgggcaacaattttcaaccacaaatatgtagttatccaaatcttttcaaactcttatctaacttgacaaacataaaatctttacaaatatggccatatttgattgttgagttgagtaactaactaatgagatgtaacagaattaactaacagccatgaatctctacagagttagttagtcagttgtacagctgtattgattctttcatttgcattagcttttgaccatttcatgttctctctttgtgtttctcaacttcaattattagtgtatgaagcttttcgaaactttgtttttgttttcctctttcttaggtgacccgttcaattggcgatgacgatttaaagccagaagtaactgcagagcctgagatatctgagactattctgtctgcagatgatgaatatttggtaattacaccattcatttaatgagttgttatttatttttatttttttctgaattagtgagttgttattttaatacgagtaatttgcggcttaaatatttaagtttaacttccagttgcaaataaataatttttcgcgatagtaatacttaagttataattttagaacttctgtaaatttaaaaaaatgacacgtgaataatgagttaatacttaacaaccaggtacttacggaagttctataaatataacttaagtattattaccgtcaaaaattactcattttgatatcacctagtcagaattgtgatttgctctcacaaaatttggcgtttgagatcttctcgagcatttacgtggcaattgctatagtttcttcttctcctcaaatataataagaggttttttgtatagaaaaaaaggaattctagacatagactcgggttcatggctcgatttggccattgctaatttcgaatattagagcgaatatctcaacaaaaatgttttttaaatgaaatgatgttgtttgttattaaacaggtcatggctagtgatggattatgggatgttgttagcaacaatgagatagtaagcataatcaaggacacagttaaagagccaggaatgtgttctaagagattggcaaccgaagccgccgagcgcggtagcaaagacaacattacagtaattgttatctttcttcgtcctgtatccacagcagagagaatttactaagaaaata

SEQ ID NO: 130070 - DNA, 1082 bp, Cannabis sativa
  modified_base (38)..(48): a, c, t, g, unknown or other
aatcttaaaaagaccaaaatcttaaataaaactagcannnnnnnnnnnggcacgtacattcacctagttaattattatatatctttatatttataagaatttatcatattatgttttactacatttaaaaatctcgaaaattattcctcgaactattcatacttttataaaattttaatgtatttatttaatcaaggattagtttggttccgttttttattttatttttgaaccaaactactataactattttgaaaatttcaaaatcaaaaaccaattaaatactcaaaccattccatttagaataaaaggtttttacaaaaatactaattattggacaaaacttataattttactgccacacaaatgtttttacaaaaatactgttttttttttttttatataaaaacaactataaaatattaaacggaacaattaaaaataataactaaaaaataatagtaaaataatagataaaacttacagtattttaaaaaaaaaaattctaccctacagccaaaaaaaagttaaaaattttaatatatagtgtaaaaatccctaaaataaattagtttgattcgaaactatagtttgtatttcgtaattaatctattttttgatgtaattatttttttttatttttatttttttagcttttcaaagtttattagcaataaaattgaaacacattactaaaatagtattaagtcaaatattcagcctaaaattatttcttaagtaccaatatttaattcgaaacatatatgttaattatataaaataaattggtggtttggtttggtttaaacaactatcgagaattctaatcaagttcaaaaatatttaaacagttatattgaccaaaccattaataataccaaattcatttagggttttattttattattttacattttaaaatatttttttttttatgtatttttaccataacaactaacataaaatcttaaatcgcaatcaaatctgttagacaatttatatgtataaactgaaacatatatgattaagtataaagtgcggaattaataaaacatatatgtactataactaaggatcgaaat

SEQ ID NO: 130071 - DNA, 526 bp, Cannabis sativa
ctgatgccgtttgggtccccaaggccgtggatggcgtgaaagagaaggtgggttcaggcgagcgtgcttcagttgtctccgttagtggtaaagaggttgatgtgaatttgaatcttaagggaaagttgtctgagtcctttccctgtttagagtcctcgaaattagtagaatgtcctgaagagccgttggtcaatggtgggttgtgtactgatgttgtaacattggaaggtgggccgagtaatgacaaaagtggtttgggccttggggttgttgggccgagtagagatgttcacttgtgtaaaaggcttgaaatgataagtaatgtgggttttgaaagtgagggtgttatggttggtgggccaggccgtgggaaagaattggaacataaatggactgatgggtccattaatttagtgaggccgattgtcattaaggatttaattggtaaggaaagttttgagggtaatgttgggccacgtgggaatgggagtgaattggtggatttggtgaataaaaataatacaca

SEQ ID NO: 130072 - DNA, 913 bp, Cannabis sativa
tagcatatatttaatcaatctcttattttagtccttgtattattttacaatagagttgtaataaatcttgattttcttccattgttataaaatctctaacagagatagttagtggtactagcgcagtgtagaaagaagaatgtgggaagttaagtttaatcatatatatattcgattaattatttaagtaggttaggagatttttcgttagttaaccatagataactaaaaacgtagctttggtaaaactaaaaaccttaactttattcaatttaattgattcaattattccacactaattaaattttgaactctaatctctcctgttactttcgagttatactcttaggttccatagtcaaagcttcgtacgtcaacattcatctccactttccaagaattttagtgaatatactcaatacttcccatctcttttcaagcctgaaaccaatgaatattttctctcatttataattttgaaattcaaatcagcattctcttcaattttttgaaactcaccatccttgttctcttaacggtaactatcacacaaagtcaagttcatcttcctttgagctattgaaccccatttagattttattattggacttttggcttcaaggagtagtcatatattatcgactagtgcttaaaattaaggtacgtattgagttatgtataattaaggttcagaatttaaagtttaattattagagtttttgtcataattttatataatttataaatacttgtttaaggttaaaggaaaacattacgttgtaaggaaatctgttaaggagccatatattaagaagtagtggtgacgagataataagttttaagcagcgagatttcaggtaacgaaattagatagttttgtatgtgtttatctgcataaatttaaattctttat

SEQ ID NO: 130073 - DNA, 733 bp, Cannabis sativa
taatagtggaattaatttgtataaattagtggagggtatatattttgaaatggggtattttattagggtcaaaaattgaaatttccctatggcaattgactaagcagctatgtcatcattttgtttgccgcgtgtgacaaaacttgacagaatgacctttttacaacactgtgaatagtttaggaaccatttataatagtttgaaaggcacaataatacataagccgaaattcgagggacaaaaatcctaaatatccattattttttttttataacaattaagtccgtacataaaacaatttggtttgttcccaagtgctacctaatagcaatgcttaaccatacgacaaaaacgactactattttttaattgaatgagttacatttagatttttgtaactcgatctttacattgggttgaataaaatataggatcctagctgtaacccccactaaaaaaattacattttaagacattaaatattttccttttatttatttaaataactatacgataaaatagtaaacaaaacctcacaaaatgattataatttttatatgaagtaaatataaatattttttttcacaacaattaagcctctacataaagaaaaaataaaatttttaaaatactcttttttatattttatttacaattttagaacttaaaatttttatttctattctatataaagtgtgcctatataacagaattattggtttatgagaaatt

SEQ ID NO: 130074 - DNA, 1362 bp, Cannabis sativa
  modified_base (1005)..(1021): a, c, t, g, unknown or other
tgtaatttttggtgttgtggttggagtagaaataatttttgacaccaaatttggtgatagtgtaacaccaaatttggtgtctccttggagatgctcttagacacctaatatgtactccttttcttgcagttacctcatccaccttaaaatacgttaaaatcattagtgaaattcctgagcctttaagagtgataatttcaaaatctggaaggaacgagttcttattcacttagcttgtgctgacatagactacacaataaggaaggacgaacatattgttgtcattgcgaccaaaactgctgctaagattgtactacgtgagaagtgggagcaatctaatgatctttgaatcatgttcatcatgtctaaaatttctatgggaatgtctaggttggtggagccacctgaaaaggtcaaagacttgatcaaattgatggatgagcagttagacatctcttataagtttgtattcaaaaacctcattcaagagttctcatccacaaaactcactggtgttaaagaagtttgagaacacatctcaaagatgagggatatcactgctcttctaaagaagctcaatgttataatttctgaaactttcccggttcattacatccttcacaatattcctcttaaatatgggcctttcaaaaattcctacaacactcatagggaaaaatagagtattaatgaatcgataatcattatccgtattttcaaaaaaaaaaaaaaaagacatgtgtaattcaaagactttacttcaactaatacaggcccaaatgcaggcccaattaagataatggaccaaatccgttattaaagtcaagtcatccacatgttggacagacaccttgtccaggtgagataaagacccagtgaagcatgtttccagatagtaccaagcagtgttcccagaaaggtaattaatgagcatccaaatatcaagcttagtatctcgtttatttgttattaaaatttttattttaatttatttattaattagannnnnnnnnnnnnnnnnattaacaaataaatcctaaaatattctttcttcttaattaagcccttacttagtaaaaattcataaataagacatagtctaatttataattctaattggttaattaaaactaattaactgagtctacaagccaatattatctcaactagtgcgaggaccatgtgcctatataatcaagctctcaagtagttctagaatttattaagtaaattctctatcttattaattcttcttgactctattatagattcgaaattgtaatcctggttacatagaatactctatatgttccaaatatagatacactattaattatctattgttataatctaaataatcaa

SEQ ID NO: 130075 - DNA, 548 bp, Cannabis sativa
tttgagtggtttgatgtacacccctacataaactttatctcaccatttgatgattttatccaatgctcattattactagcatcatgaacaaatattaaacaccactctctttttgttgggtaatcttcaactgatctaggtaagtaattgcaacagttaccctctctcactagataagttcctgttgtttcaaatattaatataatggattgtgaataattagtaattttttatcgctactacaaaaattatcctttgcaacacttattcaacaatactcaattaaaaagtattcttaatttatttatttttatattttcacacacataatatataagtgttgccaataactcttaggtttttacacttaattcttttaaacaaataaaaataagaagtgatttttacactacgtattgaaatttctaactatttttactcttgggtaaaattttttaaaaaatattgtattttttttaaaaaaaaatactttgtaagtttttatactgtgtattgtgttaaatttttactgttatttttaattattc

SEQ ID NO: 130076 - DNA, 897 bp, Cannabis sativa
tgaggattgtctcggaccacagtcgggttatcctggactcaaaccctcctaaatgaggtcctagccctttccctttcgacaaccaatggttggaacataaattgtttcccaataaattccagacttggtggaaaaaggcagtcgggttagggtgggctggcaccaaatttatgagcaaattaaagcagtaagaggaaatattcaggagtggagcaaagaaaactatggattcaaacgcgaggctaagattgccatggaaagaagattgctgatcctggatcgtctggaagcctctgaggagtggaatcagtccttaatggaggaaaggaaagccatcaaaaaagaatggcagcagcttgcatttgaagaggaaagaagtgtgtggctcaaatcaaagtgcaaatgggctaaagagggtgatgcaaactcaaggtttttccacaatctcttaaatgcaaaaaaagccaggaacacaatatcaagactcgaaagggaagatggctcaatcattgatagagaagaagaaatagtcacagagatagtgtctttctattcaaacctgtataaagctgaaagaagacgaggctcgagcgtagaaggtattgattggcaaaagattccaatggattctgccatggacctggagaggccttttgagatagaggaagttaacgaggcagtgtttaactgcgaaggaagtaaggccccaggaccagatggttttagtttggctgtctttcaatctcactgggaggtagttaaggaagacctttgggaagttgttaagtcttttgagagagaaggaatcatccaaggcagcatcaacgagactttcatatgcctaatcccaaaaaaactcaacagttgtagggtaaaagattacagaccaatcagcct

SEQ ID NO: 130077 - DNA, 976 bp, Cannabis sativa
atgcagacgacttggtttacaagatcgacactgaagcatggcgaaacgaacttgaaggtggtggtgcttatgaatctcatagcggctgcagttgtaatagtaaggtactaattaatcaattatacatttatttattatgtatttttttatatcaaatctggtaagtaactaattaatatcaagattggaaacctatttgatgtttgacattataactaaaaaattgttatttgtttttaagtttagaaaaatgttctttgagaatgaataagtgcgtttggcattgtttttagaaaataaattatgagtcccttaaaactgccacgtgatccataagattgtctaagctaccgaaggcgtgtgtaaggaatctgccatagataatgcacaaattttaaaatacctgtttataaaacttttgaatcttttaccatatctagtgtaattttcttttttaaagtttcaaattacaaaaatacgatttatttcataaaataatatagtaaaaatagcaacataaaaagtaaaacatcaatcccaaattatatcaacaccatacaaagaaaaaaagatgacatgaggatttgttgtgtcaataaaccaaaaatataaaattttagagatatacaaagaaaaacttgagagcaatgagcttttcaaatcaaaaagtgagtgaaaaataatgaaggctctagtagtccaaaagatatcatatttataaaattataaaattatttaattattattgtatgagaatataacataattgctccctcattctctatcaattacaaattattctattgcataatgcttgtcaggcactcatgagactcatctcatcaattcctttaaattcctttgataagaccataaaagctgagatagaagagacacttgagaaattgaagcttcttctagacaataaagatcttggtttggaacgtgtgaagaatcataagcttccagagagggt

SEQ ID NO: 130078 - DNA, 1294 bp, Cannabis sativa
  modified_base (1247)..(1255): a, c, t, g, unknown or other
aaacatttcaaatttccttgcataaggtatattctagagagatcgtccaagaacttaatgataactcatatccactcctaaatgtacacccatatgctttaatacatataaacttacttccaagtggattttgtcatgttttctctttgcagagaatgatgttgtcaaaaccgttatgaacaagatacaaatgccatagatttaatattatgggtgtggtctttcgatcatccctaggtttagttacaactaagatttcatagaatagttaagtagattttggtcacaaaatacaaaactcataatctatacatttaacataaaattaggatcaattgaaagaaaatggatattaacaacttgtgaaatttatactgtagttttcaatgtattctagaaactgaaattcaatttctatttggaatctaaaaattgaagtcaaagacataaatttatatcaaatatttcttaagtaattattctaacttggacctccattaaaatactaattcaactctaaatttaagttgttttagtaagcatatgaagtaggagatttttctaagattaaggatttatatcattacgggatatgttgaccttgcttctagcgaacaacagtgagtcaaaaataaagcgattaaataagataagtaaaagaaagtaaaagtagtaaaataaagtgagcaccagattttaaagaggtccggccccataagtgtggtaatagcctactccccttgcatttttattgactgtagagaagaaacaaagtgttcttcctctagaaagctcttacaattgacctctgagtaagtttctctcttagatcactcttttctaccttaaatgtatttctaaagtaattttctcggtccgtttcatgaagaatgatttcccttttgcttataatgagtaaaataggaaactgtattaattctataattgaaatgcaagaaataggaaactaaaatgtgttgcctctattctctaactcaatcccgtaattataggaattatcttcgtgtgtggaaacaacaagattgatctctggaattgtatctttcatgcttcgctcggcataagcatgtctgcatcttggtcatacatcttctcaaccatcctgctcggatgtatgaatgttacagatgctgagtagtcatctatggactgctagggatactttcctctacccatgtatcaaaaatatgggacacgtgtcatccattttaatataatcagatttnnnnnnnnntaaagattagaaatcattcttttatgttgcatggttcac

SEQ ID NO: 130079 - DNA, 1035 bp, Cannabis sativa
catgaccatagatagagtttactggggaaacacccaccatttcgagaaatccagctaaccacaacctgcgaacacaccgcacatgcctttctagtcacgtggttgcacaaggaaaaagaaaactggctatacgtcgcaaatggctgggggtttcacagtgactcaaggaacatgcgatcgcacccataagcattgggccacggtgacacactaaccatttgaaagacttaaccagtattcccacacaaaaatacacagagagtataaagaaaaccctaagttctaaacaatgggtcagagtgacaaaatctccagaattcctaaggaagtatacatgcgagtattcaagatgttcatccaaatactggcgagtattcaaaatagcaattaaagagacgcgaatactcaaggtattcttcctagaattcacggttatataaatttcaggtctattttctcttgagaattacccacttctaacggaaaaataaagccgtacgtgtattccctacaaataaacatgcattttctacttctcaaaaattcaaaaattcagaatgcagagtttttctcaaacccagaaaccaaattcgaaggaagattcaaaaagtaaccttgagattcgacgattctccctgtgaaaagtttcgatcggttcagaaactttgaagattcaaaagaggcaaagcacaaatttatctaaaagagggattttgcctttgagagttttcgggtaaatggaaaaatgagaatgggagggaaagtaagagaatccttttgtatcaggaagcttaaatactgatagacctcataaattgggattatgacacgtggcaacaggaatgcctaaggtcttcccatccaacggttagccatgggcacgcctacacggaaaccgaagagtttcgtgacgtggcaccatcggcaggataaaatgcaataattatagccgtcatttttcgaaaccctcgatgggacaaccaaaaggtcacctcctcgtgacaaccctttacctgtctctcgagcaatagtttc

SEQ ID NO: 130080 - DNA, 643 bp, Cannabis sativa
tatatatactgtacccaaaataccctgatataagggagtcacatggagagtatcttgaagtgacctgagatgtggatcatccaaggcacattagcatagcgtacttcacctgttcgaatcgaggtttgaaaccaaacttctcctcaggaggatagatggggcgattcaggtgagatccaactttctattcactagtgggatccgggcggtccgggagggatcatatctattaaacaaaaatactctcaattatattacattaaaatgtacccaatttagtgagtggattgtccaatatacttttaccttccacttaagtttagcacataatttacattagcctaagtggtataatgagggcatcatctataaaagtgggtatatcttaataatataaaaacaaaagtaaaaaattaaaatagatgaagtaaagtgggtatataatgtaatttcctcccccttaaagcttgagtctggatgacaaaatgagctttcaaacttacaacaaccatcttcgaaaaaagctatctacaaaaggtgccatgtctgaaagatatgttcagaacgcaccactttctctcaccagacaatggcggacattaaatttaagggtggacttagttatacatttaatataatccaa

SEQ ID NO: 130081 - DNA, 760 bp, Cannabis sativa
taattggtcacttaattttgtatcacactttataatagcatatacattatacatatgtgcccacacagaatttttaatccaacagatacaactacgcagatcaaatcgtcaagtgagtgaagacttggtgtcctaagttagatcaatgaatatggatgtcggaattagaacatccaatttaatgacacacatggccctgcagagtggtggattcaccaatttgccatgccaactgtgggatgtgtataataaagtggctggcgcacgtgtgtttgagcagtctcaaactgattcagatgcaacattagaatttttggacttcctaattgaaagggatccaaaaatggaggtggtatattaagttgatcaagataatcgcttagcaaacttgttttgggcatatggaatctcaatagatgattataatttatttggtgatgtccttgcatccgatacaacttacataaccaacaagtataataaaccactaaccactacactacaagaaaaataatttttatcagcggaattattaggggcggaacaaatccgctgctaataatatcaatattaccaacagatatatgattccaccactattaaaaagttttaatattaaattaataataatagtattagcagcggagaaatatttattactggcggtccaatctgccactaataataaaatattttaaaaaattattagcagcggatgtatttattattaggggcggatcccgcggctaatagtgttaca

SEQ ID NO: 130082 - DNA, 944 bp, Cannabis sativa
  modified_base (61)..(78): a, c, t, g, unknown or other
tggtgttttataaaaacacggtatttttgaaaaaaattccgtgtgacagtatttttgtaannnnnnnnnnnnnnnnnngtatttttgtaagttttccaattactttcagtccaatgatgaaatccaagtctccaacgtgatatgcatgtggtttttggtaagtagaaattacgtaaactatgggaaaattttaaacatttacaaatttattgcatattttttttaacccatatggggtatggacttttaaaaatatttttcatttttgtggttttatttctgccacatttttgtaatttatttttgtattcccatagtgagtactatgaagtcattcaatctacgaactcagatttcatttttgaacacaaatgttgccttagacagtttgtccgatcgccgatcaacgcccaccgtcctccgatcgttgacctgagctccagcagccagaagtttagtgtgctagacctaagcaaaactccttcccgaccaaagttcctctttctggcacattttttggtgcctatttctactccgaccagtctaaacccagaacttcgacatcaaaccgagttgttgtttcactgcctatttttatggtgttcgacttccttgctccgagtggatttcagatatggttttagatctagtgttaaatgtttcatcttttttttcctcctatgctttattaacatgaagtaagtaaccataaaaataagtaactatggaatcaaagtaggaccatatgttagaaaagtttcataatttggctactatcttttttattaaatggaagccctattgtacttttctctcagctctttaatctcatatttgaataaagttgcatctgttggaatttattttaccgggatcttagatctactcacaagtatgtttattaacaccttaaatatgaactttctaaaacgatgaaatacaca

SEQ ID NO: 130083 - DNA, 551 bp, Cannabis sativa
tgtaaaactgaaaaacaatcaacaaacaactatttaaaaaataaaaatgtacaaattgatttaaagatattaccgaatcattaataaacatgtcgcaacaagaaagatgataaaaccaagttttatcttcaacgtagtccacacccaatttgaaaccaggagagattttttggacactatcctcttagacattaaagggcctaaaaattaaaaaaaaaatgaatatgaacaaaacttaatttaaataataaacataaataaataaaaaaaaaacaaaacaatgcataaacagaataaataaaacatcacctaggatatttaagcaatcctttgctaatctattcgtcaaagttcgcctcaagctcaggagaaatgggatcagaaaaaaatcatcaaagacccttgaagtatgtaaaaatctcaaaatcacgctcatctcctgcaaattgagaatctcaagacataaactccaattgagaggtcttcgaatcagacgaactaaatcaacaaaaggagatttcaatgttggggcacgctttctattatccaat

SEQ ID NO: 130084 - DNA, 1621 bp, Cannabis sativa
aggaatggagggcaatgggtgaggcagatgtctcactgttgaattagtggcagcagcaaccgaaggcaccggatgtgaagtcgttgcagcaggtgttgccatggcagaagggtgatatttgtgttgagcatttctgaaatttgttaaaaatgtgaccgcatatgaagcaagatcttttgctggtctcgcttgttggccatgaacaactcgattccgttcattccaaattgcccaaagtaagcaaaatatgtgttccatttcagcttttgtataaatggatgaaagatggaagagatagtcacccttacgcattgcagcagatagacttcgatcaaaagtagttacgccaaaccgaacgagcatatttgcaattaaaaaggcaatgcccgattgattcccaagcctgcctacaaaccgaacatgttgaatctgttatgacctttctttttaccaaggaagtagcaactggaaaagcatcatggacagctcgccaagcgaatattttcactttaggaggaagctgcaaagaccagaagaatttccaccatggtgatgcgggattggagctggagctttcatccatgtcatctaaggttgctgccagatgatagccagatttgacagtgtagaagccggtgttgtgatgatgccatatgagcgtgtctctgctagtgtaaaaactcagtggtattgtcaagatattgtccacatccacgactgagaaatactgctgcagagcttcaacattccattgacgctcctcagtaatcaagtttgcaacaacaccatttaaagggcctgagtagtggcaaggcaagaaggagtgctgaccgggtatccatggatcaaaaccagatctaagagtccttccatcaccaactttccagcgtaatccttgcgagagtaactctcttccccaatgaattccctgccatgtcatagaaggagagtgtcctaaggatgcttcaaggaaaccattgtgagggaagtatctgcttttcaagactcggctgagaagagattccggcttttcaagtattctccaagcctgttttgcgagtaaagcttgattgaagtgtataaaagaccgaaagcccatacccccttcagattttattttacatagaagcttccatgaacgccaatgtattttggagccattttcagttaatccccaccaaaaattagccatcatggactcaacttggttgcaaaagtaagttgggagacggaaacaactcatagcgtaagttgggatcgattgcaccacagcctttaaaagtacctctcttcctcccgcggagaagattttctcattccaactgttcatcaatttccaaattttctccttgatgttactgaacattttttttttgtccctaccagagtaagatggcaagccaaggtacttttcatgacactcacatataggcatggagagttggcgatgaaaaaacacctgggcggcaagagtagtgtttggagaaaaggacatcacagatttatccaaattaagctcttgtccagatgctttacgataagtgtccaaaactttcttaatggcaaggcaggatctctcatttgcttgacagaagagtaggctgtcatcagcaaaaaacaa

SEQ ID NO: 130085 - DNA, 1184 bp, Cannabis sativa
gaccagcttggtggccaaataagtccacgtgcgagcaagaagttctcatgcggacttagggggaaaatgttatcccaatttttgtacaaaatgatgtggcatccatctgggtgatatgtggagagaatttcgtaacttgggcgggtagttcacttcatggtgtaccgtcaagagttatttatatcataaatgactagtttgaagaagaagctgaaatatttagacaaggaacattataccgacctaccaacatctattttgcagttagctcgcacagaccaattagagtaaatgcaactagaatatctttaagggtattctctaaatgttcaagcaatgcaaatctcgatcaaatctctattttgtgggatagattcacgctgacaagagaaagaaggaaatccacctagttttcctttttatttctcttgatttaggaaagtaattaaattttcttatttgttttggaaaactaaactaatgtaattattccctataaatagtgaaattatttcactattcagggatccgaaatcattcattccatagaacagttacgctactaaaaccattgtaagagctttcaaagaagatcaagaaatccttgctctcttctcacaagtcaatacaagaaaaatggaaataggatattaccaccatcatgggactgaaccactataacaatttttgtgttctatttgcttgatcattattattaattatttctaattgctctaattggctcattatcgttggctaaaagcgagatcaacatgttgtaatttatatacaattatcattattattttagcaatattcctttaatttaacttttatttgtaaatttgaggcctgatttaaaatttacttttaaatgccaaatactgctactgtatgtacacgtagaatatttttattagtcgaaataactttaattatttttttaataaatttaatgacaccaaagtagtattgtaattttaattatttaaatattataaaatttattttaagtagttggcataaattagaggatattgccactagaaaagatcaataattaaggatctacaaattaaaatagagtaatttgcgacataaatacttaattttaactttcagttgcagataaatacataagtttaattttttatgataataatacataggaaaattctacaatg

SEQ ID NO: 130086 - DNA, 928 bp, Cannabis sativa
  modified_base (855)..(868): a, c, t, g, unknown or other
tgtgcgcaatgacaaggtgtggaatggtaagaataaggctgttaaagaggtagtttcgttggctaagggtagttttgatcaatggagttgtgctcaagataaaaattttggttcctctttgttttttttacaagacgacgaagggcacgagcactagattgtatcggttggtaatacaatcaaaattaatattgatgcaactatttttagcaattagaattagcatgggtatagttgggtggcccagaactcttctattcaaattattatgactcagacagtaagccggatgggggtagttgatcctgttcttgctgaagctatcagggttttacggagatgttgagttggttgaaataaatagggcagtatgatgtggtggtagagtcgaacagtttggtcacaatccaagctatccgaagttcgttagatatgacttttatttttgggtgcatttcagagtgggcccgaattctttctaatttgaataatgtttttttagtttttgtcaagcgatctgttaattatgttgctcactatttggctagagctccgtggttaaatggtgattgtacctattcagattttattattccgagtaatttatgtgatgttcttttaaattatttgagttaataaaattgtatttttctattcaaaataaataaataaataaacaaattgaaagtgaatagttaattttcattgataaaagttaatttggcatatatatatcaaaataaatgaataaaaatataatttgacataacccacccattcaatacccaccatttccttagtagtgaatacaacccaaacctctaaagtatcttttgttaattccatttttggcannnnnnnnnnnnnnaaatattttattatttattgtatattttcggctggtatacattaatatggtttcctattt

SEQ ID NO: 130087 - DNA, 511 bp, Cannabis sativa
aatattatcattaggattcgaggctgcctcctcttaaattctacaaaattcctctttagcattcgtataatccttagcaacatcccccacttccttcctatgaaaagcttttaaggcatgcttgatccgaaacaaccgtttcattaaactatcaaggccaccaccagcaacctctttgttccaacagtccatcactagctgagaataacccagataggacgaccaatgattcccaaatctagagggtttaatccctacattattctgcacatgaaaacgaacaaggcaataacaatgattcgagataacctcccatttgaagcgggcataagagttagggaaatcattcagccataaattatttataaaagctctatcaagcttggaatagattctctcccacacctcatgcttattagtacaagcgaagaaagaacccgaacttttgaactcctcaacttgaaccaatgctagccaagcttgagcgtccacaatatctttattctgaata

SEQ ID NO: 130088 - DNA, 514 bp, Cannabis sativa
  modified_base (485)..(489): a, c, t, g, unknown or other
tatttattctgtcgttctatgtgcctaaagcacttgtggtagctcatcaattcatctgcctttggctatgtttgacttcttttttatagtgtcattctaggttttattaatgacttctacttgttcatttgcttgaggtcttgatactataagaagcttttgataattttatttattttgcaaaattcaatgaataagtccccattgaactgagtgcggttatctcggacactattttaattggaatgccaaacttacaaaagatgtttttgatgacaaaatcaagaacttttttgcatgtaatagatactaaaggctaagcttttgtctattttgtgaagaagtcgactgctaggacaacatattttgcaccacctcgacatgtaggtaaagacctaattaggttgattcctcatatcggcgaggtcatcattttcaacttggtgggtggtactcgaggtacatatatgtgacagtcagtagtnnnnngatccgtaaggggaaacaccgggta

SEQ ID NO: 130089 - DNA, 574 bp, Cannabis sativa
atgtgctataatattagaaaaataggaaggaaaaaatataagatgccacatagactcctcttatgctttcttttatatatatatattgatttatacaattatttttttcctaatctaaattagttttgatatttccatatttttaagttattttgaataaaatgatatttttatttatttagtgtttagattttgtgttatttttcaaggcacattatgtagggttattcacaaattgctgcaatcaagatgacgcctcaagcttagggaagacaactcgagataaaaaatagtgttagcttagttagcaattgttggagttagtcacctttcattttattcaacatgacgcttaaagaataacgaatgtatatttttttgtattctcagaacatgtaattttattgcccataatgtgattaagtgagccttcgcccaccaccactttgggtgcttacctatttcttaccttccaaaagacttattttgtaatgaccataaaatctaattttctaattaatagacaatcctttcaaaaaaaaaaaaaaatgagtttatcatctcctcatagtgc

SEQ ID NO: 130090 - DNA, 1069 bp, Cannabis sativa
tatatactatttgaaattttctaataatttatagataatcctatatagttgtaatgtaagcgatcatgaaaaaatatttgacttaaagttgtcctggatgctaaaacaaatacaaccctttaaggggtatactatacatttaccctatgctctatacatcaatatactaaattctttatatttgtgctaaaaaaaagaacaaaacatctttacccttatgctaaaaaaaataacatatttaggcccctcctaagactaagggctggttccgccactgggtcacatattagtattggtataaatttaatataaatctcacattaattaaattatattgtatgtgtaagcacgtatcatttatcataataatgttaaaatagatataagaaaaatgttaaagaaatagtaatatataatactcaacataataaaatattaaatctcaaatattttaatttaataacaatataaattactgttaactatttgtaaaacaacacgaatagtgcctaagagcattactaatgcataatagcataaaaggtgtttggtagcaagtgattggaaaggaaaggaaattaatttgggataagttgatgaatatttcttttttggtatccattaatcaaaaaaaatttcaaattatattttattaaaatgtacccacttttgtgagtgatatctaatatacattgaccctccacttaagtctaacacataatttatattaacttaagaggtataatgggatatcatttatgcaagctgtttaaatttagagtcagtgctaacttaataaataatatatatttttataaaacaaaatttttgattggttgttagtgtcactaatagagatcatgtttattaataaatattaataactttattaaaattaaataagagagaacttgattaaataaaagagaagagaaaaggaatattttcccatcaattttttaaagaatgctattaaggataatacattttatttatttttattttattttttcgtattaaatagagtaaatactattttggaccatgtattttgcaaaagttacagatt

SEQ ID NO: 130091 - DNA, 1431 bp, Cannabis sativa
  modified_base (329)..(331): a, c, t, g, unknown or other
ggctcgcgcccctcccttcaacttaccttcacttttcagtttaatgagttcattctcctaatgagtccctcagctcggccagcacttgatttcctcttcttctccttcacatgctggggaatgaaatcctttggataaagcctatactacacaaagttggcctccgaggtaaacaaagtgatatttcgggcatcatccggtagctgagtgatcctttaagctctatccctaagagccagcgtgaagggtggacggtaatatatacggatcttctagaatcaagtataggtggtgcccatcccttccaccatgtaatactcgtcaacaannntcccaattttgctcacggccttgtcccaagtgcccgttaaccacttgaagtccggatgagaaaaatagaagtatccaaacttgccttgcttgggagtagacttcaagtcaaaaaaacaagctattctcatgaggggaaggcataccccactttttggtggtgtagagaacgaacctggcagacagataattgatgcccttggaagtaaactgggtcggacagagacagaagaactctgccaccttcctaaagtacgggtgcaaaggcaataatgccccttgtttggaatgagcacccgactaggcatacatccccttcttcgggtttgtggctcggttttttgaggtaggaacataacattccaactcgcctagattgccggacttgtccagatcccttaagcatgccttagtgaccctggtcggagggctcacccacctggcacccaaggcaccttgcctcctgtgaggaactacagcggtaagctcctcagtgacgtagtcaactcgttcgaccaggacatcgccatcctcgtccactggctccctagcctcgttgtatcccccaaaattttgcggtgtgacctcctcctcttcctctgcctcggaaggacagccaggacggacattgccctgttcctctcttggacttcagcgtccctttcatgatcctcctcctcctggacggatggatcctattcgacgctgggtaaggtagcatgttgtgttacctgagggttagatgcgttgacttgacccattgtttgtttagttcgaacaatcatcctgtggctggacgagaagattgaaatgaaacgttcgtcgcttgaagagggcggactggaataaggacgagggtaatcgttgtacataagttgaagcaaatcctggtcaattcggtgtttgcttccccaaaactcgccagggttcatcaacaaaagacaacacataagatgagtgtttggtcgggatatagaacaataaacaggcaaatatgccgaccaggagtactaaatagattatcgaatgaaatattcgacgataagtcaaaaccctgaagtttgaaattttcgagatttagggcaaaaatttcacgaagct

SEQ ID NO: 130092 - DNA, 985 bp, Cannabis sativa
ggtttcaagtttgaaggggctgcggttatttgttcttattatgattatctaactagactcctctaagcttcatctactttcaccagttgtgtaaggatcacagtttggtaaacctttgctttgcagataacttaattatcttctgtaaaggtaaccaagacttagttaatatgattcacgaagccttcaaacttttaagttgctgcttctctgggttgattgtaaacaaacctaaatctcatgtctattttggaggagatcagggggtacaaagcaaatggaagaagatacttctcctctcaagtacctcaaagttaatatgagaccaacaaagtggaaagagtctgagtgtgatcataattgtttgtaagaagttgtgaattgatagtgtttggagttgtagcttgatttgttgattaatgaattctttctttgataaaaaagaaatattggtagtaagcacctagtcaaacatattaattctaaatatgctagacaaattgaaaaagcgtcgatctactattgttgtgtgtttaccaaaattcaatgcagcccaactatctttttctacaccattttaatattataaccaccaagtcttaatcttatattatgattttgataattgaataaatattatgtgtaattaaagctatcaaaagtaaaatttgttttctatttttatgtgttctttcttataagtttgttcttactttataaacttctagacagtttgtaagactagagatcatgagagaggaactattagagatcgatgctataatatgggcattttgaatgtttaggtgtgatttctgttggttcatgtagctgatcttgaggaactaacgtcaatgggcattttggatgtttatgtgtcaattttattcgttcgtgtagcagatcttgaggaactaatgtcaagtaaaaaaaaataatttaaggatcaaatagatataaaaatagggttttttcatttttacac

SEQ ID NO: 130093 - DNA, 1005 bp, Cannabis sativa
tattcaaatgatagagcaactctaataagacattcgtgaattgtcttttgttgatgcaacatctctattcaaataatatagcaactctaataaggcattcattaattgtctcttgttgatccaacatctccacttaaatgataaagcaactccaatacaccatgaacaaaaataaaaaattgttacggatgaaatagaacaacatatagtgttttgtcgttaaattttttttttgtcatcaaaattgttaggtgaatagagaagaaaaatcacaattattaattcagataagtcaaaagaatttcgaaacaaattatactttcggtagacacacaagaaccaattataagtattatgatagggatggatattctatccaaattcaattagtagtaaaaaattaagtagaatagagaagataaaaatgggtggtagcctttcattaatttgtcaggacttcaaaagcaaggttctctcccataatggttacaattactattgaattcattcatacctcaacactgagaaattcctatctcttattctaagagaccgaatgtacccaaaagtaaccacaccatagtacaactcaaataactactaatgacagatcacccttattaatcccctgtggtgtccctcacagtagtcttcttgtgtcttcgagaatagagaaaagtgagtggagggttgtcaacaccccctacaagtttcaccttgtcctcaaggtgtcaattaggaaattgatcttggatgacaaaaaattctttccaagtagcgtcaaaagaaggcaagttcgcccatttgattagagcttgaggaatagtcttgtgtgtgtaatatctaggaaacttaattatgaataattaggatttattatacattatgtgttaattaagtaatattaagtaggattatgatcttgctaatctaatttagcataaattgtaaattttatcataagtggataaataagcgtaatttgataattacggagatttattt

SEQ ID NO: 130094 - DNA, 518 bp, Cannabis sativa
  modified_base (32)..(40): a, c, t, g, unknown or other
atatatattttcataaatattaaataatttannnnnnnnnagtaaccaatctaaaataatcgatccgatctgcacttttgcggattagattggattgaattggaactattgtgaggattagattggatccaaaaaataaaatctgcttattatttattttgtattttttaacaataataattttgttgaaaaaagaaaaaagaaaatattaatggcatacttctaaaaagcaaaatctatacattctgaaagagaaaaaaaaaaaagaattttctaactataaacacgttctatgtttatttgttagtgctgcatatcatggttccttattaaactaatctaatctaataataataattacgttttagaaaaatattatattttcattttcaagccttttaaaataagaataattatataagatactatttttcttgtaaaaaagttacatttttacgtttaaagaaattatttttttatatattttttatgttttttttatgaaaacaacaagaaaa

SEQ ID NO: 130095 - DNA, 1619 bp, Cannabis sativa
atagaagtaaaagtgtaattttaacgtacttaactacactccttgtgggatcgacctcactcctggtgagtctactacttgaacggtacgtacacttgcgtgagaaaattatcgcaacatatatctctaggactgtactttatttttaggtttaagaactttggttttacgaaatctgttatcaactttgcagttgcttatcgttgatctccaaattttattggaactccacatgtgtgttcttctttataactccttattatgaatatttctatgtttttattttttgaagctttcaaactccatttgcaatttgagttcaaactaaaaattttgtattctctagagcaagatttcactactttgtattgaaatattttcttgattgtaaagtagcatatggcacttatcaatatgtcattgtccttaaaaatatatcacttttttattatttgtgtcgtttatcagtgatgataatcatttctgtgttgtcaacttcttcttctttttggttgttttcaagttgatataccatttttgtagcaacaagctttgcatagtctctgaagtcaaataattcatcttctgcaagagtttttttgttgttgttttttggttgttgtatggttaactctaatgctaaagtcatactgtcgaccaaaatagcatcatctcgaactgatccaattgttgctgcagatagtaattgtttgtttgttgttgttgtgttgttacaaggatgttgcacatatgcctgtgctaagtgattgtgatacgatgtcatcatcatattattacacatcattgattggttaggtgccaaaaaagtttgtctctttttgtcgttgattttgttcacacacaatgggtaccatatgaaattagtttctttgcttaatagctttatgtagaatagtagacttttttcatcattgatttgtagtggttggaatctttctttcagttggtattttagttgtatttgtgttgtatcaaggttgcattgtagttcgtccattactattttcactagttgatcaaaagtgcaatctcttgatagtaattctctacttgattcataatcaatatagtgtttgttgtcatcccaatggtcattgctctgtaccgaatttgtagaggtttcatgtcctaaaatttgtctatttgttatgatttttcagtatcagtagttgtaaatagctactttaatctaataaaaaaacttataaacaactgttttttttttcattaaacattaaataacatctaattcaactatatttgttttttttttaaaaaaaaaaaactaattcatatgttttttcaaattgtattcatagttcttaagaactatttttatctatcaaaataattgttttctgacaatcaactgtaaataaaatttaattcagcaatagttgttcatttgtaaacaaacaactattataatcctcgaaaacaacatatatacaattgtttcaagataaaaacaatagattatattcttatggattagttgtaaagaccgcttagtttaatttagaaattagcagttgatcatgtttaattatgaaaattatttatagatatttaattaattatttatacagttattattg

SEQ ID NO: 130096 - DNA, 970 bp, Cannabis sativa
ggaggaggcccagcatagggaggctctttcggagcggagtcattaggaggcgctaaaggcaaaggttgaggagctaaaggctaacgatgatgcgttgaaggccagggacgcgggtgtggccacgtcgaggcgagagctccgggatgcaaaagagtccatgcaggaattaactgccaagctaaagtctctagaggagctgcaccaagttgatttttcaaacgacagcaaacctaactgttgaagtgaaggagcttcgtgatttcaaagagcaaactcagaaggaggcggctaaggcgaaaagagatgccctcctggccccaattacctgcaaacactacaataagcgtttcgacgatggagtcttcatggcttggcagaccaatggccaaaatcttaagctcgacttctatcccaagcttgaagaggtccttactcgcttctaggaaaacaagaaaagagttgacgccttgttagaggagcgtaggggccctcgtcttccacctcgcatcgactaagatggttgttaaccaccaccattactatcattattttctcttctcttttttttttattattacatatttattccttctcccttctctaagacaatttactttctttttcttaagggtagacacttatggcctgtccacaagcccttttttatctttttgaagcttctctttgggatccgaacaacttacatttatgtttgaatatctatttatcttctgactttattaaatttggtatttttacatttgtccgtgtgatatgtcttactaccccctgagtgagatgaaaatcaatttttaggccactcagtcttacaaaattaagaggttgcatatatttgtccggtataaatttactttacagaatggaaactttattttgcaactattggtaatactttcagaggtgatcagcgttccaggccctaggcaccatgattccatccattattttt

SEQ ID NO: 130097 - DNA, 574 bp, Cannabis sativa
  modified_base (527)..(533): a, c, t, g, unknown or other
aaaaaaaaaaaacttttttttttagttccagcccttctgcaagaagtgtgtggcgaagttctggactaaggcgattatggtttactttttttggtcattaatttattaattacttttttttttcttgtaagtcctttaattacaatttatttaattgcttgagtggtggacttttttgttttgacttttaatatgatttgtattatttatgatatttatttttttaattattttttccttcctttcatttatattacagtaagtttttattttagttgctcttcttttaaatccctaattacaatttttaatagagtaatttacggcataaatacttaagtttaactcctagttacaaataaatacctaagtttaattagatcattaccgaaggagaagattattgtattgatcttcttgattgatgccaaagtttttcttattcccacatcaatgtcttcttctgtgatgggtttaagagcagtcgtttgagagtggttcggttcggctcaatgacgtcctccgtnnnnnnnttttgttttcatttattaatttactattactagtttaattc

SEQ ID NO: 130098 - DNA, 903 bp, Cannabis sativa
  modified_base (811)..(823): a, c, t, g, unknown or other
  modified_base (870)..(871): a, c, t, g, unknown or other
ccagctacgtttgtttcctcccacctgtcatcttctgctgccgtatctcatggacaccaatttgccaccgctcaactatctcatacagcatctttccaatacttacaaatttttacatcatctaaaaaaagtataaagtgcagtaatatttttttattagtttttttttatttttaattagaaaaataaaaatatttttaaaaaatatgtttaataaaattattttcactttttaaatttttaattcattaatttcaaaaaaaattatacaatttttttcttaattaatattttaaactctaatcccaacttgtatcttagaacctaaattctagctttggccccagtcttaaactcagaccacgatctgaccccatgcacgaacctacactcgatttaaataaaaatcaaaaaataaaaataaaaattatataacacatttttttctacttttaaaataaaagtagatatagaacacatttttattttaaaaaaaaattaaaaacacaaattgacttttatttttgtaattaaaaattgaaaaataaatgtgttatcagatgccctcataatattttattgggataaggcactattttttttgtaaaaaattacgtttttaaagaattttttttatatttttacggtttttcataaaaacaacatgaaaatgacaagaaaactacataaaataaacatgaaaataacatcaaaacaacaaaaaaaaacatacaaataacaaaaagtcaacaacaaattaataagagtacaacataaaagactttatttttctgtaaataaaatcaaaaannnnnnnnnnnnntttaaaattccgtgaaaccgtatatgttgcccctgatttcgcccaanntacgtggaccaatcaaacagggacacgtggat

SEQ ID NO: 130099 - DNA, 3217 bp, Cannabis sativa
  modified_base (30)..(46): a, c, t, g, unknown or other
cattgatttagaaattcatattaggatgtnnnnnnnnnnnnnnnnntagtaaatctagattctggtaaaacatattccaacaatgtttccattggctccgtaagattctcaaacttttgcagagattgttgaagtctctacatagtttcatgaaaactttgctgaactgtaaggtattagctgcaaacatttcaatcagctgaatagtagttagcttttcactatatggtgcaacataaataggttgttgaaattgtgcattattatgttccatctgaatagtagaagccaccaaagtgtttagcagatcagtaagagaatgatcttgatcttgtagtgctacagtaggatagtaagaagttagttaaacatattgatcgatcccactataggaaggtctagaataatctctctattgttgattgtatgtgtaagtgttgtaatagagatcatattgatacacttgtggcgaaatataatatggatcacagtattgttgattgtacatcgccatgtttctaaagaaagatctaaaaattaaaaccacaactcgaagaacaaattagtaacaagaaaaatgtaaaaaaaaacaaagaataataaattgaataaaatagtcccagaaacggtgccaataatttgatgcgtgtcgtaagccataacaaatttactaattatttttatttttatattaccaattacttcaatataacagtaaatataggtcaatcccatgaggactattatcaatttattattcaaaaattagtgacaagaattagaaaaagaggttttgattatgataataaaataacataaataaaaacaaaaataaattaaatgtgatactacgatatgagataaatagttaaaggttattctccacccacaacaatcattcttaacttacattaatgaatgtaatttcagttttctaatcaaactattaatccagcagataaagctgaagtagtcagattatcacaatctccctattacatgtaatcaaggcgaagcgctcaataattaactcttttacctaagcagtaaatccacaaaacatgtaatttatttaacctaagttctattcttcatcacaattaaaaaatacctttgacaatattaaaattgcaatttatcacaaatactgagaatcctatactactatgtgaatattaatcctaagatgacggtagattaaagtaaaacctaatttagtgatcatctatacaagattaaaacaataatcataacattgaacatagaagaatagaaacaataatggaaactagaaattaacattcatcaatgaaattaaaaactcatgtctcgggttttgaaataacccttaactaaaaggaaactacttggaactagacattataatcaaaatcataataaatagtgagtttgaggagaagaaaaagaactatgatgaagaacatttcgaaatcgctatctccgtctcttccttgctctctctctctctctctgagtttctatctcaattttgtagcttaagggttctcaaattcatagcctaaaagtcctatatatagtgcttgaaaatatctcactaaaaaaagatatctccctttaaaaaaaagataatttttttgaaattgcccataaatcacctcctcgctgcggcgccacgacttcctcgtcacgggcacaaggttgctcgccgcggccatgacttcccgctgaaattttttttgtcacgtgattcgtattttggccataatgttttcaatacaactcaaaattagacgattcaagatgttccagaaagctaaaaatgtgatctacaactttcattttaagctctaagtccatttctgcctttaaagtcatcaaaatttgtaattaagttttgttttgaaaatcgagctcgttggcttccactattttccaccaaaatgtgctaacatccctccaattgaccctaaatgcatgattagtctttaaaatatccaaaacaattaaaatcacactaatcaataatttaaagaatcaatttaagaatattaatacataaatttatcatatttataagacaaatatggactcatgagtgcacttattaatgtatctttgtccttgtaaatctgtctctttctattgtttcgtgtcatttatctgtgatgataatcatttctgtgttgtcaactttttttttcttctttctagttgttttcaagttgttgtaccatttctgcagcaacaagctttgcgtagtcgatgaagtcaaaatattcatcttttgcaggtgtttttttgttgttgtttttagttgatgtatggttgactctgatgttaaagttatagtagtgtcgaccaaaatagcatcatcttgaactgatgcaattgttgctgcagatagttattgtttgtttgttgttgttgttgggttgttacaaggatgctgcatattttcttgtgctgagtgatgtcatatgttgtcatcattatattgttgcatatcattgattggttagttgccaaaaaagtttgtgtctttgtgttgatgattgggttcacacacaatgggtaccatgtgaaatcattttctttgcttaatagctttatgcagaacaacagatttttatcatccttgatttgtagtggttgacatctttctttcagttggtatttcagttgtatttgtattgtatcagagctacattgtagttcgtccatcattattttagttgattaaaagtacaatctcttgatagtaattctccatttgactcgtaatcaacatagcgcttcttgtcattctaatgaccattaattgctctataccaaaatttgcagaggtcccatatcctaaaatttgtatattcattatgagctttttttttttgaataaaagctgaaactttatttataacgattcttgcacaattacatcaataattttactcgaaagagaatcaaatgaataactacgttcagcatttaaccatgaaactcgggcaagtccatgagcgacacgattagcagaacgtttaacacaacgtaaataaacattgattaaatctgaaaacatcctcttgcattcctcgatacaacagccaaatggagaggtaaaagtcactgagcttcggaaagcttgcacaacaatgagactatctgttttaatggtgacttttgtaatcttggatgcctttatccaactgagggcttccttgttgggttttgtgcccta

SEQ ID NO: 130100 - DNA, 741 bp, Cannabis sativa
aaaacattgacttttggaatattacaatttcttagtcttttatttggataattattctaaattctttgtaaattaaaaggtgaaaaaaaaaacgttttaaattcactaatttttatacatataagagtttaattaccaaactcatcataatatgagtatatacttttttaatgtttttgttaggatttgattctctacccacacaaaaatatagacaataataatattttagtttaactttagagttagtatcgaattacgataaaaataattttatttatttaaaatatttaaaaatgaaaataagaaaaataaaaataaaattaacattagcaacttaattattacagccaaaattattattatcatatattaatttgaaattatatttaattcaacaaagatgttaacttatatattttatctccttttaataacaagtattttcactcaaaaaaatatattttatctcctttatttaaaaattaacattaaaaaagtagttccgttcttgataacgaagttcgatacttctttctttcaagttattttcagattaaaaaattgaacataaaattaagaattattaatatgtaaagaaagtataactatgtctaaaatattaagctaataattactttattagagaaacaatatctaattctaaaaatgaatgtgaggtaagtcttttttatatatactaggtgattgttacgtgccaagccacgtagtgttagtttt

SEQ ID NO: 130101 - DNA, 634 bp, Cannabis sativa
cactaaaatgatattagtgaaaaacagatgcaactaactccagaacagatgttagagacaacaaatactgaacaaaagcaatatctaatttgccacacaaaacatgacacttacaattattattgcctttttaatgaaattcatgatgatatggttgtggtgagtgattggattaagcccatctctgccttgaatggagattgggtcctcctcatcttcataatgtcacgattgaccttcaaaaatgaaaatctatcttcagaattgagaacaataacagaggaaaaaattgacaatgagaatatattacttataatactaagttgtcatttaaaccagtaatgattcttctctattaatactaagttaaaaaagtattcattaattgaaaatcgaaagactaagataaatagtttatattaattttttttttattgatttgggtagaagtggaatatgcatagatcatattaccactaagttttgattatatattgagattttggcggttaaactctcctaaatgtcgtttcacttgtatttaattaagtaaattttggcggtgaaattagggctgtacatcggtcggtttgagcggtttatcctatatattttctaacccaatctaaagttc

SEQ ID NO: 130102 - DNA, 951 bp, Cannabis sativa
aaaaattactaattaaccttttatatataacacatttacatatgatgtatattaatgtgtagaaaagggtcaattattgtaggtgaagaatgggccggggggccatggttggatatgttggtacttagtagctagatatatacaatagtgtgaagatagagtcttgtatggtctcatcaccaaaagatagagaaaattaaagggtttctaaattgggtcaaaatggctttattggtggaagaaagatgccattttttgttacctatatttgaacgtaaagaaaggctaaaagacaagtcatgtgattgtaatgagaagaaaggtaaagatagatatatattcaattaacaacattattatttttccataaaaaaatatgaacattattatttttctacaattctagattcatcggatgatgaatacaataattgtgagaaggaaagatgatgatggtgatgattgtacgcaacaccgagtatttgacctagcgatagggtttttttttttcgctttgtaacgaagaatagaagttcgagtaggaccagagttaatatttgtacatatttgttcctcttatcgttgaggttccattttttttttctttacgagtattcgagttagggattgtgtatatatcggtgcttattaacaagttgtgtatagtatattttaattgaaacataaaatgttataataaattgaaaaaaaaaatgaaaattaatgaagatattatagtaataataaaattttacacccaatgtttaaatgaaaaaaaaaataaagaaataaataaataataaacttgtgttgttgtattagtgcacgcgtgtttgtggggtggggaactacctattatcctaaggctaaaaactatgattggattgactgaaaatgaaattcatacacaaagaacaaaccatcaacaatttgtattgagtattgttttta

SEQ ID NO: 130103 - DNA, 843 bp, Cannabis sativa
tcgttctgctttgaacaaaaccaaagccaaacagagctaaccctagctcagttctcacttcgaaccttcgagagtttctcaaactctctctctttctctctggatctcaagccctagaaccagagatctttctcgatcaaacagatcgatcttcccagaaatgttccccagaaaaacacaagcacacacatacaaagattaacgccaaaacagtagagttagatagaaacaaaaaaaacaccaaaaattatagaggttcgccctagaaattaggggtacatcctctgatgagctcgccttgaagatcgacctcaaatgtgcactatctttgaagaaatatacatcaggtgagaaatccaagtcacaaagtcgactggtatttctgatttgttctctcttttattttctgtgtttatctctcttttttattttccttctcactcactaactctctttcttttctttgcatgaatcctggaacaacaacttcgagagcttaactctcagatctgggtttctggcttctagaatctctcaactgagagattggtaagtctctggtcccccttttatattcgtagattaggttaaaaggtgtgtaactgaatttctgttgcaaaacagaaattcagttacacaacttgtttaagttgttgtgtctggtgagtgagtaaagccacgagccttttattttgtatttctctttcttctgtaaagctgtaataataagtagaccaggggaggtctaatttaacatgaccgttaaaaatttcccttgaactattaagattgttaaatttaaggacttctatctaattttaaaaaaaaaattctaacatggat

SEQ ID NO: 130104 - DNA, 768 bp, Cannabis sativa
  modified_base (710)..(742): a, c, t, g, unknown or other
accgtttaaatattttattttattaccaaaaacctcaccattttcggaactaggttagagttgtaataacttagattaaataagtattttctccgatctcacataattcccatgggttcgacctcgttcttcataatctccatactacaataaagactcgtgcgcttgcgagttaataaatataaaatgtaccacttttggtacacaacaatgcacgactagttgatgcacgaccaacagacgaattgccaacctgctgacaaatgtccaactgaggtacaatcaggtgataggcacgaccaactaacaaacaaccaggtgaaggaggattaactaatggtcaactagctgagggacaaccagttgagggacgaccagctgagggatgaccaactgacaaagggccagccaagggataactagctgagggatgatcagctgacagagggctagctgagggacaatcaacttagggataaccaactgacggagggccaactgagggacgaccagctgacggacaactagctgatagagggccagttgagtgatgaccagttgaggaacgactagctgagggacaatcagcttagggatgaccaactgacagagggatagatgagggatgactagcggacggacgactagttgacggaggatcagctgagtgacgaccagcaaaggaacgactgttggaaattattttaccnnnnnnnnnnnnnnnnnnnnnnnnnnnnnnnnnaacaccctaaatatgaactttctata

SEQ ID NO: 130105 - DNA, 662 bp, Cannabis sativa
ttacagttttacaaacatttggtacttatgccgctaaaaataaacattgggtttatgccgcttaaaaacctaaaactttaggtacttatgccgctatttaccctaaattataacgcggacaatataagggctgaccctagattttagtgggtcatataaaaatgggccaaaatttaaaaaaatatggtattttcaaaaccaacaaaataaatgtgtatttttaaaaagaaaaaaaattggaccatagactagataagccttaagtacaagcctagcccacttatatcgagagttgggcctttagttaatatagtcacattatgtaatttgaattgagtagaattcagaataattatgtacttgttcaactatataattacaccactctccaattctcaagaattgggtataattataacgtgtaattgtaaaatattgttagttttagacaattaatatttttaaactatgtaattactacatgaaaataaaactcaatatacaattacatccaaacacacattgtattttaaaataaattataattactattttattagtaaggttaattaggatttttatcccctcaactttgacatgtactaaattatgctccttgaacttttaaggttattaaaaatcactacaagaaatatcacttt

SEQ ID NO: 130106 - DNA, 924 bp, Cannabis sativa
  modified_base (127)..(133): a, c, t, g, unknown or other
ggtcaaacccggtcaatatgttcaatcctaatatcagctgtacttatttatttattttttatgaaatataagtgggttggaaaattggtttcttatgatttgattttcataataataataataatannnnnnntaataataataataatataaagaaaagcacaaaagttggtgaggttacatgttatatatatatatatttttttttgtttattttctaaaattttggtaaattttattcattagaacatttttaagaaaagaaattccacataatttagaaattattgtgaatggtgtatagactatacttagatgactatttttccactttagtttgtcccaaatttagtattacattaggtgattaaggaatttagtcttgtccattaatttcttaattttttttagaagaatgtaacatattatttttctctttgtatttttcatatcacaattaaagtgtcataatataaaaaacaaaaataaaatattaaattttctcctatttaaatttttgaattatattttttttacttaaagaacattgaaaattacaagatgatgtgccaataaatttttattgttattttttctgtcttttttcttaaagatataaaatatgatattatttttttaaaaaataatttacaataatagtaaaaaattatgttacatgctaagaaatctttatttttaactattgattatatctctcttatattagatatgactatctaatgaaataaaattattgatttagcagtttctttttattttttttgttaaagttaacggctaaaactaatcgttttaagaaaaattagttttaaatatttaacattatcaacaaaattaaataattattttttatatatataaattttaatttaaatttaaattaaatattaattcaattaatta

SEQ ID NO: 130107 - DNA, 1720 bp, Cannabis sativa
  modified_base (788)..(789): a, c, t, g, unknown or other
tcttgcagatacagtgaatggatcgacgagtgtgaacgtgttaacaatgttgaagaggatggtgcttagaaggaaaatgttgtggtggaaatggaagttgcggcattgaatagcttgcaatgattcaagcctgtaattatattaggtgtacgtggaagcaatagtcccttgtgtctaggttatatcatcttagtagctgagtgtataatttcatgtaagtgaaggtccaggaaagcaactccacacctacctggaaccatgacccaatgggtttcttattgcacaatgtcttgctatattccaagcttatatatataaactgtgtactgttttactctaaattttccatcctcgttagatctttctgcgaataagaaacatgagtgcatatttgttcattgatggatgcatgccgttcagtataacctgattaaattaataatttacatagagcactcaacagcttctaactaatgtctaaactcctttatttaaagttaaaatacactattcataaatatattttattaattgttttagattttaatagttatttttgtatggaaatatgtgtaaatatttttattatatatttgaaataaataaaatataataagatttttaaagaagttttattatgtaaagagcattgctattaggcaccagtggtgtggtgtttagcaccttctcgacatgtcgcattgcggttgactagcgatacttcctaaaaattattatattaaattatatgggaagttggaaattgatacttagttggaccaatagcnntattgacacataagagagtgctagacaccattggtaccctttagcatttctcttatgtaaagtagaaaaaataaagttttagtattttattttaaaagatagagtggagacttttgaggtactcttataaattactacaattactttttatatgtaattaagaaacatgactgaagtaaggggcatctccttcaacatcttgaattattttagagaaatttaatttttttatgcatatattaccaaaaaattaatcccctaaacctatatgtatattggccaaataaatcaacatttctcttttttccaaaataccctctccattttcaaacagccactatctctctaccctctttccctctctcggtctcttcatcttctctaaacgaaaactcaaaccccccaccaattttccatccgaggattcacgcgacccaaccaccaccacgacccaaacaccacccttctccaccacccacaacgattgcgactgacgaccaccgtgactgacggactgaagacccctttctccacgaccactgcgacccacagacccaatgtcaaaggttagtgtttttgaatctgtgatttctgggttagaaaatgctttttctaggcacgcccgatggatcatgatgaaaaaatttgatctaggtgaagacaaaggcccaatatagggtccgatggccagttaattttttggaaaaattgacaggccatcgggccctatatcgggcctttttcttcaactcagatctaattttttgttgacgatgcatcgggcctacatcgggaatgcaacggacctgaatcgagcctgcctagaaaatgtattttccaacccaaaaatcacaaattcaaatctaaccctaaatctaatccaaaacgctcataccagaccctaaatctatcaataaataatattttaacc

SEQ ID NO: 130108 - DNA, 680 bp, Cannabis sativa
aactaagcggtctttacattgaagctactaaaaaggaggcaaaagataaggccgaggcataccaaaaactcaggaggaatacaagaaacttctggaggaataccaaaaactgcaagaggaacttaacgtagccaaggtgacgctcgatggcaaagaatctgaaaccattgagcgatgcaatgttgttggactacgttctatctaccaagcctggatggaaaatcaagggatgactacgagtttcttgggaaagtccgaaggggaagtcctcgcctattgcgagaaggataagaaggaagatgaggaagccgaggccagtagaagaagaagaataagaagaactgtccaagtctcctactatgtaggctgggtttttatttatttttgttttatctaggcaaatggccttaaggcggagacaatagtttgtgggcacttttgtaaagacaaattttcaaggatggatggccaactttgcttttattttatcttttattgaatgcttcgtacttttacatttgagcttaatatatctgtttttttgcattttcattcacaacttaaaccattatgctttaatcaaatttaaaatactttaggcatttccattgctcgtatttcatttgatattatttagggtaaataccattttggaccctgtgttttgaaaaagttacaga

SEQ ID NO: 130109 - DNA, 917 bp, Cannabis sativa
aaattgtaaaagattgcttgctcttttgagaaatgtttcagttatttttattaaattgttagctaatatggtagctcacaactttgctcgaacctccatattataccttcattgtagttttagtttagaatctgttctaactaatttgctatcaagattggtaacaaaagtttaatgaagatgaattttttattcaaaataaattagatacattgatcaatgaaggcatgctcaagactctaaagtagagcaatcatggcatggtgcacagggaggtgatggggtggagcattgggttttaccatagaacaatagtatcaaggtcattgtagatgctgctttgtttgacgctaataaaagttttggttttggaatgatagcttgagatgtgaatggattcctaattgaagggcgcaccactcttttacaaggcaagatggaaccagaattagcttaagcgatgagaattcatgtggcattgagttggatcaaagataaacaatatgtggttcttaaatttgattgtctttgtattgtgcaagccttgtgaagctttttttctatgattttttatttggtcatgttatcaaaaattgtaaaagattgcttgctctgttgagaaatgttttagttatttttattaaacgatcagctaatatggtagctcacaactttgcttgagcctccatattataccctcattgtagttttagtttggaatctgttctaactgatttgctatcaagattgatagcataagtttaatgaaaatgaatttcccattcaaaaaaaaaaaaaaattatgtatacaaaaaaggctaattatgaattttgcaccccaaacttaaagatatacgaaattatgttccatgaacttttaagatcattaaaaatttcccttgaattattgagattgt

SEQ ID NO: 130110 - DNA, 841 bp, Cannabis sativa
ttagataaatatgattttctacacagagtcttcttactagatatcgcacgatctattgaactagttgagcggatttctctaccaaaatatacatatttcatcatcatataaagaaatttttttgtcttttggtaatttttttagattatttacacaaaatttcctattttttttacattttaaaaatattgtgtttttttttaaaaaaaatagtgtataagttttatattgtgtactatattaagtttttatttttgttcaacagttattttttagttgttccactattatttttagttgttctattttgtgttctactattgttttataaaatacaatatttttaaaaaaaattctgcgtgataatattttggtaaaaattaactcaaattttagtatatttgtaagttttcattttttttttacaattattgttgcccttgatttttcccaaaatacgtgaacgcagataagaacaacacgtggatttgaaaggattatcacttatgaaaatcaactaagtctcggacaaaagaggaacatctcagggaagatgcctcctagaggaaggcataaggagtatccttactctctgagaggtcaaaggcacgttaaggcagttccgggaggagtggagatctcttgaatagtcctttcgcatttaatgccgcacagaggaagacgtattgaaatctctataaacgacgtgacagttggcacaagccccgttctacggctattacgttgtaatcgatgggcctagtgacggctactttatgagatatcacatcagtcaagaggggataaaatattacatctacctaactcctaagatacctac

SEQ ID NO: 130111 - DNA, 1081 bp, Cannabis sativa
agaattcttctgtaaaaatgcaaagaaaaaaaaacggtgttaaagtataaaaatgaaaaatgccctttttttaatgcttttaataaaatcattaaattttacatcaagttttgtaattttacattagagtacaatactaaaaattgatggtaatatatcataaagtattttttgtgtcaaatatagcataattttagtgtctcccattagaaagggttttagcatgtgtcaaatttggcacactttttattcatcaccattgaagctttatttttattttattttttgaaatacgctaaaatttagcaatataccatatttattgctctctaaaaaagatgctctaatataaattaattgtaaatgttactagtcatatgccatataggctcccgctaaggtataaacatttttttagaaaaatgcttaatttatttttttcaaaaaaataaataaataaaataaaatcatattttttcaaaaattatttaatttactttatttaaattatatattttaaatttttacagttatataatcaaaaaaattattaaaaaaaaggctaaataatttataattttttgccaagaattatattgttgggtggctaattttaaatgtatgtcgtacttaaattagtgtcattgacacgacttgagccctaggccgtagcagatatgtaacttgggttgtcaaatatcagactttgacccttaaaggaagataacacttataaacgatcattgaattcattttacaaaatacatatttaaaaataatggaataactactatatctataagaaaatattagttgcaaaattaggatcacttatcagtataaaagaacaataataactccacagttatgtagtcactgaattgagagatttaataagtttataaaacaccaaaataatatttagcatccatcattcatcatttataactagagcataacaaacttaagtgatccagaccgtccattcaagttcaaatataaatttcaaagaaatgtttaataaatagtgtaaaccccaagttcttgtctaacttatctttttcatatttagattgatttt

SEQ ID NO: 130112 - DNA, 930 bp, Cannabis sativa
  modified_base (900)..(904): a, c, t, g, unknown or other
ataagtaactatacctcactactcaattacaaatacactactgagaaagactctcgtttgatttaaacaatcaataacaaattatatttttttgttgattctttgaggttaattctctaaggttgccacgtagccttcttatcatcctctcatcacaattttatgttttgaattctcttttttaattaccatgcctacatgtccaactagtatgaaataaaatatatttgtttgtaaataaattcttgatttaagtgccacacgatcagggcctattctacaagtgactactattaatatccattaatacaatacctcactatactaagttatatgtgtatataatcttgacccattactagcgttttggccacgttggccttcatttgtctcaagagaataggttaaacctatagcttaatcactctcacaactaatcatatttattcttatcttctgttactttacttataaattttaaatatttaggaaatgtatatatacgaacaactatcctaatctatttgctaatttctctaactactttatttgctaggtccattatcttaatgttaaacgttcataatattcaaattttaaattgtctccttaacatatatattcataatacttagttatgaagaatattgctacatataatctaatggttcctatgcacacgtttatataactaaattttatctctcatatttcattctagttgataccaccctaattctaagcttttgtatgatcctgccactactattaattattactactccttgtcaattttttttttgatgaaccagctatattcattaattacaaaccaaacttttttacaacctataaaagagacattaaataagcctcaaacatatctttatatattaaaannnnntatctaacggcatttcttggtttaac

SEQ ID NO: 130113 - DNA, 1278 bp, Cannabis sativa
aatgttttgaaggacaaatcaaaaagagtcagtgagaagaagaagaagaagaagataaagttttatttatgatgaaatttaagaaggtttacttaatcatatgattattgaagttcttcattttgtgatgagctttcatggaatccaagaaaaaaaatagaaaaatggtgttttaatttgaatgatttgatgggagagatggcaaaaagctcagaacaagattgttttcaaatttctcttggattgttatggaaagattgatattcaaatctctagcttgtttatggataacttattcttgattatctttgcttttaatgaaagtaatcatgaaatagtgtcattaattctttttgaggttatagctatatataatccaatgcttaaatgtgcaaatcattgtaagaactctttggtaatacatggttttgatactttaatatgatttttcaaaaattcaatggaattggttggactagtttggtacaataagaagaaaaagaaggaaaggaagaagacaattttattctaatgatgaaatataagatgaattagttcatcatatgatccaaaattatggtacttagtgaacatagtttttctttatcatagtggttcaacaaaagaaggtgaggttaagaatcgtcaagaatctacaaaaaagttggaagatcacgaaccaaaaactcatcatctgactaagaagaagaagaagaacaagaacaagagcaagaattagagggagatgagcatgtatgaaatggtgtttattgattacttttactttatcatctttgcttccaatgctagtaatcattaactggtgtcattgagtccttatgagcttaaaattatagtctaatgctttgtctgtggaagagaattgtaataagaactctttagtaatacacggttttgatactttacagtaatttttcaaaaatgcagtggagttggctggactattttggcacaataagaagaataagaagggaaggaagaagacaatgttttatttgaatcatgaaatttaaatgggaactagttcatcatataatcattaaagttcttcgtttcgaggtgagaatttctagtcctgaattgatgttcataagcagaggatcttgaaaataatattttcaaggacaaaatgaaaagagtcaacgataagatgaatgaacattgaaatcaaatcattcaatgatcaatattcagtccaagaatttaattatatgattcttatctagaagattcttctttagagttgaattttttttg

SEQ ID NO: 130114 - DNA, 823 bp, Cannabis sativa
ggtgtggggcttgggtgggagtcaagtctgggtctgggtccaaaaccgggtctgagtcggggtctcgtgtataggttcgggtcttggatcggaggtgaacccaacctcgaactcgttctaaatattataccaaaaatataaatggggcaagtcgagcttgctccaaaacttgcccctattatatagggtaaagcttggacttgaaatcgctctattttgtcattcctgtaacaatggatacatgcacaactcttgcaactacagattaggagtgatttatcggcaaaattaattgcttttcattttgttggcgaaggttcaccaaatgtcttatcaacgggtagatgttgtacgatacacgttttttataatttattatttttcattttatatcttaatataaatgataaaaaaattaagagaaaataacaaaaattagaataagtacttaattttaactcttaaataaatacatgatttgtaataagtttatgttggttataaggttgatcatgctttaaaaggagttgataataattataacaaataaccatgtttatgtttaggagcattgctataggatattaaggtgattagcactattatatgcaggggcggagccacatacacccctataggggctgtggccccccctcaattttttaaaattttacactattaaacatatatatatataatcatatataaaactatgttaatacataatttgtcatgtataaaagaactacaaaattaatatttatttatttaaatataattttattattaagaaaatatatacaattttattttatatattaat

SEQ ID NO: 130115 - DNA, 2873 bp, Cannabis sativa
aaaaaaataaagacttttgagttacctttttttcttctacaaacctacttctctcttactttgtctgtacaagatattgctctatctttcgtattttttaattcacattgcacaacatcaaagaagaggagaagggaccaccattatcaatcaagagaccattaacactactacaaagaaaatcatattttaattatcttcaggtaataattttatttattttatacttttaataattgaaatatatattgatttgttattttagtgttagtaattagttcatggataatagccctaaatataatatcaaatattttataaagaaattttagtaattttgtttgtaagggccatagaaaataatgcttagtcgtcataattcttagtccttgcctaagtatgagtatgttgttgtactaaggtcgattagtctaaacatatctcgctagggttgattcatgaatcatgattgatgttatttttctcaaaattctctataactattactttaaaatgttcctgttatatataaaaaattgaaaaatgtacaacaaatgagtgtattgatgcattcttatttgtttttgtatttgatttttttttcatcaaatatatttttttaataattgtgtatattgtagttatttaaattgaaattagactatggagaatttacatatatgtatttgtgtttatatgattatatatatagtctaaaatctaattattataatttatatttgaattgcaggtatgaagaaatattatccaatagttccaaatttatcacatcaaattgaaccagaggttgatagaagttcaaagagacattgtaattcaataaatatggaaaatcttccaactactcctggattacgagctttgatttctgattataattccaatattcaagatgaaatttgaagacattatttacaacaagggccttgtcaaccaagaagtcacaattttcctcctactttctttggaaaacaaaagcgttggttcaacattgcatggtttgatcaatttcctacttggttagaatatagcatcagtaaaaattctacgttttgtctatattgctacatttttaaaccaaacaatggaaaacaaggtggcggtcaaacatttgttagtaaaggtttttcaaattggaaggacagaaaaagatttattgttcatgtaggagatcacaatagtgatcattatcaaagttacaagaagtgtaaggatttgatgaatgaaaaacaacaaattcaacatatattttcgaagaagaataacaatgatcgaaatagctactatgttcgattaactgtatcggttgacagtattcgatttcttctacgacaaggtcttgcatttcgtggtcatgatgagtcccaaaattctactaatcaaggtaactttcttgaacttttaacttttttagctgatcataatgaagaaattagagttgttgctttgaagagtgctcctaaaaatcttaaattgacttcaccaaagattcaaaaggatattgtaaatgcaggtgctgttgaaacaatcaatgttattattgaagacataggagatgctatattttctgtgtggagatgctatattttctgtgttaattgatgaatcccgtgatgtagctataaaagagcaaatagtcgtaatgtttcgttatgtggacaagaaagaatatgtaattgaacgattcattgggattgaacatgttccaaatactacagctgtctcactaaaaatagcaattaataagctattttcaaagcatgggttgagcatatctagattacgtggttaagggtatgatggagctagtaacatgagtggagagtttaacggtttaaagagtattatcatgaaggaaaatgaatgtattttctttgtccattgctttgctcatcagttacagttagcgctcatgggtgtggccaaaaagcatgatttgataggtattttctttattatttattatctttgatactatgttccaattattaatgatttttattttgtaaaaatataggtacttttctcactgtggtatcaaatattgcagtgaatattgttggagcatcatctaagcgtcgcgacatttttcgagaaaaacaagctgccaaagtcattgaagcattaaaaagtggacaactttcaagtgcaaaaggcctaaatcaagataatgggattaaacgtccatgtgagacacattggggatcacattttcgtactttggtaagctttactatcatgttttcatctattattgatgtgcttgaggagattgcaaatgatagtttgaatagtgaccaaaagtatgaagcatctattatgttacaagatgtgcaaacatatgattttgtatttagcttgcatttggtgaagaatatacttggaattataaatgagttgtcacaagtcttacaaagaggtgatcaagatattgtaaatgccatggatttagttagagtatgcaagaaacaattacaaatgatgagagataatggatggaattctctaatggaagaagtgtctgatttctgtgttgagatgaacattgatgttctcaatatggataatatgtattgtgctcaaggaaaatcacgacaaaagactccaaagcttacaaattttcacttctttcgtattgattatttcaatactgtgatagatttacaactacaagagttgaatagtcgtttcaatgaggctaacactgagttattgctttgtttggaatgtttgtcttccaataattcattttctgcttttaacaagggaaagttatagtgtatgtaatatagcatatagaaatgatatgaaatgcggaaaataaactgtaatcatatcaataatatatgcaa

SEQ ID NO: 130116 - DNA, 1550 bp, Cannabis sativa
  modified_base (56)..(71): a, c, t, g, unknown or other
gtctacctattagtaacctgctattacaggttaaaaaaaaatgtaaccatatggtnnnnnnnnnnnnnnnnccattgaatagtcacccatatttaatatattgtttcatgtcaatttacaatataattaattaactacattttgtctatataagcaggatgttagcaacttaaaatatgtcattctttctgagtcagagaagcttacttgtctcccaaatctctctcaagcgaatcttcacatgcttcatctagatggttgtacaagtttagttaatcttccctcgttaagatttcacaacattttttatgatcaagataaagaatctcaagtgatgtacgaatataattctttgatggttcaatttataaataatgaagaggttgcacacgaaatgtctgaaaggatatcctaccaagtgaggaaattatctactaacttgcttgatcttaatgggtgctccaatctcacaactcttccggagatttttggtaatataaaatttatttgtttaagtaaaaacagcaatcaaggaatgacacccatctattttctctctaaaaaatcttcttctacttgatctacatatgtgtgaacatctaagggaacttcccaatgatatgtgtgagttagaatcattggaatacttatacatgaataattgcaagaaacttgaaagcctcccaactaccatttgtaagttgaagtctcttcgggtacttcgccttgaaggttgctcgcgattgaaaagctttccagaaattttggagcctatgcagaatctaaagagacttttaacaagcacgggaattgaagagatgccatcatcaatagagaatctagttgtgcttgaaaggctatacttgagtgggtgtaagaatctcaagtctattccaaccaccatcttcaacatgtgcaacatttccagtatggtgattgatgaatacccaaaattccaaattctgctatataacggtttgccatgtttgctagtaaaagactcaagtgaaaccacttatagtcgactactactaacaaatgatcaaccgtatatgtgcagaagtagttgtacttgtaagttacaacaagttcattgtcaaatgtggggatggggatagaaaagtaaaggtatatctctcttacttatagaataaatttaatagtatagttttttcaccattaatatttacataaatgacacttgtttttcacgtattgtaggatatgagcttcttaggctttgctttatgcattgttgttgagtttgaagcgaccactttgaaacgtgatgatgtgttaaaaatgtaaatacaatctggaaaccaagaatggtcagaactttcaattctcttcaactatgcattgccaaaggctactcattttgaccatgatgattctaatttagactcttcctcaaatcatgtgttcttatggtatgattatggtaaacactttcagaaaaagagatcacattcagaagtttctctcaataggagagtgaaagtcatacgttgtgatcttttattagattagcaaaggaacaataaaac

SEQ ID NO: 130117 - DNA, 871 bp, Cannabis sativa
  modified_base (828)..(834): a, c, t, g, unknown or other
tatattataatgtttcaaaagttgtttataatttgatgatatataatattaaataatatagtgtataatattgtgtacagaaaatagaagaaaaaaaatctctttaagagtattatcatacatacaatattaaaataatatttatttattaaatagattgaaaaaaaaaagaacctagttcttgagatgatcaaatcataaacaatttgaagaataaaattgtcctaaagctaatactggggaagcaattactacttaatttttctttaaaattaatatactaagtgtgtatttttttttaacaataagtatgaattatttgttatatttgaatacttttataaattgaatacaattaaataaatttgttaatcttatataattaaaatattgaataattcagatgtgaaaaaaaataaatagtttaaatattttatattcagatttaaatatgatatcttattattgatatgaacatttagatttcgcggtttaaatcctaaaaaaaaatgcacccaaaatctctttaaaagtattatcatacttacaatattaaaaatttatttatttattaaataaattgaaacaaatggacctagtgagatgctcaaatcataaataatttgaagaataaaattgtgctaaaactaatgttgaggaagcaattactacttattttttcttaaaaattaatatattaagtgtgtattttttttaacaatatgtatgaattattttttatattcaaataatttataaaatacagttaaataaattttttaatcttatataattaaaacttagcaaaaagttacgtgcgaggcacgnnnnnnnaattttatgctagtttttttctacgttattaaaaagt

SEQ ID NO: 130118 - DNA, 639 bp, Cannabis sativa
caccttatccatcataaaaccagatcgtaaatcatatatttgcacccacatgtcgagcttatggagagcacactctgtggatctttccctttctgtagtcgataaaacacaagagggactctattgaaggtgcaagggctcccatctatcacagcctgcacatccagttcatgataaaactggaatatatatctattagtatccagttctttgatgaacacacctttactcttcccaaaaccataaacaaaaatataacaaggaaaaacaacactaaaattctttgttgcaacaattacaaaagtgaataacaaaaagaaaaaaaaaatactacactaagaataaatagaaaaaaaagaagtgtgggtgcaacataaatttgaacctcttttatcaaaataataattataataaataaattaaaattttattttcagaactataaatcatttgatatttttttgaaaaaaatattataagtggtactagttaacttcagtgtacaagataatgaaaataaaattaaactaataaattcttttggatgccaatgcagacagggacggatccccattaagattgatgtgggggctatagcccccacgaacaaaaatattgccttttaaaaaattaaatata

SEQ ID NO: 130119 - DNA, 575 bp, Cannabis sativa
aaaaaataattttaatggttgatgagtgactcaattcgtatcatatatattttttcttatttatactcaataataatacaatagatgatcgtgcaatgcagagtttcttccatttataattaaaatcatttttttttaaagcaataattaaaatgaatttttttatttttacactttaaaatatttgttttttttttttttgtacttttacaaaattcatataaaaatctctattgcaattaacggagcaaattacattacaaccaaaaatcatataacaacccacttaaaaaccatcagagaaacaactttaaaaactcaaaccgtaaatttttaaaaaaattataaaaatattatattaaataatttccttaattataatcaatttaaatgatatttttttttattaacaaattggatttaataacatccattatagaaatactaaaaataatagcactgatatttgatataggggttttttccaggggaaattttttttgaattaatcaggagatttattaaataaaaaactcgctctaaacaatagaacgcactttagaggaacaatcctc

SEQ ID NO: 130120 - DNA, 1033 bp, Cannabis sativa
  modified_base (973)..(1002): a, c, t, g, unknown or other
aggagctgagtttgatgctattaatgagaatggtaccgttgaggaaacgtgtgttagtagtctcgtcttattctatttatcaaactttccattgaaaagtaattttgtatttaagattgaatagatggtctagatgacttaaattagctatgtactatttagaaatgaggaataatgagtgctagatattatttccatctttttattgatttattaaatctatctacgcggtgactaaacaattgttgagatattattattcttttatattgaggagtgatcctgattatgtgattaatatttcttatagttatagaagttaatccattatttttaaataagtattttataatataaattaaaagatcatttacaaccattatcttcctacaaaggtcaaagtgtgacttttaactacccaaattatacatattacatatctgacacggcctaaattcgagtagtgacaatttctgtatttctttttaaagtgggaatacctgtaatgaaagtaagcaataaaaatatggatatttaatgattatgcatggataaaaacattcaccatctgctaaaaacaaaaacagtcagcaacaagctaaatcatgcaatgaaaatggacagctcacctattctccttaacagtatcatcctttaaacaaatttattaaccatgccaaaggataatatctttaatcaatatatgtaaaccattccaaacaatcatacaattagaaataagttgatattaaagttacaacctaatgctctaaaaaataaatatgttgaaaagttacgattgttatacccgaaattcaactgccatctcattggaggacatgtgtcatgataaggggaatatgaatcgatgcagttgccttaaatggaataactcattaattactatattgcgagaaaccatatgtcgctgaatacgaattgcgaggacattaactgttggaaattattttannnnnnnnnnnnnnnnnnnnnnnnnnnnnnttattaacatcctaaataagaactttctaaa

SEQ ID NO: 130121 - DNA, 1587 bp, Cannabis sativa
cttttgtttctctctaaaaacaaacgaaaaacataacatgcaatatgtttaaagacaatcgaacacagcaacatacacggtttggtcaccaaatcatgttcacaaataaaaaagtaccaggagaaaatcctctcgaaagtcactctttacaacctctagctccttttgtactcatgtttgtcattggttcaagatttatgtatgttttatcgaaggacgataaaacataacttgtaaccacggtttttctctgccataagtgaggctctcgaataaagttttgtaagaagttagtctaagataagtgacctctgtctcttaaaaaaatgttactcaaaatatttcacaaatttcctatccaatccacaaaaaccatatcttatggaaaaatataaaaaactatctactctgtatatgtggccacaaactcattttaattacaaaatatatgagaagtgaagtgtgtgatagtgtattaggccattagcgacattgtccacgattcaaccagaaacttcattcgataattcaatggaaagaatgaagtaaagggtagagagactatcaccattgaagtgtctcctcctaagaatgtagaacgcaattgaaataatcacaccagctaatccaacgatgacagctacaagtatcactactttcttatgatcacttcttgctatttcatgattcatttttggaactgagaaaaatcaaacataaaagttataaccaaaacagaatacttgtgaacttgacataagtttttttaccttttggtgaaaatggtattcgaatgtatacagtttgtccatcagaactaagttgtcgaatatcggacagatccccaaaccagaggacacagtcactgccttcatctgactctgtataactataagccatacaagagcaattgctcaagcatttcgccttgcattcgtcttgattaacgctcttactcaactgaatatactgactatcgggcactttcaagcccgaaaagccaagcaacacatctttctcttttgtatcacagctcacagaactgtttctcacacacccttctgaccaagacatcattgagttccagttttcttgatttttcggattgaaaccttctaaacatttgcatacttgattatttgttatgatacattccgagttagctccacagatgccatacttgtcacatttgtctcatggaattgtgtaataagaggaactccaactgttttcttcttctaaccattcggtgtattcaactgtttcggttaggacaagtcttacaatatttgatccattaaggaggctgaaattgtagtaaacttcatcatcattgttgacaaagttgtaaagaccactgtaccaataaactgatacataaccagtactagaatctccactgaaacttatgccttcccatggcgcttcgcgaaacaattttgctgatccatttcggataaatagttgagggtatgtatggtcatggtgtggttcatcaagctcaatcccataagtgaaatctccatgacaaggatcatcagagctcttccacgacgataatcgcctatttagacctctcttcaagtc

SEQ ID NO: 130122 - DNA, 616 bp, Cannabis sativa
ttagttatgacaggttgagcgttctatttcgaaatgctatattgcatgcttacattgaatttgaaccaactacattcaaacatgcatcaaaatttgctcaatggttaaaagccatggacacagaattctttgcccttaagaaaaataaaatctggacagtaatctcattaccacctagatgtcaatcaatttgtaacaaatgggcctataaaatcaaatacaactccgaagatgaagctgacagatataagacacgtcttgttgctaaaggattttcacaataatatggtgtcaattatgttgagacctttgcccctattgctaagttcaacacaccaggggtgaaaatcggtcgattatggtcggtttatacaattttataaccgatcggtcggttacggtttttattttacgaaaaccgtaaccgatcgtttagaaattataaccgtataatactgaccgtacggtttttgctagtttttggtttggcaatttttggcagttttggacgatttattgcgatttttggcggttttttggtttaactattttttaatttcaaaaacaaaccgaccgccatgtcaaaaaaaccaaaaccgaaaccgaccgccaaatt

SEQ ID NO: 130123 - DNA, 590 bp, Cannabis sativa
cgcaattatccctatttattttaattatattaatataaccaactattactacttctaatataattaaattaattagtatttttcatgtaaatcaaactattagtgtttttttcttttttattgcatgtacttatatttaaggaataattagttttttttattttatattttctttacaattaaattaaaatataaattaaatatatataactatatcaatctatctatataatcttgtcttttaacatgatttagtatgtgttctttttgagcagtgtcaataatttgttttgtgtccttgttcaatttttattgtccgtcttgtgcctttaggtagttttatgatggattcgatagaatgaaagtgacaaaacattttaattataaactaaaaaacaagctagaagttctataaaagaaatttagttctgagaagagtctttcccggctcacacgaagattctgtagtaggagctaggtgtcacgggctcaccttttcaggcagcagaacacccgtgcggcaccttgacttctctaagccaaggtcagccttccaaccatccgagtaacaatgggctcatttttcgcgc

SEQ ID NO: 130124 - DNA, 1458 bp, Cannabis sativa
  modified_base (29)..(34): a, c, t, g, unknown or other
  modified_base (1421)..(1422): a, c, t, g, unknown or other
aaggctaaataatagtagtgttcaaaaannnnnngcctataggccaaagtaagaacatgaaagccttgaggccggatatgagattggtttgcatgcataaggccaacaccctcctagaactgtatagctagaaaagacctggacaaagctcttataggggccacgtatcgggctacgactaaggcagagttccttaaaggaactaaaccatgctgagctttaaattgaacattcaactacaatacgctcaccattaagcctcatacagagtttctaaggaaaacacgtatgaggctatggttgtatatgcctacagagccaaactcttgccgaagtcataagagaacaaaaaactggccacccacttagaaccaaggcacatgctagccaaggttgccaagccttgaaagggttgaccaaggtcccatgactcagccaagaactggccagggtcaccaaacccaggcatgaataggcaagctttatagggtaaaaccctaaagttggccaactccgatgcttaagccttagggccagccaggtctcacgcaagaccttctaggctgaccaaggtaagtcttgaatcccaatttgtgtttttctttcaaaactcgaatatgtgcctcatattctttatgacttaaagagttaagaatcatagtgaaggccaaaatgatggtcaatctgagaggactattcagatacttgaggatatgcttcgagtgtgtgtattagattttgagggttcttggaacaagtatcttcctttaatcaaattctcgtataataatagttatcaaagtactattggcatggcaccgtatgcgatgatttatggaagaaagtgtcggtcgcccattcattgggatgaagccaatgaacgtagatatcttggacctgaggcagtccaaagaataagtaaggccattgagaagattcaagctcgtatgtttgccgcacaaagtagacaaaagagctacgctgatccaaagcctagagatattgagttccaggttggggattttgttttccttcgagtatccccaatgaagggaattcagaggttcagaaagaaaggaaagttaagccctagatttatttgtccatttgagattcttgaaagggtaggtcatgtagcgtatatactagccctacccgctactttatctagggttcataacgtgtttcacatctcgatgcttcaaaagtatgtatttgatacgactcatgttttaagctatgaagatatcgagcttcaaatggacttgtcatatgatgaacaaccaacaaattctggacaagaaagaaaaagtgttgcggaacaagaatatttcgctagctatagtgctatggaggaacagcaaggttgaagaagcgacttgggtgttgttgggttttgggccctaaataaaactcatttnnatataatcagatttacttattaagatcggaagagcg

SEQ ID NO: 130125 - DNA, 1975 bp, Cannabis sativa
gaaagaacattagatagctatgaagtgggtgtttagatacttaaaaggaacaactgaacttagattaaagttcactaaataaatgaacaacaccttagtggaaggctacaatgattcagactttgttggtgataaagatattagaaagtctaactctgcttatttcttcctaattaggggtaattgtatcagttggagagtccagcttcaacctgttgctgctttatccacaacagaggcagagtatgttgtagtcatggaggcataaaagatctttggataaaatgcctaatgaaagaaatgcatttactcaagaaaattcccactgtttattatgatagccaaagttgtatccacttgtgcaagaaccatgtttttcatgatagaactaagcatgtagaaagcaagtataatttcatcaaagacaaagtgacaaaagaagaggttcagattaagaaagttcctacagaagagaatccttctgacatagggactacaattctaaacttagccaaattcaaacaatgtttgaatctgctaggtttaggtaatggaggctgaccattacaagtttgagccatgacccttaaaaagaagaagaaaaaaaaaagaagactacctgcttgtgatggagtccaaggtggaattgttagtttgaactccactataagcaaagttattatacttaaaatatctcaacttaagattcctaaaagcttcttcgtggagctggatttgtctgaaagagagttccaagaagttcattttgtctgctctagatggaagcttcagggaagctagtcgtcctctaggaaaaggagtcccagaaggctagttgttccccgaatggaggcttcaggaaagctaatcgtcttgtaggaaagggagttctagaaggctagctgttccccggatggaggcttcaaggaagctagtcatcctccagggtagtcttggaaggctagctattctcagatgtaagcttcagggaagcctcctctcatccttctaggttcacgccttccaggaagtgtgttccaaagcgtgatctcggcaagaaagtgagaagaaacaatttgtaaagtgagagattattgagattacttgtcaaagaatgtgacatgaaatctccaacaattttgtaacaatttaagcttggatataatgaaaagagctaaactttctaaggatagctcacaaggacgtagcccaagggtgaaacttaccaaaatttgtgtttgatctctatactctattttaccttgtttttttatcattttattttcattttaattttacatcaatctgtttgatttgtattgtgaattgtgtggggaattcaagtttgaatcctaataatatatatactagattaatatatatcatgcaatacatatatacttagttatattcttaatttttattttgtttatttatatttgtagttgtacaattagtttttttttttttttttgtgtgtgtgtggatattatttaataaacaacatcatttttttattgaaaagtatttgatttaagtgcaatttataaaaagaaaatatcataatattcaaaatttattgttaattataattttagtttaaccttaatgcttcacttttttatttttttagaaatattatatactttttcaatttttattcaaataataaaaatataattttagaaattgtaataggtaaaggcatcacaatagtattttttaagaaacataaacacttttttaattttattgtttaaagagaaaacaataatagaaatattttttcttagatatgtgaattgggtaagaaaaattgtaataaggaagtatgtttgggcggttgcgaaaaaaaaaaaatataacttatttgtaaaatagatcaatagtgtttatttgaggaatcaaaaatagtgggtgttggattaaaattctatgtgggcacatatgtataatgtatatgctattataaagt

SEQ ID NO: 130126 - DNA, 1279 bp, Cannabis sativa
ttataatattttattttacattttttctaatattatgtttttcaatttttgttttcattttgtgatttttttacatttttttattataatttttttttacattttttattataattttttttaataatatttattttacaattttttttttacaatacttcgtgtgatttttttgctaatttgtagtgcttgggaccaataaggtaataatggtatgccactatttatggtgtttaacacctctcttaatagttttatgaatgacaattttttttacaacacctcctatggttttgttttcaatgatcgtaattttctttattcttatgaataattttttctatgtataatttttttgtacaattttgtatggtgaattattttttattattattaataaaatattattattatttattggcaccttaatatattcaatactatacaaatatgacacttaataattagttagttgtttttcatattattcactaacttaaaatgggtgaaactcattattaaaatgcatcaataacggtctgccactatttatgatgtgtagtatctcctttagtattttccttatcatctctaatagatggtatataatttgagctaaaaaaatgaatcaatattatatttggcttaaattttataataatgtcctaatgtatttaggctaaaattaaccttttttaataaacatgtgtaaaaaagtcaacaaaagtattaaatatttattgaaattatataaaaattctattaaatattaaataaaatgtaaaagtgattaattacattaataagtgacaaaagagtaaataaaaaaaatatttattgtgatgtaaaatttgtctcatgctatattttgttctaaatttgacacaacttttaacatatattaaattttatccacttttactattggagttcacttttataaagttgagttaaaatatacatatacaccatacttttaattctgtattggagatggtcttaatacgtacatatccttattcactttagttagaattttaactttttttttttttcaattatgcataactttgtaatttctttttacttgttacacaccgcttaggtgagattttcctataatccttgttcttttgtattttctcaaactaaataagattattttagtaatttttgtttatcatatttagagttgtgtattttgttttgtttgtaccaattattaatatttttgtcattttttaaacctcaccgttctccccccccccccccccccccc

SEQ ID NO: 130127 - DNA, 1642 bp, Cannabis sativa
gcgcatttgacgaactgcgccggtaaaaatgccttttcttgtagtgagacaatgttggtgaagggatctttgtcagaggaaagggttcaaagaaggagaacaggaatcaaagcagtggaaataaaggcaagactaatgccaagttcaagagaagatgttttctttgtaataagacaagtcatttgaagaaagactgcccaatcctgagagattacatctccaagaagaatggaagtgcagatgtggtatctgatggagatgatagtgtcagtgtgttggtaatttctaaagacaagtcaaatactgattggatcatcaattctggatgttcttttcatatttgtcttggtaagaagcaattcataaattacaagactatcaacagtggctctgtcaaattgggtgacaaccattcatatccaattgttagaattggatcagtcaagcttcaaatgactggtggtggagttacaatgcttgaacatgtgagacatgtcctagaaataaagagaaatctgatctcaatggctatgttagatcatgatgggtactcagtgaaggttgaaaatggctcattgaaggtgacaaagggatcaatgttagtcacgagggctactatgatgaatggcatgtatgtgctgcaggttaatacattcagagatcaagttaatacagtggctccaaagggtgaggaaccaaccctaatctggcataggagattggggtcacataagctatggtggcttgaaaattctgagcaaacttggagtatttggcaaggaccagatacaaccaatggaactgtgtgaacaatgcattcttgggaaagctaccaaagtcaagtttggcactgggaagcacacaaccaagggaattgttgattatctacactcagatctgtgggggccatcaagaacaaaatccagaggaggggctaggtattttctgattttcattgatgatttttcaagatatgtttggattttcatactgaaaaataaaaatgagtcattgagcaaattcaaagagctgagaactatgttggaaactcaaattggtaagaaagtaaagaagttgaggacagataatgggcttgagttttgtgcagatgagttcaaagaatactgcaaacaagttggaattggcaagcatctaacagtacctagcaacccttagcaaaatggacttgctgagagaatgaatagaacaatacttgaaagagttgtatgcatgctaatccatgctgatttgccaaaatctttctaggcagaagcagctgttacaacttgctatttgatcaacagatgtccatcatctgcaattgaattcaaaacacttgttgaggtgtggaaaggcaagccagcaaggtatgatcatcttagaatttgattgctttccattttagttatggtaaatcgattcacataccatatttactaaaaggagttttgagtaaatgcccctttaaaaggagccaaagaaatgcatatttactaaatgtaattaagagttggtagtcttttgcttgtcttggtggctggtttagtggctgccgattgtctgttgttggcttgagccttgtttggttgtatcttgctagttttttgaataaagtttcctcttcttcaaaaaaaaaaaaaaa

SEQ ID NO: 130128 - DNA, 902 bp, Cannabis sativa
  modified_base (36)..(40): a, c, t, g, unknown or other
aaagaaaaatttaaccatatggttacaataaaaatnnnnncattgaatagtcacccatattatatatactaagctaattatttttctaaaaccatatataatccttctcttatcactgtttttttttttgtttttgttctctttgatttttttttttcatacttcaaatttttaaaatttatattttgtattaaatacttgaataattttaaattaaaatataatataataaacttcttaatattatataaaaactctgaaaagaaaaaagcaaattcagatgtgatgaaagaacatttaatttaatatagatcttaaaaaaaactataatttaagccacttcaaaaaattaaaaactacaatttataaatataattattattcaaatacattaatgagagaaaacttcatataaaaaataactataaatagcttaggaaaaaaaaatatccctaattactatatatgttatatattagctatataattataccatataaaaaaattaaatgagtaatactttaaaaatacaatcattactcaaacaaactactttcatattatatcatatatatatttatttgatttatgtatattattttcatatatacaaattattacaatttttttactatttttgctgtatataaaatatgttttttttttctacaaatctaaataaaatgaatatttttaaattgcatgaaaaaacaataaataaaattcaatgataacaatgaataagatacgaggagaaaacatatgagatacagtagtaataacggtgacctataaggtgcgtttggtaatacttctttaatttctgttttttcaattagaaaagtgaaaatattttctaaaagcatgttttataaaattattttcacttttcaattttttaa

SEQ ID NO: 130129 - DNA, 574 bp, Cannabis sativa
aaatgtttaatgggccggcccaaagtatttttgtaattttttttccttttttgcatttttttgtttttttcccaaaaatcttttttggaagtatttcaataaaaataaaaaataatttttaattttcttttgaaaatgctaggaaccatgacttctccaaaataaattttaaagcgcaataaaaaatatctttatatagtaattattttaacttaaaataataattatctaaaaaaataataacctaaatcttttacaatttttttttttttttttgacattaagatcatttactttttagatctagacaaaatgatgcatttttaactttatcttggacaagcttgtgtccaaactccaaaggtggaaagtaaaaaccctctctaaagtaggttaggctactatgatcaaatcagttgggcttactcttctaaattacacgatgcaaatgactaaaccttccaagagacttgcttttaaagttgatggcacaagggacttttggtgggattgtgagaagggaaattgttaagaccgcttagtttaatttggaaattagcagttaatcacgttt

SEQ ID NO: 130130 - DNA, 822 bp, Cannabis sativa
gctggtcggcctagcatgacgttaaaggctgatggaacgtccaataccagaaattgtgccattatagttatgcttgtcggagattgcccaacaatgagaggtaggtgaatttgccctagaggtgcgactccttggccggagaaaccatatacagccaggagacagggggttaggtccttgagctggagtcccatctttagtcctgttatttggactcaacgaattaggagcgttgtttgaagttgttataactttattgtctaaattttcgggggcagttttgtcccatgtggttcgttctaagattttagcgacccatggcttggcaaagcatgctcagcggttagacgatgagctatcctagttcaaggaggttccagcgccggtggcggacgtctgcgtcgtaaattcatgagtgattctaatcactttgtcaaaaaaaaatatatcttttgtttgacaaagagaatatagtacatacactgtatatatcatatgaatatgtcaagaactataatgttatatttatagattgagtctacggttaggtttagaatttaaatgggctgaataaaagactataatgaaatctaaaacaacctcatgaatgaaccctcactaaggtttatgagtttgaattttgtcattattttatttccttaatgaaactatcttttatttaaaaattttatttatcgattctaattatttaaatgacaactttatctatttaataattgaaactaattattaaataaaattactatttaaatataattattagttaaaccctacaaggtctcttaattaacaaataagccc

SEQ ID NO: 130131 - DNA, 707 bp, Cannabis sativa
tagccaaccatctctggccggctctatggctagccatgccaggaaatagcatcatggccagtcagcctggccagccaaggatagcactgtaggtcctacaagactctcctacacgtgcacaacaagaatgggctacgaattgggccctaaaagcccaacaaacaggctaagaagtatctggaatcttagggaattttggtcttaagtaaatatctagctaactatccaatttttaagggatttaagttgtaaacctagggtttaggcctcccatataagggccttaacctttagctgaaagcctaagttgcctaagcctcctctaagctagaaatctcaaattctctaagtgttagactctctctctctctctcttcctcactctctcacacgcccaagcctaggttgcgtatcaccctaggctgtccaacacaacacttaagttctgctagacactgattcatacattgtaatcttaaagggcactatagcagatcccacatatagtgatctagatagtgattcccttggtataatacaactaaaaggggagtagttcattacccgctatcaaaagcaaacctctataagaaatcatgttctcttttatttcttattcttatttgtgaacacatgtggcgagcattagatctgtatgaccccattatcggttgatcactttttagggtcaatagtttggtgctttc

SEQ ID NO: 130132 - DNA, 1064 bp, Cannabis sativa
atgtacacccatacatatcttaaaaagtcattaacaactgttagaaaatacatgactccacctctagatgacactcgtgatggcccacataggtttgaatgtatgtagttaagaatttcctttgtgttgtgcaagttaagtcttattttctttcctaacacacattgttcataggattccatgtcttacacaatattttcaccaagaagccctagccttgtcaagatctaaagtccctccttgctcacatgtccaagtcttatataccaaagcataatagaattgaccattgtctttgatgccactgttgcttgatcctttgatgtattcccttacaggttgtacacctcatttttattattgatgcttcaactactaaaaatatcaaaagatggaccttaaaacaatttttttcggagaccgtcactaaaaaaattaagtaactacttaaaaccgtcgagaaaaatttagtattcccgacggtttaaaatcgtagtaaacaaaattggcgacattttttaataaaatacgaatttttaggaggcccttatacccgacagtttaaaaccgttgggtatagtataggcccaaatttcttattgttctaaaaatttaccaattctgggctatctctttttaggtagtttgtcttatgccaaatgtaacacttcttgtagtttgaattagattttccattctttttactttcttaaaccctgttatatctcttatttattttctctcaaaaaagcagtccttcccttgatattttatccttttgttctaactttttcttcaattcctttgacattagagtactatgaacctcaccaatgtcaatgaattccttccagaataattgcttgatcttcatctttcactttagcatctacgttttcaagatcaagaatgatcctattaaagtcatcaagatactattcaatggatttttcaaggaataactcaaaagtatataccttatgccattcgattggataatgatttcttcatataaagttgttgaagcttctttcataagctttttgcatgcactcttttttttt

SEQ ID NO: 130133 - DNA, 973 bp, Cannabis sativa
taattagtgaaaactcatcttatctcaaaaatttaaaaaaaaaaaaaaaagagaataattagaaatgggattttcatcaaacccccccaattacatcttaattaattaaaaaaaaaaaaaaaagtaaacagttaaaagacttataaattaaaatcataattttaattttgattaagctttaacttttaattatttcgttttctaacttgttggttaaaaaaaaaatttaaaacatcaaaacaaaatcaaatttgttaatttcttttgtggttagaaagaagttttatgtgaatgaagaagaataaatgaaatgtaattttatttttttttaaaaaaaagtcatggtataggtaataaatattttttgtttaccattttactataattcctcttctgtaatatataactcaaatttagatttggttcttataagaagaaacaaaaatgcttttccaagagataaaagaataataaagtacataagattgaagataattttcttatgaaaagttattaaaaaaaataagtcaaacaaaaaaaaaagttgagtaaagtaaaataatattatttattaaaagataaaataattactattaaaatattaagaagatatgttagcttgtactaactttcatcattactatcatattctccaacttcttattactattggatcattaatcaatgtacaacaaaatgtccctatctataaggacaaaacaagcatccctaatatagaagtttccatatatatatatatatatatatttaattaatattcatatatatttaatattattagatgtattcatgaaattaagaatttaattttgggaaattctattaggggtgaaaattaatcggttatggtcgtttttttataattttataaccgactgctcagttacggtttttattttacgaaaaccgtaacctactgtttagaaattataactgtataaaactgaccgta

SEQ ID NO: 130134 - DNA, 705 bp, Cannabis sativa
aattattaaaaactttttttaaaataaatagtgtggtttatagtgtcccactaaatttagtgggacacggtagacaaatctatttacgactatagttttagtgttttattaaattaaatatagtgtgaaattattgtatatttgatgttttagaattcagttgtaaatggtctaatgtatgtgatggcatctttcttttgtttaattcaaaagttatatcctcttggctagaagagctatatatccaacttacaaaggtaatacaaagaacatagtaaaagtaatttaaactacaaaaaattcttagcaacaacaatcgtaaagtaatttaaactacaaaaaataaagttaacattccttattttttttagcaacaacaatagtaaagtaatttaaactacaaaaaattcttacatagacataatactatatagccacatccaatatagtctaacatttctcttaatttgatttaatctaattagtaactaaatttaaaaaatcatacccgatccgatctaattacaccttaaaatttaatttaattcaatccaattagtttagatcgattttttaattggatatctaattatacatttaatttttaatattaacataaagatatgtaaaaaataaatattataatttatttaaatttaatactctataaaaatattattgttacaagtgatttttttttttttt

SEQ ID NO: 130135 - DNA, 918 bp, Cannabis sativa
tgtgaagaaacaataaaggaaagaaagaaattgtttctgtacattgctcaagagaagaattacaagagtttatatacagagatagaaagacaaataagaagctgttggagcagctgaaacggttacaaccaaataacagaaaaactgttgtaactaataacagaaaaacaaacacagttaaagcttctcttgacagggtctacaacaaaaattttatattggtcaaaaattttatataacaatatacacatactctattagtatgagattttttaaaaaagtgtgcaaaaataaaaacgtgagagcaaagaagaacggggcaaaaatcttaaccataagggtatttcatatttcgttaaccacagttaaattattaattaatttatatattgtggtattgaaaatatctccatatgttttaccagttatgaaaattagttgtctcccgaaagtatgttcctagatcgctaacttgtccattgggaagaaatcttatggaatgatagttaccacctgtaagggcgttcccggacgactatcatggccactctaagtgtactctttggctagttattcctcccagaagagtgttctggatagtcaactccagttgactctattcctatccaaaagtcccttcagcatttgcttcagtcctttgtcaggaagagtatgtctcatccagaagcaccttgtcttgtgctggcgtggagaatttgttacgagaagattgttaagtttgttacgtcgtaactaacttaataacttatcggttatagccaccgaccttattaggactgaatttttatcctgaacctatatataccaccaacacttatcatttcgtgtacgctagatttgatgaatttcaagagaagactttgagtttgagagagaaaaagattgagaggtagagag

SEQ ID NO: 130136 - DNA, 1073 bp, Cannabis sativa
  modified_base (780)..(781): a, c, t, g, unknown or other
  modified_base (1015)..(1038): a, c, t, g, unknown or other
gagagagagagagagaaagagtacaaaatgatgagtgaccttggattttgatgggtggcgatctcagatctgatgttcgtttgactgttgggcactggaaacaagttggttggaccagttgatgcacacgaagagagaagccaatgtttctaagtgcggctgatctcagacaaaaaaatagtagaatgagttttttcttttgctgaataaaagtagagagagtattcatatatgggtttagggaaaaaaaataggatggaggggtggtttctgattgctggaggcggagaggggcgagagaatgactaaatgagttgagagaagacttgagctttaggttggagagtggttggatgctctgattttatatttgaaaaaggggaaaaaactgggcccgacattgtcgtgcccatctgtaattgcgggaaaattccggcctgcatcaatgtttattttttgaaacattaggggcacgataatatcgtgcccattgagagtgtgtcgtgcccaagtgtctccaaaattttttttttaaaaaaaaaagaaaaatgtaattggcaccacattaagagtgtcggccccaagtagagtatgttatgggcaccacactatgttgtgtcccacttagacgtgcctatatcctataattgttgtagtgtaaattttatcgttgattatcatgtcagtgtaaatcgagtgcaaagataaatcatgggactaaagctttgaagcatataatcataattactttctactatgatgacatcactgtaattgtgnntaactatatgttctagatttaacaaaaattatatataaaaccataaacatcaaaataacatgtaaacttaaatgacttctaatcttctattgatgacaaacaagattatattaaaatgaattttatttagggcataaaatccaagcattgcaatcactgatcaagagcctagttggatggacccaattgttaattacttgactaagggagagcttgttgggttttatgccctannnnnnnnnnnnnnnnnnnnnnnnagatttacttattaataaagctcagaaataacatt

SEQ ID NO: 130137 - DNA, 554 bp, Cannabis sativa
ttagggcacaaaacccaacaccgcttggcccacaggcagaacctgtgatcggggattggacgactgatcgttcagtgtctgagaagtgttcccagctgaatcttcatctgactcgcccagcgagatgatggtcgcaggttgctaattagtagcatgatatgctcttcgtatcagcatggtggcctgtcttgtttggtcgtcaatggctgcttcctgagccctcaatgtttccacctctttatctctccatttagtgaacaaatgcctttgctcttcaaatgcaaggttcactgcagcacgaagatcttcttggtcatgatgtagagtattagtatgaccttgcatgagtccaagagcagcacgcaggttctggatctcaatgtcatctctaacggttgtttgaacatttgttgctggcaaaactctattgttcggaatcccctgattggctactgaagtggtatctccagtctcttgcataccaaggtggattccattcagaggagacgtcacaccatgacctacggtcagaggttgttcaggattcgtggcta

SEQ ID NO: 130138 - DNA, 1047 bp, Cannabis sativa
tcaaatttgaatgattatcactaccttaaaattatgatattaaaaaaaattaaaaattaaaataaaattaatataagtgacttgacacgtaacatttatctatcatatatatgtgtcttattatgatcatgaaagtatataggcaagaaaattaattatgacataagctgtgttgcagtagtacaaccataggtaggctagatttccatggaagcactgtcgcatggtttgtaaattaaacaactatttactaagagttttaacagaagaatcttgtaaaaataactattacaagccattgcgtgatggtaacatgtttgtgaagttaattacttaagaaatgcattataaatatttatcatgaaattattcaaaaaaaaaaaatgatgaaaacttatattaatatagatgcactatggttaattagtattattagaaaatttaagtttttatacttaattttgttatgtaattaaaaaaaaaaatactctcattgatttgattgcatattcatttgttgagagataaaaaaaaaagttaaatttgagttaatcatgatataaatattttttgatatagtataaaaacagaaattttttggaccattaaattaaaatctaatgaattttttttgtttaataaatatcaaaatatataaattcttgtatacacaatgtcgatgttgaaatttaatgagtgataagaaaaaaaaaatagactctcatttaaaaaaaaaaaatcaaaattattaaaaaataatgtgtattttttttttttaaaaaaatttatttttaatccttaagtgagcgttaagcataagtctacttcagcccggggctactctcatgtagaactattagcagtgtattctgataaatgaataagaactaaaattataattaagacattgaaagaaaaaaacaataaataatcataatttctttctattgaatggatgggagaatttattataaattatcaaaatgggtgaaagaatttacacaataaccgttatgtaggaggtttcaatggttacatttttattgt

SEQ ID NO: 130139 - DNA, 589 bp, Cannabis sativa
gggcctaacctaaaatttaaaatttaagattggaacagggaacaggacctccaaaatgtttaagacggccctgttcactgtatgtatatatatataaatatgtatatatattttgggtgtttctacaatagacacccctaaaaggaatgtatagatgcactttttatctactttgatatccaagaatttttttttttcatatatagtcgtgtacgttgtagttatttaaaacattttattaaattttaataattttagaataatttacaatatagaaaataatattcaaacaatctattccggccacatgcatagaaaataaatagtcacgcgtaacagactattcgaactttgtttttaatgtgttaattttttttaaaattttataaaatttcttaaatcactacaacatacatgatcataaaaaaatagacaaaaaaattcttccaataccgaaacaaatagagtacatcagtatattcttaaatttaaggtaggagtgttcatctaatccaatccgcactattttgctcatagtgcatgtgcggattttattttttggatctaatccaatctgcacaatagctca

SEQ ID NO: 130140 - DNA, 550 bp, Cannabis sativa
tcacgtaatacgcctaaattagttagggtgttacattaactttctttggggctagtaaatactacatcggggtgacaccccgagaccccctgtgaagggggtgatagtcgccaccttgaggtagtacccccgggaccccttccacttgatctttgatgttgtgggtagccttagcgtcatgaagatgtcatatatcaaccatgtctcatataggtacaatatgtgttacttggatcatgaagatgtggggggtttaagggtacgcccttagactaacctcatcaccttttgagtaggtcattaaatttgcggtaggagtagcagtatataccctgatttgattctcttaggtgtgtggtgatcgtttacccatcatggagctactccaccttccccagggtagtcaccttgcttaagctaaggagaagagtgaccgtcagatttctcttctaacagtcatgaccaacaaccattaggggtgtacaaaaatttttgtaaaccgcccaacccgaataacccgcccaactaaaccgacaaaaacgataaaaaa

SEQ ID NO: 130141 - DNA, 1100 bp, Cannabis sativa
aaaaatgagaatagaaaacagttttttgtcattttaaaaatttaatggtgtttggcacaaatttttaaaaactgtttttagattttttcttacgaaacaaggttaaggataatgagatggcctctaatatttttcgtaatgtatctttataacttttgggtgtctctcccatggttaatgacacactaaggttaagatttccaaagttgaattttttaaactttttgtatatatttttttctagttccatgactcgaagttgcaaggtcccatttggtttagcttctataagatcttttttagcttttagaataaaaaaaaatcattctaagagtgtttggataaaaaaaaattcttttggaagaagctaaaatttgtagcttttttaagaatgacttttgagaagctatttttaaaattaaataatttatataattctaataggctgcttctataacgtgtcatccttaaaagggtacgtcaatgcgcctcatatctgtttaaaaattttagttctttttctttttataatcacatatgctataattatgtagatatcttataaaattttaagaattacgaaataatttacaatatacaaatagtttttaaataatctatttcacacacatataaaataaaaaagtggggcgaccatgactaacatataggagtgcatcaaaaatatatccaatttacttatcttagaccattttcaatggaaaatttaaaatttgtactaaatttagcacaaaaaatgagtttgtgctatagttcgcccactatttacaattgtgctccaatacacaagatgtaaaataaagaaaaaataattgattatattgatgatcatttcatattttattgagaatatataaaatttattattatttattttttttattatttaaataatggtactataaaaagaaaaaaaaattagtatattaatgaatcataataattagtgagattataataaataaaaaaataatatttattattagctaaatttgacacgatgctatatcttgtgtcaaatttagcacactttttaaagggaaatttgaattaatatgcttacattaccttataatttt

SEQ ID NO: 130142 - DNA, 1477 bp, Cannabis sativa
ggtatatagttaggtatagaaaatagaagatttagaaaaaaataagctaaaatcgacgccataagagtcatagaatttccttcagctgagtaataaccctatgtcgtcccttattcagtttctagcaaaaataaggacctttaaagctcattattgtagtagtgtataattttaaattttaatttttaggcaccaccacctctttcaatgtgaaccctattttcagtgcatatattgttatcgtatttttcacactatgacgtggcaacacatactggtgacatgtggctgttatttcctacatctggatgaagaaatattctgaacaaagctcagtatacatctgcacagatagagactacctgaccaagcagggcaagggtagacgatccgagcaatgcatcaagacttatatcgtgaacctcaagcacacatacaatccctataatcatgaaatcgtgtcaaagggatatggcaagctatccgaatcccacaatctatgtattctaagtatgcaatatattttcttacctattatagatattgtaagcaaaagggaaaccttccctcatgcatctagccctataaatagtgatccatcctcactgtaatagtggtcgaaagaattacttcagagagagatctaagagaaaacactcagagatttcattgtgagagctttaatagaggaaacactgtattctttgttctcgagttaatacaatctaaggggaatagcctattaccgaactaaaggaggaaaacctctttaaatcctgtgttatttactgtttactggttcttaccttatcttaattacatttttatggcttattaattgactcattgtcgttggctaaaagcgaggtcaacatattggtgctttcattgagagcgattatccaagtttgctttttgccttaagttttatcagacatacaaaatggtggtgcaaactcgtagaggcgtggttgattagattgacccactatttacagatcctacattacagactcctgcgaatacaagggtcccaccagttaccaatcatgaccaaccaaacacgcaaccaatgttcagacgaccataggagatgataccgagatccagattctccacaatgctcttggactcatggaaggtcatgctaataccttgcatcgtgatcaggaagagctccgtgctgcagtgaaccttacgttcgaagagtagaggcgtccgttcgttgaatggagggataaggagatggaaatgttaaaggtctgctcgaactcaaagatttgaacaaacaaaaatcatacttgtgaaatgcaagtgaccaagagtcaaaagtctgctcggtcacctggggggcaactaaacctgtacaaagcattggtaaaaataaatgacaagcacgaaaaaacaaaacaaacacagttgcacaaataatgatcataataaggaacaatattcattaaagataacaaagcacgta

SEQ ID NO: 130143 - DNA, 1388 bp, Cannabis sativa
tggacggtgtgatatgcatttgacgcttgatattgtgattatttgtagtctctctactttgtttacacattttgataatggtgatgaaatattttattataaaagctatctgtttcccgtgatttttggaaacagaataaaataataagaattgaagaaacaataattaaaagaaataatataataagagacaaacaatttttacatgattggggcgttaactagccttagtccacgagtccgttttattcagtgaagtgtttacttgtaaatattctcgaagggatacatgatgtatcttattatgttttcctgagcaaaagaacacgagagaattcaacccttaatctatgagattagttgggtatttatagtagttgaagaattacattagggtttcccattttctctctactggggagtttacaactgaacaatgtctttgggcttactcatgaagtccagcccatgaagaatacaatctgctaactaggaaaatcaggcttgatttaatcaggttaaaactgtatccgattataatgggaaaatattctgaaataattgccctacgcttgttatgggaagtttcttttttgattgcgatatgatcttccgggccaatatgacagctagagttttgttatttataggagaaaacaaacaaggaaatcggaagggtcttctgagaacgcacctccctttccctccaagctcatgataccggagctcgacatatcaagggcaaaaggtatcatgagctcataaccaaaataacactcggaaggtcctatctaggtgggtttggaggccatgtgtattgtaccaaaaatgcggataacactaaccatgcatgaatttttattaaataaatagtcatttgatattagttgttttcctattggactttataagctcaccctctatatttccttttcaggaactcagttggatacctatggatgtgggaaagtcgttgatggagaaccataagattagcttagtcctaccttaattattaattaactcttttttaaagattagatatgtatctaattattaacagatagtttgtatgatttatatagacatgaccagttaaggatgcggaatatgatggatgttataagtattatcttggtattttttgggttataaattttaactatttagtgattacataactgtgaaaatattgttgttgtatatatagatatatatatatatatatatatattgacaagtaatcttattttattacaattactttctatttattataggagttactccattattttaaggaaaacttacaaaaatattagaatttaagttaatttttacaaaaatactgttacacgaaaatcttttcaaaaatactatatttttat

SEQ ID NO: 130144 - DNA, 2519 bp, Cannabis sativa
accaatttcatagactttacctgggttctgtcttgcgaggctaccatggtacacatgtggaactaaaagaaaaacttttaaaaaatcaatttgtgagaaacaagtctcttggtcactttctattcaccaatttcatagactttacctggatctgtcttgcgaggctaccatggttcaaatgcacaatacacggaatataattattgttaatattcattaattggtctaatttactatgcaacttacataaattgaatctacaagcctatattaaacaaatttagcttctagatatcaagtggctacccctgctcacatagtaaagtagaggccacagttgatgaataatgggagaccacgcccaaaaagggtcgtgggtgctagcgctttttgtacactaatgttgaggtaaaatcgctactatgaagtagaattttgtaagctggttactgatagtatttttgaaggtgctctccattccaatactttggtaggagaacaagctccatgttctcattgtatcttccaagcttgaaggcttccttactagctatctctgtaactttataagggccttcctagttaggaccaaacactcctgttgctgagtctttaatgttcaggaaaactctttggagcaccatttctcctatgaagaattttcttctcttgacgtatttgttgaagtgccttgctaccttttgttggtaggcctgcagctttaggttggattgttctcttatttctaatactttgtcaagagaatctgccaccagggtgttgtttatttgttggtcataggttgttctcctatgagacggtggccttagctctacaggaaaaatcgcctcatagcaataagctagagcgaatggagtttgcccagtggttgtcttctcggtagtcttatgcaaccataggacctctgggtgcaatttaggccagttgccttttgcttcctcaaggcatttctttagggtttccttaatgattttgttgacatcttctacctgtccattggcttgaggatgggccatgacatagaagcttttgatgatgccatgtctattgcaaaaatcagggaacatctcgctattgaatttcttgttgttgtttgacacaatcttttaggtaaggttgaaccagcatatgatgttcttgaccataaagtcaaggaccttcttggaggtgattatcgctaggggtttagattctatccatttggtgaagtattctactacgatgacaacaaactgtacccctccttttccctttgggagctaaccaattaggtctatcccccacactgcgaagggccaagcagattacatcatctgagctgattgggtggagctcttggtatccttgaaaatctctggcacttgtcatatttttcgacatagtccatcgagtcttcaatcattgttggcgaaaagtactcgtgtcagagtatctttttggataagttttgcccccggcatggttgctgcaaaatccttcacacacttctatcatcaccctttcaactttggctttggtgacacacctcaagagaggcatggagaagctctatctttacattatcccgtctaggatcaggtacctagcaacttttcttctcattttgcttgcttcatttttgtcttctggtaaggctctaatttggatgtaagctacgataggtgtcatccatgttggagtgtcatccaacatgtcgacttcttggacaacaatgctaggttcctctaggaactgtatgggcacaaagtttactttgttagcattggtgctgcttgccagacatgcaagtgcatctactgtggcattctgttctctggggatttgcttgatcatgtagcctttgagcttacttatcaagtctttaatttttctcaagtaggccaccatttcttcacctcgagctaagtattcacccaagacttgattcacaactagttgtgaatcgtttaatatgtccaagtggttatctcatacttcatgtgctagcttgaggccaactatcaaggtttcgtactcaacctcattagttgaggctttaaagctgaatttgatttctttgtgcagctgctacccctaggtgttgtaaggtcaatgcatgcaccgaaaaattcttcagtgtagctttcgtcaacatggagtttccatgttagttcttcagggtcatgttgttgctcttgctctcgcttcttttttggcccttgattttctcttgagtcttgagggatctcaagagttgagttggcgtactcagccacgaagtctgcaagggcttaaccctttatggtttgttcttggttgaatatgtgatcttgaactagccaagctcaatggcccatttgaggagtcagaatgaagcttcaagtttctgcaaaacttgccgcaatggttgatcgatgtacacctttatggggtgtgcctggaagtagggtctcagctttctgcaagccaagagcaagttgtaggttagcttctccatgagtgggtatctactatctgca

SEQ ID NO: 130145 - DNA, 843 bp, Cannabis sativa
agcttgaacaactaaaatgcaatttgtctctaaaataacatttgacttgttattcctctttatccaactaagtgcctccttgacgcttagaatttctataatttcgggtcacatttaatataacatatgtagaaaatgtttataataagccactacttttatccctattggacgtctcaattttttatatgtagaaaaattatataactcaaaaaaaaattataattatatacaatgtagttataacaatcatgttacttgttttcgaaatatataaaataatttataatgtgaaaaataaagttcaaaacattcagctacacatacacttatttttcttataagcgtgtaaatttaattgactattttaaactttgttttgtagtatatatggtaaattatatgtaactttttttttttttttgaaaagaaatgaaatacctacaactataatataaagcatcaaataacaataataaattataatttcatcaaatatatatatatatataaaaaaaataataaaaaaaaaagagtaaaaaatctcttactaatagtgacaaaataatacacctactataatttattcacttgccaaaagaagagcatcacctaaaaaaataattaatcttatagaagtgaatattggaagtgtatggcttggaaatgtaataataaaggtcaaaaacaaagtaagtgatgctaaggatttagaataagaaaaagacgattagtaatagtaataataatagtatatcacgtgtttttttcatcttcagaaccaaaaaaagaagggataatttcacaaatgcacaaaaataacaaaaatacggtttcacggaa

SEQ ID NO: 130146 - DNA, 503 bp, Cannabis sativa
agcgtggaaaataaagtattagatatatgcattgggtgagatcatgagatttggaccaaagactagtcaacaatgtgtctttaatgagccctatagtccgtagatacgtacctggtcccatatttagtccaaatgaaattgtattttatgtaacgggtcctctcgacatgacctggtaaaaaaaattaaagaaaagtgaaacataattataagaagtttcaaatttaaataatttattaaatataacagataacagaaagctgcatatatagatggtacgcgtcgtattaatatattggtggtaaaattatttgaattttataattttaatacttaattataaaaattagaatttttattataaaatttactcaattcaagttccgttttgcttattatatttccttttaaaattttgaattaaatgatacagtaaaaacttgtaataaatttttatggtttcactaatattattaaaaaaaaaattaaaaatcatttaaaaa

SEQ ID NO: 130147 - DNA, 695 bp, Cannabis sativa
tttttttttttaattaggtaacaaaattaaacataaaaattggtttgattgtttgtaaatagaagttgcaagtctaaaaaaattgctgctaggatgttaagatttgttttgtggaatacacacatctgattgacaaaaaaaaaatattaaacatacaaattcaaaattttctaaataatatataatcatgaataatattaaaagtatatatatatagatcagaattgctaaaacgtgctattggtcatgcttagtactcttctcggtattatgcatatcgtcgatattggtataattaagtataaaatctcatataattttaaaaaaatagtttttagaaaatatctctaaccaatcgtgagccgccacttataaaaagtattagacactactgctacccaataacaataatatacttatatttcatatgtgtatatatatatatatatttataatttacatatacgtatatacgtgacttttgtcttcataaaaaataacagtacaccttcttgggaaattttcatacaagaagaaccattaatactcgtggcttaaacaaagtttgacatatttaattatatatcctataaataaaagcattttttcttcacaaaaactctaaaattaatgcttctgatatatatatatatatatatatatatatttatagagagttttgatcacttttatta

SEQ ID NO: 130148 - DNA, 610 bp, Cannabis sativa
caactcaactttagcgcgtaaggccgtatttttgattgtcaaggactgaactttggcctagagctagtttagatctatggtcatattccccacttctttggtggtcctctctgcaaacaatgccatttggagaaaggaaagtaaaaagaaattattaggcagaatttggtaataaaattgtatcgcaaggaagaatagatcaaaaaaattgagagttacccttgcggcctgctatttggcggccactgataaagtgtatggataaataatgctacccacgacccacttctctgatgtgagctcgctcacactaagactcatgcttagggttgtacaaaattttttataaacccctcaaactgaataacccgcccaaactaaaaaaaaatagcccgacaaataatgcaaactgaaaaaaaccagacaactactttggattgtaacaacgtttgattcttattttgatcgaataaaaggatcctctatagatcatctacagtaaatagggataaatttaatgttccacccttcaatgtattttatccttaagacacttagcaacctttaaatgatatttcagtaaattaatataattactgaaatgaggcct

SEQ ID NO: 130149 - DNA, 649 bp, Cannabis sativa
  modified_base (612)..(617): a, c, t, g, unknown or other
ggtcattacacaaaatgttctccggtaaggagtcaatcggaatggatccgtacatctggttgttaaaagcccaataagcgacattatggccttcactttgaaatgtgaataatttttttttaatatgcgatagaatatttaattacatacatcaatatagcggggttgaacgaacatcaattcaatataattagaaaaaaaaaaatctgtgggagctagctagttaagctaggcaatacattttcaaaagttgcaattgtatctatgatatcaatttttataaggatttttatactattgaaatttcttatttttttttctttattattgcggtgcaaatttttttttacaactattgtggttttttttttaaaaaaatactgtgtaatttgttaaatttttactgttgtttcacgatttttttagttgttctactgttgttttaattgttctgttttgctgttttacgattgttttataaaaagatagtatttttgtaaaatattccgtatgacaataaaattgtaaacttttacccaaaataatattttataaaaaccccatttttataggaataattacataaggtatcattttttgtaaaatatttannnnnntacgttcaaagaatattttttttacattttta

SEQ ID NO: 130150 - DNA, 1170 bp, Cannabis sativa
cactccaacatacttatattattgtccataaaatgaatgataagcagactgtagtatcatctacttacattgtgccttaaatccatgtatgttgcctgagaatttaataatcccaacacttctctgaaaccagtatcgtcctttccatgccatgaaattcatcaagatatatcactttggtcttagttgtgcctcacttgtcttttatctctaatactagtgaggcttacctaacattttttcgttgagttatgctccatgcttttggtgtcgtattgatgttatttaggttctatagatgtcatccatgaatgttaacttctcatcttcctctagttttaaatttgtgatctcctctttatgctttgtatcattcactgtaaatttgtatctatggtgtctatgttgttgagttgtgactcacttcaagtagttgtcctcttcattgtctcctcttcatatatagtctctcatccatgttttatccaataattgatagatgcgcctaatcgtcatttgtgcttgtagtcctgctaatgcccttatcagagtgttagccttaattgctattagattctctaaaacatcaaccatctctgggtcactggaataacacatccttagcccccacctttatttgtcgttcctctctcattgattctaacggatcttctagttgcatctataaacgcttacaagaatggttgatttaataggaacaaaagagtctaaatttagggagagaagattccatgcacatgtctaaacttaatgttgtcgaacataactagggcatatttttctatttatcaaacaaactcttatgaattctgaataatataaattctaaatttttgagaaaagggttaaatttctttccttcttactaataaaattaaaatgagaaaagcaaagaaacaaactaaatagctaagcaactaaaaactctcaataactaattgtcctccacgaatgattcaattacctactcttcaagtccttcttcttaatatgtttccattcccccatcctcttgaattggtgctggtgtgactgagactttttgtcctggggatgggtggtatgccaataaattttcattttctaactctgatccctggatttctacctcgaaatgataatctggtatatctccatttgacttgttat

SEQ ID NO: 130151 - DNA, 1088 bp, Cannabis sativa
  modified_base (1043)..(1044): a, c, t, g, unknown or other
ttgaagcgaagggtagaagagcaggaattacataatgcttatcagcaacaaatgatgcagactcagaatcaatacccgaatacatttaaggagtagttcaagtatttatctgacatcgtttctggcttcaacatgcctgagatagctctgattccattgatacatcctcctggagttggatcttcgtcaccggctgcccctcccacccagaacgacgatgaggacgatcatgctgttgatttatactttaatgtttattttataaatttcagtgtaaatattagtaatttttataaactatgacaacaaaattttacttagattacaatgtttacttgatttttttataatcataatatgaaattttagttttataatgtggttgggattatattattgtattattatttataaaattctatatttttaatttaaatttaattatattatatttatattacaatatcgaacaaatgttttaaaaaaaagtttcgttagagaagttaattgcaccgataaaacttttgcgggaagttaaaaattggtctgaaagttttgccggcaacttagtttgctgataaaactgggcaaaaaagcccttaaccgacgggacaatgtcggcggtcggatatatgtcggcgacgtaattcaatgggaaaagtgagttttgccaacgaaactaaatgtcggaaaaactcttttctcgatcgtctattagcaacaacttttgctgataaagtgtctgccggcaaaaggttgtcgacgaggtttagttaatttttgctggcgcaaaagctaccttaccgacaaaagtcaattttcttgtagtgttttttttttttactgtcataccattaagattgtaagatatgcatgtgattttatctcaaaattcattgacaatcagaggagtagcatatgaatcttatatatgctatactctttcaacgtacatgagcgcaatgtgaaactctctaacaagtgatgtaaattatcaagtttagggcccgtttggcacagtttttggaaaagctaaaagatgnntttcaaaaaagctgtgacaaaaaggtgtttggtaaacagttaaa

SEQ ID NO: 130152 - DNA, 1334 bp, Cannabis sativa
  modified_base (39)..(40): a, c, t, g, unknown or other
actttatatgtgtttatttatcattttagaaagttcatnnttagggtgttaaacaacatacttttgagtagatcaaagatcctggtaaaataaattcaaacacagattcccgcatactgctatcctcccttcacgctgaggctcagagaaaaggctcaaaaaattctccaactgtcggaggctactcggaatatcactttgttgaccacagaggccaactttgtgaagtacaaggtttacctagcagatttcataccccagcccgtgaaggagaagaagaagaaatccagggtgagccaagctaaggatgtcgagcaagaggaagacatcattcaactgaagcatgaggctaagttgaagggtggtgctgaagccaaacagtatgctcaagaatattcaaagtaggagaagaaggctctagaatattcagagcaggagaggccgcccaagaagaagaaaactctcccgaatgagcaggtgccaatagaacatgatatctgcattagggaacctggtgtgcctgctcggccatcgactcctgttgaaggaaaaggaaaagatatcctggaggagcaaaaagactctttggatgatgatgctccattcgtaattgttcgggagaatgctcccgtcagcgtgcagagtacttcaacttgcatttattttttttcctgatttttatgtcttcacatatgttgtgtcttcttctgactgtattgctttatccatgcagaattgtctcagaagatgattcaagctttgaagaagagaataagggatagctcgggcctatctcctctggccaaaaagtttaaaggtggtgagattctgtccaagttgaagatgctagttgaggtggccattgatatctctgaggagcgacctgttgtggacccttcaacccagaaggtctcgaagtccaaaaattccttgggagggagttcgactaaatttgagcaagtcaggggtggatccgaacaggttagggcacctgccccaatcctggcgctgtgcgtggaggccaatagaggcaaagaggtgcttcaccactacgtggctcggtcgcttcttgaagtgagtgaacacctgtccgggcggatagtgaattggcattggagttggtcttaggagaagtcctgaaggagatttcttgagtaagttccctctatcatttttctttaattcttctttgaatggttcggaattgaacacattttccgtataggctggtgtgaagatggccaatgtaacaccataactagcataggcgtattacgagatttttaaacatgatgtgcagctcgttgctaatcaacaaggtttatggaaaacgt

SEQ ID NO: 130153 - DNA, 775 bp, Cannabis sativa
atctaagatcctgataaaataaattcaaacaatcacatccttgttattgaaatcttgaagcaaacaatttatccataatacttcagagaataatatttactgtcaagatgaaagaataggcttcctttaatgaaggaacaaacaatagagacatgacacaactagtcatacaagtgtgaaccaaaaagaggaacgctatcaaattcagataaggaaataaagatcttcaactctctccattttaattctagaacatgtagaggaaaattactctaatgctagacctttagcaaatggaacaaaatcaagctcaaagatacatgtacttaaacttacaacctcctattaacggtcaattctctcgtatatgctattacaaacaaaatatatatatatatgtaagtattaaataggaaaatcacagcaaatctaaactcttaagcatgttgaagttgtgctagtaattctctgcctcaattcaaagagcttgcacatacaaattttcttatatctgtataactaagagtaagttatacatagcagtaccacaacagatggaagaactttgtgttacataaaataagttactatgttaggtaatatttttaatatatatttaatgttttatgagtctgagagctaaattaaagtgttagaaacacaggatatataggtgttgagtaaactgctagcaaaataaaagaggaacgatattaccgaatgaagaattttgggttgagtcgcggactaagtcgctctccttaagacgttcgcg

SEQ ID NO: 130154 - DNA, 844 bp, Cannabis sativa
acaccccaccggtgctcccaattgaacttttatctctctctttgttcttgacaggttgctggtgcccaaattccgtattgtagatttcaccctctacaatagttaagtataattttattttataattatcattttaatattgcaaacagtcttacataatttggtaaatacctacttattttatatatttttacacaggcatttacgagagcatgggagaaagcatgctctacgagaggaaatgtaattttagtggttccaaaagagaaaaagtatcacattaaacttataaaattccaaggtccatgcaaatttgagcaacttaattttgaaattcttggaactatagttgcatcaaatgagcaatcggattatggtgagtatggaagccgatggctcatctttgacaatgtaaaaaatttactagtccaaggtggtggaatcctagatggctatggtgatatatggtggaaccattcatgcaaaatgaataaatcgcaagtaagtaattaatcattatattatatatatatatatatattaatgatatgtacctgcataaaattatatattttgtgttcacatatcattatttttttaatattaaaaatatatctgacttttctttttcttgaatatttttcagccttgtaaacaagcgcccacagtaagttatttgcaccctacatactatttttttgagaatttatacttattttattaatagaattgataggtatatattgtgtgtattaatttaaggattatttgtggcaaaacctcctaaagtggataggttttttcaactaactccctaatttaaaattttggtggtaaaactacc

SEQ ID NO: 130155 - DNA, 1056 bp, Cannabis sativa
taaccatattatttatgattaataaatgaaaaaaataattaaaaacttaataaatgtgaaaaatagaaaaaattagaaggaatttgaaaggttgaaaaccgtaaaattcttaaaagatacatttttgtaaataataaagtgacctagaatagtcactacttattataataataaataataataataataataacaactgatttataataatataataaaaaaattagtcatcatggttttaattaaactaaaatataaacataattaatataaaaatagagaagtagagttctatgcgttacaacataattaatgaaataaatataatgtaatgaaaacaaaaagaaataaaatatgctttacgagggattgtttatgataattctaaattatatattgtaaatacttatatttttattacttatcattgagaaataaattgtattatatttataattaatttatgattataaatatttttttaattaatatttatgtaatttaaaaagagtacaataaaaattatataatagagaaaaaatagaaacaaaaataataactattaaagtctaaatttgaatatttttatataagagaaaagaaatccctatctatttaacaatactttttttttttttttttcttttaagtatatttataaaagtatcttttaattatgtcactttttagattaatctataatttaatatttttattttataaaatatttattatattagttgagttggtaaaatctatatatttatataaaatatggaagcccaaataagtctaagtaacattctattttattttgaaaaaaattgtgagagtttcacatatatcttgttctaaaaaaatttcatatgttttgaaccctatcatattattattgttgtctttttgattcatttttttgtaatactcatatgacataaaaaaaatagttatggtatgtattgtttataagaatattttaattatggaaatgaattttctatttatggaaatgattttttatttaaggaaataaataaataattgattttctgataa

SEQ ID NO: 130156 - DNA, 769 bp, Cannabis sativa
  modified_base (26)..(31): a, c, t, g, unknown or other
  modified_base (616)..(629): a, c, t, g, unknown or other
atccttaaaagaaaattagctactannnnnnattctaaaataatagaaattcaattaaaaatagaaaagataaagataaaggagatagaacattatgtggagtcctccaatggtgtctttgctcctagcatttcttctttgctccaaattggtctatattttcgaatggtctcaaagcttgcttagaaagtcgcaattttcctagttttcatttttcctcacagattcttagtttctcatttttttttcctcttcggcgaacaagcaatgttgcggccttccttgctaagtcacaaccttgatgagtagattccttgttttcttcaattttcactttatttttggaaaatgttcattcttgtctttagaccacgaatttttaagatatagtgcaatctttgatccattttagactatgagaaatctaagtaaacttgtagaagttttttttttttttcttttagttatccaattttttgtctcaaaaaggcttaaaaaataccaaaattaccaaaaatagagatctcttaacattttttccttaaaaacataataaaaacaaaaccaaacataaatccaaacaataaagtgataaaaatattaaaacacacactannnnnnnnnnnnnnaatacataaaaataaacctaacagtcatgttgtttcatattgttaatttgttatgtataatggtgttcagttatgttaatatttattagtatgttatgttcaaattttattttatggagttggcaaaaataaattattat

SEQ ID NO: 130157 - DNA, 1102 bp, Cannabis sativa
tttttttttttacccttcaaaatatttttttttttttttttttttgcatttttattgaaatccacatagaaactctcataacaactaacggagcaacctaaatcgcaaccaaaattcacatagcaactcacatagaaaccactagaataatccaaatcgtaaatttgaaaaaaaaagttaaaaaataatagtataagcggtaattctcctaaataaattaattatacactaattaattaacttaccttttcatttataatagcatgcccacttagacctttcacaatatcattgatgtacctacataaaactacattctattccttttgacttttttggatatcctgtagtgcttgctcctttaaacatttcaagtaactcattagaacctccgaccctttcaaatgccttacattcaataatttatattagattcaattaatttgtaatattattaataaaatttaactcgaaaataaaattataaagtacctttgcagcgtttggtcaataatctgagggtgtttatgtcatttccaaaggtccaagtgaatgatcctcccgaaaaaaacgatctcaagcatctaatgttcctcaaataatcaataagaaagaattatgtattcactactacaaaaaggggcttttgcgtcgataaacgcgtctggtcaaacttgttgactgaagcaaaagtcaacccacacttttttgcttcagttatccaccaacgtaaataattattaattagcgtcagttatctattcgatggtaaaacaaaaattgaagcaaaagatgaaatataaaaaaatacatacactattagtttcggtgcacaactgacgcagaaagccattatatacactattagtgtcggtgcacaactgacgcaaaaaggaatatagaatcagctatgggcttcggcccattttaaaaaaatctaaccctaaaatataaaccaacttctaaccttaattctcctctcagacatcccctctctcatctctctctctaacctaattcactctctccacccatcatcaccttcatcttcctcctttcttctcaacccaacctaaagcatgaactgttggaaattatttta

SEQ ID NO: 130158 - DNA, 659 bp, Cannabis sativa
cataaaacccaacatcaataccatgtgaaaattcttataggaattggtttttttaaacaagtagcatttaatttctaacattaaaaatattaagttttgaaataaaaataaataaatataatgcatctggaacctccacgtatccatatttatgagttaacgaaagtagtagtaacgggtgtaagagaattgcaacattggatatttttgcctctaaaaataaaataagatatttaaacgtataaaatctgaaacattaagtatttatgccgcaatttactcgcttatgaaggtgaccagagtggtccttttggtgtgagattttggccaaggttggcttccacgatagctgggttaaaaatatgacttatttccaagccttattgctaattttaaaacatgtgtccagtgcgaaaaattttcaagccacattttttatgcacaggtgcggtgtgggtggtttttgcggtccagataatttgatgaacaatgctagtagtaaattttatatattgatttacttgtctatatatttgattttggggacattattattatatataaaggctgctcatatgtttgtgttagtatcccttctttttcttcgcgcggtgttgtccaatttttataatttatatatatatcatatttatattaaa

SEQ ID NO: 130159 - DNA, 511 bp, Cannabis sativa
gccttttgacgtttctattttatgttattgggcctttttcctgtgctcggtttttacccccaaacactactccccccagttccagttacaattgtataacctgaaactgtcttttgataactcccccttttagacaaagagagatctatgtatttttattttattattattttatttttatccttatatttttattatttttatccttttatttttattatgtttatttgtcacttctcagtttttatgtgggttttaattcatcattactattatttattttatattttttcttttttgattttgaatttttcagttttatgggaagtggcagtttttcttgatgtgatcgtggtgtcttgagaatcgatccttcttataaatgccttactaatcctctatcttccctttgtgttttggcagtgcactctcgagtataagactcccaattttaaaaatctattacatgctttctctctgctgctcgtttcaacttctctgtgctagatct

SEQ ID NO: 130160 - DNA, 1532 bp, Cannabis sativa
gaaaaaaatatttcatactttattgtatttataaacacacatatcttaaaaaatcaaaataaaactattaaaaattcaataaataattttaaaaactaagtttattttaagaaaaatcaagcttattcaaatttataaattcatatcttaaaaaataaagaaaaataattgaaaattcaataaaaacataaatttatttaaaaaaaaaggttagaaattaaactaaaatgttatatttacttaaacaatttagaatttttgagaaaaaaaatatattcaaactcattcccataaaatttagcttttacaaatatttatatatatttttaatatctaaatagatttttaataaaaaaataaataagtttttaaatcgctttattagttttaaaattttaatttttttttaagttttttaatcattcaaaataaattttttaagatctaaattaatttattgaaatttgataattatcaaagtttagggagcaaagttgctactttacaaatacatgtcagtgttgattattttttaattattaatatagatatggtgaatggtgtaaatatgcatgttagatgagtttgaatatatatcttaaatatttatccgtagtgaagtaagttctgtgaatacatgcggtcgaatgggggaaaattatatatagtgtgaaatattattttggttttattgttattcttgtagattgctatgattgttttttctctatttataatttttaggaatgtctaattatagttgttatgtcgcccaaattgtggtagaaaaatgaaaataagtgataaattaattttaattttatctttaacataattataagaaattaaatatcaaaatttaaacagataattcaaatttttattaagttagcatttttatgattatatagtttaattaataattacattatactaatcaacgagtaatagttaataatattttaattagtatgttgaatagtcaatcaattaactaaaagcctaacttgtcattaatatgttatcataaattgtttgtaaagaaagaatgtgagttgtgaaatacaaattaatttagttttgttaaaagtttcatcataatagtctataataaagaattaatttacaattactcaaaatatgaaaaatgtatgatatcataattaatcaatttaaaaattaatttattttctagttgttttatagttgccgtgagattgtttttctggttgtttttacttttttataatttatttatagatgttgtgaagttaatttttcgttgttttttatttatttgtttttatttttattgagcgaagtgtatttttgaagaaaaaataaaacttatttatatttacaaactcataacttaaaaaataaagaaaaataattaaaaattcaataaaaacataaaattattttgaaaaaaacttagaaattaaactaaaaaattatatttacttaaacaaatttaacatttttgagaaaaaaaaatatactcaaacttgtttccataaaaaaaaaaaaaa

SEQ ID NO: 130161 - DNA, 749 bp, Cannabis sativa
tttctaaccatactctatgttttagtttaattttagctaaaatagttaaacaattaaaataggatgttatttttattattcttctccaattatactctttagttagtatttgattattttaataatattttataatttaaatttttacatataaattaatatcataaaataataataaaaaaagtaataatatttttaattaaaatacaccctgtacatttagagaacttcttatctattttttatcatagaaaaagctattttttatatgattggagcttctttttccaaaatgcattttttattttagctaaagagtgtttagagagaaggattggagatgttacttaatactcattattttaatattttattaaaaaattaattatataaaagtttttaataaatgatattgattaaagtaatgtaaaattttttggaggaatgaatagcgactcgccacatttggtttgtcgagctccctattctcttcgctattttaaggagccatatatgttgccattggagttgaatatttggttttgcttagctattatagctaaggaacatataattcgtgaatagttggagttgctctaaagatgaaactatttttttttttttgccgaaaataaaagagataacgtggtgcaaatctaagaaggcaatattgttggattatgttttaacaggatctagatttattaccatgtatgttatttaacatcctaaatatgaatttctagaac

SEQ ID NO: 130162 - DNA, 953 bp, Cannabis sativa
ccgcatacaccagcggcgccgtcggcaggtatgagtgagtccccggcttcatcatcgacggcaacggcttcggtggagccactgctctgtctttcccgaagtaaagccgcttagaaagcctgagaccatcttccacagccttgtcgaattcctccgccatgtgtacggacaatcaagaaaatagagattactttttaggttttttttttttttgttgggttcggagaaagaaaaaaaagaaaatgtatatatttaatttggaatatgaggtattattcttcaacggatatgaaatgaaataatatgaatgaatggtatgcttttcttgaaatgtaagctaagcttaaaggcttctcttttctttttttatctgtactagtgtactgtattcattttcgatacacacaagctcgggggagaaggtctagctggccaaacgccaaaagtatgatccaacagtattgtgacacgtggacgtgatcaggctatattgccgttgaggaacgtatattaattttggactttatgactagaagttcgaacgttagaatgttgagagcgtttggaggaaaattccagtgtggcaggtaccatgtggaaccacgtgtgcttgtcatatcttttatctttcttttttttccttttttaattgtttgggccggtggaacgtgtgggacttcaactgattcactcccaagaatcttaataaggcaatatcttaattagtggatttacttttagtttatggtataagtttgagtttttagttgggataattataaaaaaaaaatacaaaaataataaaaataaaattataaaaatatggtttgtacggagtttttaatattgttactattttttaaattttatttacatcaaatataattcttttgatgtattttgtgttattttttttttattatttgtatattcttttttaggctaattaggat

SEQ ID NO: 130163 - DNA, 1164 bp, Cannabis sativa
  modified_base (1095)..(1116): a, c, t, g, unknown or other
agaattagtatttcacacctatacttaatcacacccataataatttattgaaaaataaagttaagattttatggtaactggattattttttttctttttgaataatcaaaataaaaataaaagttacacctcctcatggttacataaaatattatttggtaacttggttatgaaataatgagatttaagatgtactgggagactttatcaggaatgggcatcatatcacctataatcttctcattagggtaaattagttgccaattgaaccttttaactacattgtggggtttctctccagatgagatgattggaggtttttccaatttgacggtcatttgtctttaataggggttcttattgctgagtcttttcaaaagttacctttgttgtccctaactaaaagcttccttttgttctgttttattgtgccgttttttttccactgtgtagttgttttggtttaagttttttgagttgactttaccctgtgagtacatttattattcaaaggttggttattcccctaccaacactgctgcattgatgagtgagttggtaaaccaggtaaataatatggaaggcatcattaatgaaggaatgaatgtcaaccaaagggaggagactcaaactcccactctgatccgtgaagaggttacggaagtcattaatgtcgatgaagaggggccctctgcagaggctgagaaggacaagaaggaagaggagttggatgtcctacgccggacttttttggataacatgacactggacttggagcctgactttgagctcaatgtcgaagtgacacgaaaaggggtgctggcgagtttctttgaaggaaatggtgtgtcaagaactaggtaaaaggagatattggagcaaatctggaagcttaagggtcactagagattcaagaccctcaagcttggtgtttggggaatcttttttgataaagaggaagattgtgttacagtcctagaccataggccatggctcataaacaggaagctactgattgttcatgaatggcctgaacatggaagttggaatatggtggacttgacaaaagcagtttttgttgggttttgtgccctnnnnnnnnnnnnnnnnnnnnnnatcagatttacttattaatataggtcaaaaataacatttaatgttgca

SEQ ID NO: 130164 - DNA, 703 bp, Cannabis sativa
  modified_base (665)..(673): a, c, t, g, unknown or other
tttatctccaatggtatagcatctttatattttgccacataagtttttcacctcatcaagcattctccaaaatattaccattagagatgctcttatcggacattatttgtacgtcaatggcttccccaagatcaacatgaacaaaccaataaaatggttaatttgtgatcgatatttattgatgaatttccattagttattgttagaacttaagttaaaatttaacaaaaatatgagatgtattgtgtgtgatagtgctttgagtcttacaataaataagaatacttatttaaaattgtatatcaggtgtaactttgagaattgggtatgggctctaagggtcactgaagtttgtgcgcacggataaggactcacacaccggaccactacatacacgctatcttgcacgtgcggaatgattcatacagagattgttttatcatagagacatcgtggttgcttgcatacttcgggtagagtcgcaaaacatcttaaagactactcagccaaaaattttattcggtaatttattccaattttatattttaattcgatttaatagctattatagtaagattttattgaaagtattttaaccttaaaattgatgtgagaaccaaattataattacataaggcattattttttgtaaaatatttatattnnnnnnnnnaaagaatgtttttttacatttttacggttt

SEQ ID NO: 130165 - DNA, 1402 bp, Cannabis sativa
atccaaaatatgaaatccgcacttagtgcggattgaatgttgtttgatcaaaaaagtgcggattgaatcggatgaacacccctaatttatatagatatacatgtattttggtaatgattgagtcatttgtttagctcaataaaggagcttcaaatgatgcgtaagagaccaaaaaagtaaaaacattaaagaataaaaggaacatctatagagtgagaacagtagaaaaaataaatatccaagtaagcttcacttaacaagagtgaatattataatgactacttgaataggaacaaaggattcttgagttgccacataatagctttggctcaatacttctaatggtgtatcttaaccattcaaaaattgataaaacataataggttaaaggggactagctaggaggcttaagaggcatatgagaaaaaatatagtataatattttaatataaaaacataacacaatatgatccttccaaagcaaaacaaataatggaaaacttcttaaaatcatattcaagtgactaaaggtccttcagctcaatgaattgaatttgtgcacaatactttaagtttaatcacccaaaacaaacctttgtcccaactttaaacaagaaggaatgatcttccagcattcgatttcataacatagagcagtgtttcatgtgaaaactcaatggccaagctgatccccacaaaatcaaaaagcaaaaaaaattaacaattcacaaacaaagctttgatttttcagtttcttaaacacaaatttaagccggaatttacttaataattttataaggtttgtcaaataccacttggccttgcaagactagcacgtagtatacatacaaacattcaaaatcagatatatatatatatagctgcattaagagccaagttggcaccagagaaactccttctgcattaagagccaagttgttaatgtgcagatggctttggcaaaaatcgaaaagaaggcagaggagttgatgcctaaaatgtctgcaactcccagccgcaatgatggattttcagatggtgtgggaaggcatggattgggagagttcaatggcacgatgctcaacaacttatcttatggttcttgcaattgtgtcttcactgatgcatcatgggtgaagggtactgctggtgtagctgctattagtgtggatgtgtcaacaagatgctggtttgtcaatgcgcaaaagatacgggtggagtcggctttggaagctaaattttcagctataattcttgctttgaacagggcatgtgatgcagggtggaaggaagtgtatgttttgtcgaactctaaaattgcagttcaggctttatcaaccaattctcttcctgactggagagtagctagtgtgttttatttatctttaaacttggctaaaaa

SEQ ID NO: 130166 - DNA, 849 bp, Cannabis sativa
tgatcacatgtgaatatattagcagcccaactcattttttacttttaaaaatcattaaataatcttaaaataattaacaatagcgaaattgaaatattgaggagaaaaacaatcgaaatatgtttttatttatttatttatttagtttttataattaaatagttactatttagtttatttttcacttttaaaattatttaataaaatttttattgaaaatggaccactatttaattgacacgtattagatagatttaataagatttaacgaaattgtcattaaaaagtgccacaacttaacatataatatttaatctgtcagaaagaaaaaacatattgtatataagtgtaaaaattgaaaagataaaatatttataagacaaatatctctaattaaatcgtcaaatcacaaccataatcatccattaatggtgtacgactaattgactgattaatatatcttgattatattataataataacaacacgccatatatacgaaacaataataagttgcaaatttgacatttgagtttgacagtgctagctacccttgtctgaacctaaaataaagttaattgacttccacccaaaaaatattctatttcttttacatattataatgaactaatttagtagattaatctaaacatgcaacacgactatcactgtactgcatatgttgtcttttaaaagaaaaagttacatttaagatatatatatagattagggacaagattttgtccaagatgtactttcatcgaatgtattccgtggtacattagatgggtctcagggtacgtttctactttttaagcctaattatccctagattaatctcagccgtca

SEQ ID NO: 130167 - DNA, 946 bp, Cannabis sativa
tggtccttgttatgttatttcacttaatggtgtagtccaaggctgattttatgcgaattaaactttttaatgggttaacaacttatcgttggtgactctcataaaaaaaatatctattaatactatttactattattttttcaaacttttcatattttcttttctattatttttttgaatttgtattggaatcgataataatttaataaaatagttagagttttttttgtgtgagttttataagatatataattgtatgataaaatgtttaaaaatattatttataaattggacttttcttttttgttaggggcccaatttttaaaattagaatacgacctctaaatatttaggacggccctggtgtaacccatgcacaacctcgttttgttactagttttaatgaagattgtatttagattgatacttgttctcaattctatgttctcccgtaacaattaatttttattgaataaaatctttccttcaaaaaaaaattaaataaataaataaataccaacattacaaaaatattttttttttagtatcatcaataaagtttgtgataaaaaaaatcatgaagtgaaatatctgtgtttaaattatataaattataaatatgcattttttaatttcaaacaattttacaattatgtataataaaatatggctaaaattatcttatagttaatagttgcaatggctaaatattattccttaatcccaatcaatttttggttaggacatatcaaatgataactctctctctttttgtttttcttttttagggtgtgtttggaagtaactgtgtaattactatgtagggtaattattaaagtagtaattacactatattttaaaatgcaaggtgtatttggatatgaggtggtaattacatatgaattcctaatatcttgtttggcaaaatagttattagtaattacat

SEQ ID NO: 130168 - DNA, 1089 bp, Cannabis sativa
ttttagtcacaacaaatattgtaagtaaaaatacatttagtcacaacaaactgtgatttttgttaccaatacctttagcaatggacattttagtcacgacataggaatgatcatttataattagtgataacatttatactttaaattacaagttttattataattaaaagtaaaaaaaaattatagtgtcaagaacaaacctatgtaattattcttttagtgttttaagtgcatgcctatgtttctcaattaatggacatataactaacctccaaagaaaaccacttgatatgaaaataatatattttataataatgatatattttataataatgagtaccacagaacaaatttaaagatgattttttttagaaaaattagttgtgaaaatatattttttaatttaatttagtttgattttcttttattgtttaaaagagatcttattatggcataaatgacccttgataagatgaaaatcaactactcgttatgcaaagatcaattcaaggtaaaaatagtcatgggggccaaaagaattttgtgagtaaggaaggaccactattacaaaaactactattcttgtcggttcttaaatcgctttttttgggaaccgtcgctaataaaattgaatgagtgtttaaaattgtcggctatagtggactattcccgatggttctaaacacttgtgtgtacgtttcccaatggtttaaaagagttacaagctaaaaaagaaaacaggatatcgaagggcatctcgacagtttaaaccatcagctatacaatatccaacaattttaaatcgtaggctatagtgttatagttgacaattttaaaccataggctataatgtaatagtcgacgatttcaaactgtcgatcatagtatcccttacggttttaaactgttgggaaatgtggtttaaaaatcctgtacaatttttcaatttaaacccccatttcaaccatcatttcattcatttgcttaatttttcaattcaaaccatttcgtcctctctttctctcgctccttctcctcagatcaaccaccacctccctctcctttgctctctctcactctctctctctc

SEQ ID NO: 130169 - DNA, 677 bp, Cannabis sativa
aggagatcacctattggaataaaacacttagaaaattctcatctcttctctattttctttctctaaattataatattacataatactaatattttacaataattgaaacaatttacaatttcatatattaaaaagttgtgaacattaaattgaataacaagagcacaagaagcatattatttgtcaaaacagagaattaatatttttctaattagataaatattattttgatatgacttatacttaatttataaaattaaataaataaataaataaaactgacaattaaaatatttataactattgtgtttgaaaaaactaaattaagtgataagatagaataagtcaaaaccaaattcctagagaaaaaaaggggaaaaccaatgagaatcagcaccaattaagagtatgacatcattcttagtacgtcactcacttcacgcattgtgagtgcattcattcattaattattcatgagaattgctaaaagctatctctaatggagttcatatattttaaaaaaataatttataagaaatattattaatcagtaaattaatacaatagtaaggaaatttacatcatatattaatttttgttattttttttacaaaaatactgtcagatggtatttttctttttacttttttacagtatttttatataagtttcatact

SEQ ID NO: 130170 - DNA, 759 bp, Cannabis sativa
  modified_base (50)..(53): a, c, t, g, unknown or other
tcttttaattttgttacaaaatcaacaaatcattagtaacaaataataannnnatatttgttaatcatcaaaacaaggagacctataagtttgagttaacaccatcatctcatggaagagcaagaagtaacacaacatttcaaggtcttctgcagaagcagaatacagagcaatggctaacaccacttatgaagtggtttggcttctttctgttttgaaggaattgaagttgaacatgaagggcctgcactgttatattgagataacaaatctgctcagcacatagcagccaatctagtgtttcacgagagaaccaaatacataaaaattgactgtcatttggtcagagaaaaggtacaacaaggcatcatcaagacatttcatgtttttacaaaagatcaaattgctgatatcataactaagccattctttcctaatcaattcaacactttcaaacacaagatgagattgaaagacatttacagtccgtctccattttgagggggagtattaaacttgattagtgcattgattagtaagatagaaagctagttagctaagaggttagctcaatcacgattagttagtttgttagtgtgtttctcttgtaatcttagctgctataagtagttgatcaatactttgtaacacttagatttgatgatagacaattctgttaattcctttctctctttctctctttctttcctactctgtttcaagctcattcgagctaatatttagtcacaaaaaatttat

SEQ ID NO: 130171 - DNA, 714 bp, Cannabis sativa
aaaaaataaaaaaatggttaaaaaagtgttactaaacacactcttaatatgacccaaactcagacctcaaccctagacccagaccaggacctagaccttagccgcgaacacaaactcggaccccagtctggacctagaccttaaactcaaacccaaaccccgaacgcggactcctgaaccgaactcaaactcgaacttggcctaggaccatggacctgtgacctagactcggtgccagactcggaccccagccccaaccccatacccgaacccaaacctaacttaaataaaattaacaaatgaaattcatatttacaaaacacacttttattttttattttgaaaattgaaaaacaaaagtggctatagatcacatttatatttttcaaaaataaaaactttacttttatttttgtgattacaaaatttaaaaataaaagtattaccaaatgacactaaaatgtgtaagggtttgatgaacacttctctatcaaactctcaacacccttagtcacacccatctcttttcaccccttcaaaagtagacttaatcttaaaaatgttaaagagttgtaagtttattttttgaagggggattcccttgtgaatgtaattgactcagtttaattaataaagcaaattaatttaaaagataattattatagaactatgtatctaaatgaattggtggcgaaagtacttaagtaattaatt

SEQ ID NO: 130172 - DNA, 982 bp, Cannabis sativa
tttttttttttttttgtcaattttcatacccaatatcatattttgcaatattttttttttaatatttttataacggtattcattatagttataatataattttataaatttttaaataatttataatatgaaagttgttaatattttataacactcttcatataatatacaccgttgcaaattttgtgaattattaattatatataataatgtacctacgtccgtagaatgaaaaaaaaattaaaaaaataaaaaaactaaaagataccaaatgcaatattttttattgagactgctggccaaatttaatgggaaaacttagtgattagcttgctagaaaaatagattgataagctatatctaatcaacctttaatttatatatattataattatatggggacattatattatatatattcatgatgtgtggtctattctaccaattgaaattttgatgcccttttggttgacatttaatccgttttttaatttctagattttaaaataaatgacaatatattaatatcacaacaatctttgttatgaaatcaattattgaaatatatttaaaataataattaagatgaatatggatctatacacatacctaactggaaatttggcatataagattttttggtcttttttgaaactaaaatattcttacgtacaaagaaattaatttatataacatggcctccggccattagcaacgaattttgtatattgtttttatgttattttcatgttattattttttttgttattttattattttttataaaaaattataattatacttcaaaaatataaaaccgtaaaattgaaaaaacaaaaaaaaaataactgtaaaaatgtttaaattttaccaaaaataatattttgtgtaaattgacatcgagttactattaaaaaaaaaaagaattacccatatactgtttttctaactttttttttttttttaatttacgatttgggtt

SEQ ID NO: 130173 - DNA, 588 bp, Cannabis sativa
  modified_base (101)..(107): a, c, t, g, unknown or other
actcctattttgtgatcattctacacattttgtaactccataatgtatgttacaatttgacaaaattaatattttgtcacacttaattatttaatctaaannnnnnnttatataaaataatataacataatcattacattacattatataaaaatattgctgctaaaatactaattttttctgtttacttgcggatagatataacaattattttttggtacgttgtaaaaataccaaaattactttatgttttactgtgtaggtaccaaccgctaattaataattttatattttatctgaatatttgcggttaaaatacttaaactttgcatttacttaagactaatgacacaactttttataatttgcagcaaagacactaagacaatgtattatatattgaaacgatagcagatttttttgaatttccatttttagttgaaaaacaatatggtgaagttttgttataatgtaaaattggatatttaatagatgagcattgctattaggcatcagtggtacctagcacctttgcgacatgtcgcgtattatattaaattatatgggacccgatacttaattagacca

SEQ ID NO: 130174 - DNA, 696 bp, Cannabis sativa
aaatcttatttttggtattataaattatttagaattttttgaaaaatatttaagtggtcctaaagagctacaacatactcgattataaaaaaaaaatagattaatttttttttaagtaatttgcaacatacatacctaaatttaattatcgattactgataaataccttagtataatttctaacggtaataatacttaaattatatttctggaacattcttatgtacttgaccattaagtgtaaagtcattatccatgtgtcattttcttattggtatgtttaaattaattgttaaacaaaaataatagtttaatgaccaaaaccaattaaagattgtcacgtggatattgaattgacactggatggttaggtacttacggaagtttttaatataatttacatattattaccgtaaaaaattaaacttaagtatttatttgtaactcgtaattaaacttaagtatttatgttataaattatttaaaaaaattcttgatgtggaaaaagataggtctactagaacgaccatttaggggaaaattttattggagaaatgctttaaatataaatattccccatgtgtccaaatccactttagagcattcccaatagcatatctactctttttttaaaaaatacatcaataaaaccctattttctttattttacagcatacttttacattacaccataca

SEQ ID NO: 130175 - DNA, 1772 bp, Cannabis sativa
ttaaatgtattcctatgatttattcactactacaaaattggcttttcccaacggttaataaaagggtcaattatgaaaactgttggaaaagctaagagaaggtttttcccaacggtttagaaccgaagcaaattaaccgttgggaaaaaccaatagcaacagtggagaactgtgggcaatactaagtgaaattttttttaagaaaataataaatcccaacagttataaactgttgggaatactaagtatttcccacagtttataactgttgggaatactaaatatttcccacagttattaaatgttggaaaaaattctctttagcaagtacaaagtaaattattattgttactattattattatttctctctccagctatatttttttttattattattatataaaattaaaaaccctacaaatctctttctctctccatcttattcccattttattttctaaccctacaacaccctgtcgcctccctctcttctgatttctctttttctcatttctaactcaaaccctaacaatctcatttctcttcccattgttgcaaaggatttcacggtggggggttcaacctcgtcattgggtgtggctctatcatcgactggcggaggaagccaccagacaagaatcgtctgagaggaaaagagatgaggagaaaaggggaaaggagatccatgaacacattttggccactgcttgttcaagcacaaagaaataggtgctgggagttcaattgagattggtttaaggaagttcttccaatgaaaatggataatggtgcaatacccagtggtgtaagtgattctttgcttttgattttttaattgatcaatgtatgaaccgagaaatagactgagaattaaaagcatattgccttgcatttgatgatgaacttggtattttttttttttttttttgcatctttcatcaattttagaatctcatggaactatttttaattgcttgtggttaatttatttcatttactgatcacagggccttttcttgttgctaatgttagatcattaacccatgatggagagaatcgtttttggcttggacagccggaagaaggccatcgtcgatcctggtgagggttcccgtcaaggggagtgaagtcagggctcgtttttggcttggatggttgaaggaaggccatcgccgggcgtggatagggttgccgtcaagggaggctcctttttggcttgaaagctgaaaataaatttcacttaggttttctttttaacaattttagttgtaatttatttttcatatacaatatattttgaatttgtattatttttttttctgaattgtatctcatgtatcatgtatattgtaaaatattaaaatatattaattttattttttttattaatattgtttattttttgattaaaattaatattattatatatatttaatattaaaaaaaatattaaaaaataattcaatttacgtttagcaaaaaaaaaagtaattcaatttactctaataatacttttaccaacagttataaaaagtcatttaaagtaactttttccaacatttatcaactgtcatttaaaatgacttttcccaacagttataaactgtcttttaaagttctttatttttatgacacccacatagccaacagttttaggaaccgttgggaaatagtataaaagacagttataaaccgatggaaaaagtcacttttgtagtagtgattagtacacagggtttaactaatatgataatctacaacgtagtttac

SEQ ID NO: 130176 - DNA, 1933 bp, Cannabis sativa
tcatctgtgttatatttttttggtttatgtgtttgctggttttttgttcttgatttgtttgttttgatttaacttttgtttgtttaagtgtgatcttaaagctaaaattaccgtggttaattcttatgtatcagagctaaatttcctacagtttcatttattagaatgtactatttctcaatttcagtgtctcctctcttttttttttttttttttggtagtcctgatttcagactattaaaattaggaaatagattttcgagggttttaataattttttaaaatttcatgttaaaaatatatttttaatttattaaattatgaatgaaattttaatttattatttttaaataatttttatttataataaaattatataatacatcaatataaaaaaaaatatatttttatatgttattagtactaataatattaatcataatgcaataaaataaaagcatataagtggaaaggagatgtattattggtagaagttcaaaaaatattataggaaaaattgtggtatatgtttctaaaaaattcagagtatttataaacaaaaccaatacaagagttggtcaatgtacgagtaactcttctagtaaatcaaaatattatagtaagccaaaacgaaattaaaataaatgaaaggcaaagtcaatattaattcaaatccatgtctcatattttcaagtactaaaacaaaaagcattatacacttgaaagaaagttactactaaaatgagaaacattaacactttaaaaaaaaatacaaaaccaatcctttggataaacttcatcttcacctcaaactccaatactcgaaaaccaattcttaggatgatgttgatgagttaaggtcaaatacaaaaatgggctccttcctccattatcatgggtatactgaagtgaaagaagaaggttctaaaagtgaaaactcaagacagaaatggaagacaaagaagatggtttatacttttgttgacttttctatgaggtccttacctgcaaacttcatcttcgaatctcttgtctgcctatatcttgggctgataatgggcttctaactactgggcctctactaggcctcatttggggataagttgaggaatattctattttgtatctattaattaaaaatacctttatattttattttattatatattaatttctcaactgttgaaaatagttgctgcagaaaataaaaggaacgaatttatcgaattaaaatttagtttgagtcgcggattaggttgctctatttaagacgtttgcggcactgtccagaactgtgcaagcagactatctcgtcatctccaggataaaacagcccaatcaaacacactgtaacggaactctattgcacgttagagaatcgtcaatatgccacactcaaaaaccatactactgctcagaatatatgtgtaatataattgtatgtatatatcgtgtatattttttagtgagaaaaaaaggtgtgtttctccctttagttctgatacattatataggcaatgcactaaaggtagtaacaggaagaaagacgttaatgaagggaacgttagaacgtcggatagtgtgggattgtgggaatgatgcaaaaaaataggaagtctctgtttaccaattaattaaatacgtttaaaaactgttttaattaattaattaattcataatactttaatcaataatttttctccaaaaaaataaagtaacaccacacccgctcgccagcttagcgcggtcgaacggcgacggcaatggcagcgcgcgtgtgtgagttctcacccatgcgcacaaaactgggtacccctttgggccccaacccaagttccaaacctggacattatatacacttctaatgaagtgtttctatcccgcgtgagactccattcactcacacacttcactttttatttttataaaattt

SEQ ID NO: 130177 - DNA, 779 bp, Cannabis sativa
  modified_base (683)..(687): a, c, t, g, unknown or other
cgtacatatttaaatccataaatatgtaaaataaaaaaaatactctcagctaaataaaattacaaaaataccctttcggagttagcggatattacagtgtttcccgctgaccttaagaaggttcgctaaggagtggtttaaaaagctagaacctggatctgtggattgttagaacaagtttcaagttagttttagaaggtagttcgtggtagccagaaagataaaccttaaagtcagcgctttgaccaacatcaagaaactaccagttgaaactctgaaaaatttcataaaaagatttaaggaagaagcttccaagactaaaaaagttggatgatggacaacaattggcattactacaagctagaattcaaacgcggaccccttttcagaatgagctttagcaggaaggagctgctagcatttaggactttcagaagagggctaaaaaatacatcaatttagaggaagcgcaaataacttctttcaaaggatattatcccactggtagaccagggtatgttctcgaaatgcagtttcaaggaattacccttccagttgcgtcacaagcaaatggaacgcctagtgtgcaattcttagcagcacttggatacacccacaaccttgatcttactctggctcaatctgattttagagcactaggaggttgttgggttttatgcccnnnnnaaaactctttacaatctgattagctatcaatataaaaaatttgaagtgattgatatttgcatgaattctacatgctaatggtttaaatatgt

SEQ ID NO: 130178 - DNA, 811 bp, Cannabis sativa
tgaatgcatagcaatcttaccataaacaggaaaaattatttaacttgccaaaaaaggactttacaaaaccagttcccgaaataattaatttgtaaactaaattttgaaataaataattcaagaattattttttgaaatgactaaatcaaaaactaatgcaacgaatacttatagacaaagattgagataatcatatagggggatttctccactcaagcacaatccaaacgatttcggtaacttatactggattgaagtattcctgtacgacaaattccaactgattataagttgtttaaagtaattgatgaattagaagaacttctcaacatatccaatccattgataaaatatttaattctccttagataaagataattatcttgagtagtagatcattcaacaaaaaaatatgcatgaaccatattggaaagtgcttcaaagatcatgactcaaatatcatacatgattcattttataacaggattcatcacaattactaaacctctacgagtactcctttatttagaatagacaagcatacataggtatacaaataaaaaacacaatgtcaaattcaaactcataaatcgtcactactgaaaatcctatgtagttatgcagtagtaatattaaacacaaaaactgatgacatagagaattacattgtacacactgcacaactatatgcaagtacacacaaattcttaggatgtataatatatatatatataaaatactcggcaactggatactgtgctctctcattttgacaggttctgaaagttgatgctgttgggttttatgccct

SEQ ID NO: 130179 - DNA, 1412 bp, Cannabis sativa
gatctaggggtgcaagcccaattgaatcaacttaagagcctcattcaaggcctgactagcccaaaactcactgatttggagctcgatcatacaagaggttcaccattgtcgcctcagattgattccctcgatctttcgaccaagttcaagatgcccactatgaagatgtacacaggaaaggaggatccattatctcatatcaagtatttcaagatacaaatggacttgcatgcagtaaagggtgatgtacagtgtggaatattcctgactaccttggcaaatgccaccaagcagtggtacttcaagttaaccccggggaaattcatctcatggaatgcctttgcaacagaattttgcacggaattttcctcttcgaggcagctccccgctcacttggaagaccttgttgaagtaaaatagatattaagagaatctttgaaagattacaacagtcggtttatgactgaagcaacaaaagtgaagggacttaccaaagaaggaaggttagcagccgtgctacgaggaatcgaacaaaagggtgagttatggaaggacattaaaagactcactgtaggctcaatgtgagaatatttcgactggcatataggtttataaagctcaaagaagtagtccaccgagtggacatagttggtcagagtaaggcagacccaagtcccacactccctacaactgcaaccaatacatctgtccaaccaggtcaaaccttccaacctcaaactagaaacaattctgaccatagtggtaagaggtctaacaataaaaataaccataacagtgggaaaaaagggaagtttaacaataacttccattaaaaacatcattgagagaatgcctcaaagttcattgccttcacaatccttactgaagctcaagaaaccatttttatggtaactcagttcgttgtgtcgtacagaagaccccctccaatcaagaaagatatgaacaagaggaataccacaaaatattatcgttttcacaaagattaaggccatgataccaacaagtacaataatctgaaggaaaaaatggaattcctcattaggaggaataattcgcacatgcatcggtacataaaggctgatcaaatgaaagagcttcccaattaaacaataatcgaaattatctgataccccgaccagtggacaagcatttacaaatgattattgggggcttgcacattactagagaattaaaaaaaactagataaaggtatgcttaaacactccaatatgagcaaaaatgaagaagtaatggatgcggaatagataaagccaaaatagctgcgtagagagaaagttgtcatctcattcagtgaagacgatgtcaaccatgtcattttcccgtacaacaaccccctggtcgtcgaggtacaaatttctaacatgacagtg

SEQ ID NO: 130180 - DNA, 650 bp, Cannabis sativa
tttttatttctatatggttatgttttatgtggttccattgttccattccataccactacttttctaattcaaattcaatctagttctagccccacctcatgcatgagagagaatatatacatagaaaacctttactactcaatgccttcattattgccgccattgaacctcacaagaaaagtatatgtaattgctaattggggtgatgttggaagattaaaattgaaagctgaataaagtaatatatctaacaaaacaaatctaatttataaataaacttgaatctatttagaatattgaaattccaaattaaatcatccaaatattgattaataagtgtgcttgatccggtaggtacaactgactaataaagtcatttaatcttgtaactcgtaaggtgagagagtcttaagcaaccataagagtggtggggagtcgtgttaaatttttacatcgttcaaaaatataaaattttattttattttatttacattattttttacactcatacttttaaaaataccctaataataagtaccattaaaaaatactatcatggctccacacattattatttactttaattataaatattatcaagctgaattttaaaaaaaaatcatatattaaagggtcaagatgcaaaatgg

SEQ ID NO: 130181 - DNA, 681 bp, Cannabis sativa
tagagctcgaccaatgtagtcaaaagtcttaaaatattagtgtagagcttgactatacggagtagaggtcgaccatttatggtcgagatgtagtctttaaattctcataatgttagtataaagctcaactatcttgagttgagctcaactgcttgtgggtaaagtatgactattatgtttgtacttgattgatataatattatctctatttatttaaatcagtcaatgaaaagttttgaagaacaatcataagcaaatagagaagaaaaattagaattaagtggaaaagaagaaacataatcgaatggagaagaacaagctgaatctaatggagatgaacaaataaaattcgatggcgaagagtaagaagaaacaaatggacaagaacaattagaaccttcatcaatgtcacgagagaaaacacatccggtattttttaaatttgttcactttattttattattatttttcttattttattcagatagtagaaagattatgtttaatttattgcaggtggaaaatatttctcgattacttgatgttctacagaattcaacgttagtatatttataagtccattcatacatgttttcttagttgatatttattgcaaacatatatgtattattgatttcaaaaatttcttataacagagaagattgtgcggtgtatgcaatt

SEQ ID NO: 130182 - DNA, 605 bp, Cannabis sativa
tttttttttttttaagttttttaacaatgtgctttcttgatagaaaaatgttgtccacaaatgaaccttaagcatctatttgtaatattttgaagaccgtgccttaaaattcaaactcatacacatcccataactaacagttgagagtcctctccaaaccgcctgattcgtgaataaaaagtcataggtattctggccgatccggccaaatgaaatgaatcattgttcatagaataataatttacttttagaaaaccattttggtattaatgggtataaactaaaagaaattgatcaccaaatgtccaaatgtattataacatatttcactggggcatgtggcgatgcgtctccacttattgtgccctatatgtggcaatacattcccacgaccctctctgatttcattttcacagtatcactttttgaaactcttatttctacaaaatcataaaatatttttgtgctcattttagagcaagtttaattaatacagccgtgcactactacaatttggctttttagtgacactatttagtgacacgcacaaaagtgtgggtcactatagagttaggagtaacttttagtgacatgcataattagac

SEQ ID NO: 130183 - DNA, 769 bp, Cannabis sativa
gaatctgcaattaatttccgccttatacaatcgagcttgctgacttctactattttccaccaaaatatgctaaaatctcttcaaaagactctaaatggatgaatagtctctaaaataacctaacaagttaaaatcacactattcaataatttaaagaatcaatttaagaatattaataaataaattaatcatatttataagataaatatggattcattaagtagctccatcagagggtggtaaagttcctgtaaagcttttgttaaacctgtaaaagcattcaagagccatatgtcaaactttgtgacatagtggacatcgtggcttgttttttgttgtaggaaaccttccaccatgttgagtagtatggtttcctcttccatagttgtaggaaggagatccacctcaagacatatagctcgagttagttcctctattatcgtagtaattagaagaactggaagatggatagggtgaagagtgaaagtgaccttcactaattccttgtgctctgaaattgcgattgtaatgagcaatgaaagcttcatatgacagttgagtctccataccaggattagtatcagtaacagcaagattggcactcagatctacctctttgtcaatcttttttattcttgattcagaggcaagaatgagtgcttcaattttagctacaaagtataatccaattcgagtatttgatgatatgatgaatgtatcatattcacttggcaatcctgttaggtccttttttggcaatttagttgtc

SEQ ID NO: 130184 - DNA, 2355 bp, Cannabis sativa
agttaaggagtcttattattcttagtttttttttttttttttgaaaagagaagccttattattctaataaaatatgatgagaaatttgaattcaattttattaaaaaaaaaaattataactaattgggtaagattaaattcatcaatcacacatataggaaataaattatactaactttgtgacaaaccaaaataaaagaacattgatatatttaatgtaaaagtatatcatccacaataatctctaaaccatgtgggatttttgtgaagtgactctcatattactaaaaacatacaaaaatgtggaaaaatgagaaaattaagatatattcaacaaaaaataataatataaaataaaaattctaaaaatatatattatttttatttgttaaaaactaaaggatgtttttttttaatttaaatatttgataaagattaaatagtgtaaaaatatgtgaaaataaataatattaactttgtaacaaataaaatatatataacctataaatttaacatatggttttaattatttaaatacattaagacaaagaattataagaaaataccttttatagagaaaaatatttaaatgattttataattattttaaacttgataaagatttaaaaaatgcaaaaatataatttgtattcacttgaagaaaaaaaatataactaaatgagtaagattaaattcatcaatcacaaacatagaaaataaattatcctaactttatgaaaaataaaaataaaagaatattgatctatttaatgtaaaattatatcacccacaatggtttctaaaccatgtgggacttttgtgaaatgactctctaatctcatattactaaaagcatacaaaaatgtggaaaaatgagaaaataaagatatattcaacaaaattaataatgtaaaataaaaattctaaaaaaatatattatttttatttgttaaaaaacttaaggatttttttagatttaaatatttgaaaaatattaaatagtgcaaaaatatgtgaaaataaataatattaactttggaacaaataaaatacatataacctataaatttaatattctcatctcaccaaaaatacatataaaaatatatatttaagaagtcttattattctaataaaatatcatgtattaataaattaatatagttttaattatttaaataaataattataagaaaataatttttatatgaaaaaataattaaataattttattaataattattttaaatttaacaaatattgaaaaatataaaaataaaatatattttgcatttacttttaaaaaaaattacaactaattagaataatgatcaatataatgtaaaagtataccactcacaatgatttttaaactatgtgggacttttttaatataactcgcataagatgccatatcatctcttttttaaccttccttaatatatatatatagggaggtgattttgtcctgttatggcaaataagggaatacaatccctgattgtactgtagtcgttggattaaattggggcatgatctaagggttggggttaaagtaggggtagttagggtgcaaaaaattgtaaccggttggtattttattttaaaataattaatttttaaaaactgatactgattgataattgatgtacgtactgacagtaaccaattttcaaaatacattagtatttccttcttcttcgtgggttagtgtgttcaaaatacattcataacagttaggtttattttagggcacttgttctcattttcttcttattattcaaattttcttcttcttcttcacatttttgtcttcttcctcaaattttcttcttcttcttcccattttttcttcttcttcacattttcttttagggaataaaataaatttaaaatttgggtgagggaactgtagtagtttcagagttggtgtactaggttttttgtgtctccggctccgtctccgaccgaggtgggtttgtacaactaagtgtctccgaatgtacaaattttcttcttcttttgcatgttgttcgttctttactttggagcattgaaaatttgtctaacattgttaaaaaagatttaaactttggtaaagagaagtgttgttcttcaatccgtgtatgtgcatttcgtattttttttctgttccatttttggtttattgagtagttttaatccattttacaggccttaaatctgcttcgtgagcaagttttgattcacagattgctaaaaatcgaacatacattttatgttccccaattttacatacagagtactaggaagtagttacttataaatatccatgtcagttcctatattttgtgtgaagagcctgattcgattcat

SEQ ID NO: 130185 - DNA, 1265 bp, Cannabis sativa
actttaatattaataaaaaaataatatattatttttatatattattagtaactataatacatgtaaaaaaacttaataaattaatatatatgcatacggtcggtttattatcaaaaaaaaaaccgaccgttcaatggcgattttaaccgttagcggttttctcagttttcggtttcgtcagtttcggttccaacagtattcggtaggtcgatttgaacggttttgttggttctctagattttatgctcaccctgtaatcttctatatcacaaattggctttctacaagtaatggcttcaatacaaatttagaatcatttataataataataataattatattaaattaaactatttcgataaccataaaaaatgaaaaaaaaaaaaaaaaagaaactcaggatccatatacatcattacttgtaattttaatcactatatatcaccatcattattatagtaataatagactatatacatatacaaaaaatttcaaataattttatttgaaatttatacttgaaagttagtaaataaagaacaaaaataccgggggttcattgtttctaaaaacaaaaaatccaaataaaaaattttaaatttacactcaaaagaaattgaaacaaaaaagagtagattcattttttcaaaaaatccttctcacagatttcttcacaacaatgagaaaactaaacttgattacttagaaaaacttgagggcaccatgagagagattaaaaaaataactaataaaataatcatcgaactcaattttagagatgtggaaagacatggggaagatggatgcttgagaaaagagttttgcttgttcatggttataaaaatagagatctagataaatatattagctaggttatatatattatatagcatatgtttgatactaaaatatcaatgttaaaatatatctatatagtttagaatattaattttttttttttttctgaaaaaatcaatacgtggatatttttttttaagtactacggtattttttttagaaaaaaataattgttaattaagtctttttggtaattaaaaaacatgaaaaaaaaaaatagataattaggaatggtgatttaatttttttataaaaaaaattataaaagtgagagaattataaatagatatatagattgatgattatttttttataaaaatattaaaaaaatttgagaaaatagataaacagattttggaatctttatatattaaaagtgtctatctaacggcatttcttggtttaac

SEQ ID NO: 130186 - DNA, 661 bp, Cannabis sativa
agttctttcatgatgggctaccagttacaactttgattacaataaaatcaactttcaatgttcttccaacagttgtgacagtcgaactcaatagctcctatgggaaaaacttggttgttgtcaaaggaaagcactggaaaagttgaagctctaattttgcattcatctaatcccttattgattaatgccacatgaaacaaaatgtgtgcactactcccaccatctaccaagatctttcctagtacgcaatcttggatttgtagtcgaatgacaaaagcatcttcaagtggcagttttacatctttaaggtcttcctcggtgaaagtatttggagccataggaaaatacttctctccaggaagaatataattaacttcatgttgttgagctcgaagccttttcaccctttatatggtccttttctcctgttgagtcatattttcctggttaagtgttggctctacacttcgtagaatcatggggatctattttagaatttgtgtctattccttggatgagcttaactctttccaggtttgttgtctcaagtgacaccctattttccccttagtgtatctttcttcattccttccaccttaattcctcttcatgtactggtggaattaggagtgttcattggatcacatccaatggatttgga

SEQ ID NO: 130187 - DNA, 1527 bp, Cannabis sativa
  modified_base (300)..(312): a, c, t, g, unknown or other
agagaacaaacacgatcaccttcagctttcaaatattgattgtagtatgatcactgtgaatacaaagaagaacaattcaacccagaagtggtgagaacatcacaaatctgacatggaataaaacaataagagaattacgtgcctacagaatgcgagatgtgagagacatcttatccggagataataccaataaaagcagaccctaaaatatcataacatgttagaatttggagaataagatgaatggggttccatctcaaaatcaattggctatagaaggagtagctcattcatcttatnnnnnnnnnnnnntttccacacattagcaatgtggaactaactcttaatataacacggagagttcttttttttttctcctcactttttgttttgagaaaagaaaaccaattatttctccctgaagcttactaactcttaattcaattcaacatttttttaggggtgaaaacattttccaccgaaacagacacatacccagttcaaaaattagcataaagcttcaaaatcataacaaaccaattacatttaccgaatgaaacatataagaatgagaccgagaaaaatatacatagcagagtgtaactaactaccctatatgcctgaccttttcaacaagcaagagagagaaggtgagttgctgagtggtggtcgttattagagagaggaagagctgaagttggagctgtgcgtgcgtgagaacggccgtgaagggaagcaacagggttgggaaaatagtatacaaataataaaaaatcaataataaaataacaagagtacaacataaaaatacaccaaaaaactgtattttatgtaaataaaatttaaaaaaccgtaaaaatattaaaaattccgaacaaatcgtatttttgtaatttttttattagttttgtattttttgaaattattccaagtagaaattactttataaaattttgagaaattttcatatacatgggaaaataacattaaatttaattttttatggcaaaaaaaaaaaattcaaaaacttatgcgatttaaaagtgtacaagtatttaaatatgggaaaaccaaaactgtataaagaaacaaatcccttaaaaattttcattttagttaaagaaaaaacaaaacgattctctctctaatactctctattctctgattctctctcttcaatctatctcctctctgaatcaccatcgcgatttttctctctataaatcgcaataccattgagcgattgactacaacaattaaataaaaaaaaccaaccaaatcatctttttatcaccatcactgattatcttctctagctctagtaattcgtcaaatcattctgattatcctcttagttactagaacttgcaaaacaaaacatatgtaacagcttagacaacaatctagatctatcaaaccaaaaaataaaaagaaaaacacaaatcaaaatgaaaatacaacaacaagcatggacgataattctcacaaatcatcaaattaggtgttggatttattttaccaggatct

SEQ ID NO: 130188 - DNA, 648 bp, Cannabis sativa
tgcctcgaccggtggctagatcacaaccagcgccaccaccaagagtctcatcgaaagtcgtgcccgctttgtcgtgcgtcgttcctgactcaagaatagtagcagagattgaccatgggcaccgcacctcagcccagctgggccgtcgaacgcctcctctacctctttggggattatttactgttgctcttctttctcccctttgtcttctttattttgtaccaaaacctccatagccaccatgttctaaagctcttcttgcttagatatgaaattttttgagcaacataggtttctagcgagaggtctaaaaatgcctcgtcgtcgaagtctcaccctacaatggctccaatctgggtatcttcaaattccgaccagtcaatctctaattttgaattttgaatcaatggtggtggaaggcggagaatgagagaagatgctgaagaaagagcttgcaaaaaataaaaaacaaaggtggcagttaatcatatcaaaatgggcagtgaggttgttccttagcctctccatcaatggagtttccatagtcatggacaggtctatccacgaagaagaagaaaaataaggagagagaaagtaaataaaatagaaaaagaaaataaaaaatgttaatgtctttttttttttttt

SEQ ID NO: 130189 - DNA, 1042 bp, Cannabis sativa
ttagttggttgaggtggatgacataagtctaaggttatgggttcaaatcccataacacttttctttttcgtcttgggcccatatatttttaaggccgaccctgattggcatcataatacttctattttccctcatcatctcttcgacgtgatactacatataaatagggggcggagggtgacatgatccctacatagtttttatataatttttttaaaattatatgtaaaagaataaaaaataaaaatttatatttttatggccacgttaaattttgatttgactctacctttggctaccaacgatgacacatgagcatggtatgattttagtgtatatatttatcagaaatattataaggcacaagtagtgtctaatactttcctcaatgttatattattattggtacaatttagtatagggtcccatataatttaatataataaattttaaaaaatgttgctaaccaatcacaaaaaaatacgactagaaagtactagacactgatacttaataacaatcttttatttttattactaattgcaaaatatttatattctagaaacggatgaagtgttgacttgaggtcttaaggtaaattacaccgacaaaatgtatgattacaaaagaaagacacatcaattgtcaattgatgatgtgattaccaaacaaaaaaaaatatttttagtaataatttttcaattacaacataaattttttgtgattaaatataattttaagttataataaaaaattatttgtgactacaatataatatttagataaaaattgtcactaatttaattttagtcataataaatattttttaacacatttaaattttattgtgataacttgtatctaactattatattttagttgcaagtaattttttattgtgactaaaagtcacatttaataacaaaaaaaatatgttaatactaaaaaattatcactaaaaataaaaataaaaataataataattaatatataaaacatgagaaataattaaaattaaataattaataaatataaattaaaa

SEQ ID NO: 130190 - DNA, 991 bp, Cannabis sativa
tgggcttgggaacccacgggcccgtcaattccttgagaactatgttgttcaaaagaaacccaatttcatttttttaagtgaaactttgtgcaaaaatgatgttattgaaagacttcgaattcgcttgggctttgagggagcctactgtgtggaggttcaaggtcataaaggtgggcttgctcttttgtggaaattcattgatggggttcgacttctcggatactctcatagccatatcgatattgaagtttctatgcccaactcccctgtttggcgtttaactggtttatacggagagcctaatcgcagcctacgattcaagacctggcagctcatctccaccctctccaccgaatctctgcttccatggtgtatcataggtgacataaataatattagcaatcaaagtgagaaaaaaggagggagaccgtacccttcttccttgatcgaaggcttccaggaggtactctgtaattgcaatctcactgatatggaactccatggtcatccctatacctgggaacgtggaaaaggcaccagtaactgggttgaaattcgtttggacaaggctcttgtttcttctctctggctaaactcttttccttctgcaattctctcaaatggcgacttctcttcgtctgatcacacgcccctgtttctcgatatttctcctgaagctcccactgttttggctcaccaatttcgattcgagaatgcatggtctagagaacctctctgtgctcaaattgtccaagcttgctgggacaacaatgcccatctgtctcttcttgataaaatatctctctgcagcaagcaacttgatgattgggggaggagtttaacttgcaattttaagaaacgaattcgacaaagcaaagctatccttgcttctcttaaaggtaattctgacccttcttcaattgctaatttcggttatgagcaaaataactactttgagattctagcccaacaagagttatattggaagcaa

SEQ ID NO: 130191 - DNA, 583 bp, Cannabis sativa
  modified_base (47)..(59): a, c, t, g, unknown or other
atatagttttatataaaaatattatataaaatacaattcaatataannnnnnnnnnnnngacctaatacggcgttccaaacaaaccctttatgaattatatttttattactcgatgaatttagcactatacaaagtaattatagagtagttagttagatatgaaaaatttatcataagcaattaactgaaaactagctagcactaactaactttctaactaacactaactgacattcaaaactaactttctaactaaaactaactaactccaacacagatgaaaaattaaagtaaacaaagactttgttaaactagaacaatagattcttaaatcactattttagtttttaggccctcgcaagctacttgtaacttctatctatatttaacttttaaaaactaaaataatagaatcttccattagtattttcaatttttaagaaaaagtttttatcgataggcacatagcataaaaaggtcaaaaagtcataattaactaaaacaataaaaaaatattgggtccatataatttaatataggaataattacataaggcacaattttttgtaaaatatttacatt

SEQ ID NO: 130192 - DNA, 1932 bp, Cannabis sativa
  modified_base (49)..(65): a, c, t, g, unknown or other
ttacataaaaatattgcataaaatacaatttaatataatacaatacaannnnnnnnnnnnnnnnncggcgttccaaacgagcccattaagtattaactactggtatacatataccatatatatgtatatatataattgttcttttagctggattaatattattataattattttcttggttcttttattgtaattaaaagtctaaatttttaaggacaatgtgcctcaggttttattattttattattattattatttttctaataagtaaggttatgtagttaagtcacctccttaactctttaaatatacatatctcatcacaattatagacttgtgataatcagataaaaaaactgcttttgatttagagattttaagagaaagacttagttaatagtactattgcacaatttaattaaaataattactataaattaattaggtagatatacttacttattatctaattattattgtattttaataaattgtatataaattttgtatggtgattttatttgattttctaacaatgagcagattacttggggagcccaggtgagcatcgagctccctaggtggcaccacaactagagtttgagttaggaggtttacatgtaagagtaaaaataacagccctgcctgtaagtttcctatcttactaattagatatggtttaaggagaaaaaaaaaagagttgttctgtttttttttttttttaatgaattgatttatttatttatttattaatggcaagtggatcacttacctatatatacttgcaatacaattttggtacaagtcacaattaacaacttcagcttttactagtggaaaatattgaattaaccaaaactctattgtggaagtatgatagtgataatattaaacataaaatatataattgaaagtgaaatgactgagcgttgtttccccggcatttcagacctttactaaatacgtccattatacgcaatttattattttatttttataaacacaaaattattagcaatgagattaataattaatctagctatattaaattaactaataataaactttttcaaggacatgtgcatagaccttaactagatattcctcttcacatacaaaacacacaaatgcagatgtttaagaaaataataagttaatatcatttgagtgggacgtccaataatatcatataataatgcattatcataaaaaccacacgtagatgagatgcgagatggtttaaaatgaaacttttatataatttttggtggaccaaggaatcagaatcgtatcttcaactcaatcaatattccattatctatacaatccatatatgaattatattataatatttgagtttaaacattatcatactctgcttatagccatcattcccagttgagctgccatctcacactttccccaacattatattaatatgggaatcatcttttcatgtgattctagtctgcacatcacttttttatctttttttttcttcttaatatatacctttttttaatgtttgatgaaacataatgatcacttagtttgggcacatatcaattatggtcctccttttctccctattatatataattaaaaaatataaaagcagtttgtattagtatattggtttaatataataattatctcatagtttaagctcatatccattattggtcctcttttttttatctaattttaaattacttgtgaattattatatgttgttctggattttcaatgagattttatctgtaatatcttatgtgtatcaagatacgcaactactttaataaggattgtttgtaataggctggattttttttccacacaaactatgaaatttatatatgtactgaataattaagggatccaacaaaaaggttttataacacttaattaacgggtaaattgcggcataaatac

SEQ ID NO: 130193 - DNA, 825 bp, Cannabis sativa
  modified_base (29)..(37): a, c, t, g, unknown or other
tttagagtgttaataaacatacttgtgannnnnnnnnagatcctggtaaaataaattccaacatatatatctctttgtctctctcttaacttaacataaaaccctaatctactcttataacagccgctccctccctctctattttttgcgatgcagccgctctctccctctctattttttcaagctgcgattcaggcaggcgacctgaacacaggcgaacctatcactccttagacgaacccgtctctccttaggcgaacccgtgcaatggcagggtcaaatggcttccgacgatctctcttttcaatcggttttttttttgtttctctctctttaaatgtgaaaattgtttgaatctatcctggatctaggtgtttgaatctcgtcggtggatcttcagagttacgttcgacgtttcgagatggttgtcgacgacgatttgttgtttgtggttcacaaatctgtgaagtatgatctgaggtcgacggtgcctattgaaatggagtaagagattaccagaaggataacgaagacgaaggctatagcggcatttctgtacattttcagtgatctgatggggatgttagtctctctgtgctgagtagtacggactatgttgccattgattttgttaacctaataataatcttgtttgggctctctttctcttaccttttttctttccttgcctattgggctacgtggtgtactgaaattaagcttctcttttctcaatttttatttattttagtttatactattgtatgttattatgtgattattttgtaatttttggtgattattttgtaatttttagtaaattta

SEQ ID NO: 130194 - DNA, 648 bp, Cannabis sativa
tggaggcttgaagcggggacgttacaaaacctatataataaatatcgttgtctattgtttcttattctaatttgtgcacacatgtggcaagcatcaaatctgttgaccccgctatcggttgatcacttttcagtgtcaacatatttattaattatttaattttttttattaattctcatacttttatatatatatatatagattaattttactttttaatcacagtgcatttattttctatttttgtaaagtttcttttttagaataatttttaatttattgttttatgcaaattttattcttcattgaaaaaattattcttctaatttaatatattagtaattttgtgcttcttactatattttttatttatatatatatatattatttattttatttattttaatattatcatttagtatttcttatatagtcatttattttttttttaggaaaaattagtatatatatttaatgtgtatgtatatatttaaggaataattaatatttttatgttatatttttttttatttaaactaaaagtttgttagagtttatgttatatttgtcttatagctttaaatatttactaattatcttatttattatatattgttataaatattattaattatgtggatgtccaaa

SEQ ID NO: 130195 - DNA, 880 bp, Cannabis sativa
ggacatctgtctagctcccccattacccaagaaattcaagctcaagtggtaaataatccaacaacaataattagcaaggtaatgggaaaaagggaaagttcactggcaagaccgaacaagctccccgggagaatacttcccagtatatcgcacttaccgtcctgacgaaaaatatagaaagtgttcatatggccactcattcattagccccgtacaagaagcccccacccatgagaaaagatgtcagcaaaagagatatgaccaagttttctcgttttcacgggcattacgaccatgacactaattaatgcaacaatctgaagtgggagatcaaattccttataaaaaaaaataatctgcacgtgtagaagtatggcaaggccgatcagaataagaggggcgataacaagcaagactttctaccaccacaagtagatggacatctgtaagtcattattggaggtccgcacatagctggagatttaggcaaagcgcgggagaagtatgcacgagcaagaagaagtattcttggtcgtagaagaaaggaagtcgaagatcccatggtaaggggagcccacaataacatttaatgaggaagatgctgttaagatcagattttcgcaaaatggaaggattcattatacttggcaaaataacatccagattttttgagacatgtttgtacgaaatgaaagcaaaatagtttgaaaaaaacatgagaaaaatgaaagcataataatcaggaaagttaaaggcaagatggagtatcttgcacatcgaaaggagcatctgcccgagcaagacctaatgggtcgtcgtcatccaacgagtctccttgctcctccaggtcggctttcccctttcctactacaagagtgga

SEQ ID NO: 130196 - DNA, 997 bp, Cannabis sativa
agaaaacatgaaaaacgggagttctaaacatcaccaaaatggtaagccatttttggggtttcttggcagggaaaatggtataccgtttttccaaaaatagtctactgttttttataagaaacatgaaatcccgagtttcaacttctccaaaccccaccaaaagctaatcaatcgattctaaacttcccagaacaatcatacaacaatctctacatggcagtaatcaaaatatgccctaaatcaaaacttgccatgagagctccagctttgagcttaaaaattcaaacttgactctcacctcaaagcagcagcaaaactatcaaatgaacatcaaaaccaatcccaaaacaccccaaaaacaaaaccataagcttacttgtaccccaaccactacaaaaccaaaactcaactttcaaaacctaagcttttcaaataaaagagaaccaaactcttacctcaagctccctcttcaaggtagcttactcctagctgctactaaggcttgggaaactaatttagaacataagaaattgaaataaaaaaaagtttatgttggtggtttggcttgctcgagaggagagaaggagaagaagtgatgagggtttttatttttctttaattaacttttttattaggggtgttcttagtgcgggtaatgcaaattgtagccattattttaaaccaaaccgcatatgtgatttttataatttctcaaactgcaaccgcgagatcttaaaaccataaaattcacaccacaaaaatacattgtggtgcggtgcagtttgagcagtttacattatcatcataatcatatgaaaatttaaaaatcaaactaataaagctttaacaatacaaaaccaaaaaattcttattagagttttaacatcataacatgtacaacaatcataaagtcattatattaaattgcctctaaataataaagtaatatacacatatattatatatatttattcttatatgaaaaaagaataaaaat

SEQ ID NO: 130197 - DNA, 1062 bp, Cannabis sativa
aatcacaacaaaatttaaccactttttatttctctcctattggaaaacaaaaaccaaaatcaatatacactataacaaaatctgatttgttaaaaaccacaaaacattaatactaaattcatatagcagatattaaagacccaaaaaaaatatattgcagcaatagtcaaaaaagagtttctattattttggagcaacaaatgtgtattgcatactcatccatatatctatttcagatcacaataatttattacatatcagcagtaattaacaaagtgaatgaataaatgaggcagttgttaaattcttaatcttctttagttctcaccatcataagaagacgaaagcaacaaccttgaccgacatatatatatacaaaaatatatttgggggtgggggtagaaaatcgtgaaatgaacttaggtatcaaatttgatgcaaaaaaaaaaaaggaaaaatgaacagaagacaataagagaattccctattgtacgtacagaagttagttactataaaaatatatgaaacattttcttgctccatctccacagtttttctaagcaaacaaacaccaaaatatcaaagaaggctaacgactaaaacgaaattacctgaaagtatgctgcaaatgcatggagtaaaaataagtcactaagatataatgtccaacagtttatgggcgcacaaattctgtccaccattttttttaatttaagcgtttatatattacaatgcataatttggacactcgaatctagaacttccaaagcatcttctattacaaacaatctgattatctaattttgaccggctaatattacagatcacttcttaccctcagcattacagattcatagttggagctctacaatacttgactatcaccagacttgaaatctcatacattgtgaacaaagtatgtcaattcatgtcaaatcctcttcacacacattggaatgatgttaagaggatcttgagatatctcagtagcactatttctcatgacctgtctctacaaagacctactgagcttgatgtcactgccttctgtgatgcagattg

SEQ ID NO: 130198 - DNA, 788 bp, Cannabis sativa
aaaataatttccaacacttccttcctggaagacacaataggtgtgtctgtaacctccttacaggaaaacacaattggtgtttctgtatctttgaccctagacaaataatggttcactcttagctttgaatccactctaacaacccacgaaagtaggggttcaacttcagatatttacctattcttaaagaataattaataggttattttcttatatatttaatgtgtaaaaaagagttgatagctcctcattttaagtgatataaatcgactttggcttagaacttctgtaagctctctcctatataaagagcactaggttaaaccaaaaagttctaagttctcactcttaagttcttgagttcaagcactcaaaccatatcatttctctcctatacgccacgtacagtgtgtgagagactagtcttccttatctcacttacttgagatctactctacattctccctattgtaatttagagaaagccactctagaacttgtaacacttgtgatttgagttgtatagtctctcatatcaatacaactaaaatgggagtatgtcattacccgttaaacaagggggccaaacctctacaaaattattgtatctattttgtttgcttcttctaattgtttacacgtggtattttgatcgtgaataagactctgctcttagttgaccaaatctatggtgtaaagaccgcttagttaaatttggaaattagtagttaattaagatttaattatgaaagttatttatagatatttaaataattatttatgttgct

SEQ ID NO: 130199 - DNA, 1630 bp, Cannabis sativa
acaattcaaaagctatgctctcaagcaaattccaagagaagaaaacacaactgttgatgcactagcccaactcacgagcagcaacataaatgataaagctagtctaatccccatccaattccttgaaaaacctagtatcactggcacggaggagattgaaatgattgacacatcatcaaattggatgacgccaatagcagcctacctcaacactggggaactcccagataataggaatgaagctcgaaaaattagaagaaaggatgtattgtacatcatcatagatggagtcatgtatagaaggggattctccatgccactactcaattgtgttacacaagaagaagctgtacgacttttgtctgaggtacatgatagattctgtggcaaccacacagctgggaaaagtttattcaagaaaattttaaggcaaggttatttatggctgaccatgattgaagactccaaggcgtatgttaagaaatgtgataagttccagagattttcaaagatacctcgtgcaccgcccaacaaactaactcaaatgcaaagtccttggccttttgccgtttgaggagtcgatctgatcggataattgcccaagggtaaaggtggagtacagtacacaatggttgcagttgattacttcactaaatggacagaagccaagtcgctgacaaccatcacatccaagaaagtgcaagacttctttgtgaaaaatataatatatcggttcggactaccgtacaagagagtctcgaacaattgcaaacaatttgacagtcagtccttcactaatttttgtgtgaaccatgggatcataaaaagtttctccgcagtggcacatccccaagaaaatggtcaagtcgaagcagtcaacaagacactcaaagatactctaaagaaacagcttgaagatgctaaaggaaattggccggaagaactccttaaagtattatggtcgtaccgcacaaccgagaaaacagcaatcagacagactccatttgccatggcatatggttatgaagctatgctgcccgtagagcttgaaccttcgtcccacagaagattgacatataaccaagaagttaatcatgcactcctcgcagaatcacttgatgaaatcgaagtaaagcgaaccacaacaaatctaaaattggtagcccataaacaaaaggtagctcggtactttaacaagcaagtgaaagcacagaaattctttgtgggagatatggtcctcagaagggtatttttggacaccaaagacagcacgacaggtgtgttcagaccaaacagggaaggaccatatcaggtgattgaagttttggaattaggagcatacaagctgggtaagtatgacaaaaaaaatgcaactcattctagtaccaaggtattacaacggggaacacttaagaaaatactaccagtaacagtaccaggtcagatgaccatgttaagtacgaaacaaaaagaacatttattcttaagtgaatggccttctgggcggatcacgcccaaaggttaagatgaaatgacgaagtactcaggtcgggtgaccacttatgaaagtacaatttttattttttgcaacttgttttgtttatgttaagctaaagatcagactagatca

SEQ ID NO: 130200 - DNA, 717 bp, Cannabis sativa
gattcaacagtagtataactataagttgtaagtatgcaaatcataagaatcattttggtaccaacaaatttgccaagccacttagattagtttgtagcttttgactgtaattggtcaacatgaccctgttgaaggttagtttttttggttgcttgttagatcctttaattgaatatagtgactaaaatatgtacttgctttattatagtctcttaagccacccatgccaagttatgatttctccatatcaaagatcaaactgcccttgtttttatatgttattattacctgataattaactgtttgtttattgaggaagaaattgtgagatggcctagatttgtagtaaggaatcttcttctgcctttgaaagaaatgaagaaccatatcgactagtttattaattcccagtgctgaattgctgacatataggtcttaattatgaattagaaaaaagttaagcaaagtgtctgttataatataaaatgatataaggaaattattgtttcttgaattcttattatttcttctttcccatacttgtttcttgctctagcatggtcatttgtctggtattctctattgattgaaagaaataggttatttagcatttttttttatcttcccaactatgacatatattattgtataatttaaatttaaaataatttaaaaccagttctaataatttcagctggggcgaataccccacacgat

SEQ ID NO: 130201 - DNA, 545 bp, Cannabis sativa
gaagctagcattgtagttcaagactttgctagggctgagttatatagtcggggtaggactagctttattgttttgttttcaggtgtatgctttcttatagccattttaacaccttgttttatttctttttgaagcatccaggccaatggaagatcttttggcaactcttgctgagacctacagcccgaacctttctcttcctccggcgcctgcccgagtggtgaccccggggaggtcatcttccagtgcccccctaggcacaattgtcttgatcgatgaggaaggggaggaggaggaggaggaggaaggtgagattgtggctcctctcgactggaagcgcaaaggtaagattgttgaggcctagtcttccaaaaagcctagaagaaaagacaccccgaccgttagctcagattcagggattcttcctgaggcagaggagtatgtcgtaccccctcgtattgcccttactctggtccccgcagataaggagaggcaacaactctgaattgccaaacataactatgctatggatgagtactcccggg

SEQ ID NO: 130202 - DNA, 594 bp, Cannabis sativa
caaatgcctttttaaatggaactttacatgagacagtttatatgactcagcctcaaggctttgaggatcccaccaaacccacacatgtgtgtaaacttcataaagccttgtatggcttgaagcaggcccctcgcgcttggaacgataaactcaagtctacactatttggttggggatttgttgcctcaaaagctgatacgtcactgtttgtctatggcacgggtcctgatctggtaattctcttagtatatgtagacgatatacttgttacaggtcctaatgctgctcttattcagaaacttattcgtgatctaaactctgccttttcacttaaagatctaggtcaggtgcattattttcttggtgtcgaacttcatagaaccaatgagggtctttatttgtctcagaccaagtatataacagaccttctcactcgtgtcaatatggaaggagctaaaagttgtgctaatcctacctctactgcacacaaattgtcacttgctgaaggtgttccttttgaagatgtcaccctatatcgcagcaccttgggtgctctgcagtacttaaccctcactcggcctgatgtggcctaca

SEQ ID NO: 130203 - DNA, 719 bp, Cannabis sativa
tattacttcaagattgaatgcctatagggaaattagtcgtttatggaataggtatggattctattactgtagatagaatggtagacatgtttggttattaaaagagcaagtttccttggagggagaattattcttattagtttgattttgttatcaatcaattcttactgggctcaaatttgtcaagccttcctttggaaaggggcaaaaatgagtaatgatcctggttgtgtctcttggagtgatacttgtaagttcaagatagaaggagggttgggctttatagatattgctttatggaacatgtgtactattggaaaacatgtatgggttatttcttgaaaaaaggacaatatttgggttaaatgggtgaatgaggtctatataaagtatcaagactggtgggattatcaagtcccaccttgatgcaagttggtattagaaaagtgttgttcaaacaaaagataagattaaagaagtgtattctcagatagctattttcagcttttgagtctggaaaggtggaagtatgaggtgatttgaaaaagaatttacgtgactgaaggggttgttagtagcatagttacttacctagcacaatagtattgagtgctcaagctataaggttgaatgaacatgctccaacagtttctactattgtgtcttctgagcggtagataaaactgaaaataagtgtttttaagattaattgtgatgct

SEQ ID NO: 130204 - DNA, 724 bp, Cannabis sativa
  modified_base (27)..(30): a, c, t, g, unknown or other
gttaaaccaagaaatgccgttagatannnncttttaatatataaagatatggttaattatgtttctgacttatttgtctttacaatttatataatactaaagtataaattaaatagaatatttattttaaattcaaaaactctttattttcatattaaattacgctacattattttactattatctatattttttaatctttataggtacccaatatagtctctatacttaatggatattcccctacctcaaacccgttgggaattaagcggggtgagggcggggatgggagaataaatggggagcgggaatggggttggagttggagggtgcattccccgcttaatcattacccacccaattttcatccctatacatactagtaatagttcgtaaaaatatttaaaaatccataatttttgtaatttgtttttgccaagtctaaaataatccctgaattacatgacattaaataattatttttttttgcctaaccaaaaaaataataataaatcttttgtgtgatattgaaaaatgttaatattaaattcaaaaaaaatttacacaaagtactacttttggtaaaaaaaaaaattaggaaaattctataatgcactctcttaaaagaaatacacaaatacatttttatctgttttagtattcgaaataattttatagtcaaattttttcttatgatcatgtaaattatacttatttaagaaat

SEQ ID NO: 130205 - DNA, 1980 bp, Cannabis sativa
agcattgttcttaaatattttataataatgagacaaggatatactattaaaagatttctaaatatgagaaatatcattaagtaatatattaaattctatgaaatggttatcttttctttactatttacagtaagaaccaaccacaagcaatttataaaactatttaaaaaaattatgtattttgtcatctttttgcattttttaattaattataaaaaagttccttaatatttactattaaaaaaaatgagcttttcttcaaaaaaatatatatattaaaaaaaaaaaaaaaagaactcaacaatactacaaaattgtttgtgaacctataaatgattaagaagatttcacttcttaaattattttacttttaaaaacaattttttttataaaaattagctactgttttcattacttcaaaatctaatttacaatctaaaagcatcctcaactagaaggcctcactataaaagcaactttttaattatctacaatattaataacatactaattgtttacttttttatcaaaaaaaataaattatataatattttttatgatttatttgaattatttaattttaaaagtaactacgacaattttactgttaaattatatttgtagggcatgcgtgtttagatttgatactatgcttgagagtcttaattagggcaacagaacaggtcggtttgactaggttcgaaatgtaaaaattacatatcgaacctgcttgttatagctaagaatttaaaaggtttcgatcaagattgtgggtgatgtgtcattgtgaagatgtatatatatggatataaccacgattagaggactatgatcaattaagagtataatatatacttgtaataaccactataaattcagcatttgttctctcatctttcaattctttgtgattcataataaacaacattttcttagtttttaattcacaaaattcaaagtcaacatggtataaatccttaatttatgatcaagaacatcttgttgataataaataaataatttttataccatatacgtagtagttttgctctttatggtattcttaatgcatacgctaaaaataataacttatttatattaattgttatcttaaatatacaactagttgtatgtatataaatatatattaattgcttatctcatatcttcattaattaatccaagatgaactatgaaaattaaataccaatttaatattaattcatgtttatatatatagcttatatatatatataataagattatttattaattacgacattcgacaattaaaaaacagactactagtacaaaattgacacaacaaagtcaaatgcaaattatttacatatatatatatacacacacaaataataactacatgatcgatccatataataacatataatacaacaatttaaaggacaatcgtttatagattgttgggatcgaatcatttacttaattataatattttgtatatttaatttttttttaacaagtatatttaattatttagataagagactaatagtgatgaaaaatgaaaattataagtagaggaaaagggaaaagggaatgttggaatttagtaaaattttacgaaatctttagattaaaaatgaaatgtgtgagcgtattgagtctcaactggagtaaaagaaaacttttattagctaggggcatgtttgtttttattttcacatattttttctttttattctcaaaaaaatttgtatatttttcaataaaaatttattttaaataacactccaaaaaaaggtcctactaagattatataccacaataaaaatacaatttgttctgatgtactatttaattttgtaatgaccgcatgttaaagtatgaattagtaaaacaattagcattaattattgacatttttataagtatgcatgagtttattatattgtgggtcctattattagaaattggcactagagttataatttttcaatt

SEQ ID NO: 130206 - DNA, 1040 bp, Cannabis sativa
aaggtggtttctagtcactagtcactaccgtgatgcacatgcttttctttccatctctactttcacatcacagtttggcttaatccactgttgaagaagaggttgccatccatcaaccaggagcggaggaagagtagggaaaagagaggttctataatatgtgaatcaattcaatacaatatttcacattaaactcattcatttaattttttttaaaaaatttgatattcatgctctatatttaaagaatactactcagtgctttgaacatattttattaattattttgagttttaataattatttttgtatggaaatatttacatatttgaaatgaatggaatatataaaaaattttaaaaatgtagaattttagtgatgtattttaaataagttgatgtatgatataatgtaaaaatgtgttgtaaattaaaaaaaaaaagtaaaattttaataatatattttaaataaactgatgaaccatgtaatataaaaatgtaatataaattaaaaataaaaataaaattgtaataatatattttaaagatataataaagaagaagaaggggttgaaagtgctctaacgacctgaaagtaaaagttgatcatgtcaaaaaggtctctcaacggctcagatgtaatttcatatatgatatcagaaaatatttgtatatagatagaataatgaataatgacatggacaccccaaagtgatatgctgacatggtccagatatagggatggaattggatcaatcatgggttctattttatttttaataataagtattaattataatattttattataattttttaattaatttttgttttaaaaattacttttttttaggttttttatagtatttattatagctataatattattcttattaatttttaaaaaataataaataatttatcaaaaaaatttaaatttatttttaatactataaactattcgaaaattttaaaaaaaaaattatagaaataatgttataactatatcgaacactgtcataaaaaattaaaaaaaaaaaa

SEQ ID NO: 130207 - DNA, 1419 bp, Cannabis sativa
  modified_base (365)..(376): a, c, t, g, unknown or other
  modified_base (1005)..(1016): a, c, t, g, unknown or other
gaacctagacccggacccagacccggacatgcaccagaccttggacctgaaccctgaccccggacgcggcaggcccagaccagaccccagacctgtaccccaatgcccgacccaagacctagacccggacctggaccctagacaccagatcctaactccgaacctgacttgaacccagatctatagcacggggttaggtctgaggtccttagccgtgttcaggtttgaggtctgagtctgggtccagggtttggggtctgtgtcgagatctaggtcagggtccaagatccgagtctgattttgagtctgggttcgagttggggtacgagtccgagtctaggtctgttggaacttattttaccagnnnnnnnnnnnnctaacatgtatgttgattataattctatggtctaacatcctaaatatgaatttcctaaaacaatgaaataaacacataagagattaataaatccttacattgatggcagtgaaatataatgactcattccattcaaatctcaagctcttgattcctatctgtagcataacactatcaagatttgagatcttctctccttcaatttgattagatacagtcttcctcattttgctaggtattactttaacatgtgtgggcatactctcaaaacactataagctttgaattattcagtagagaagaagaagaatttcaataatagtagctttctttattttctaattttctgacaaaaggagagtactggtcatcatctgaaaacaagagctatacttttctatttatagggtaccttttagggttagatttagaataaaaatagaattaaaaaaagataaaaataatggccttattaaactcgttggtcgaaccctagtgtgcctgggttatctttcttttcacaaacaccatattttaattctaactctataaatgtcaaatctatctatttaataattataattagttatcaaataaaattatcattaacttatttattaattagaccnnnnnnnnnnnnttaattaataaacaaaccctaaaaatctattttcttctaaaataagcccttgcttagcaaaaatttacaaccaagacatagtcttatttagaattttaattgattaattaaaatgaattaattgagactacaaaatataatattatcccaattagtgcggggactatgatcctatgtaaccaagcttccaattagtagatctgcaatttaccaagtaaattctttaacttattagttcctcctgactccactatagattcagaattacaattctgattacatagaatgctctatatactaaaaaatagatgcactttaaattacccattatttcaatccaaataatcaaagatcctccatagataatcactactacaaaaatagtttttctcgacgtttttaa

SEQ ID NO: 130208 - DNA, 1415 bp, Cannabis sativa
aataaaattaaaataataaccgcgtgaagagcggttatattggctagtttctcataaactaaaaattatatagccacattttatatagaatagatattgtacatatattaaagcattacacaatttaaattatctaaatacttttaaagtactttatactttatgtagttaagattaaattcacatctatatattataatttgtgggtactcgtttatatatatatacatcgattgatgaattacgtccacagctttttcaaggagcaattaatcggtttatccatacacatggaagagctaaagacagtgagtgataaattagaggtttccaatgctccaaaatcttaatgatcatctttatcttgataaatcactgtcaaatatatcaaattaaataagctttatacatttatataataagtaaaacatgttgatatatatatatatatatatatattcagatataaattagtattagtaaaaaaaatggttgattatgtaattaagattcaatgattacattacttgacttatgaaaattaaagaagcaaatacatcgatcgaaagaaacggaacaaaagccaataatctagtatgaaaagagcttagaattaatctcatgttggactaattcttaataagccattttcaacatttattatggtatggttacaaaaacagttggaataatggagctactgtagtagtactattgctagtacaattaatatataaatgtaagagagtactagctgatgtagagatgaagtttgacagcgagaaagaagatgcaaacgagagcgaagtaaagaagagaatgaatgagaatggaagcaccactggtctggaagttgccgaactccacacacccatggcgccctggaacttggaatagcagtcctggggttaacagcacgaacagcaccactgccacgaacactgggccccagtctgacataattaattattatatatatagtgaagttgtgaaggaattaatagagaactatatatatagaatgatgagtagtacttaatttggttggtggggatgtttaagttttggtgtatatataggggagtttacatgaatgtatatatgtatataattgaaatacagaggagactttgatgtgaagaaaggaagatatatagagaatgagtatgagtcttagtattagtatcagtctgagtattagtggggcggaaacttgtggagaccaattaacttcgattcactccctccttattgcaattaatattcctaagccctcgatccccacaatataccatttataaaatagagaaatgctaaaggccactagtgttgcctagtactctcttatatacgtgttaatatcgctattggttcaattaagtatcgggtcccacatagtttaatataatagtttt

SEQ ID NO: 130209 - DNA, 896 bp, Cannabis sativa
agtcccacttgttgggtttggccgttagggggggcttttgtcttgggagtcgtagatgggaaagggaggcatggtttcgggtggagtaacacaaacgacactagcaggattggtagtcatgaacgtggacaccggaggattggcaaagttaagctgttcaggacacaacatagcattagtagtaactttaactttgtcggatatggttttgatatcataccttagctcgggtgggaaaggggcttcgtcacaagctttcatgtagtccacacatcccttgttatagctatgtcccgtgcgaccacaaaagaaacagatgtcgggaagattctcatactttagttcgagccaaacaaccttatttctacctgagaagtggacgggtattccacaagggaacagatgtgcaacatcgaacatgacccttatgcaaaagtagggtccccatgtctcacgaaaagatggctggtagatttccaataggtggctgagagaagaggagactagctcagccagttgttccgtgcgtttgaggaaaggggtgttgaaaacttgaacccaaagtggaattttaagcaaactgtccccatttaggacatccaccgaatttgggatatccattagaatggcttggttgagataagtccaaggttgctgcagcaaaacacggtgcctatctccatcacaaccaaactcaacaaggaaaagaccattggaacggtctgtaataaaaacaggggaccgggatatatgattccagttcttagtcattttgtctatgaagtttttacgattaaaagacttaaccgtatgaaccttggctaccaggaaaatttgagctggggtgatctctgtaactgtgttgtttgttgggatgggctcatgaagggtctgga

SEQ ID NO: 130210 - DNA, 851 bp, Cannabis sativa
tatagtgaacattataatgtaggtagtattttattctagtttatttatttattttaattaaaacaatgataattaagtattaactaaaagagttaatgctattttgaatttgtattttttaaaaaattatcgagtggatttttttaatttctattttgttaaatgataaaacgaactatatttttcataatagtacaaataggacctttactcaaatttcaattatttcttttaatacaatcaacttaaagataattattagcataaatatatgcaaaaaaatgtaaccaattttattatgacacctctaaattaggttattattaaattttatttgacaaaaaattagttcaagatactatttagaaaaatacagccggctaatttatcatttaacaaaacaaaaaatccaaaatattttgtataaaatataaaattcaaaataatatatacactcaactttttattataactactttacttaatatttttttaatagacatactagaagttatgtatagaagctatatgttataaattatttataatgatgtaaatattgtgtgggaagaaattcatgtgaaaaaaaaggagagatatatagagagtaaatatatttaggaatactaataattaaattcgtcttttttttttttatttaagcgtttatatattacaaccacgtataatttgggactcgaacccaggatctccaacacacatgcacattcctatggccacttgttaagtaatggatccttttcgagacaagaaaagataaattttcaaattttacttttgaagacaatgtcaatctctaattgaactaatttttttattttattttatat

SEQ ID NO: 130211 - DNA, 673 bp, Cannabis sativa
taccctaaataattaggggccagtcatataataggcgctatagccttgtaaggcgccaaagccataaaaatggcgcaaatatagaacaaaccaatattgacaaaaatacaagattaaaaatggtaattaagaacatattaacactaaaattatcacaaattaagtaaagtataagaagtagttatttgtgcataaccccataatacaaaaaccgcaatattatctaagccatatataatatgtgatttttttttttttactaaagagtcaaattgtcatattttaaaaaaaaaaaaaaaactttatgaaataatgcattcttagcatgtcatgttactttgtttatactttgttttgtaactaattaggcatagtttattattcgcttaaatatatttttttttcttaatactgagattttgataaattaataaaaaaaaattataatttattaattaagattagatttaataataaaaaaaatatttttactcgaccatcatatataaaaaaaattaattttgtaataaataaaagtaaagattaatagagttatttatactatatagtacatcataaaaaaaagaaatatttgcaccaacaactattattattaaattatttaagaatttacccttacctattttaatactcacaatttaggcatttcttt

SEQ ID NO: 130212 - DNA, 643 bp, Cannabis sativa
agttggagacgtccacacttctcaactaagttggggggtatcatgcctagccgtgtgtgcccccaaaaatgtacagcgcgccataattaattattttaatacacaatttttgtaatttatattcaagcttagagcaagatgtgttttcaaccaaattccttaaaaggaatatcacttgaattccttcttaaagctaaaataaacccacattttgaaagtagaagcgtttttagccaaaattcctagaaaagggaagaacccaccataatcccttcttcaaaattctaaagtgttgcttaaaattattaaaacgggaaggcctcacttgaactcctatggacttgaacgttatcttaatcaaaaggtatcgtctaaagtttgtagtgtgtgaaaccgacctcctagaattatgaaaagggttaagcacccaaagagtgccaaggctcccgcgagcatgtaatggttcaagaacattctaaaatcctattcatgttattagggaattttaataggctcaagtttgcaaattttttaaaaggttaagaccaaatccccctacttgaaagtaggaaacatgtatttcttaagtatctcctaaatcagtagagaggttgtggtgttggaagttattttaccaggaact

SEQ ID NO: 130213 - DNA, 975 bp, Cannabis sativa
tagtcacaaccgggtatttcgggccgaactgggttcgagttcgggaccgaaatgcaattgggattgaaatattggcattttatttaataatgattaatttgaaaatttattggatttatttgtgtgagaaatgacttaaatgcccttatgtgtgtttatgcatgctttatagccctagggacaatatggtcattttgaccattaatttacaaataataaaagagttgaattttaaggaaatgaaatgtgatttttttttttttttggtttctttaccccaaactcgaacccctctctctctctctcttaaaccctctttgagtttcaagtgtgaattggtggaatttggcttgaattgaagccttgcgattatggatttttgagctttaaattgagatagtttctctattgattttatttgaaattcttgctgaaattcttgttgaatttttaggttgaaagagcatgaaaagattaaattgttcttggagttgcatgataagtgtattggtgttcaatcttgttagatttgagtatgatttgcatatttatgttgtgaattatattgttaagttttgattgagttattagagtattttctagattaaaaaacatgatttatttggtattttattgctggaaaatattggagttagggtggtttgaagctcaagttttgagcttgaattcttgttagttaaagcatgttgttgtgttggttgtgtaatctgaaattgggggttttatgttggattttaatgcatgaatatgtgttttaactccctaatgtttgctagcagtctattttgtgatttggatgttttggttgagttttgggggtgaattggggtgtgttttcttgctgaaattcgaattttaggttgctggtttctgaatttggaacccaggtgccgcgacatggtctttagcatgccgcggcccgccccttttgtggaacctgggaattggtcccag

SEQ ID NO: 130214 - DNA, 1010 bp, Cannabis sativa
aattacatatgactctaataaaaaaagtagtgacaaaagtacctatctttagattttgttacaatcgtaccattttttggtcgttaaatgtcagcttagaaacatatggcaacatattattggaccacatattaaataaactaaagaaatatgtcgtcacgtgtttttgagttggcacttaatagacttaattgacacttaacaaccaaaaaagggcacgactgtaacaaaattgtaagataagctacttttttttgccaattttttaattaggatcatatgtataactattataaatattaagggagtttcgccgcaaatatcccattcatatactattttatcactttcaattttttttattttttttgtcacaatttaattttatcataaattttaaggatttttatactacgtgtcatatttagctacttttttacattttaatcccaatcatttttttaaaatatttttttaccttattatattttaaaaagttttatatttataaaaatactaacttgatgatgtcatcacacccaattcccccctccccaatttttagtttggttttgcttttttttttttttacgaaagaggactaaaaaatcagttttctttttcacttttttatgttaacttgcttttttatttcttttttacttctatctttctatatttatgttaaatggacaaacactcatgcatgtgagccctactttttactggaggaaggaggacgtaccaaatgcgtttagcatttttttttttttgagttaacctactgtcaaattagcaatttgtttttttttttgaaaaaaaaagcaagaaataagaaatgtgtactagtggtagaagtgacatgagtataaataaaagaaaaaagataatgtctttcaatataatattttaatggaccaagatgcaaaatgaccctaaatctaacaattaagttaataaatgtccttttttttttaaaaaaaaaacaaaatgtccttttagttaaaaat

SEQ ID NO: 130215 - DNA, 733 bp, Cannabis sativa
agggcttgattgcactctgaattataacaagggattatttcataaatatctaaaaataacaaaagattaaaattttttacggatatatagttttatatatatatatatatttatatatatttacgaattttaatgctttattttaacaacatacaaaatattattttgaaattaaagcttttcttacattgctgctataagaaagcaatgtaaaaatatcgtttttaaaaaaagtaaaaatttttgaaaaaaaaaaacataatttacaataatgtaaaaaaaaagtgattataaatgcatctataaatttccctttaaataaatagcgttatcacattaaccatggtatgaaataaaactattatgatgttaactattaagagtttctttaaacaaagtagtatgattgttgtttgattaactattataatttgttgacgctgaaaagtggttaaaaccagcttgttagattggcgagatcaataatgagtttaagtaaaaaaatttagagagacacacacaatctataatagttctctccccatgagacaatgataatgaagttacgtctacttcgaattaatttttcatgagatagtaattagaaaaaaaaaaaagtgctaagtgtttaagctctagtttctaaagagaaactagagagagatgctctgaccttgtggatagttttttgaatatgaaaaataagctcaaggagctctccttttatagttga

SEQ ID NO: 130216 - DNA, 1688 bp, Cannabis sativa
aaatatatatttaaaaaaaagcaattaatatagagagcctatgaatatatgtatatacatttaaaaatcaaaatgtgaggaggggccatggccccagcacccaacaacatagttccgccattgcgaagagaaatttaaataacttatgaaggcgaaaacaaaaatggtgcatgcaaactaatagttcctacttcctaccacataattttttatattttatatatgtgtgttactcatatgtagggtgttcattaaaccgcctacactgcataaaaaatacaatttgaaatcttttgtggtgtagttatagtttttatttttgccaaaccatccggtgcaatgcgatttgcaattttgaatttagttattaaatttcaattttcaccgcaatatatattataaagttactaatttttacgatataatttttattgtatattttcatataaagataaatatatgtgtatattacatcttttttagagacaattaatataatgatttgaagattagtatatatgttatgatattaaaactttaataaaaaatttatattgttaaaactttattagattgactttaaaatttttattataatgtttgataatgatgatagtgtaaaccacatcacacaatactgcatttttacggtgtggtttttgtgcatgggcatcgtgtctgaccaagggggaccaaggcttcaaacacaagatgtctgaattccacacgcagatctcctccttgtctgagggtccgtgcgcgcatggagcaccatgctcgacactcaatgcatcaaattttcaaaaccccatatctatctcgtttttaatcgaaattgagttccgtaaaaaataaagttgcttaatttttctcaaggattaatctagataaattatttccataacgaaaataaaattatttttcaaagaaaattcgtaatttacaaacattcatcaattaagcacataaaccaacatgaacacatccaaattatacaaacgtcattttgaatccatatttcatgaaagtaaattattgtcatggctctgaggccatttgttggaatttattttactatgatctagatttactagcatatatgtttgattataatttataatctaacatcttaaatataaattttctaaaacaatgaaataaacacataagagattaagaattccttacattgatagcagcaaaataataatgaatcattccattcaaatctctagcccttgattcttttatgtagcagagcattatcaagatctgaacctgaatcttctctccttcaatttggttagacacaatcttcctcactatgctaagtattgctttgacatgagtgggatactctcaatcaccatggactttgaattattcagtagagaagaagaataatttcaaaattagaagaagaataagaagttctctctttattttctagttgtttgacaaaagagactgaaatcaaaattagaaaactagagtcatcttattctatttataggattccttctagggttaggtttagaatttaaatagaattaaaaaagataaaataatagcttaaattaccttaagggtgtgtttggaagtaacaatgtaattacaaggtagggtaattactagggtagtaattacactatattttaaaatgcaaggtgtttggatataaggtggta

SEQ ID NO: 130217 - DNA, 936 bp, Cannabis sativa
  modified_base (851)..(871): a, c, t, g, unknown or other
taatttcataattaatcataaacagctgctaatttccaaattaactaagcgggctttacaatttatctcctctttctgggtccacatttcacgagcagtttgatccgtccatttctagaactcacacctctgttgttcgaatgcttggttcacagttgtgcgggtttcctcttggctatgatggagggtgttggtatgagtctgaacttgacctaataactctcttaaattttttagctcagagttgtctcccatgtctatgcaaggctctcctgcggatggtcgtccaatcctagcctctatctccccatggtatgcttgactcgtggtccctctttcttggacaccggaggtgaatttagcgagtgtggtagtgactccactagtagttctggtagttgtcactgtggggtctatgtctccactccttgctcccatggaagagttattatagagcggtagcccaacatttgggttgtctacccccatgttcgtgggtacttgaaagttgggatttgtggccatcaggtcacgcagcttgattgatgtagaccttcttgtttgaaccatttttcaattggcaaatagattgaaaacaaagtataattcgatttttggtgagagcaggatgacctctatgctcttaatgaaagcatcaaaagattgacctcatttctagtcaacgatgtggagtcaaatagacgaaaatttcaagtgtttgggataaagaaaatagcaagaattataaatgacacacagagattatagaggttcagccctagaattggtaatagtctactccccttttgttgtatttcttttggaaacaaaaaagtgttgggttttatgcnnnnnnnnnnnnnnnnnnnnntataatcaaatttacttattaatatagatcagaaataacatttaatgctgcatggttcacatgat

SEQ ID NO: 130218 - DNA, 3535 bp, Cannabis sativa
  modified_base (46)..(46): a, c, t, g, unknown or other
  modified_base (1733)..(1733): a, c, t, g, unknown or other
accatttaatagtgatccaatggctaaaaaaaatgtaaccatgatngttacaataaaaatataaccattggaacctcctccatatatttatatatatacattagaaaaattagtaattagaaatttatagttatgttatatttctcttatatatatagtttattttcttgtacatatattgacattatttcatatatataagtatatttttaatgagtattattcatgaatgagtataataaagaaaatttaaattttcatacttgattttctatctaattaagaaaatatctcatttttacattgtattagctgagattgttctattggcgaaaagaaaaaaagttatttagcaaaaaagtaagatgaaaaaaatagttgaatttgatttaaatactattatataataaatatttttattatagtgtaataaaagatattttaatttgtatatatcataaattaatagctaaattaattatacagactcaaacatctattttattattcaccattagacaaaatttcatgctttaatatttttaaaattaatatttattgtcaaaattattttagtaactatcaatgaataacccccattgaaaagtgttctgtatatatgtacatgtataaccagttgaataaagcaccctttgaaaaaaaacaaaaaaaaaagtgtaccaatacacttaatttgtgtttttaatatcttaaaagacataccttatatatgtatatgagagtttatattatagttatatatgatatacatcttttaatgtttacaaaaatttgaaataccatataattaaaaaaattaaagtttaaatagcctattttacatatgtataaaattaaagaggcatacattcaacggactgtttaaatttttttttcggtacgtttcattattttaaatttctaaattttttccagcatatcttaattaactataaaatacacggttatatatatatatattataactatctaaatcataaatataaaaaattataaaatcgtgcaacattacactcattttgggatttaatttcccaaaattcattatcttattataatgaatatttttagtgttgcccttaattttgtctaaaatacgtggaccaacacgactgtgacacgtggattgaaggagtaaggctttcagataattcgagtaagtcttcttaatgaaaaggatcagcaaggagcatgcctcccggagaaggtatgagagattcacatactaccggagagcaagactataacaaagtacgtccgggaggtatcaaatcctacttgaacagtcacctcgcatttaatgccgcatgggaggaggcgtatgggaactgccataagtattaaagtctgatggcgtaacccccctttctgcacctattacgctatgattaatgagcctagtgacggctactttatgaggaatcacaccagtcaagagaggataatggattacatccacctaactcctaaaaaacctagggattagaccatacatgtcctatgatacactcgttgggaatgtgtgcctttactgaataatacagacagacatgtacctctgttctagggatcaccccacaaaaacactataaataccccccaaactcattaaggtaggggtcgagaattctgggtttcataagaactaaagagaaaaaccaccaagaacattctctgtaataagtattcttataaataacaaagactcgtgnactaaggctcattaatgccccaacaacgtaaaaatcttgcgcattaacctcttacagctttcttatataatattattatattggttgccgaaaatctcagtcaatattttggtgctttcattgagagctgaaggaagtgtctgcaagtaaacagtaatattacaaaacaacaatggtggagactcgcaacacacgtcaaccccgtactcctcaagacgctcaagatcctgacgatgaggatgtggcctcaagagtgaacgtggactctgaagaaggagaaggaacccacaacgacgagtataaaggaaacttcgatgagtacgacgtttatgacgaaggtagctacacagaactagtactcttgagacaaaaggctgccgatcacgaagctgaaatcacagcccaaaacgaacagaacaaaaagatgcaagcggtgatgctggccatgcaaaaagccatggaggcagtaagaatccacgtgcatcataaatccatccatgctggacttggagaagctggacttggagaaacacggacttggagaaacaccaggagaatccttgccaagtgcccaaaagcagaagtctagggaacgtaaccatataaggtatccctctgaagggaactagcagaaaaaccctacttccacccctgggaaaagggaaaaggtgcaggatcctcgaaaggtctgctcagatttcccaaaagggaaaggtccacagaggggaaaactccaaaaagggagtcttggccctcaggatcgagaggactgaaagagcgattctgtgcaccaggaacccggagggagaggaagaagaggccaaaaataccctcacatcgatctgagacatcagattaacggaaaacacggtgacctccgggatcacctagaccaaaagaaacacgtgcccgcggtctccacgggaacactaaatgaaggaatcatggctgagcttgccatactctggaaagacattgctcaggtctcccggagacgaaaaggtgatgactcagactctgagtgtgaagaccgggagccatgtgccaggcacatcctagaggcggagctccccaaaaattttaagatgcccaaaatggcagcttataccgggaactcggaacctagtgatcacctgtcacggttcaaccgagtaatgacactcatgagagtcagcaatgacggcaagtgtttatgcttcccactaacattaagcgggtctgcagaagaatggttcaagaggttggaaccaggatccgtggactgctggaataagctgcaaaccagcttctggagacaatttatcaccgcaagaaaagtcaatctggaggtcagcgccctgactaacatcaagcagctacctaccgaaacattgaagaatttcataaagaggtttaaggaagaagcctcaaagaccaagaaagttgatgacggacagcagcttgctctacttcaagcagggatccgtactgggactccattctggaacgagttaaagcaagaaggagcctccaaccttcaagattttcaaaaaagagtccaaatatacatcaacctagaagaggcccaaatagtggtctatgggggatactaccctaccaggatagtagggtatgtacctggagctcagctcccggaaactttaccagaagttgctccaccgatgagcggcatataattttccgctaccccagggtataatcacaatcaggcattggcccctgcatcttctcattatggtaatccttctgggataagcgcacaagtcccgtctgttggaatttattttatcaggatcttagat

SEQ ID NO: 130219 - DNA, 642 bp, Cannabis sativa
attttctaacttcttaatggaaagctctccatgtagactttgaagttctgccaattcttctattttagcgccactatccttccccacaacaaaagttgtcaacaattggagattcgtcaacttacttatttgacttggcatctcaacaaggctattataaccactaataataagatgtttcaaattaatgagatgatggatatcttttggcaaagtttgaagatgaacacaatgttctaatttcaatgtctgcaaattgtacaatttacttacgacttcaggcaacatcacaatcttagtcttagaaagatccaaatagcgaagaagttgcaattcaccaattgaatcagagaacttagtcatttgaagaccacgaaaagatagagctctcaaagatttaaatttcgatagcagattctgcactacttcctcagatatactgatttcagaatatcttggacccaatgttaaaaaggttcgcaaatgagtaggttcaaaatcacaacttgatattttgttagcagtataaattttcatgtcacatccaaggcgacgtgtcttcttctcaaacttaacaatgtcatcattgtgctctaataaagaactatactttccagaaacaattttagccaaatccacaag

SEQ ID NO: 130220 - DNA, 796 bp, Cannabis sativa
cccgataaaatatttttatttcaaaaatggtattctcgatacacacatatcctaatataatctccgtaattaataaattacgcttaatgatcttttaataaacccttattaattaccctaagtaagatcataatgttacttcattaccaaaatagttaaatatttaataaaataagtctatttaaatattatttattttttgggatattacactagggaattcacaaataatgtaggcttgaaaagctcaatcgatccaaaaaaaattacccatataatatctcaaaattatgggtaatttatcgattgcgcctgaaatgattatcaaacaagttctagagtggttgagactttaaattaaaattcaaacatgcattcatctttccaaatattagtaaatatgacaattaaattaatgtgcaaaagtttttaaaaaaacaagtttgagcagtaattaataatgagttaagcacacaaatcatgagaatttattattttctagaattataactatcacacaatgaagaatttcatcatcaaaaaaattatgttccacaagaccatgcataagatatcaacgtaaagacacatatcaaccacgagcaatcattgtccacagaatttcattcaatcgacacttactaaaattaaagaaacaaaaattaatataaactaaaaaaaatgataaaaataagaaaaattaattaaactaaaaaaagataaaataagtaaataaaaaacttaacaactaagaaaaaaaaaatgttgatagacaagacagttaatctctcccccc

SEQ ID NO: 130221 - DNA, 1488 bp, Cannabis sativa
  modified_base (29)..(31): a, c, t, g, unknown or other
aaaatgcaaaaaaaaaaaaaactattttnnngtgtaaaaatgaaaaagccccataaatttattataatttttaatagtttaatttactatattttttgaatggaaaattcaactttcttaatcattaacttctgctaccaaacaatgtagcaaatcagttggaacagactctaaattgaaaagacaatcagaatataatataaaagctctaacaaaggtatgagtcaccatattagctgatcgtttaacaaaaataataaaaaatatttttcaaaagagcaaggaaacgcttaccgtcattaataacatgcaagataccgtgcttatgaaacaaatctttaaaagccatctcaggagtaatatcagatctaaaccttttgatgaaagaagtaaatttatttttaacataagatagaaattgtgaaatgacattaagagcatcaaatttttgttttaacaaatagatccaattgaatcttgaatgatcatcaactaaagtaaaaaaaaaaattgtgtccagaatgagctgggatatggtaaggtccccaaatatcacaatgcataagatcaaaaacattaaaagcaaatttattactgcttgcaaagggaaatttcttttgcttagccaaatgacaaatataacagtgaatgtttttgtgtttgccttatgtgttggtttttatttgaccacattttattttgggaattttgtctctgtctcttcgtctctatgtatatatatttggtaaaatttattgcaattacctttcctttgattaaataggttgagtgctcttagcactactcattttgtgtaactggaaattggggttttttcaaggaatctttagccacatgaaattgttgaacaagtttgaacaagatggaaatagttaattgtaaattgattaataatttgtcttaagatgaattatattctcttaatgtatacaacccattatacaattatttttaactttggctcacccaaactctctattttcatatttgatggttgacatggcattgctggtgcagcatgagaaacaatggtatctcaggtatgcttaatgcatgtgatgttacccttttcaacagtgtattagtgtaaaactctttccttcatcttcttcttcttcttcaaactcaacaaataaaatagaaagttgaagtactcacgtgtagtaaagttttaacacagattgatcagcctatgcaaataaataaatatatttgtttagttattaaactaattatgcaattgaaaagagtttgttgagcttgatctttctcttataacacaatataatgtttccctcttttgggatgaggataaattagattaaatgctgttaatttgttcctcttgcagctacttattataagaaaggtttgactcattagacattacatgagctttgatcttattattttatacttggaatacatgtattagatattttaataatatacaaaatatattagatt

SEQ ID NO: 130222 - DNA, 1191 bp, Cannabis sativa
tttttttaatagtattgtaattataaaataaatataaataaaaaatatttatactttatcgaaaataaaatataaaatagtattgtattgatattttttcgcgtgtaaatagaactcgccatagaatgttcacatttgtgtgaaagcgcatctcacatgcttatggttttagttggctttttgccccctttattaaacatgtcccacgtttattatattagtttataattaggtgggttgaaatgtgttgtaatcgtgtatcacatgccatggaccattacatatatctgtaataatttattttgatttatttcaaaaggtgaaagattcataaacacaacaacaatttctttttttaaaaaaaaaaaaattattgtacacatatggtgattttttgttttcaatgatgattataaaaggacttgaaaagtgttatgttgtagcgaagcactcgctgttgtatcgacatttgtcacttgctaattgataattgataatgacaggactactaatattgttttattcagtacacgtaccattgggaaagaagatatttataataaaaatagttttctaacgtccacccatgaattggataagttatatgatcttactcggaaatataattatctcattatttttgtggttccataatacacgtacagcatgtacttatctataactatatcttcccttcaaccaaaaaaagaaaaaaacaacattttcattaagatatgaaggtgtttattagattaaatctaataaatttaactcaactaaattaattcaatctaattattaaataaatgttgttttaaattacgaaaaaacttattgatcaaattgaaaaagtgatgagtaaattttggtagggattgaatgttactcgtattggtattcattgaaaaaattaaaattctctatttgaagcaaaatttgaaggaagcttggatttctgtgactttgttcatttcaatgactattatttattttttttttttttaggaaatgatttgtaacattaagaagaaagattagatacataaagtttggttataaaagggaaatttgaattaatatacttacgttaccctataattttttccctaaatgcaaatttattaaaattggtcatatatgaccactttactaattttcttaaactatccctctcatttcaaaccatcagcc

SEQ ID NO: 130223 - DNA, 1178 bp, Cannabis sativa
tacgctcacacgtctatttacaataagaccttaaaatgatttatctcggttctgattatctagtctaacctaattatgcattgtgcgcgtaattctttatatgatcatatacagtataacattgcattcatatccatttaaattccagagtaataaccctacatcacataaccgctaacctttagggtaataaccctaatctcggtttctcacataacatatacaaaattacatacatgagcaccactgcactaaactctatgtgctagtttactgtcttacctagtaatccaagtatgtggagatttcaaatctcggtgaccctaagtaagcgtcggtaatcctagtcacacattcctaaaatttcacaaatagggttaattccaaattcaatttcacatatatacataatttgaattttatttatagattaacatatagagcctgaaaaaaaaaaagctttccaacgatatcaagaacgtccaaaacagagtcccgagtcaaaaattatagtaaaaacgaaaaaaaaaacaaaaattcctgaaaaaaaaaacagggtctcgtcgcggcaaacaaggcccttgctgcggcggctccaacctgttgggccacgccgcggtgagccaagccgtggccgcagcaacgggccctggaaccctaaaaattgccaattttcttagttacagtattaataaagttcaacaaaatatactaaatgagagttaccaattttatattatgttcgaattcctatttgaattttatgtttttaaaagttaacttttgagttataaaaaaacaataattaacttatgaatcaaattttttgcattttggaacttttagtaaccgattttctgattttaaccaattaagattctgtattttggtaaaatgccaaaaatataaacatgtatattattctctttctaacatgtagtttgattttataccccatatctaaaaatactaaaggtgtacatcggtcgatttggtcgggttaaagtgtatttttatcaagtcaatataaatgccaaattgcaaatatctaatagtgacacatccaatgaaaaaataaaagaagtgtaacccgattttcatcggtttggtcgggttaacccttttcaaccgatatttttttgggtattttacaattttgtatacattattttaattaa

SEQ ID NO: 130224 - DNA, 1399 bp, Cannabis sativa
tttgtgttgggatttctgggtttgttagggtttgggttcgagtttctcagagagaaactctctgctagggtttcgaatctaaacctagggctgagggaagtgatcaagaagtgtctcgattcttttggttttgttcaaagccaaaacggagtcgtttttgactctgctgactttgaaaagtcagagagaaggaaaggtcgaaactgaccttggttaaatactgattacttaatgttggtgtagggtaaaattggaaaaacttaaaaattcctacaaatattttaattatgttcaaatgtattttgtgtaattttacactttttgattgttaatgtttttaggtttagtattgaagaaaaatgaaacaaattaattcgagaaaaaatgtgcaagaataattaattaaataaaatttcactacaaaaaattttacttttagtcacaacaaaacttgttgaagacccatcttagcggatgttgcttggttgcaaatgtttagttcggctaaactttacaatctttgagatatcgacatccgatcatttgcccatcttgcttgaactttttagtactactgttcagcaacgggtcactcgttttcgctttgaaaatgcatggctacgggaaccactttgttaccaattgatcaaagattgttgggatggcagtggtgatgttgaagtgcaacagaagattcaaaggtgtggacagtggctggtggtttggggaattgagtttacggataattctaaagagagaattcaacaatgcaaaaatgaagtggaaaagtagaagttggggagagatgatacctcggtggaaaattataaaatggcaaggaacaatttgaatgaagcttatacccaatgtgaggttttttggcatcaacgatcgaagtaattgtggttgcaagaaggtgataacaacagtaaattttttcatgcttttgcaactaatagaagacgtaataacttcatttcaaagctcaaagattcgaatggcaattgcgtggattggtcttcgggtttgccacaaataatggtcgattacttttctgctctttttgcttcatctaatgcgaactggagagaagttacaagtagtgtgcaagctcgtgttacagcagagcaaaatatggagttgcttcagccggtctccgatgatgaagtccaaaaagtattgttccaaatgcatctcgacaaggctctggggcctgatggaatgacaccagtgtttttctaaaaatgctggtcggtggttaatcaagatgtcatacaactgggacataatttttttagctttggaaatcttcctgtgggtttaaataatactaatctggttttaatacccaagaagaaacaacctattgatatgggtgacttaagacctattgcgcttt

SEQ ID NO: 130225 - DNA, 961 bp, Cannabis sativa
cttattagacatggtcagatcaatcatatgcaattcatcactgccactaaacttctagggatatgcacttctagtagctacttacattttgaatatagtaccctcgaagtgcataagaaatactccaatagaattatggaatgggacaaaatctagtttgaaatattttgtatttggggttgtcttgctcgtgtcttaaactgaagactgagaaaattgttcctagaattgaagtgtgtatgattgtaagatattcagatgaaattcgaggaaatcagaaattagatttctataccaacgatttcagcaccattagttgaacgaccaacatcagttaccacattgcctgaaaaggaaatcccgaaacattgtcatcctgggaggattttgagacaatttgtccgccatgcatgaacatgaagcacatgttcttgtttctgatacaaacaagaatgatccattgacttactagtaagcaatggaagaccctgattcagacaagtggaacaatgccatgaactccatgcgcactaacaaggtctgggtatatgaaactccacctaaggatataacacccattgggtgtaagtggatttttaagaagaagaaaaaatgctaaaggaaagttagagacctttaaagctaggcttgtcgccaaagagtacacacagtgagaaggcatcgactatgaccaaaccttctctcttgtgaccatgcttaaatccattcacattcttcttttcatagctgcctatgagatatggcaaatggacgtctagactgcttttctaaatggcaatcttgatgaaaccatttatatggaacaaccaaaatggtatgtgttaccagggaatgatcgaaatgtgtgcaagttgcttaaatttatttatggattgaagcaagcctctagatcctggaatactacctttaataagagtattaaagagtatggcttcaaata

SEQ ID NO: 130226 - DNA, 1031 bp, Cannabis sativa
ggcaaaatcaggggcaacaaacattaaatagatataataaaaaaatattttaattttaatttttcaaaataatatataagattcctgtacttaaccaaatagtgtaatttaatttataggaatatgattacatattaatgtacacaaccaaacacaatttacacatttccctataatcttattctctttcataatattccctataatcaaattattttaaacatacctcataccaaatgccccaattatttaaatatatgtattaattaatctactaaatcaaatacaacaaaaaataaaaagaagagtattattgatgaataccttaaattttcttttctttggatgagttcttgtatttggtatttgccaaaaatatattctgcaactctgttgattatatatacttcatgtgtaccttacaataaatacatataattatttatacataaatttacttatatacataatttcaataaaaaaaacaaacaaaatagacgtgatcttcattattgattgacaaacactatataaaatatagttaacattttacttttagttatatgagttatgagcatcattatagacaaaacaattcacaaatattggtgggttctgctatagaaattaactaagggatattgaagagatagtttgctataatgaatgagagaaaaaaaaagatagtgttagggttatgtttagaaagttgaaaggctttttaattaatagagttagtgtgagatatttattttatttatttattgattaatataaattaaatttagcttgatatttttttttggcagagagaagcaaaagcaatataagaaattaatataaattaaatttagcttgatattagttgttagatattataaaattagtgtataaataattagtattatatatgtttaattaatattagattaaatgattaacttatctattctactagtaaaaactacgtgcgaggcacgtatactaaattttatgctagtttatttctatgttatttgaaagtgatacaa

SEQ ID NO: 130227 - DNA, 546 bp, Cannabis sativa
  modified_base (493)..(493): a, c, t, g, unknown or other
ctaggaaaaaatattttaaaaaatgaattaggtcgttcattttagaaaaaaaaaatgaattactgaaaatatatttttttaaaatgctacgtttagtagtcttttccaacgtgcgatatctagatgtttattcatgattgagtttatatagtgaaggtatacaatagtaatgtaaattagaattttaagttttcatatcatttgaaaataaatttgttatagctagctatggtttaactaaactaaaactaggattttaagttttcacattctcttttttcttttgtctagagcatacaaatatatcacaaaagtactttttatgtcaaatataattaatacaatttttacatctttgattgaatggtagaaagagaaattataaacaagttatataattaaaagaggaatttataatagggcaacaaaaacaatattattaagaaaaatgtgtaaaaaaaaattattttaaaaatttatacattttgaaaanttattacatgaaaccatacatttttaatatgtttattaaacctcaaaataaac

SEQ ID NO: 130228 - DNA, 740 bp, Cannabis sativa
aaaaaaaaaaaagaagaacaagaagaagaagatgaatagaggagagagatgaataccttaagaataaagttgataaagaaaaaaatataagatcaatgaactgatgaaatgaaaaatgtgagataacatgtgtattgtgataaaaaaattgaaaaccgtgccaagtgacaagacaagataaaacaaattaaaaaatcagtataatataatataatttttcatcatcaattttaattaaagaaaaattaaaaaaaaaaaaaataaagaaatctgtcacaacataactcaaatcacaattttatattatctaaactataatataattttagttaaaaaaaattatcactaaagtgacagcacaaagtcacatcacatttattacacttaaaaaaataataaaaattgtttaatatgtgctcaatatgcatttattacaagacagtataaagaaacagtataaaagtatatattaccgtgtaacagtaaaaatgaaagaaactgaaaaaaaaaatagtatgaagtgtaaatttctcaaaaaagaatgattagaaagcatcagaagatatcagcccacttccatttggaacatggctattattatactcgttgagatgcaaaatgattctacatttagaaattatattagtaaatatttctcttataaaaatattaagaaaatagtcaaatataataaattagctaataaaagttataagaatacatttactacattttttttt

SEQ ID NO: 130229 - DNA, 681 bp, Cannabis sativa
aaggtctatatattttgaaccattttaaaaaatacatggactgaattattatttaataaaatagaagatccaatgattaacttttagaaaatgcaagatttaaaatagtatttatcttttatttatagataacatttgcttaaaaaaagtctatttttaattaattacatgttactagaaagataattaaaaatatatattttataaataataatttttatattaacatttaattaaagtactaattattttataaataataattttcatatatatattattttacttgcaacaaaataattatttttttatagcaaatagtgatatatatatatattttaattaaaagaaatgaaagtagtgataattagtaataaatgtaaaaatgagatttatatggctattcttgtgtagtagtagctattattttatcacaattatgaatggtagaaatttcttcttatttttccttcattatattttttcatgatatttaaacatgaccatgcactcacaattattggtggtcctacaaataaataaaacaaaatgttttctttttcttttgataaataaacaaacaaatttattaaatgtatatataaaaactagtatattgttacgtgcgatgcacgtatgctatgttttatattaagtattatattatgagttcggaaggaa

SEQ ID NO: 130230 - DNA, 2390 bp, Cannabis sativa
aaagttgggttcagctttagcttttagctgtagcttttccgtaaattctttaataagttattttttaactgcttaccaaatacctttttatcataaatttttttaaaagcaacttttagctttttcaaaagctgtactaaacgggcccattgaccagttttaaaaatctactatttcttgacgtgtacacccataaatttttttatatgtgttagaatttttgaatcttaattatactttcactagtgaattaataatactaaaggataaagaattagaagaataaaacggtaatttagccgaaactagttatgaaacgacataaagagggctaatcactggaattgattatatcaatgaacataataattaaactcagtaaatataattttataattactgacagttcaattccatatgtatagtggagtaatcatggaattaataaataagattatttggttgatgagatttaataaatgatctaatttattggagcttagcattataggtgtatggtccccagattgccacattgcaacactgtcaagagtatggataaaactatataatgatgttcaaaaaatttattttgaattagaaaaatagtaattatttattttgtaataaataattagtttttaaatttattatttaaataaattggagaagacaaagtgttgtcaggacaaagacatcactattgtctgattgaagcaatggtggcgccattcattgtgtcattgtgtcatgacacaatgattggcgtctatcagataagatgagtcccactcaatttgtttttgattaattaattaattcaaaagataaaaatttatttaaatttaaatttaaaaagtagttgcagatatttatagtggttgagatattctttcaaagtagttgagagattctctctaggtggtaaaaatattctctcaagtggttgagagattccatcaatcaattattaaatatttaatttaaactaaaatatctaattcaaaatagatatctataacaaaatcggttacaaatatttaaaataataaatatctaatttaaataaatatttattattattttattagtttaaatttatatatcgccatatcctaaatctatatatacttatagtttaggaaatctataaacaattaagttattattattattattcactcagagaaaaaaattgatcttgctcatgtgttgaggaaaactcaagaatgcaatatatagttttatcctaattagcgtacactattaagattgtgataaaaaatacacactgtgctcttctagatctaccaccacatcttaaggataaaacttacaaaaagattcaataccctgattatcttcaagagttaaatatatcatttcattttttttttcaaatttaatatatgtacacatggagatcctagagtgtggtacgatgataatcgttataaattcttccatcgcttacctgatttagtaccacaaaacttacaatttagccttgtgagattctttcaaatgtcatgttcaatcctaccgtctcttaatggttgttcattattcccacacttttcaagcccaaacataaggaggagggtatattagagttagtcctacattgttaattggttttgagatgtaacgtcatgcaacttaaccatacacctttctaaattctaacatggtatcagaaccaaacaaaaaaatattgttgtctcccttttaatctttatttgggacctttcaggcaatgtgtgccagtttttagtgttggagagtttgatttatttcaaaaatctaaaaacttctcgatgtgcacacccaaatttttttttatttggccttatgggattctttcaactgtcatgtcaactgaaaaaaaatattctggtggcgtagacatcaatgtttgacacgtgacaagaaagataacatctcaaagttgagtagtcccaagttatagcagtcaatctaggaaggctccctagcactgctcccaagttaactttgagaactctagaatgggtgttcagattctcgtaagtcatttttgactcactatccttcagtattctataccatgaagacatgaataaactaattctaggccctgggagctgagaataaatgaatcaacacctcaaaaattaatttgggcacatagggtttcacatagcgcccatgttgacaatcccaaataggatttcagtttctctgggaccttctcttagtgcaaatggatcaaaatttatattgggacatgaactagacataccatgaacagatttgaggcatcataattgttaggttataattagcctatgtttcgggtctttaaagttagcattatctcgtctattggtgtcttttagagcagttttacg

SEQ ID NO: 130231 - DNA, 764 bp, Cannabis sativa
  modified_base (733)..(738): a, c, t, g, unknown or other
gcactaccaagagcctccaaagaagccaaagcataccaaggtaaggacatatcgggatgcacaaccactatgcttgaaacagttgaagcaaagtacaaggacgtacctaggggagaaggtggcatgggagtgtgatcccaggcgttagcacgaattgacacccgaccaccactacatgaattccactactctgacatttgtcacaagccatctgttagagagtacatggtcccctaggagacaacttagagcatctcaattgtaaaagaaggatgaattactataaagtttacaaaatttaactaaaaagaattacttttacaataaacagaattattgaatttatttttatttaataatacataattgattttctttaaaaatacattacgaaggatatgatcattatcttacaagaagctcttgtttctttacaggtcgtgttctttagtgggagaattgtttcactgaagttcgttcaaaaaagaataatatataattgattttctttaaaaatacattatcatattcattatttttgaattttgaatttatgacttttggtaaaataattaaaataacaaatattagtaatctttttcttaaatacaaaaataaaaataaaataacagagcaaatgtgcctatagcacaaataaaaaactagtatataatatgaaaaataatagggattttttttttaatttttataaattattttttttaattttttnnnnnntatttataattattttttaaaattga

SEQ ID NO: 130232 - DNA, 1047 bp, Cannabis sativa
gtgtataagaaaaacaatcgcaaatataacaaaatatataaatattgtaaactatttaaaattatctaaaaatttacaaataatagcttatttagcaataaaaagtgtccccatacacttctttaaatggtgtattctaaacttaccctatatttatagctagcctatttagttgttgtttagtcatgtcactactgtataaaagaaaattataatctcgttcaatgcatggtgatgtgactaatacacttaaccctgcttgattagacacgagaaaacaaatacatcttctttaatttttttgtcttaccaaaaaaaattcttattttatcatcaagagtgatttaaaggtgggtattattacgttcaatgtaatggatttttgtttggagattatgaattattttactttttgtaatagacactcattattttattagttgtaatttttttattagtagaatctataattttgtgtctataatatagtaaagtacgcctttaactacatcgagtatagttgcttgcttgtttcttctattccgaactacatctctttataatgaccttgaagataatttgttagtctaattttttaatcgtttatattatagttataatttaaaacattctgtaaaatttttaaaacaaattaatatgttgaaaataaaatttaagtaatttgttgtaaatgtgattcttttatttcataggtgtgcaaaatatactatttaaactctatttttaacatgttaaatgtttttgtattttttaaatttggatatcttaaatcattacactatagatgaggaataaaacaaaccaatataattaacatttgaaaattattaagagtgtttggtatgtaggattagactggattagactgaaaatgattggactggactggacaatattggattatgcttaaagtgatcttgtgtttgatttaagaatagactaaactattttatttatttctttttggtaaaaaaaacttaaattaaaataaaaatatataatattaaattaaaattaaaatatata

SEQ ID NO: 130233 - DNA, 867 bp, Cannabis sativa
ttttctgtcttcctagtgggctcctttctttcaaaaaaaaaaaaaaaaaaaaaaaaactttgtcaaacattttttccctcaaattagtccatgaattctagtttatttttgcacactttttctttctttgctactaaaccaactccttccaaattattctaaaacaaataaaaataataataataatgaagttaagcaaaaaaaaaaataataataaataaataaaaatttcttttcaatcatatttattcagataactgcaaactatatatatttgaagacatggtcaagtattaatgttaaaatatgaaagtgtattgtttagaaagtagaattaggtgggtgaatggtaaggtgtatagagtttaatttaaaaattaattagtaataagaagaatagctcatgcatcttatgtataagatttagtttctacacattatcaatgtgaggctctataacaattaataccatttctttctttctcatttttctctctttcctcaaacttttaaaataatttttgatcacgttattattcgaatgagcctaaaaaaatattattttgatctactcctcaatgtgaacacttcaagatatgaaaaatatatggcttttgctatttccaaaaaataaaccatttagctactaatatagtaattaattactgttttatatattttttaaaatcttagttaacattcattttaaaattttattaattgaattatattatattatacaataattaattgactttcaaataaaagtatataaaataattggtgtataaaaataatagcttgttatattatatgacaacttattagtttttgaaatttcgtattttaatattcccagtttaatta

SEQ ID NO: 130234 - DNA, 914 bp, Cannabis sativa
aaattatagagattcaatcctcttaaatttgagtaatgacttactcttcttttagttgtattaattatgagataatattgtgcaaattcaaattacattactaaggaagacaaagtgaattctaactacgactctcaagatgttacagaaaatttatttcagctaagtgctctaagatgcgagataaagatttcaggtccattctccttatagattcattcactatttataggtgaaaggttaattattacaattagctccgtaaaaggagtaaccaaaaagtaaatattcctatattctagggtatagttgaagatcctacaatcttgaataaaacagtcaaatctgtatttgtaggatgtagttagagatatttgttgaagttgctgaaaaagaaatcaaggcttgtgtagccttgtccgacagtcctggcgtcgttcatcttgcccgacatgttgacaacccggccagacccttcttgagacttgtcctttttatgggatgatttatgaaacactcttgtatggtgtgacaatcttcccttatttggccagcatattgatagtcgggctggatgcttcctggaagtcaatcttcaattcatagatatcagtctcatatgggacctattaggtacacttatgcccaaaaatctcttgtcatgttatgggtcaactggattatgtcacgtgtaggtgccacgatcagatgtgtaaaacttagaataacatatataattgttattagttaataattggtaagaaatatagggttccatctcaaaaccaattggtaatgagtggagtagtccatgttcttatgtatgggtcacttattattattcggatctcaagcgtccttgcacgatttggatctcgtgtgattggttaactatctggataggtgtggatcga

SEQ ID NO: 130235 - DNA, 561 bp, Cannabis sativa
  modified_base (523)..(526): a, c, t, g, unknown or other
gagagatgagaaaatgaggggtggccactcagtacatattatagggttttatcagcttcggcctatttatgcatgcactataatttcgattatttgaaaataaccgaaggcatgcataaggtacacttaataccatatggcttcagccgtagagtgcccaagagatactactagaatagactatgtctttatttatttttaattaaaaaaattcataattaaagtctaattaataatattgtagtagtgcttctacaaaaaatactattcccaatagtcaatgcgatgatcaatgttatcatttttagtcattgtatatattgttattgtatattatacatagttgttattatttttaattattgttattgttacactgttatcgtttctatttctagttattatatactgaaaaaattgaaaagaaatttgaaaatacaatggaaagatttgcaaaaaaaatacaatttctccattgccaaaagttacgtgtcagattgtattgtggacattgtcccacatnnnntaaatggtagagaattgagtcatatataagaacat

SEQ ID NO: 130236 - DNA, 748 bp, Cannabis sativa
taattaggattagatcaaacaacaccaagtaaaatcgaaaatgtgtttcatcataaaacaatagatcaagctatttgaagtacaaaatcatcatcaacgacaagatattgcgaataatatgggcaataaatgtaccaaatgatatggattagataacatgtagtcctcttcttggtttgattctccatcttttggactgcaaaattgaatggtattatcaaataagaactcataaagagcaaacaaaccctgcaagctcataaactaaacaaataaatatttacacattaaagtaatgagtctaactgtaccctgagagtgagggatcatacaatatttaagcatgaaataaatgtagcgaccaacatgacaaaagccacgagatttacctgttagctactattcgaagttgtctaaatggccatatatatacgccttccactctgatttgaacaccattaacactgttttcattgtcaaatacatcttgaaaaataattattccctgttatcataggaagagagcaacaaagcttaggacaatattataccatgaaagataagcataacagatgtttttatttgttgacttcataatttgatatatcataaaacataaagacatatttaagctattggatttagctcaaggaatagtgattggcacaaagtgtctctgtttgtgtgtgtgtgcacacacctacacacattaagggctcgtttggaatgccgtattaggtcgtattgt

SEQ ID NO: 130237 - DNA, 532 bp, Cannabis sativa
ccgatcttatttggcccttagaacttgacagcacaacgactgatcctcatttagaagagcccaaccccacttggctaataaagccttattcatttccccagtctttcaaaaaccaagacctccccgagatttgggtagacacaagtgatcccaggcctttaagcagataccccgattgccttgctcgcagccccaccaaaagtctctaaccatgccatcaattttcgaggcaagttttttggagagcttcgtggtttgcatagtataaactggcaacagaagtcccacatatttgattaaagtagcacgtcccaccttggacagtgttttcaatttccaaccatgaagtttcgaaacaaggttatctaagatgaaattgaaatcaacgtctttctggcgggacctaaaaattgggagcccctagtaattgatgttccctataaagttgttgagaccaatttccctcaaaatgcctctcttcatactctcttcagtgttgttgctgaaaaagattgaggttttgagtttattc

SEQ ID NO: 130238 - DNA, 1239 bp, Cannabis sativa
cgtccatgcccccaaactcggacaggacatagccgtgatccaccaaagtcttcgagagacgaccagtctctgcagcaatctggcaagataagaataataagaagctaagtatgggaggcataatggtataaagaaaaatcccaaatagcacaggtaaagacataggcggtcatggcagcactaatatcttggacctggtagatggcgttcgtggaagcgcagtccgcgtaccttttggccgagagttgggtcaggtgggacacaaactggctagtcagctcaaaagcaaaaggagcaagggtgggccaatgaagcggttgaaccaatctgtcagaggatccatgttcagatcccaagcgtttcggaaagcctcctcgtgcatggaattctgttgggcctcttgcaggaccttgttcaaggcctccgcctttgcattgcccttggtgtattcgtccatggcatagttgtgcttggccacccgtagttgttgcctttcctcatcagcaggcaccggagtaaggatgatgccaggagccaccacatattcctcgacttcgggaggaatccctgagtctgagctaaccgccgaagtatccttcctcctgcttcttggagggttcaccttccaccaattttcccttgcattttctatcagtcaaggccacgatttcaccttcctcctcctccttaatctcaccgtcctcgtccagtaggatgatttggccaagaggggggctggaagaagatctctctggggccaccaactggataggtgtcaggggatgagaagtctccgggttgtaggtctaggcaagtgttgctaagagatccttcattggcctggctgctacaaagaaataagcaaagtgttagaatggccacaataaagcatgtgccaaaaaacaaagtaattaagactattcctacactgactatctaactcagccctagcaagatcttgtaccataatgctggcttcatcatccccgagaaagctgtccgaggggagaaaccagctggaagacaagtagactgagcgatccaagggaatgggcacaggaggtccacaacccatccgggaccagcctaaaaagtggcctaaatgggaagaatagaaatccttggcatgatccccccaccgagtggagggcatcctaaacttaaaaagacggtcatcaaatcctataggtctacactattaggttttatgccctaaataaaaccctttacaatctgatt

SEQ ID NO: 130239 - DNA, 642 bp, Cannabis sativa
cttacggatcacgggactaccgactgtcacaaatgatctgggttgcttgttatgcaatgttcaagaaaaatctcgtgaacatctattttttatatgcacattcttgtttcaatgcttataggaaataaaagtttggcttcaatggaaggcgtgtactgcatccattactagacttacaagatggatcgacagagctaaaaccagtaagttcaaaaagcaaatttaatctgctgtattggctggtttagtttatcaaatttggaagacgaggaataaaaagctttgaaattcgaaaattgaagatgtaaatagtgtaacttgtatagttaaagaattggtaaaacagtgtttaaccaaaaaaaattagcttgaaagatacggaataatttttatcgttgtaataaaaaatattgtatagaatacttgaggtcttcagatgaagatgcttgtagtatgtaaatcagtgtttttgaagtaatgaaactactttattcatataaaaaaaatatttacccttataaagtatattataaagactaggctaattagtaattttttctcctgaactttgacatgtagtaaatcgtgccccctgaacttttttggcagttaaaaatcccccctaaactattgagattgtta

SEQ ID NO: 130240 - DNA, 632 bp, Cannabis sativa
ttacattgtagaatcacccaaaaaaatatatagagagaggagttctataatgagcgggtcacttttgtgtataatggaaaatttcatttactatacttaaaaaatcacccaattactaaatacctccaaaatattctataccatcttatcttactaattcttatgctcacctaaactaccatcccaattaattttttcaaaaagctcaaaaactctctctcaaaaaacttaaaaaaaaaaaaaaaaatcactaccattcccaccaccacgaatctcagaggaccacatcggaggaccacaccaccattctagccaccaccaaaatcggaagaccacaccagcttccgtcgtcagtcgaaagtcagaccacgtggccacgtgggataatgggaagtatttattcaaccattttgttaagcaattgtaaaggtatagttcatcactagaaatttagatgtaaaatatgaagcagatatgatcgtgtatgaaatgcagaataaatcgaacatataggcaatacgaaatgtattgactgttagaaaaattaataataaacccaagatctatttgtatataacatagaacacaatagtaatatataataattaggtatgtgtacctgattgatccat

SEQ ID NO: 130241 - DNA, 1419 bp, Cannabis sativa
tgtaacgaccatgaggtctagcttattttaatatatgaacacgcttattttcaaaaaaaaaaagagaaagagaaagagaaaggaatcttgacattatagaattgaggaatggtgatcataattagtattgaaactctgtaactttcacatttttagagtaagcaatctaattacgacactaatatctacctatataatatgatgatggatcatctattatatgacaaatttgtttttttttcatacattgatcatgattgaactgcaattctaagataatcacaaataggttaggtttataatttcgaataagagttggttatgaactcattagttctcaacaaaattgattttatgttgggttaatttttattttaataagattgttaaactaaatgtttaggacacgtttggtacgatgtattgtattatattgtattgtgttgtattatattgtattgtatatattgtattattattattattattatttaatataatgttatatttatcattgacttgttttaataaattgtatgaagttagaatatatttttaataaactcgactccaacaccgattatgggttgggtccgggtccggtttggcgtccaggttgggccttaagttcggcgtcttgggtctgagtccgaattcaggttccaatccgagtccctggatctagatcaatgattggggttgactctaaatcttttgtaaatattataatacaagctaatatgaattatttattatgtattgaatcatacatcttacattgttttaaaaaaatttgtcgtaataattaatacaatatatttattattatccaaatattatattatttattatttaatatagtataaataccattttggacctcgtgttttacaaaagttaccaattggaccttctgttttgttaaatgacaaaatggaccatgtattttctaaaatagtacaaatagaacccttaacttaatttttgacaactttttttataaccaacttgaaaatacgaacagatatagaaaatgtaaacagttttgtcataacacttttagatcgaattattattaaattttattttgataaaaatcagttcatgagggtcctatttttaccattttagaaaatacagagtccattttgtcatttaacaaaactgaaggtccaatcaataaattttataaaacacagaatccaaaataatatttaccctttaatataatatgatcttcctataacttaccgacgagttcataaaagtttgaatattgattttgatcatactagttttagagatcaaattggaatatgtgcctacataaatattgttttaagatttcaaatttaattttactacaatttgatttctataattttattaataaaataatatttaaaattatatatgata

SEQ ID NO: 130242 - DNA, 537 bp, Cannabis sativa
tttgtggttaagtgttacaaactgtaaagtttaggtggtttagccgccaatatccctacaaaatattattcaacgttcacagtttaataacaaccagttttgtgatcgtttgtcataaataggtttatccaacagtaatatttgacatttaatatataatattagaaaaaagaaaaaaaaaacaaaagcaacttattgttcacacaatatacaatattttattatcacttaattaattaaacgacagatacatttaatatataatatatatgggcaatatatacatatatatatataatcagtatcaacacgtacaattgcaatcaaaataaacagaaaaaacacagtacgtagctaggcccgcaacgtacttacttccttattgataaacgtacttacttccttgataagaaagtaaatatatctttggcatcataactaaaaatactattttttgtttttaaaaacagaaaattatttttaaaaacaatttagcttgtttggcattgttttttaaaaacagagatcggaagagcg

SEQ ID NO: 130243 - DNA, 1292 bp, Cannabis sativa
attcaacaatcatttgtatccataagttaattttactctgaaggggctagtatgaaagggaacctgtatggaaatgacttgatttcaactctatcagggtacaatgaaacttaggggaagactatgggaagccatattaagcaagtctcatcaatgggaaattaagactttggtcgtctccggcggtgggacctgggtctagtggccaagctccattcgtctccggcggtgggagctgggtctagtgatacctcgaagatccccgtttccagatttggccatggtcgcggctcgaggaggatgaagatggcgacatctcgtgagccagctggtcgtggttcgtctctgcgtgctgcttggataccgaagcacaagcctgcatctcgagatttgacctttactctgttgggtaatttggctccgactgacagtgtagagaagggaaagcttcctgtaacttttcctatgttagaggaatgcccttttgaccgttcctctattgtactattggttttgaatgttggtggtcaaggtgatattgggccagttttgaacactagtgggtcgagtaggcttatggctgcttgtgttgatttaaatggaattggaatagtacctcacgtggataatagtgtgcttaaaggagggttgactttgaatggaattggaagtgggcaaatttcttgtgggcctctggttattaatgataaggaggttggtgggtcgagctctcctcttaatgaattgggccaatatgatttcctaagtgttgggcagaaggcactttgctctaccaacgataataaggccttgtgtaatttttttcaagcccaagaatcattgctacaagggcttaagcattttgggaagttggatttggatgagattagaaccttgggaggtgacattggtgttaaatccacttctaagataaatattagaaccactcctttcaagaaaagaaaactttttaaagcttctgcttccttatgttccagatctcataagatgattcagagacactcgggtgttatccgagacttcccttgcgacacaaaggaacaagaacaagacagaactttcaagattgattttgaagaaccttctgaagtttgttcggatttcttatctcgctctgacgacattttaaagaacccgcttattggttcgcttgtgattgaggcatttggctctagctcatatgttcactctcaaacccctgtggaggagaatgtcttatctcctccacaagagccatgagaggtgtagcgtggaactgtagaggtttaggg

SEQ ID NO: 130244 - DNA, 1241 bp, Cannabis sativa
agcttttgagcttcaagaatacttcgccaaacatagctcgaattaggtcctagagatgcagaaagaaaagagccattaggatagtatctggctttgaatacccgagcaactaacgagttagtgttaacacgtagccgccagccttgtttccccaagagagccagattaaaatcctttaaattctgaaatcccattcctccctttgatttgtgacggaaaagtcttttccaagacatccaatgaatacccgacttagtagacgctgatgactgccagcaatatctagccattaaactttccatttcatttgttatttttgttggaagcatgaagacgttcatggaataacttggtaaagattgagcagccgccttgataagcacttctttgcccgctctagaaatgaatttggcgccccaaccttgcaatttatttctaatcttttccttcaaataacccaaggcagccgtcttatttcgggtcatggaactagggaggcctagataaagacttccttcaggcgcaattcccacatccatacttatgcaaagatcatgccttaagttctcctctacattagaactgagaaagatagaggatttggcaaaattgactttttgccccgaagccaattcaaacttttggagaatttcctttatacgaagagcttcaacttcagtggctttgcagtacaagtaactgtcattcgcaaacaacatgagaaatcctcggcgctccgtttgcaactttgcacccatgaacccaacctctttgatcatatttacgaagtaaagccgagaggccctccgcacaaacaataaagagatatggcgaaagtgggtccccttgccgaatccctcttgacggaacaattggacctacttcatagttaccatgcacaactttgtaccttgcagacttcacacatctcagaataagttgaacccaattctccataaaacccatcttacgcagcatagcttcaagaaagccccatttaactcgatcatatgccttactcatatccagcttaagtgccatgtacccctcttttcctcttctttttcttttcaaataatggagtatttcaaaagagaccagtacattatccgagattaagcgccttgggataaaagcactttaattttcagataccacaatatccataaaaggcttcatcctattaaccataactttagtaatgatcttgtacaacacattacataaagcaataggacgca

SEQ ID NO: 130245 - DNA, 526 bp, Cannabis sativa
atactcacaatgttttttattgtttaatgatttttaacctttttaaacttccctatgaataatataaagagcattgcttttaaaattagtagattgtaatcctactagtgctaccttataattagttagcatgtttatatatggtaaatatcagaatgagtatctaaagttttgagtttataagtgacataaattcaataatttcttttagcggcataagtacttaatatttataaaactgtattttttttttctagtttcctcagtacaatcttaaatttttttttgacatattatacaatcttaattttgaatttatcaaaaaaagatttagaagtaactgatactacatgtttttgtcaagatacaatgatctagaatttgcgctttatatgtgtcatgtttaagacaataataaaatttgtatagacgaaaataaaaaaaaaaatacagttttacaaacattaagtactgttgctccaaaattcgcccaaaatacgtggaccagtcgagaggggacacgtgg

SEQ ID NO: 130246 - DNA, 1135 bp, Cannabis sativa
tatcacataataccgacttgtatctaggcacccatacacctatttacaaggcttagtagatgagtaggaacgttctaactgagatacgaccatgtaccgctataccacatgcacttagtaccaccatcgtactagtgtaggtaaggtatgaattgtaccccgagtactgttaagtgttgtaccacatacaccgtgtaccttcccgtactagtgctggtaacaccatgatgtactcttcagacatcgtaaactttgccaatgcactccgtaccgcaatcgaactagtgtttgtagtgtacaaatcacaacaaacatgcatatatatttcacacatacatacattcgtatatatatcacatattatacgatgttcttacctctttttcgaatccaagtgagttggctgacctgaacagaaagtctcgtgctcaatggatgccctaatcacatattaaaactggataaatcacacgtcaaaaccctaatctagaaaacccaaacctacaacttaaggttctgttattactaataggaactacaatatcctagaaaatagggaatcaaccaaacgaggcactgaaatggacacgagtcgaggaaatgagttattcggggaatctgccaaaactggttaactggttttacgggtcttggcaagccgattaaccggtttgtatcatgtttcccaaaaaatttcataacctactgaaaacatgtctaaaagctaccaaaccttccagaacacctataatgagcttacacaatataatcaaaccaatagaaaccaaaaaaacactctaaagtaaaacatgccattgatgacccaagtttgagttttcaaactcaaacttggtcatccaccacaataatcatcaaaaacagcagcaagaacttaaaatcaattcaatttaagcttagaaatcaagcaacacacatatcaaaccctaacaaccccttaatctcaaaatcacacaaccaaaccaaaactaaagcttgaaaaacaacaattaagtgttctagggttaccttagcttcaaaaccacttgaatccttagctgaattccaaaaaaatgaagagaaaaggctagtttccttctagttttgtggtggccgaacaaggagagagagagagaga

SEQ ID NO: 130247 - DNA, 757 bp, Cannabis sativa
ggtttaaattattggtttagaaatcaaattttttgattttctaagtatagaaaatcaaatttccctattataattatttgactagtagatttaataatatatacagtaaaaattcgatatcatatcaatatcatgaccagttgaattattgaatttttattctcaagaactaattatattgggaaattgcaatataaatctaaagaagatgaatttgatgcccttataaaattattcttaaaaatattattctttttttgttgtgtggttcctataacagcactaagaccaacatttcaaaagtcactagtggtgtaggagaagtgagagaaagaaaaaaaaaacataagtttaaactcaaaaacttttaaattattaattaatttgtactattacgctacactttaaaaaaaaaaaaaaaaactcagtactagttgtttgttgaaatactggcatactttgttttggtaaaattctggtttcaacttcaaaaagctttccgaaatttcaatcctaactttttcactttttcattcatttccacgtttaaaaaagaattcacatttgttttaattctttttctagttattttttaaaaaaactaacattgacgaactaaaattcaccaacaatattaaaaattaaaatttacaaaaagattaagtttgttatcccaaaattggcactctgacttggcatcacaagaatggtgacacgtggcatcaacttaaagcgcctggtcggatcaacatgccga

SEQ ID NO: 130248 - DNA, 1286 bp, Cannabis sativa
aaaagtataatttaaaataaatttattttattaagataaatttttaagtttaggattaattaaaaaattagtttatattttaatcaataatataaaattgtaaattatattaatgtgtttaaaaaagttaataatttatatttatataagtttagaagttaagtttactaatttgacattttttaattaaattaataaataatttaaataattaaaattctaaagttaaataagaggaatttatttatttattaatttaaatataaataataattaaatgaataaaatttttatttaaagttttacgaaataattttttaatataattttatgttggtttaattttattaccttaaaaaattaagaatactgaaaaattaaaaaaatataatttaatgtaattttgttttataaaagtaaatagttttattttatgaattaaataaaaaatttgtttaaattataatcaattatataaatttttaaataagaataatttgtttaaaaaattattaatttatatttaattaagtttagaaaatatgtttagtaatatgttattttttaaataatttattgtaattaaatgaataaattttttatttaaattttttaaaaaataaattgttaatattattgttaaacttaaaagatgaaataatatgtgtctaattcataaaatatttataaaattttataataatagttaataataaatggttgaaaagaatctaacaatgctttagtatacttataaatatataccatatgtgcatatgtgctttattcaactcctatttttaaccaagctgagttggggaatctaacactggatttatcatcagatcaggcatatgtgtcttctcccccacgggcttcgagaactcgtaacgataataattcagatcaagactttataattcgagaccttaatgaagatgttatggaataattttttttatgttttctaacaatttagtttaattttgagacaatattgtaatagaattaatgttaaagtaatttattttaagataattttaaattattaataaattttattggatttaaattatattaattgtaatttggtttattatatatttataattaattaattatttatatatttaaataacgttatttacaatttttttttttattatttttagttagcattagtggcggagcattagcggtgggacctcgccgctaatgctctttattagtttcgagacagcagagagcattagcggcaggggcctaccgctaatggtccgccgcaa

SEQ ID NO: 130249 - DNA, 1168 bp, Cannabis sativa
  modified_base (82)..(82): a, c, t, g, unknown or other
taataggatctgaaaggttgaattaaaacacaaccttttctccaccattactcttcgttaatcacaaaatcattgataatgngaaattcctctctatatgtctagaccaaattgagaaggtccgcacgatgttacatgataacaataaaggtgcatacaagtctagcgtgtacaaagataacttggagtttgaacgtctacccaaatactgaaatagggaacatctttgtaagtactctcactagccaacttgtgaattagttcctctaatgtttcaccgtccagggacccatagaagagctaatacccattaataagcatgtttaaaccaaattgagaaggtccacacgatgttacatgataacaataaaggtgcatacaagtctagcgagtacaaagataacttggagtttgaacttctacgcaaatactgaaatagggaacatcttggtaagtactctcactagccaacttgtgaattagttcctctaacgtttcagcgtccaggaacccataaaagagctaatacccattactttttagcatggccacccgtcgctcttcaatgatggtcgttgcgtggtaagccacgcaggggtagccactacgtgatttaaaaagcgaacaccaagctgtaaacttttgttacacgtaagtccaactatgtctaaaccacttgctaacaagataaacttcttaaatttattctttcagttccacatgcgtacaacggacaacatgccaagaaaagtccaaggtaaggtttgtgaaacttggtgaatagcaagtgactaaaagacctaagtctctacggttacttaggggcaaccataccgtacaatgcattaaactagcacaaagaacttatgcagagaaattgtaacacttagaataagctactaaacgtgcctctaagtcatacatgcatactttggcttgacaagtaaatctagaaacttacatgtcaaggccatcagaagatagacaagacgattgaatgtctctcataaaaggctttaaggctaaataatagaaatatttgaaaatagagggcctataggcaaaagcaagaacattaaatccttgaggccggatatgaaatcgattcacatgcacgaggccaaggccctgcaagaactgtatgttggaagttattttaccaggaact

SEQ ID NO: 130250 - DNA, 1196 bp, Cannabis sativa
atcatctcttgaagcaggtggatgatgaaccgttcagaaatcagcttcgtttgagcattttcctaactgacatagtctcactttgtcgctttggaatgaaatttggcgagatattttcttgtccaagataggccgtgacatttgggtttgtagtggtgtaggctggtgtggttgagataagggagttgagttgggaagtgactggtgaaggtaagtggaaggagtgtgtaggtggataggtagcaaggacattggcggtagaatgatttggaaagagttgtaatcaatatcaggcatatatatattggaaagatcagtagtagaaagggaggggttggtttgttgttttagtgtagaggaaggaattgattggttgattgagtgagtagtgggggtggagatcgtaggggcagtagagacaatgggtgagggggttgaaacaagagtatgagggtaggatggggattgctgaggtgaagaaaggaatgcatttgcaccaataacattgaagggtttgtttaacacccaggaaaagattggaatgaattagatatgatcggactagcctgtattagatttgattatacagaatataatcctgtgtttaattttagaacggactggagtattttagtaataaataattgtagcataaatttaacataataaaaatttgaatcataaaacaaaattaaataataaatttttgttaaaaaaactatcaatatataaaatataatatacatggcaattaaataccatgcttttacataataaaataataaaatattgttagtttttagaatttatatcagaatcgttgtagaagagaattaaaataagatttaataaaaaaattattaaatcttatataaactataaattcagatctcaatacaattataaatttagagatttttatagcttgttacctatcaaggtttcctcactatttttttatattacacaaatgaacatccaaatcaaaagaacttgttgaagagttcacaccagtgtcttccaagtggcttaacactctaaggatagagcgcactattagattctagttggatgaaaacaatttagtaatcacagtgtgttcttaactcgtgagagactgtgattgagataggcaagaacacactcatacacaaccaccataagagagaggggtgtgtgtgtgtgtgtgtgagaga

SEQ ID NO: 130251 - DNA, 569 bp, Cannabis sativa
  modified_base (241)..(243): a, c, t, g, unknown or other
aaataaaattaaaaaataaaaccccccaatttcacgacactgttctatatatacaatataaaactaagttctggactgttctctctaattattattttctgaattttttttttaatttttattatgatttatattgttggataggtagacacacatgcatacagcatataatatattaaatagctgcaattgtttctttttgtaatctaagtgtaaattgttttttaattttttaatcacnnnaataaaaataaaaattatgttcttaaaattttgttttaagatggtaaataatgtgttttataattaatttttaattttttaattataaaaacaaaaagtaaaagtgttctgcaactttaattttattttttgattttatttaagttggattcagatcagtgtgtggagttggggccgttgtctgtgtccaatattggggttggtgtcggagttttgtatgttaagaaactgattaattagtaatctctttgttagatgttaatcactctgttattaaccattttctctgttttagcattgtgtggtcccatcaatatgtaatcgtg

SEQ ID NO: 130252 - DNA, 606 bp, Cannabis sativa
  modified_base (552)..(555): a, c, t, g, unknown or other
ttagtgtaattataatatctgctcaaaattattttagtatattacattaaattcttattatgaaattttatttttaatttaaactaaaatcatatttacatttcatttaatttcgacaatttatttttttaaaaaaataattaagatatttgtgctggtgcgttttctatcgctggcaaaaggtaaagaaatttaaaaaaaaaaactaaaaaaaaaatatttttggcgcagtttaatgcgccaaaaatatgttcttgtgtaaatccttgtttgcgagaaagttttgtcagcacttctaacttagctatcataactttcccgtgaataatctaaatttgtaggaaacttttgccagtacagtatgtcgccgacaaaaaattttaaatgaggctcaaccgacaaataaattttggcaactcacatttcatcgacaactttatgcatcggtgaaaactacctatgccggtgaaggtctctttttctcaagcaaaactacccagcttccttgataaaataatgtcggtaaccttttgttggactttgtgccctaannnnaactctatttcaatgtaatcttttctattcaattatcaataaagaaacaga

SEQ ID NO: 130253 - DNA, 1883 bp, Cannabis sativa
  modified_base (1640)..(1641): a, c, t, g, unknown or other
tcctattcactgggacgaaacgggggaaaggactatgttcggaatagtgcaacggactaatgaagatataggaaagatcaaggccagaattcttgcctcttagggtaggcaatactaaaacgtaaaatttcatttatgccatatatgaaattttacgttttagtatgttttgtgcccatcaacattggaacgcggcgtttggccaatagaatcacattctaagatttttatagcaatggggtaatatagttcgacattgggaatgtcgatattatttggggtattttatttgaccgaaattcccctaggtgtcatggttgttttttggcttagacaatgactaattaatcacttgccatgggttcttgtttgtcctttattagaatattattagaattatttactgtgagtattattgagcattttactaggttagttttaggattattgaggattttactaggtgagtatatctctcgagccctcaagagaaaccaactgcatttggagcttctccagctcaattaaggatttcctagtaaaattttagtgattcaatccaaggtaaaactctctagcttctctatttgtggtttctttagttcaaagttaggttgtttgcttgatttgtaaataaggttttgtggttttaagagttgttttattttgtgttctgatgatatattgaggttatttgagctgttcttgttggttgttgtggtgattgagcaaggtttaagtttatgaactcaagctttactctctaatggtggatttatattcttgatatgttgggttgatttattgcatggattatgtttattatgatatatataggtaatctagatgttattgtgtggtttggaatcaaattgacgtgtgtagaaggttttgagtgttttctgcactaaaccgatcgacacgttcagtggggcctgtaggaaccgaaattttaggttgtccttaggaagccccacagaaccaaaattttaattggggaaccggtctaccagttgtggcattttagggaaccctttgtttttacatttttgtattattcagggcatttccatgtaattcatcgatagggaaacttttagtttcgtgtttaagtcccccaaaagttatttagtgtgtcactcatcatttttatgaataatatgatttaggggctcgtaaatggtcgagcagttgttccactcaggttggccgacacacctaaatttggaagtgaggtaagattagtataattgttgcatttgtgtataaatgtttagcgtacatgttagttgccatcagaataacatatcagggtatcagtgaggtgtacatagagttgctccgagataccaacatatatatgttagggaaatcaatagccatcagattagcatatcagggcatcagtgaggtgtacatagagttgcatagagatgccaacagatatatgcaggctatcagatagtatgaactaattgctaccacattagtatgactagagtactgattataggctggattcgcagttagtcatactttatcaataacgttcctaactcagttagtacattttgattaggtgtatggacgcctggttacggtctggatatatgtttatgtttatgattatgcttttcttnntgagtttgtcgactcacagatatggtttgcatgtgtaggtaagggcaaggctaaggttgagcaaccgtgagagaaagcggatgaatattgtacatgtcagaatggttagaactggagcgttcagtctatgggacagctgggtgttttttgtatagtcgctaggcaaaaacttatatactgtaaaagttttgtaatacttttgtaaacgggatctcagttttatataagtatgttaatttagt

SEQ ID NO: 130254 - DNA, 750 bp, Cannabis sativa
cccctcgctacaatgtgggtccgcccctgtgtgtacacttatttttgtatctattttgacatattaattcaaatgagttttttagttttaatttttcacataattacattaatttttacatcctttattaaagatatatatctaattacataattattttataattaaatgattaaacaaacgcataaaatctcattatttatgactatgaatatatacacataccttcaattacattatgatttttatttcaatgatgtaatgatagtaaacacatgactacacacgttctacttattcatgcatgtagcagaaaacttgactatataataaatgagaaatgttaaagggttgcttagttagtattcttgtgaggtatattattgttataggtacaattcaatatcaagtttcatttattattaatttaataaaaattatagaaaactactaattaattatataaagtgtcaccttatagtggtattaggaataggtactttataagtgccccttagccagatcgaccttaagaatgtatgggctaagaacaatttaaattttaaagctctcaattttaaaatatatatttaaataaatatagaaaaagaatgttatgaaactcaaaccttaaatatttgttgtttacaatttagttaattatacttagataaaagtctaatatataagacatttaattttttattttggataccaaaaacaagtgtgaaccctaaccacatgtctata

SEQ ID NO: 130255 - DNA, 937 bp, Cannabis sativa
aatcacgttaacacgcctatgctagttagggtgttacagaacaagagatggtgatcttatcctgagtgtccaagatgtgaaaagtgccatttgggctaatgtagagcctgatcatgttattgtgtgggtagtgggtcatctgaaaagaacctacctacagttaagaaggactgatgttaaagaagaaaagtgtacggctcctgccaaggtgccaattatgattcaaggggactcggatatcggtccttcggccgactcaagttagaattttatgggcaatattatagttgctttttcaattgatatcaatattaaacattgtacactcaatgaggggatatcaaaagatttgaatggactgtgcatgtatgttatttagtggtagttcatgtgacaggatagacagattagagaaatggcaataagagttaaacttgttgatattcccaagtggaatatgggacatgagtagctaatggagtattcatataattgatttagggaaacaaaatcttctaatgaaaagtgatctagtgttagcagaaggacaatttatgagtattgttcgaaaccctaggtgaattaaaaccgacgattgtgtgtgtggatttattcactaccaagggcatgagtcaagctgtgaccatcaaagcctcgtgatatatgaaggaaagaccaggagttgtataaccccacgtcgcttgggggaaacgtcgtatgtagtgattttgagaatatgtaagtgtgggactacatagtaattgaggacttgaatggattgctttggactacttataatagcaaggtgtatcttgtttcgtagcccaccatgaaggaactccacagttaagtgtccttcacctggggtgattttatttaggaagtttccccacgaagcattcgaaccagaacaaagcacgttggaaacacttggatt

SEQ ID NO: 130256 - DNA, 1046 bp, Cannabis sativa
aaattccatatttaatgtttttatttgtttaggtagttttatttgtcactgatgtcggaaaagtcaccggagtttgctgtcggtgccaaaaaaatcaccggagtagcggtcagtaccggaaaagtcgtcagagttggtgccgacgccagaaaattcgtcaaaattgggattgtcgccggaaaaaacactgaaaaatcaccaagaaacttgtttcttgaagaaaaaatcggtttcttggtgatttttcctgtgatttttctggcaaaaatgctaattccgacgactttttcgacgccggtggcaacttcggcgactttctggcaccgcagctactccaacgactttttcaatgccgacagtaaactctggtgacttttccgacacgagtgacaacttcggcgatcactgtagtttcatttgttttatttttttaaaaaataaatataaagggaactttaatattttttatggtaatttaattaagtttttattttttatgaattttaaattcaaattttctttttaatattttatatggtttttttttttaattcgattggttagataatataatatttagtggcatttactttttatgtcatatttattataaccttaataatttttctcatattttttaaaatagtcctttattaacttaaaaatatttcttaatccaattatgtattaattatcaaatttattgcattgggagataaaaaagagatgacaagcaaatgaattggcccaagcccaactcttctttttctccgtgtcatcaataaatgataatttctttaactttttgtgctttgatgactccaactgaaatgggccaagcgcaaaccaagttcaattacaagcatacaattcaagtggaataattcacttcattacaaattcaacgtgggtcgggcttatctttgtggcaataactcaagggctatttaaaaaaattatgagaaaataaaaataagttttgatatatatggcataaaaacttaattactatgacattttttaaaaaaacttacaaatatgggaaa

SEQ ID NO: 130257 - DNA, 1204 bp, Cannabis sativa
  modified_base (26)..(57): a, c, t, g, unknown or other
  modified_base (516)..(517): a, c, t, g, unknown or other
ttggattgtgttgtattgtattgtannnnnnnnnnnnnnnnnnnnnnnnnnnnnnnnttggtattgacttgtattaataaattgtctaaagttaaaatttattttcaatacactcgaccccaacaccaactatgggtccgggttcgcgtctgagtcccgggtctggggttcgggtccgggtctgggtcttgagtctgggtctgagtccgagttcggggttcggggttagggtctgggtcccgagtccaggtcccgggtttgagtttgggtctaggtccggggtctgcgttcgggccctcgtctacgttcgggtgcgggtccgcgtctcgggtcagggtcctgggtttgggttcggggtctaggtccagggtccgggtctggggtctggagttcaaggttcgagtccaggtccgggtcccaggtcccaggtccgggtcggaaattggtgttgacctcgaatcttttgcaaatattataatacaaactaatatagaccatttgttatgtattaaatannacaacatacattgtattaaaaaatttggttgtaataattaatacaatatattgttttatccaaacatagtcttatttattatttaatataatacgactcttatacagcataccaaacgagcctgaatagtttataaattacattaatcattgtaacatgttgaagactagtattcaaaaaaaaatatcttcagaaatctgtaaaacaatcattaatcataagtgatatgttttatgaatccaactagaaaaaaattcctgcataatgagtataattgatttgatcatttcatgattgtgttgaatgattggtaacatggatgattttcacctcatataacaggcctagcaaaccatccatccaagcaagaaaagtttaaatgatttgatcatttcatgttaccaatcaacagaatcaatgctctatccattccattctacattaccttattaattatataaagataaaaacacctttctacaaattcaaaatttgtaggctactagaaactaagtatggcaaattaatgaatgaaggcatatcattaacaatgtgatagaaggaagcaaacttaatacatatgtacacatacaaaaacagacataaatacacaataacattcttattatcagagctttgacccagccggaagtgtggtcgacgaggacgtcggaccccgtaaggggg

SEQ ID NO: 130258 - DNA, 925 bp, Cannabis sativa
aatatgagtttaatttcaaaaaaataatattattattgtttaataataataatttaaaataatattaattccaatttttttttaattttttcaaaatcaaaatccttaaagcttgatccgatttcttcttctatcatggtccattgggaaatgaaaatagaaagttgcagagaatatgaacagtccaactctctctagtcttgtcaataattaatattaagaaattattttcgaaaaattaaaaattaaaaaaaaaaaccaactagtttggtgggacccaccacaccacaccaccactctctctgtctctggcttccttctatggtacgcttttgagttttccctcctctgtgtgcagtctcattcctaattaccgtagacactcaataacattttgccacgtgtcactaaaaagggtactttagtagttatagcctcgtgtacggacaaaaggcacgtagtggtagtgggcgtaggataaataaaaaaaaggaatgtctgtcctttgatcttatctaataaaaattacttttcttactacgttgtacacgctctcgttgaatgacacgtggcgagttaatgagctttgggttatgcacgtgccactcacgtgggtagaacgcggcggttgcaggctttttttactctgcgagtgtgtgtgtgtgggtgtgagagtatttcgattcggtaagacggttacgtcactcccctcacgccatgcttacacaatgactattttgcccttcactgttttttaaactttttttttggtggttttttgtttgattttgtagtttttaattttgaattatgttaagatttgtttttttgaaagaaaatggtaaactttattagaatgaactttcaaccattacaatagataaaagatcagcaggagcagtactctcactgaaaatacgatctg

SEQ ID NO: 130259 - DNA, 1236 bp, Cannabis sativa
attaaaaatatactaaacttaatctaaaattaatactaaaaataaactaacacatatattatataccaaaaaattttaattttagaagaaaaataaatattatatacacaaaataatcttacagcaagcaaaaaaattctacaaattatatatttgaacctaaaaaattacaaaacaatttaagaacaaaaaaaaatttcacaatcagttttcgtcgaccacgaacagcgacgaaccccaatccttcgtcgacaatgaaccactatgaaccccacagctcagtcgacttcaaacgaccacgaacctcgaatctttgaagctctatcatccataaaataaccctgattctcgaagctctaaagctgtcgtgcacaaactgccttgaaacttgaagctccatcgacacgaaccttcatcgacctgaggaaatagagaaagagagagattcacacatggacgaagagcacaaaaaaaaaaagagagatagaggtagatatgagatttgtcggacgaaacacaaaagagagtggcagatccataggtttttaggggcaaggattttggttctgttgttcgttttgacagccagtcgccggagttagggttagctctgggttgaagaaaaaaaaaaagaggaaggagaaggaggcgtagatagagagaagaaagaaagagattgtaggtgagtgtaatagagttttaagttaagtgctgagtgtaaaggaaatttattttccttttagcaattttttttaatttttattaaatgcccttaatttatttcaggcgtgtcacatgcctgctacggtttatttttttatttatgtatactctttttagaaaacaataaagtgcattaataaatagtaataactaggcgtgtgtgcattattttttccaaaaataatatatttataaatttaaaaatatattaattacagttagttttttttttaaaaaaataatggtcatgatatagtgatgcgccagaaatgttgggatatatttattcaatcacgcatggcgcgtcactataggtcaatatttttttaaaaaaatatataataaaaattaaggaatttaatctttagtgacacctcatatttttagtgacccacattgtaagttactaatactgatctttagagtctttttgtgtgactcacccctaatctttttaaagagtgttactaaagggtaagattgtagtagtgacattgttgggttttatgccct

SEQ ID NO: 130260 - DNA, 831 bp, Cannabis sativa
aatataacgttgtatatttgagttgagtaataccttcaagaccaatatcccaaccctctatgacttttcctacacctgagattgggaacagaagttagagtacaaaacaaatttaaaagagcagattgattgtagcattcattatacctaggcgaaatttgtaaggatcactgtcgacatttgagtcaacaacttctccattcttcagctttccaacataatgtacacttatctgaaatcaagccaaagttgtttcaaccaccgtatttatgtgaatacttctagataaggctaacgtagaagaaacagtcattatttgatcaatcaacaatagaacagaagaagtttacccttttcccagaaacagcaactttcccatctggttcacccaattctagctcttcaataatcaatccattctgaagggatcgaacctgtaatggtttagcttctttattcttcagaaaagtgttattttcttctgtgttgaccacctgcccattctcttttactttactctttttcttcttcttcttcttaactttcttaccttcagattggtcttcgtcagcaaatctgtgggaattgcgatcaaaactcatacacaagttgtccaaatatttttattgcttatcaatcacatgaagagcaaataaaagtaaagagaaccatgatttagttattatggcaaggacctattttgtgttaaatgcaagacataagacaaagattgaaaagctataaaatggctatcatcttatcagcaaaagccgtaaagaactcactgatcattggctggttcccaaatttcctcactttttgtaagatctt

SEQ ID NO: 130261 - DNA, 744 bp, Cannabis sativa
atatgatcatatatatacataatatcaaatcgttatatataataaagaaaagattgtgatattttttttggataaagaaagatgattgtgatgttgatggtgacgttgcgtcagaaaagaaaatgagaaaataaaaaaaaaagattgacctaatgtgatgttgcggtagagatggtggaggaaagaaaagagtgaatacttagtatgtaaagtgagaaaaaagaatgagagatatatattaaaaatactaagagccaattatatatctagtttgctaagaggtattaaatgacaaaaaagtgattaaaaaaataaaaaaataaacccacttagttgtgcaagatctaacagaatcatatcatagggtctattaagatcaaagaaatgggcccaaacaattaaaataaatcaataaataaaatattgaaacagtattaacaaaccatttgcaatgatacattttacaattaattaaatgatatgttttaattttagtgacagagaggaaattagataaagaaacttaacaaaggatcctattccatctaagataaagttgatgtgattaaggctatcaaagcattgcgtagttgccattgagagtggacaaaggtaaaacaatatgagtcgggtctgaaacatatttccacaacatagaaatatggaatatatcatgaacaaccgataatgctggtgataaggctagccgatatgctacctgcccgaccttctcaagtatctgaa

SEQ ID NO: 130262 - DNA, 836 bp, Cannabis sativa
tgctggactaataacacatcagctgatcctatctctttggtgcaacacaaccttgattcatgtgcaaaaacattgcaacattggcacattaaaaaatatggcagaaatccaaaaaactttggcctcccttaaaaatgctcgacacttatcaactgatacaacttcagccataatacacaatgaatcaatccttgatgatcttttagaacaagaggatatatattggcaacagagatcaagagttgattggatgcacttaggagataaaaatacaaagttctttcattcaaaagcctcagccatgaaatcacataataatataacctttctacaaacagaaaagggtgttaaagtgacaacaaaacaagatatgggagaggttattcaagtttattttgcaaaaattttccaatcaagcacgactgatgttgatgctcttgctgcaactgtcaacaaaattcctgcaacagttacagatgacatgaatcatgatcttctcaagccatttaatctgattgatgttgaacaagcactaagtttatgggatcagacaaatcaccgggtattgatggcatgtctgccatgtcctatcaaaataattgggatgtggttggcaatttggttacttccacagttctaagtgtgctcgatggtggggttgacccgacacctctcaactctaccattatcactctcattcccaagataaaaaagcctcattacatgaaaaactttcgtccgagtagcctatgtaatgtcatctctaaactcattaccaaggtgttagtggctcagctaaagcctattcttccaagtgtcatctctgaaacacaaag

SEQ ID NO: 130263 - DNA, 1421 bp, Cannabis sativa
  modified_base (42)..(68): a, c, t, g, unknown or other
  modified_base (1384)..(1388): a, c, t, g, unknown or other
atgcaacataaaatgttaattctgatctttattaataagtannnnnnnnnnnnnnnnnnnnnnnnnnnttagggcataaaacccaaaagttcgtcccaatgaagatccatccaaggtggtccatgcgaggggatcggcctataaatacccccgaagacacacaaggcaggggactttttctcttttgtcctttggcttttcaccttaaaaccgaagattaattctttgaaaaatacattactgcaaccccattatcaactccagaatattcctactaagcttcattttcttcaagagaaacacggtgaataggagtaaaagtccatccttttttatttgtatgaacaatcactggccaaagagcctaataaaatggactcgtgcactaaggatatttaacgcatagaccacgtaaattttttttgtttattattacttcatttatacattcattactttcttaagctctaaaatattaggttgccgaaaaactcggtaaacaataagtgttccaccttctccattagtatgaggccttttgggaaggtgcccaaaaacaaaaacatgagggcttaggcccaaagcgaatagtatcatactaatgtgagagtcaaggcgaggtagaagcccgacaaggtggaagaatggggcccaacaagtggtatcagagctaaaggtttaggagcgcttggatagtttgctgcgtttgcgatgtgtgggagaagccctcaatgtgatgacctcacgattgaagatccacatggtgccttgtattaaaagtctacttgatattgaggtagtcaaatggtgtgtcccgttgataattatggcagtacaagatggagatcggtgttaggacctatgtagaaagtcttcctgatgacaaaagtgatggtcaggagagttccgttggtgatagcggtaaggtggttttgctagaggggaggccatgagtatgtggtccttggtttgaggggaggattgttggggtatcagcccaagttccacattggaagaatagacaaaagttgtcttgaatataagtgttccaccttctccattagtatgaggccttttgggaaggtgcccaaaaataaaaccgtgagggcttaggcccaaagcagataatatcatactaatgtgagagtcaagatgaggtagcggcccgacaaggtggaagaatggggcccaacaagtttgaataggtactcactattaaaataattatataaaaatgttaaaatttaatattttaacaaagataaaaaaaatgataaacttcaagcgcagcaaaataacaaagaaacgcagcaaagtaatttactcattttggtaaaactaccaaacccacaaagagatatatatttcacttatcacttcaaannnnnatatactctctatctcaatctctccacctaaat

SEQ ID NO: 130264 - DNA, 1227 bp, Cannabis sativa
tatggcgcacctcacacttcacacaaactgcacacgtggcaattaattgatcgacttggctctcatgctcggcttcagccgtggctcatcatgggcgatttcaatgattacctctctctttctgacaaaatcgggggtaatatgtctcgtgctccatctgtgcatttccaatcttttattgataagcatgaacttcatcctctcaccctattaggtaatcccttcacttggacaaatcgccaaaagcagcccaatcatactaaggaacggctagactagtgcctatctaataacgcttgggatgctatccttccagattcccaactaaatcatggcgacttttttggatctgaccatcggtctctcattcttaccctacaatttatgcaaggtcatcgtacccaaaatcctcgcttcatctttgacaagctttggatgactgaaccgggatttgaggattgcattcgtgatgtttggaccgagacaaatttggctccccactccaatcctttaatggacctaaaggaacgggtctcaacatgttcatctcgtctcaagctttggaaaaaatccttaggcccccgctagctacccaaattcgtaatgtccaatctcaactcaaaattatcaattcattgccccaatctacgaatgatcaattagatcaaggtaggaagcttgaagcggagttgggtagtttgctgcaaaaagaggaactttattggcagcagcgctctcgcgttacttggctcaagcttggtgataaaaataccagatacttccatcgcatagcctccacgagacgctctaccaataaaatactctctctccagcggttggatggcacttgggctcatgatacactttcaattttgacaactatcgagcaatattttaccaacttatttcaaagccaattacatgataatgatgtcattgatcttgttctgtctggcatcactgagcgccttactccggctgaaatagatcttctgcaggccacctttacagctgctgaaataaaaactgctacttttcagcttgctcatgacaaggccccaggcctagatggtttcaatggcagtttcttccaaaagaattggcatctgttaggtcaggacgtcacagctgctgcgctcaactttctaaatggggatgcaaatctatcgacagtcaaccaaacgcttattgttcttattcccaaacggccaaatcctgagcaggtca

SEQ ID NO: 130265 - DNA, 869 bp, Cannabis sativa
  modified_base (61)..(66): a, c, t, g, unknown or other
taattttccatcgttttagaagtttatatttaggttcttaaatcaacatacttgtgagtannnnnnagttcctggtaaaataacttccaacaacaaagtcttcaccggcctccagaatttcactggcctcagatactagttgtccatcttcattgaatccactaaagggcaacctctgagctgcaccttttacctcagcttctgatggagtattaggacggacctcgccctgatcttccaccttagcttcagatggagtatcaggacatacctcgccttgatcttccacctcttagacttctgcatccccaacaaggtcttcctcctcagatgcaggccgggcctattctgcgctcggcattgtggcgagccgatctacgtgtgggtcagataaagaagacttctgcacagtctatttggttcgtgccatcatcctattccttgacggagtctagttgctatgtctggcgatggtgacgacaaaagtagcaatgggtgtacttgtggcagcaggatttggatggcctataggcaaagtatcaattgtatctggtcgaacaatatacgtccagttggatggaagatattgcctccaccccttcctaagcttccaaatgaaacttctgtagccttgaccttcgctctggccagggtaaaaatgttttgcacttcacgttctagggaaggtgtgtgtttgctacttatctcccaatctttgaagcatgaattggagagaccatcactagattaagagggactagcacggaggagaggatgatcctcgtcagaaagttggagcagattctggtcgatatgatgttcgtgttgggttttatgccataaataaaactctttacaatctgattagt

SEQ ID NO: 130266 - DNA, 896 bp, Cannabis sativa
aaaaattattcaagtttatattttttttaataatggggtgtatttataattttatggggtgcaaatataactccccttaaatttatatttatgaatctatttttttttaaagtgtaaataactttttttttttgcatgtaatgatcacactttttctactctattgtgatttgattgttgcttctctcattttcttttcagtttatatcttcaaaccaactcacactctctatctctctatttcatcatcttcttttccttattttttctttccttttgttccattttcttctaatttatttcttctcttttttttttctgcgttttgtaatcaattgaaggtgttggcattacttttgtgttcagctttgttgtcgttgtctcttgttgttgaaggtgatttttgttttttatgatttagttttattttagggttttttctctcggttcgttttagtttttggaagtgatgtttgtggttctttaatctttctaatgtgtgtattgtgtgttgtttgtgtgatgagcatttgaatgtgttgatttttttttttttgtttctatagaaaatgctttatccgaagtgattattgtattagttttttagataatattttatgtttatgcgtattgtgtatttttttggtttagttttgttatgtgtttagtgtttagttgttttttttattttattttttctaaacatcattttcatcgatttgtttcggttatgattagtgttgtatttattttgtttttaatgtttctgttattatttttttttaatttggtagaaactgatttttttaagggaaatttgacaattaatgctaaaagattacatatggttttaaaatattcctcctcactatacattttttaactatacttttaat

SEQ ID NO: 130267 - DNA, 1156 bp, Cannabis sativa
aggtatgccaagaaacctcaacgttgggaccatgtgtgtggtctggtttttcagaaacggtccaagaaactcgagccattgttcacgtgccaaattcctttttcggcataacttaagtttgaagtaatctttttgggtgattcaaaagacaaaatttattatttttttattttctttccaaaatttaaattttaaaattgctaaatcaaaataaatttattttaatcaataaaagataaatttagattttaagatagtatattttaatttttgtcaattttgtttattatctttaatattttttttgatgaatcaggatatgttatattccacaaatcgattacaatcaccaattacacaaagctatcagttccaaaaattagcccactacaatagctcctacaacagacactgcagtagccccataccgaaaaaaaactgctccatatgaaaccaacagtcaatctctattattacttacaaagactcaaaccattccatatttatttgagcaattttcccttccctaacacttacaattctatttttaataatgaattcagctcttgaacacatctattagtggtctgcactttgtgattccaaaagcaatcatttctattgctccaacccttgtaaatcagacccacaagcatggctaaatacactttcttcctaaattttgatttttttacatctaaagatctaccttagtagcttcttcattgagtatgtacctatcctccattgcagccagtccttgagtttatcaagacatttcttgctgaattcacattcaaagaatatacgatccacttgctctgggctatcaccacacagaagacaagtatcttcggagcaaattttaaagttcactaacctgtcccttgtttggagatgattttgcactgccagccaagctataaagctgttttttggcatattatatctgctccacacctctcggctccatctcactttgatctgatcttctaacaaaactttgtagcatttttggatactataaacctaatccataagcagctggaattgagggatattcttttatttttccttgattctaacaatctgtttccaataccaactacttacaattgatgccttatagtcccaccagtttttttttttttttttt

SEQ ID NO: 130268 - DNA, 863 bp, Cannabis sativa
agtggggtgtggtatgaggtgttttaattttttttaaaaaaactcttttttattaattaagaggaattaacaaaacatatgtaacaataaaaaatttatatctgtgtattgtatttatttatttttattatgacatattttctttaaaatatttatttttcaataaattgaaaattatttgagcaaattagtgggaatggcataattgtaataaaagtatgatatcatgactagttattaagtaaaattaagtcttgttgaaaagatgacatttgtcattaaattaactagagagtgcaaaaaagggtgtgatagagagtgttcttagcactactctatatattttctttatttaagtataataattgacatatcattatccactgtccattataacaatattatttatacattatttttattacaccagttatataataaagtttttttttttgaatgaatttatataataaagttaagtgtcacatgaacatataaattagggtggagctgacggtacctagattcatggcccataatttattcttttattttttgaaaccaaattaagcaaattatatttatttacatatttcataaaatgtaagtgatcatatacaatgggtgaaagtgacttataaactttctaggagtaaggggttttattcctctgaattcaatctttttttgttgtttttccaaaaaaactacaacgtatatgtatttatggaactagaatcagaatagaagaaggtttataaagggaaatttgattttctatgcttagaaaatcaaaaaatttgatttttaaaccaaaaatttaaaacctaaaaaaactattccttttttttcaaaaccccaaa

SEQ ID NO: 130269 - DNA, 867 bp, Cannabis sativa
gaagcagttggagtaggtcggcgttgacggaggtggcgtggctggcaatcatcgctcggactgagcttgcatttatcttcagaaactggtcgagaggtagctccgactcccatgctttcaccaatcggaacttctgatcaaacaatggcgacaaattagtgggtagcgtctttacaatcagtaggagttggggccgatcgtctggttggctttggagctcttccatttttggtgtataattgggaaagaggaattgaagaagatctgcaacaaaatttattaattttaaatttaattgaccaaaaccaaccacccataatattccattatcttttttttacagcatcatggagatcttttagttaaatgatacttgaatggtctttaacagctttactttaaagaattctggataatccgtaattttgaccatttttaataactacttacccattagaccatctctaaagaagtaaaagttgtaactatatttttactaaaaaatagttttgtaatattgtttcaaacttttatggttgtgatttaatatattattataaattttaatatgttatttaatacttatcttaataattttttttttttgataaaatcttaataatttatttaaaatatatcaaataattatacataattaaataaaatttaataataataatataagttaaatgagcatattagctaaaatttaatgataaagtattaaaaatagcaaaataataaatataaaacatagcatttattagggaaatttacacagtttactgttttttcccattttctttcttttatactgttacacgcccaaaataacttttatactgttttttttttttcgaaattaac

SEQ ID NO: 130270 - DNA, 1252 bp, Cannabis sativa
caaggggatcctatgtctcctttattatttgttttggtaacggagtttctaacaaggagacttcataaagagactgaaatggagactttcaggtatcaccccctctgtaaatagttgaatcttgtcaatttgtgctttgcagatgatcttttactgttcagcaaaggatctgaggcagtagtcaaacacctcaagattgctcttgatgacttctgcaataaaacaggtcttagtgtgaatctggccaaatcccagatcttctttggtggagtgcaagcagctgagagaaaagagattgctcagttaatagggctcgaagaaggaaagtttcccctaaagtacttaggagtgcctttgaggcctactaagtggaaaatggaggactgtggtgttatcttggataagattaagaaatatttgcataattgggcttccagacacctctcctatgctggtagaatgcaattgattcaaacggttcttctggggcttaggaactattggatgaacatcttcattcttccttaaagcttagttaaggaagtggaaaagctttgcaaatttttcttatgggggcacaatggcaaaagaagtaagatacatattgcttcttgggacaaggtttgtcttcctaaaagctttggtgggttaggtttcaggattggagctttatggaaccgagctatcttagccaaattcatttgggctgtcatgcaaaaacatgatgttttatgggtcaagtgggttaacacagtgtacttgaaatgagaggatatctgggcatacaaacttcctactgataccagctggtactggaagaaactttgcaatttaagatctgtgtttagccccgataagctacaggcagcaagcatttctagtaaacttaaggttgctcgtttgtataatagcatgcttaagactgatttatgcttgaacacaaatgctatttggtgcaaactttctttgcccaagcacaggttccttctctggcaggttgtgaactgtcagttgcttactagagatcagctcccaggatttaatatcttcatagctgactccagctatcctgtctgtgggttgcagctagagagccacaatcatatattttggaatgttgttattcaaggaaaactattgctgtaatttttagttggcttggtttcaagggttggtccagcgagtttgaaggttggcgaagttggttgaagacaagaacatgtagagtgaaggaggacattctttatgcaac

SEQ ID NO: 130271 - DNA, 828 bp, Cannabis sativa
aaccaagaattgccgttagataggcacttttaatatatgaagatatatatatatatatatatataaaagagaatttactttgaagaggtgctatgacattttctacttctattttatggctttttcacactattacttttattatacatctatatatacataaaatatagagaaattattctatatattatttttttaactttttctatttttaaatttacggtttgggtttctaaagtggtttctcccatagtttttatgtgggttgctatataattttttgttgcgatttaggttgcagcgctagttgcaatagaggttttttatgtagaattctgtaaaaatgcaaaaaaaattatttcaaagtgtaaaaatgaaaaaaccactaaattttaattttaatgttttataattttaaactccaaaacctctcatattaaaaatatttattcattattgtaattaacattaacatggtaaaatagaatgtcactttttattttatcattttttacattatttattttaattatatatctatatattattaatataatgtaacttagctttaatcattaatttcaatcataacctctaaaattaaaaatatataattcatttttgtaatcaacattaatattattgtagaatatagtaagtctctttttttatattaattgatatctattatgaaattaatttctataatctttaatattatcaatatcatcaatcaatcaatatatataaaggaaagcattagggagttgaggtggcaatctatatgtgttttctatcctattctttattttcttaatttttatcatt

SEQ ID NO: 130272 - DNA, 666 bp, Cannabis sativa
attttgtttacaagcctttgataagtagcccctatatttttcagtccaaagggcatgaatttataacattacaggcctatgtctgtcaagaagctcttatgttatttgtctggtggatgtatttttatttgattgtaacttgaataaaagtccatgaaacttgggatctcatgaccagctgtaacatgctctttatttaacaacctccttttctacagtacagtttagaagtttggatctatgttcacgacatgagaaattactgatggatctatccccaccatgtgttcatgcaaccaggcaaagatatcaaggttgtccttcaaaattttatcaatgcaaattttatttctagcgctaaacctttcctgatcttcaatttcctagtgagaagggtggggtcaatctttacttcttctaactcctctaccaattttaggatccccaaagtaatgatctaaacttgcctcctcactttggattgaacttcattaaccttggccagactcttggttagagctcttggcaggcattttttttttcttagctttggacaaagccaagttgtagcccttttttgcagattttttatatccccttaggaaccctactccatgtcttgttgggaactttaggcataagtggtaaatttgttgggttttatgc

SEQ ID NO: 130273 - DNA, 1170 bp, Cannabis sativa
  modified_base (770)..(770): a, c, t, g, unknown or other
ataaatatcaaccattagatatttgatctaatggtcaagaataaaatacacatacatgggtaatacccattaagagcatacccatacatgtatagtatagctaataaaacctaaaaaaagactatatataatataagagctaatatgattttcttttaattttatttttatacattttcataatgaataattaaatttttattatatttctctccttcaatcactagctttaattttttattatcttaactattttgaaataaattacatacatttatattaattttagtgctgtcttttgattttttttaataatttacacaatagaacgaatgcattgaagattatatattagtatttttttagtaattttaattatttaactttctaaaaaaatatcacatacctttatattaattttttatcatttacaccatttaattaatatattgaagatgatatatgtactattttttaattaatcttaattatttaactttctaaaaagtattaatttaagaagtttcttttgttattgataaatttaattttgaattattaatatttaaaaaatttgttttctaatttatttatttatctatatatttttatatctacatataaatttaaaagaataataagtgtggtgacttaatctccttttaattttttactttatctaatttgcgttttttttataattcttttcatttaataatattaaggaaaaaaatataacaatccaattaaatatatactcagattttacnacttcttcatttatacaattaactaaatcaataccacccatgcatattcaacttccacctaaatcaatgataaatttattgactactatttatatttttttgtccattgaattcctacagttttttttttctcctaattatttattttctaattaattgatataattaataaatacttttcaacttctaatcattgaaaatagtatgtatataaatagagaacaacacaaactaattttacatgaaaagtaagtatttttaatgactattttttatctgttatatatatataatttttatatataaacaattctctcttgtttaaatatatttttatcctatttaaaattcttctataaaaatacacatggagattgcatgccaaaaaaaaaaaaaaaaa

SEQ ID NO: 130274 - DNA, 894 bp, Cannabis sativa
gaagaaaaaaagagggactagagggttcatgatgataaaattagatatggagaaggcttatgacaaaatggattgggagtttattctattgatccttagtcggctaggattcactgctccatttacgaattggataaagtcatgcatagaagtaaaggaaataaaattgttgctcaacgggtccatcgccggaaagttcaaaccagagcgtggattgagacaaggagaccccctctctccttctctattcatcctagcggctgaaaccttatcccgtctacttactcaacaggagaacaggggtcgattaaaagggttccaattgggaagaagcaatctctctatcagtcacctaatgttcgcagacgatgtcatcctattcggccaggcctctatgaaggaagctaaagttattctggattgcctaaaccagtactgcaagtggtcaggacaatcgatcaactttcagaaatcttcgatcctcttcaccagaggcatcccgagaagtaaatcgcataccatatcccaattcctgggaatgaagaaaatggccaacaatgcagtctacttaggtcttcctctgttcagatcaaccatacgcgttaaggacaataagtatgtagttgataaagtccttcaacgagtgcaaggatggaaagctaaacttctctcaagcgccgggaagatgtgcctaatcaagtctgtaggttcgacggtgtccaactatgtagcctcctcggatatcataccaataaccattgctaagaaggtggacaaagccttacgagatttttggtggggagactcggtagggaaaaggaaaatgcactcaatagcttaggaggtgctttgtcgacccaaagtttgtggaggtttgggatttcgtacaactga

SEQ ID NO: 130275 - DNA, 530 bp, Cannabis sativa
aatttgggttttgggggttaagtgaaaccaaaatgaaagttttgggagttttgttgctatttaccctaattttaaatataatagtgattacaagtgtgacacggtgatgacaacgacttaaactttattttgtgtttcaatttatatagctaaaatataatttttgctttaaatatattgtaacttttttattcacatgacatgaaattttatagcttgcagtgttgaacaaatttttaataaatcacattgtttttttttttgttgattagaaagatttataattcaaatatttacaatgattttgaaaacatgtttttgtttatttttatttgatttgtttgatgtgtttatttttgtaaattatcataaacgaaatgaaaaatattccagttaactagatttactaaatattattaaaaatatttatttatgatgtattaatttatttttataataaatattaactaaaaatatctaagtaattttataataaatattttaaaattttaaatttagatttttatttt

SEQ ID NO: 130276 - DNA, 507 bp, Cannabis sativa
aaacaagtagaaggtgcatcagtacatcccttttaaggaggtgcattgtagaatcaccctaaaatatttggtgcatttctcgtacaatatactcttattaaaataagcatttgttattggccaccaattgtacccaatactttttataaatggtggcataagattagttagcaatataatctaaaagttatttttttaagttttagaggactcgctacttaattacaccaatagcggtatgacacgaaagaaggtgctagacattagtagtgccttttagcaattctcttttaaaatagatgcattgatattaacctgatagtgatggtgcggtatcgaaagatggatactaatattgggagactgaatctgatgcgaaaatattcctaccagtgctatctcctcatatacacagagtactcgaacatagtaatagataggggtaacgactagggaacctccaagaacagtaacttgaagggaagctgtgacactaaaggatactag

SEQ ID NO: 130277 - DNA, 1777 bp, Cannabis sativa
  modified_base (851)..(851): a, c, t, g, unknown or other
caccaatagacgagaaaatgctaactttaaagacccgaaacataagctaattataacctaacactaactaattagttaagtggtttatacacatgaaccattaaatatagcaatcaacagtcaaaaatagatgcagtaacctgctaatagaacacgggttttgaatatttttgttgtcaaaatttaaattttaaatgttaattgctagctaagtaaaagtattaccaatttcaacacaatttacttttacaaataatagtaatactcttattctcaccaaaaagatgttgatttgaatgtccctgtcctaatatcaaaaaataattttgtattattattatttaactttttcttatcataagagtacctactattattaaaaacaatggtaaatagtggtataaatacttaatattaatttagattttatacacttaaatatcttatttttatttttagaggcaaaaatacccaatgttacaattctcttacacatgttactaccacttccgctaacttataaatatagacatgtggagggtccagatgcattgcatttatttttttttattttaaaacttaatattcttaatatcataaactaaatactacttgtttcaaaaaaaaaaaaaaaactagttctcataataattttcacatatactgcattgtagtggtgttcatcaaaccgctcaaactgcccacaaaaaaaatatggtttaaaattctttgtggtgcagttgcagtttgaatttttcctaaacatgcggtgcgatttgcgatttttaattgttaatatgcggttcaaaccgcaccgcaccgcatcatataaaaatactaatttttatatntatttaggtccaatatgtgaatgcccaacctaagcccactaattattgtattgtgtaaacttgaattttttttttcatatttatttttaagccttattttatttttgacaagtgttgctcaaattttgttgtatttgtgatattttaattatttagggatagtccaaatcgcaaaaccgcataaaccgcaccgcacgcaccgcactattttttgcggttttttagtttcgcggtgcgggtgcggtttgggaaaatgaaaaaatcacatgtgcgagttggtttgaaaaaatagtaaaaaaccgcgaacacccgcaccgcgaacacccctactgcattagttcactcatttatgataatttagttttacatctctctcttatttttttttaaacaagtagcatttagtttttgaaaaactaattagcctaaatattaaaataaaaaaataaatgtaatgcatctggaccctccacgtgtccatatttatgagttaacgaaaatagtagtaacggatgtaagagaattgtaatattagatatttttgcctccaaaaataaaaataagatatttaattaagtgtataaaatctgaaacattaggcatttatgccgtaatttaccattaagaacaataataaaataattgcatgtttataaaattataatttaaaaaaaaaaaaaagagttttttacggttaaatcgcctcaactattatttcacttgtacttaaccctctaagtttaaatttgggtggtaaaaccctcaaactaatttaaggtgttgtttatttttcataattaactgctaacatgaactttttatgtgtacactcttgtacacgtagcatatttatattagtacacatatgtgacagtcagtagtcatgtgatccgtaaggggaaataccgggtaagctgtgcaatccc

SEQ ID NO: 130278 - DNA, 1051 bp, Cannabis sativa
aagactcaacatggcttgcaacctataaggaactctaccttatccatatctcgatacgtggcccctataggagctttgtcttattctttttaccgatactgtttttgcagggccttggccttatgcatgtgaaccgatttcatatctggcctcaaggctttcatgttcttgcttttgcctattagacctctatttttgaaaactattattatttatctttaaatcctttaatgacagacatatgatcgtcattgctatcttcttacagccttaacatgtatgtgtctggatttacttgtcaatccaaagtatgcctgcacgacttagaggtaggtttagtagcgtattcaaagcattaaaatttctctgcataagttctttgtgctagtttgatgcactttacggtgtgggctcctcccaagtaaccatacagatttaggtctcttggtcacttgctattcaccaattttcacagaccttgcgtgggacatttcttgggttattgcctgttgtacccatgtggaactgaaagaataactttaagaagttagtcttgttagctagtggtttagacatagttggtcttacgtgtaacaaaagcttacaactttgtgtcctcttttaaaatcatgtagtggctacccctacgcggcttgccgcacaacgaccatcactgaagagtgatgggaggccatcctgaacaacaatgggtacttgctcttttacgggtccctacacggtgaatcgttagaggaactatttgacatgttggatagtaagagtacttaccgagattttccctattgaagtgtttgggtagaagtttaaactccaagttctcgttgtactcgcgagtcttgtatgcacctttatttttatcttgtaacatggtgtaaacttctcagtttgttctgaacatgcttgctctgggatctttgctttcaaggaatattctttaggagtaattcccttacgaagaatttctttcatcgatctatttgttgaagggcctggtaactctttgtgggcaaccatgctgctttgagttggc

SEQ ID NO: 130279 - DNA, 1098 bp, Cannabis sativa
tcccagagttggctgacctgaacggaaagtaccgtgctggatggatgccttaatcacgtattaaaactgggcaaatcacaagtccaaaatcctaacccgagaaatctgaacccacaactctagattttgctatattcactagggattacattaacctaggaaatagggaaacacacaactacggcactgaaatggacgagaattgagaaaatgggttgtttaaagaacctgccaaaaccggtttacctattttataccagtctccccaaaaaccttgcaaccaaactttccagagtacctaaacaatgtatacacaacatattccaaacagaaaatcccaaaaaaaatcactgaatcaaattatgccattaaagatcaaagcttaggtttcaaagcacaaacttgtgaaatcacaaggccatacactcaaaccagcaaccatcacctagaatcaacttaaaataaacataactgtacaaccatatttcaaaatataaaatatacaaaagatgtcgcccatttactaacaaaatataagcataaatgcctcgaagacccgaacactctaggtctagccgtctcgatatatacaatattcatccagctccaaattcactactacttagcatttgcttttcccttacctacacatgtaaatataactatgagtcaacagattcaataagaaaaatataaacaaaaacatataaccgaaccgtaaccaggtacccatacaccaaatcacaatcctatatctcgcatctgacgtgtataagtctcaaacattcttaatgacaatgtgattaactataatatcatcctatctcagtactctagtcgtattgagatgatagcatcaatccatactatatttctcaacatatatctgttggtattctgcgtaactctatgtacattaataccgctcttactaatatgttatctaggcaatcataaaaacatgtatgcatgtatatcattatactaatcttaccttgattccaaattcaagcattttgatcaatctgaatggaaaaacctgcttgacgatgttacgaaaattatgatcactacgcaagtgtacgcaatcaagtagta

SEQ ID NO: 130280 - DNA, 747 bp, Cannabis sativa
gtattttaaacaataaaataatataatatagcttaaaagtataaaaaatgaaacaaaaaagtttcttttaatgaaaaaataaccaaattatatcttattcacattaaaagtaactaaatggttgcctttttcaattcattggaaacgagatttttctaatttttttctattttcagtaattattttaaatttcggtatgtatgctgacgtggcacaatagtatttgtacaaataatttttttaaaagtatttttataaataaaatcaattttaagtataatattgaaaaaaacactttgctttccaatcacaactaacaaagggtataagctatataaaaaataaaactctacaaactaatatatattacacaaatctttcaaaaagatactataataataaaataatatctatatgtaagcaccatgaatcaaagccacccaaaacacataacaaacaaaaataaaaatatgaaaacataatataaataatctaaagtatttgaattattataataattgtaaatatattatatatagagggatgtgggagggtttgatccatatatatatatactaggaagtgttagtatacgggctcgtttggtacgctatattacatcgtattgtattgtatagtattatattaaattgtattttatatgtggtattgatttttatatgtggtaaaattatatgtggtattgatttttatatagacacctaaatatataatattttagtataa

SEQ ID NO: 130281 - DNA, 982 bp, Cannabis sativa
gtccaccttatcgtgatactttgtctcggctgccttgcaatgaaacttaggaatttcatgcagtgatttcttttttttcttgttggtggtcctcttaactttcggcattttctcttcttttcacttgcacactaccccaacacaacaagtttcttctctgctttctaattcaaccgctgcccgtcaacacaataataactcttacaatgcacttcaatgtccacaaccttccacacttgttcaaaaatcacccctctctgaccacaccacactaattaaaattggaaacacttatactaactatcaccaccacaaccaataaatttttccattgtcacacatgaaatttcacagccacacagagttttcaaatgtgcaacttatctacattaatttaattccaccaactagaccatccaccaaacaacaacctgctcacagccactacttttctcaaaatcatcaatctttctcagcccactattcttcaaaactttcatcaaattcaaattcaaattaaatagtcacaacagtgcagcccattgtttagaatatcaccaaaatttcaatatcacccccacaatttgcaaagtcacttcaccaatttcagattatgaaaaggtacccgatgttaattatccccacactaaatacactactcagcagccatagtgttattcagttaagaaaacaaaattgagaattttacccaatcacttttgataatgctctccgtgcaattgtttctttgctcttcacttagcacaaacggaatgccatggtggtagtgacttgcgtgatggttgctggttgtgcaagctcgggctcggtttggcaatttctggtgaaagacgactagaaatggtggtgcgcgtctggttgttgactgagattgctcggggatggttcgaatggtgagtaaaagctcggttgagtggggttgctgttgggttgttggttcgagcttggaggtcgaactggc

SEQ ID NO: 130282 - DNA, 713 bp, Cannabis sativa
gaagaaaaaaaaaacactctttaagaactttcaaaacaaccttaacattatagataaaaagagtaaataccgcaaatggctagtaggcaatgctgagaaaaaaaaacagcaaggtgggttttgtcttcaaattctgagcatctgaaaacagaaccaaaataatcccattagaaagtttgccaaaagcttcacccaaactcatcctaagcttatataattagccacaaaatgaggttaattcaattaatgatcatatagttgaatggtgaattagactctaattagctccaatcagagcaatggtgcaaaacataaaacacacaggcaatgcttagtcaattacatatttaagggtttctccagaaacggcatgaaaaattgaaagaatgtcaatttagatattgagggaatatcaacataccatagtatagtagaggactgcactgattctggttctggccgtttaacgttatgaatcacgtacagacaaagatgaggaagaacaagaacagcgcttgatagttgatactttgtttcggccaactgtcaaacgacgacgttcggtcatggcccgatgggcctttcggtctgaagaaaacttacaaaaatactaggggatttttcatctatatacgtgtttttagaaatatttgtaaaaaaaacaaaaataattttaattattaaaaatatcgttacgcgtaccgagatataaa

SEQ ID NO: 130283 - DNA, 866 bp, Cannabis sativa
tttgaagtaccattgttgacctgtcctgacaatgtggctggaaatatgttgcaatgcacatcatgcgtaaccttctagagattgagttgcatctcgaagtatttgatgtgagccagtggattttctcgtctggtatatatcttccatacttgcattttgaactttggcaggggcaaggcatttatgcatgtcgagaatggtattccccttgaccaatcaagttcaaggtctaaaggttttgggccggctatgccctggatcatgtccctgagttggtccaactgtgcttgtacagaaggatatgtttccgtggggacctgattgactggcccacctaggggaggctactgattctagagagataggggctgactgaccataccctgggagagtgtatggtgaaggtcagctagacccgtgttgaaatgtagaccctgaccgattattcccaagtacaggagttggcctaggacggccaagcctacacctggcttctatgtttggctggctagacttgcattgggcagagtctggctgccaaatactcctccatggctggccaaacctacaaagggcagggtatggccacccgtgatgcttccttagctggctagaactgcattgggcagggtctggccgcacgtgatgcttcggtcgactggtgctagctgtgtgttgataggtggtagaccacattaattgttggagtttggtggatctagatgcctaaagtgattagattcacccctcaaattacttttttgggtgtttccacccactcgtggtccacgttggtcgaagattgacctctgggcacctcgctcccctatgggaggaagtcgtgtactttggctggacatgggtac

SEQ ID NO: 130284 - DNA, 673 bp, Cannabis sativa
  modified_base (622)..(630): a, c, t, g, unknown or other
cgcatttcattgcgccggtaaaaggtatagctgaatccaatcccaaattcagcatctcattaatgctgacaacttttgccggcgcaattggtcaactgcgccggcaaaaattacttttcttgtagtgttttacttttatccatacatataaaatttgtattttttatttttattctcacatttttatttttacctctataaaatttatacttttatcaataaaagttatattttccatcattagtacacttatactaaaaattagctcaacaacaaattattattatgaaattgaatcctttacatcattttcgatctaatcgagatacaaactctctgtcagtttcacaactccctcttagtttctactatctccttggtttgcatgtttcccaagctcaaaatagttttgaggatgtattccgatagactttcgactagcttgatgtgagctagaatttgtccccttttttgaatgatggggtctcctatttatagccgggagtgactgttagtcctctgcctttcttctgttcggatattggtccatgttaattagttattctcggtctcttcccgctcttcgaaactctttgttaggactgttgggttttatgccctnnnnnnnnntctatttcaatgtaatccaaattattcaatatcaataaagtaa

SEQ ID NO: 130285 - DNA, 754 bp, Cannabis sativa
aatgttttatcaaaattactgggatcatattggttcagatgttacttcggtggtcctaggtgttttaaaagaaggtcgtgacatgagtagtttgaataaatcaattactactctaatccccaagattaagaagtcgaaagctatgggagattacagaccaatcagccttttcaatgtgatttacaagctgatatctaaggtgattgtgccacggtttaaagacgttttgccattggtgatatccgaaactcaaagttcttttcttccaaatcaccttattactgacaacattcttgtggcatttgaacttgttcatcatctcaaacacaagacacaaggaagtaaaggttactcgaccctcaaacttgatatgatcaaagcatttgatagagttgaatgggattacctatcgatgatgatgttaaagatggggtttgctccacaatggacctctctcattatgcagtgtctctcctccaatagtttctcgtttcaactaaatggagagattgctggtaatgtttcgccaacaagaggtcttcggcaaggcgaccccttgtcatcatatctcttcttaatctgttcggaaggactttcaaggcttctacaccatgaagagcaactaggtaatttgcgaggactaaaactcactaggcatactccatcagtgtcacacttattattgtctgatgatagcctcttattttgtcatgcgaatgttaggttgtttttagtattaattttagattaagtt

SEQ ID NO: 130286 - DNA, 922 bp, Cannabis sativa
atggttctaagtgattgagattttccttactacagactttgtaaaaatagaagtaaatggttttacataatggaaaatttttcttatccttatgttttttttttcttttattatgatttattgaactagttaaatatttatgaagaatagagaatgtttcgtagaaatagaaagaggtgcttcactgtgaatagatgcaaatttattcaaactaatttttggtgttatctcggtacaaataatgtaagaatgcttgtagaaatgaaaagaggatgtaatttagtcttatgtttaaattaactttttattggatatattctgttaaaagcaaaatattgtgtgaaatgcacaacaaataaaagttagatagatatttgtatattccattatttttgtgtattagttctcaaaatttattatgtttggtgatcaaacataattacaaatgtgcttttagtgttgtcatctatttgaacatataatcttgcattaaaaatataattatatttatatgtatatattcaatatatatttgactgttgaatcatatctacataaattatttatattttttttaataaattatcattttctaattgttgttgtttgttgtattgtaatgaatgattgattatgaagttagttattttggtggttgacaaaattatgcttcaacataaaattaataccttaaatgaaaaagtaattattattgttaaaaactaatggtataattgtaataataacctttgaatgacttcacgcatatatttgttgcaagtatagtatgatatttaataatagtataatttaaaaatattaaaagcaatattataacataattaattaaaaaaagctaaattttattttaaaataaaattataggacagataattataaaatcaaaaaaatatttttttta

SEQ ID NO: 130287 - DNA, 1361 bp, Cannabis sativa
gttgtatctttagttcttttaattttgcaggtgccattcagtaaggcacctttgagacaggttttgctccgggtatcagatcaataataaagtctatctcccgctgaggtggtaaccctggtaattcctcaagaaatacatccacgaatttcttaaccactttgacttcctcgggtccaagtaacacaagtttactggagtcaattccaaccgctaggaatccaacacatccactgcgtagtaaatccctagctttcaacacagagattctaggagcacgagaaccttgaactgaaccaacaaaaacaaatggtttctcattctccggttgaaaaattaccattttccatttcaaatcaatactagcagagtatttggacaaaaagtccattcctagtatgatttcaaactcggccaatggtaactccactagattggcacataattctctaccctcaattttgattaacaccgaactaacccactttcttgagataattagtttcccattatgcaacagggttctaaatcccatctcaaatatgtcactaggcttactgagttgattaagaactcttgttgcaacatatgagcgcgtagctcccgaatcaaataaaatagtaaaagtaatgccattgatgagaagctgacctgtgaccactgaagggctggcggcagcatctgcctgagtgatggcaaaaacacatgttggcgcaggtttagcttctggcttgggttcctctttcttcaattggggacaatctttcttgagttgccccactgatccacactgaaagcatgccctctgattacaagtccaaaggtgatctttcttgtagcgcgggcactcaggataggaataagtctgatgtccccctttaccttggtttccacaaaaccttttatttttccctgaactttccataggtgggaaagttctctttttctgctcaacggtggaatcaccactcttctttacaggacaaggaatagggagagtagtggtcccaccagcaccaggagtttcacgggtttcttgcaaaaactttaccactccttcagctcaaagagccttatcaaccatctcagcataggttgtagtatcgtttgtagtgataaccagatcatgcttaatcttggcattaaagcctgccaagtacttttccttcttactgaaatctgtttgcacaattcctaaggctaatttggcaaagtgatcaaacttggtcatatactcggtcactgtcattgtaatgatcgctttagtaatttggattagtaaaggcaattagcactaatttttattgttttattattatttgtgaatttatttaatagtggagcccaatatttagaaataa

SEQ ID NO: 130288 - DNA, 1916 bp, Cannabis sativa
atgttacgcaatttatttaccaaacacttaatacatattattcacataataatatatattactacattttaatctacacttattatactataaaataatataacacatggagctttgacatatggatcatacatgtcgtgaaagatgaatgcatctctacccatatgagatggtggaggtgatgcagatgttgatggctctagtgttagatttgtcgctggcctaccatgcaacatagtcaatatagatttgagctgctccatgatgaggttctggccacccttcaactctatatggctagtctaatatgcctccttcagctcgacatgagaagcataaagacccttctgctcaggctcgatcttgtccaacctccccatcagttatctgtacttaacaccaccaaggcctgaagatgatgcaatgggttgagggtttgatgcagtggcctgagtctctgcctcaagcataggagcatttttgacatgtttcactgctttttttgcttggcttctgaaaatggctaggtcttaggtgtcatcctcagtttgtgtggcatttacaccaacctcaattaggatctccacaccattataagtgatgctctttgcatactcctcttcacctgggtgaagaagtaaccccaccatcgcatcaagtttttgtttaagatttaaagaagaaaagagaaaaatgagttatcatttattccaaacatttctcttgaataattactctaaacataaaataaataatactcggctcgaaaataatgcactgagatccttttgaactatcccacccttgctcgtccagctaagcattctcaaaaatcgaatcccatgatttgtgtcgtacctcttcccaacctctaaaatggcctcatatgcccaatattgtattgcaggtgcgaagttatacgttgtgtatttgcactcatgctgaacttccaaacttagcttcttctcaaagtctgccttttgtttcaacatgcccttttgaagggagtgcataaaataagtacttcccttaaggaatcctgaagaagaactagagatcttcggcatctaagtatgtcaggcgtaatcaaagtgttagcctcacggtccagtaacactacctcaacaaacatgcacaagccaagcttgtacacgtcttccgaatctgacagtttaagaacctctcttggagtgcttttgtcttcatactatcaaaccagttgaaatatttgttgatcaaccgatctgaccccgagcgggtagcctacgcagccttctcatcttctgttggccctgaggtaaagtttaggcttgtaatgagtgcaaactcaaccactccaaatctgatctccttcttgccaatgtaaaaacgtatctcttccaccttctcaacatcaaccttcatcttatgcagcattacttggtgaaataacaccaagaaaatgtgagaggtacgacattctaaaaattatcaaaaccgcttgcttttgccgtctcattcaaattgtattccctaaaccacatcttaatttctgcaaaagcactagtgcctctatatgtcacgcggcgagtaaaatagtcaaatgctagaacaatgagtcgtggagccatctgagaaaatatataacaaaaacatacagtaagcacatcattgaaaaataatcgataaaatatagataaactattgccaaataaaaattctttaaaatattaaagatggacaataatagaaaattgttgacaaaatattaacatcttgtcgacattttctcaataaccaaaataactgtaatatcccaataagcctaatggtaaataattagggtttatatttatattatgggttaattatgtaataagtgatattatgatcctactaatctatttcaacataaattttaaatctgttataagggc

SEQ ID NO: 130289 - DNA, 701 bp, Cannabis sativa
tttctttcttttcttcttcatcttcttcgtcttcttctccttcttctcactgccatcaccatcaaaaacttcaaacttagaagaccatcaaatctcaaacttagcatcaaatccaaacccagcaaaaaaagaaattccacacatattcctaccaaaacaaaatagtttcaaaaattcacggaattcggtcaagaaaaattacacaccaaaaccaaattccaaattcattaccagatttttaatcctaaatcataataaacacacctcaaatagaaaacaaatcaaaaatcaaacactacccttttagaaaaaaagaagaagaaatccggaccagccaaagactgaagctttccggcgccgttgggcctcctgcgccggtcgatcacaccctgagagcacctagaataagaacaccttctgagtcctcccgcaaaatgcgaaacgccggccgcctctcccactggtgctcttcttggccgccgctcaccagaaccaaagccaagttttactcgagcacaccaccaacacgccatcatctgcgaacggaactgtcatctgcgattggagaactacagaaccgtcatctgcaaacggagaagaccgtccaacacgccgtcaccagcgaagaggaagaccgtcgtcgtcgtctgcgggtgaacagactcgctggagcggttggctgaaccgtcgaccaaacccta

SEQ ID NO: 130290 - DNA, 545 bp, Cannabis sativa
cccctctctctctctctccatttatcatctcttcaactttttgatttttttgaaaaattaccttgactcaagcttggaatttggtggttttggtgcttaaatttgagaggagcttgaggtagtctttctaccactttaatcttgggtttttgttgctgaatttgaagttgaagaaacatgcttttatgtgctagtattcttgaaatgcatgtatgtgaattgaattgaatttgtgatgttctagctgaactttcttgctaattaggaaccctagttaatactatgattgttggaaagcttagattgagatttggatgtgtgaatttgagtttatgcttgatatttccttgctgaaaagttgtatgaaactttggaggtgatgcttaattatgtggagttgtattttggtgattttaagctctagacttttgatgttgttaactcttcttgagttgttgtgatattgcatacttgaatgttgtttaagctagagttttgtgttggatatattttaccaggatttagatttacaaacaagtatgttg

SEQ ID NO: 130291 - DNA, 929 bp, Cannabis sativa
tgatatgttttgtgcgagcgtgaaagacagggcttgaggccaaggaaccgacacctagattgtcacaccacaatattggacagttaggtaaaggcatagataattcgttgagtaaggattgtatccaaatcagctcagaagtggccaaggcaagggcacgatattcagactcagtactcgaccatgcaacgacagattgcttttttgaacaccaactaatgatatttcctccaaggaacatgctgcaacatgaagttgacttgaggtcatcaatgtttcttgcccaatcagagtccgtaaaaccttggagattaaattgtttggcagcagtaaaggtgagtccaagatgttaggaacttgctaaatatcagagaatccttttgcacgcacccagtggtcagtgggtaggagtttgcatatactgactgagcctgttgacaacaaagttgatgtctggtcgagtgtaacacaagtattgtaatgctcctaaaacacttctgaattctgtaggatttggtagaggtgtgtcagactgagctgataacttggagctggaacacatgggaatggaatgggattttgaatcaagcatcttagttctacctaaaagatctatagcatactagaattgagttaaatagattgttgaatcatctcaaagaacctcaaacccgagaaaataactgacttgtccaagcttcttgagagcaatttctctgtgaagtttgtcaatgatttgagttacttgagtttgatcagcattagtcatgagtatgtcatcgacatgcacaagaaggaggagaagtttcccatttttgttggtgaagaacaaacgtttgggttgtctgccctaaataaaatctatttcaatataattagaattactaattaataaaatatcagaaatgattttatgttgcatggttcac

SEQ ID NO: 130292 - DNA, 690 bp, Cannabis sativa
ccataaaatataaatttgtataaatggttcaaacctatattctaaaatagaaaagtaggaacaatatatgtgaattgttgaaacgattacccataaccaatagatttctaatgaagagagagtttctctcatctttcttttttttttttgttgacaatgaactctcatctttctttttgtcttactagtttgtgctaaataatggatagaagtagttatagagaagttacaatccactaaagtctatataagtgatactaataaaaaataataataataatttaattaggattgtatatctagccacgtttacttagaaggtgttataattttttaattattcataatgattaacaacacttatcttgtgtcatggagtttaaaaacactgctacagcttcaatgccagtgcatctcatagaaacaaattctttgatggttgttcagaatttaaagaaggctacaacttctctcttggcttttcatgccattcttaaggatgttcactttcttgtgtccaatttcccacgagcacagatctcacatgtttttagatctgctaataacgaagcacattttttggttaagtttgctcttacggtggatacagaatgtatttggttggaggaaattccacctcctcttatgactgttatgtaatttgtttccaaattaatataatagtctttc

SEQ ID NO: 130293 - DNA, 642 bp, Cannabis sativa
  modified_base (36)..(38): a, c, t, g, unknown or other
ttttcaaaatgtataaatttttaaaataattttttnnngcacattttttgtaattattttgtttttattgtacatttatgaaaaaagcccttagtttttttccaacatgataaaaattattcaatcatatctatccaatttaataatacttcccaaaattgcaacctaagctttggctcatcacatgtatagaatatagatatctagtttacgaacacgaaattagtggcttctgggccacttaagtcttgggtcttaactccaaagttgtcaaaattggactcaaagctttagtgttcttttcttgttactacagcggttgtcctttgacattaattttcataaattaaggatatagtgtaaactgatgaaccaaagttgagaagggtcttctcagtattactatttagaccaatatgactacttgtaagttataataagtcaactacattggtcacattcttctccatttaacaaaaattagaagactaaaaatttgacaaaaaggtttcaatgaccaaatcctatattagttctgttctgaatgaatgacacattaagccatctccaatgtggttaatagtttttgttgctcaattggcccacttgactaatgttagtgatgtcattagttagttacaa

SEQ ID NO: 130294 - DNA, 2277 bp, Cannabis sativa
  modified_base (913)..(914): a, c, t, g, unknown or other
  modified_base (2236)..(2251): a, c, t, g, unknown or other
tatatatatatctaaaatatggcttatatatttttaaaaaatattttatcataattaataattttaattaatttttactttaggagactgtaaaatatgatatctatatgtatattgttggcattataggtcaataaataaaatctatttcaatataatcatatatattaattaataaaaaatctgaaatcattttatgttgcatggttcacatgattactttcataattatatgtttaatatataaattctattaaatcacgaacatatttattcatgattgtagtgttgtctacacagtggaaaataatcatgattatgtgcttcaaaatctttggtctcataatttatcactgtactagatttacactaatgttataattagcgataaagtttacttacacagtgttatataagatgtcctttctagaatattaacaaagtatactagtatcggatgtattgggtacacattagactggaccgatattgacagtaaaaaagatatcataaacttacgttatatatttctaagtaaatatcacttatttgatcttagatatatagatcttaatcctgagaaggttaaattctagtttaaatataatttgtgttctttgacttgtttgttaaagctaaccaaatagatcggctcaatacttacatcttgggaacatggtagtgcaattaagtaggagtgctaatcatagatattgaatgtatagcttctataactattagaaatgaaatgataatttctttcgagcttggcttaacagggtgaatgattgaatggtagtacaatggataattcatagcgtgtctatatttggtatatataaagcgttctatgtaatcaagagtacaattccaaatctatggtgaagtcaggaggaattaataagttaggaannttacttggtaaatttcagatctacttattaggagctttgttacataggcccatggtccccacattgtctaggatattatattattgtagactcaactaattgattttaattaatcaattagaattatgaataagactatgtgttgtttatgaattttcactaagcaagtgcttatttgagaagaagagaggatttagggtttgtttattaattaagagacattgtaaggtttaattaataaataagtcaaatagtaattttgtttgataattaaatataattattaaatagatagatttgacatttattgagttagaattaaaagatgatatttgtgaaaagaaaagataagttttaaataaaatggcgaaatggaaaccctgtagggcccactaggggttcagccatagggttcaattaaagctaatattttatctttttaattctattttaattctaaacctaaccctagaagctactcttaatagaataagatgactttattttcagaggatgattagactcctttatcagacaaaatagaaaataaagaaagccaccataatatttgaatccttcttcttcttcctctgttatttttcgtgccctatggtggttgaggattttcccacataattcaagtcaatacccagacctttgagaaagattgtgttgaacacaatcaaagaaggatatgatctaggttcaaatcttggtaatactctgctacagacaagaatcaagcactagagatctgaatagaaggagtcatttaattttgctgccatcaatgtaagattttctataactttatgtgtgtttaattcattttttttagagaattcatattaaggatgttagattatagtttattgtcaaatatacatgttaataagtctagatcatagtaaaacaagttccaacaactggcctcagagccaggttaataatttattttcatgaaatatagattaaaaattatgtttggatgatttagatgtattcatgttggtttatgtgattattttataattgattgtgaattacgaaattttctataaaactaataggattttcgatctggaattattttatttagataattgttggaaaatttagcaaattacgtttttatagaacttaatttcgattaaaattgagaaagttatgattttttttttaattttgaaaaaatgagggctagggtttctaccctgcgcgaggaaatgaggtcgttcactcggtcttgacacgcttatggacaaagcgtgttcgaggtttctttgacagaggcttgtctgaactgttggaaatattttacnnnnnnnnnnnnnnnntaccatgtatgtttcattaacatcct

SEQ ID NO: 130295 - DNA, 853 bp, Cannabis sativa
agaattacaatttacgtattattaccgctaaatattaaacttaagtatttatgtcgtaaattactcaattattataataataatttttttttaagttttttgagaattcaaattagaattttcattttttctaattcgaaaattttctaaatattttttttttcttagcaaattacaaattcaacttttaaaactaatatacaatgaatagaagtatagccaatcatatttttaaacgtaaattttcatatgcaagatccaaatttctatcgctaaagtgctaaagtggtttgtggcatactattcaacttgaacagttaaaatgcccttttggaaaaagaaaagcaaaattgtgtcgggattttattgtatggacaaagaaaatggcgaacaaaattagaagggagaatttgggtcccaaatgttataaattttctagaaagcttttctaagatatttctgctggtcttttcaaaataaataatgaaataaatattgaataatacagatactcaaaaatctgacccacctaaaatgaaaacatgataaacacacagtgccattaataattaaacgcgtgagctcagataattaataaaacatattattattttagatagttaataggaagataagttaattagtaggattgtaccaaaaaccattatgatttatcttttaaaagacatgatcatcttaacccgaaaagagtcataattcactaaaatcataatgttctttttaagcatgacattagaacatatgacgaagactctgtccaatttttccattttaccagaaattgttatcaaagcgctgaaaggatcttattatttttagaatattgataatt

SEQ ID NO: 130296 - DNA, 957 bp, Cannabis sativa
  modified_base (899)..(916): a, c, t, g, unknown or other
tttttgcacatattttgtaattaattaaaataatgtatacaaaattgtaaaatgcccatagaactacatctatttcgagtttttatttctcacgagaattacaagaaaattgactaagtgtgaaagctctaaatttttagagaaagaaactagagagagatgctctgaccttatgggcattttttatgaatgtgaatttttctggaggagctctccttttgtatgcaaggaagtcctattaaaataataataaaatattcaaaaaaattgtgaaaaaaatatagctattttttatcgatgatgatgatctaacgttgaaattgactccaaagtttggtcatcaatttttggagcttgaatcgcgttcgcaagaccttttccgggtaagttgtagttaaaatttgtaactctcttggagacaaaatttggacctgatatcttcagaattgcgatttaggtgtgatacacgacttgatagaacattgaaatatcttcaaaacacaagtttaatcgcatcaatctgatcaatattgagtgagtatggttgttttactgaaggctactctaataccagagcccaagttgacctatgacgtcaacttgaacacagggtgagtgggaaaatgtgtttggaatgtattttttatgcctaagtgatattttgacatcatttagtcaatatctttgttctggtgaagtcattcactagttctcgaagatgttgtttcacaaaatcgggagacttgaaactacccgatttgtgagtaagtcactttgtcgaaaaaagtaaaaatatgaagttatgaatttgacttatctgagttcatagctctcgtttactatgaaaaaatagacaaatactcgggacagaatagttggattttgtgccctaaataaannnnnnnnnnnnnnnnnnagatttactaataaagatcagaaactgcattttatgttgca

SEQ ID NO: 130297 - DNA, 590 bp, Cannabis sativa
ttgatagatataaccaaaatgtgtgtgaaggaaataaatagtgttggaagaaataagactatatattatgtatatattatgactttttatataaatgtgttgtgcatggtgtggagtaatgtagttgattgtgatgaatctaactaaatggatgaaaatgacaaatatctaactaaatggatgaaaatgacaaatatgactttgtattaacaaagtttcctatgtacatcaagtacatacatataatactacttcatagaatagatacttattaatttcacagttacaagaagtcagagctttggtgttggttataaattgacactattgagttttgatgtcgtttttaaaatcgacacataaaatgtacatatatgcttttccttttaatgtcagttcagaactgacactattgggcattattatcggtttaaaaccatttctgaaggatgtggacgaagaaatttggatacaggtttttaagccacactcacttgctagattagtgggaatgaattataaattaagtatatattagagagacacaaggaatttatagtaatttaatccgtgtatcggacagtaatgga

SEQ ID NO: 130298 - DNA, 2569 bp, Cannabis sativa
ggaagcagagtgcctcccgtagatgtcatcaacggcggaataggtcggggtaatgtaagacatctcaacctattccctgagagtactggcccccacgttggggaaacgtctacaccggcagccacgacggaacattttccaccttttactccagcggtggtgtccgaaggtattatccaactgaccaccgatcagtacactgcaatccaagactagctacgcgctctgcaggtcgaagtggatggacaaaatagggctcgacgtcctcctcgagtacccgctactcgcacgaaaaatcctcaggtaactaactctagacacaggaataaccgtactcgcagggaacgaagggccaacctggagggactcgatttaaaccaaccaacgttgagggaccaattcgcgagacaccccaatggaggcacagactgaggaagacgctgaacgatgtaatcctcgtcgtaggcctcactcgcgagacaacgacattgaatctgcctcctcatcctcgcatggtcgcatgcctagcaggtatactcgatcaggttcggtggaaacaccgcaaggaagacgatatcacgttcacaggggtgatttacgcgatcaccttaatgttgtcttcaaggcgcgctcccagacgcctcgtgatgtcaaagagccccgtgatccccgaatgggtgattagggtataaataatcgcatcaatctgcctaccgtaccagctgcaactactggggttaatatcccagaaaacattgatcaagtcaatactcctctagcccggaacattgatcaaggtatggttctggaggccttaaaaatgctcaagcagtagagaaagcccatatacaagttgcatgggacctgtcctttcacagtagaagtgcgacaagctcgactccccaaggattccagttatccaaatccataaaatacaaaggtacctctaatcgcatagactatctagaaaaatttaatactattatggaagtggatcaggtacctcaactcgaaaagtgtcgcattcttgcggcaacattggaagaaaattcccatgcttggttcagccaattgcccgaggcatctatctcgacatgcaagacctttgtcgacctgttcctcacgcatttcaaagccacgatgacctataggcccctataccactctggctaatatcaaacaagaacctggtgagtctttacaggactattttaaacgctttaatgttgaggtaacaaaagtagagaaggctcccgaatcttcgctagtgtgtatgttgataacaggtgtcctaccaagaaccgatttctggaaggaactgcaagctcaaagacctgaatcgttggtcgagttctttgccatagcagagccgcataagaggattgagaattctctggctgagttagagaaaggcaaagataaacgtaagtcaacagtgccacgatcacgatctcggagtcatagagggaagaattccagaggaaggagtccgagaagacgcagtccacaaagacagcgaagttcgaaattagccaagtcccctccaaagaaggaatcctctctgaaaaggaaaggtggcccacactttgtaaactatatagagttggcagtccctcgggaccatatctacgccattgaagaaaagaacggggtcttcaaaaagcctcccccaatcagcggaaaccgcgataaaagagaccctaaaaaattctgtaagtaccacaaagatattggtcacactactctggagtgttggtttttgcaagacgagatcaaagaactaatcaggagaggaaaatttagcaaatacaacaaaaatgaggaaagtcatccatgagcggatgacaaagaagaaaatcaaaatgtgagtggttcgaggactcctcacaatatcctgactatcataggcagaccccatgtcgcaggagattctaggaagtcgcaggagcaatatgggagagaagccaaagataagccgctcaccaatgtgaacaacttgagcaagcggccggagaagctgttcaaaagggaatgtgacgcatcacattcatggaaagtgatgcgagatgggtccaccacccacattctgacgcactggtcatcgttgccaatatagggggagataatgtccaccgcgtgctcgtagacaatggaaattctgtgaatctcttgaatttccagtccttcagacaaatggggttgcatgagaaggatctgtgacctgtgacatcaagtatatacagttttactggagatgtcatcgcattaaagggaatgatcgaactcccaatcactttgggaaccacacctgtagtagctaaatcgatggctgacttcgctgtaattgagcaatactcgccatacaatgctatgattggttgacctatcctaaaggagatgaagatcgtgacatccatatatcatctcaccatgaagttccctactcccgttagagtaggatctgtgcgaggaggctaatcggactcgcgagaatgctacaacatagcagtaaaactcgcagaaaagaagtcagttaacgtcatttacttgctagaggcaccacctcctc

SEQ ID NO: 130299 - DNA, 709 bp, Cannabis sativa
ttcgacattcacataatttcatcttcagcatagaatgtaatatgacagtaactcagctgagtatatgatatttgtgctgatcatttgcagtcaaaaagggaaaggtattttttctaatatttaattctatacaaacaaatcaaaaaataaagaggatcgaagaataaagaggaaagtgatatctttcctatacaactatattacagctacaaattcattcctaatatatactgattttcctacactccccattaagctggtctaaaaatacaagcttgctattaagaaaaacaatttatattgggaaatttaggttaccatgtaatgtatgaacccaaaataatctactcattaaatatatatcataaatatactttagttccacccaaaccaaaaaatattcgtcgcattttaactttctccattctctctcgccctttcattctctttatcctctctcttataaaagaccacataaactcatcagtgtgcactgctcatcactacactccactcaccactgcacacctctcattctcttgctctttgtttggacgattcccaaatatatagtttgtttctaacagatctacacattagtgtttttgttttgttcattttgcccaaaaattgaattttacattctttgaatttttctacgtttttttttttttttttttctaatttttttgcaatatttagcgatgta

SEQ ID NO: 130300 - DNA, 1058 bp, Cannabis sativa
tttttggggaacctctataaattcggtgcactctttcctttttttttcttttctgcatttctatattgtgtttgttgtgattgtattttctggggggtttatttcaatctggtctgggaagggatttactcttgggtttttctgggtaatcgatgctgctctttagagaagaaccacgaagaagtagagttctttgctagggtttattttgtggttgtgccatatatgtgtatgaatggaaaaagggattatatattgtctgattggagtctagggtttcttgtgtgtataaaacaatttgtagttcaatgggttaaatgggctgtcgttttttgaagtttaactctagggagtcaacgttgggtttgattgggtaaaaggtctgttttgaccttggtctgtgattatttcattgttgtgtgtaaggaaaaaatccctacagtagtatcagagccaaacaaggcatacatctgcagcaaagattaatcaagaaagcatcaagaaacacattcataacagcaagaattcaaatgcacataaacagttcacaaagatcaataacaagattactctaaactcattatctatataatttctttgaaataattttatacatatatgattatgagttcaatgaaggttgatattgataggtttgatggttcaagtgattattggatttggaggaagaagattagggctttattggctcaaaataaactattgagggttcttaatgatcctgtagaatggccagctgatacaaccaaggcccagcaagaagagttgctggaaacagcaaccggtttaatcatcttcaacctatctgattctataatcagattggttgacaatgaagacacacctgccaaaatttggaacaagttggaagagcaatttcaaaagaaatcattgatcaacaagatttacttgaaggagagaatctttggatttaatatgagtccaactaaatctctagaacagaatttggatgagttcttgagattgcacattgagttagcaaactcaggggaaaatgaggccttaagtgatgagaa

SEQ ID NO: 130301 - DNA, 1156 bp, Cannabis sativa
agtttttttaataggataaaataaataatatttttaaaaataaaaaataaaaaattaatagtgttattcgggttatttcgagttaagtcggtttgattgggcgggttactttatttttaacctgcctaatatacagattgggcattttttttttggtcagttttttcgatttttttttggcagttttttcagtttggtttaggcaggttattcggtttaggcggtttacgaaaatatatgtacaaccctgatatagagagagttagatgcatgctaatctatattgaattgcctgagactttttgggcagaattagctgttatagcctgttatttgaataacagatgtccctcatttgctattgattttaaaacacctatagaggtgtggaaggagaagtgttaacgtagattttcgttaactaaataattagccttttttgtaataaataaactgcagaattaattgtattgcaataacgatctaagaagaaataaataacaagaaaattttacgtggttttaaagttaaatcttcataatctacgagtccatcttattaaggatttttgtgtttgtatacataataaaatggtattgttttttaggaatgaataatagcaaatattatctattttcctagattggttatcctttgttccttgggttctgtccctatttatagatgtataggatgacagttattcccttgagatctaattattcataactgctcatgaaacatggacattctccacgtttcatctatgtgcacatagaataataataaataactacctagtcgttctttgtttttatccatagacggttatgctgactatgcgcaattgctctcactgtttgaatgatatctttcttaaacatctttatagaaaaaagttaagtgttgagttatgatgcatctcatagccttccttaaccattgagaaagatattagtgaggtagttacttcaatacgttaagagcaagatgagtgaatgctgaagttattttcattccttaagcatatgtactcacgagaatgtagatcaataagctgcaaactcatactcacgagtatgtgaattaataacaacgaataaaaataaaaatatatagtatactaataaaattatatgtcatgtcaacaaaagta

SEQ ID NO: 130302 - DNA, 672 bp, Cannabis sativa
tataattagaaatacataaatttacaacttattttgaacaaaaggataattttattcaaaaactgagcaaatacaaccaaagctaggcacagccgaagcaactaccaccaaaacctcaccaaatactaattatattcatgattctatcattagcttttgtatttttacaagcaaagcccatcaccctaaacatgaccagtcttttaatatctctacttataactgcagtagagaaacacatcaaattgaaaacacaactatttctatttttccatacccaatacaaaatcccagcaaagaccgcattagttatctgaaactttaaatcataagcagctttctgaatccaatcctggagctcgatgatatgcctcggccatctgaaaaccccaaaccagctgttaatgtcttgcaacaccaatttcgtgaagtggcagttcataaaaagatggttatgggtctccttgtcctgttcacaaaccgggcagaggttggattgaataggaagaattctccccaaattataaattttaaatttacaaatttggtaaatccatgatcatatgattttatcacattgataagaaactatgcaataaaaatctaacaatggctcaagattgttaaagaaatataatttaaatattttttatgtgcaaatatatgcatatt

SEQ ID NO: 130303 - DNA, 996 bp, Cannabis sativa
acaaatttgttatttaatttttctagagagttcctatctgtaacatagatatagattgtatatgtggttctagattttgtatgaaattccataaacatatttattaattgtggcaaataaaataaataaaatgatacattatggttaattaggatttttgtctcttcaactttgacatgtactaaattatgcccttgaatttttaatactgagattgttagatttaaggactttaatctaattttatttaattttactatttcaatgattgtttatatctaccaaactatgttcctcagacttaaatatctaccaaatcattttcctcgaacttttacatgtaataaatcatgatttctgaacttttatcaatgttcaacttttttactaaaattaaacaaaaattcttaaattcaattatctccatgcggcattgttaaagtttaaatgcctaaatttgtatatactaataatattattttccattttcggtgtccgagggttgggacccaaaacggacgcatgatatgtacatacgacgcacaggtgtacaaatgtatttataacttctatcttcttcacagaattcgatttctctttttcttcaaacaatctactctaaaattgtcatgggtgggtcttgaaaaaggaaaaagaaaaaacattttagtcattaagaaattcgaaagaaacttcccactgaatagccctccaccatatgtgcccaagaaactaataatatttaattgattcgaaaacaaataaattggtattactcactaaactgcaaaactctagggagagaaatggctgaattgtttgttaagcaatcagagtcgtacgcccaagctcggcctgattacccaaaagagctctttgaattcattgccaccaagactccctttcacgaccttgcctgggatgtcggcactggaactggacaagctgctcactcggtgagtagattctcttttgctctatgattaatatcttctt

SEQ ID NO: 130304 - DNA, 534 bp, Cannabis sativa
ctcgaatgaattcaagaatatattcaaaaaaaacaaaaaaattacataaccacttagctttatttatttatgtcataaaaagtaaacttttaaaattttccctgtataatttttactattaagaattattatcctggctttattaattgagttattgtacaaaagaaatgagaattgggctcactaaaacaaataaaagaacaaagaatgagtgagaccaaatgtgccacgtgactttgcaaacaaaggtaggcatatatcatatatgcacatatgtgatgaaaaaaaaaaagaagtggcgtggaaaacaaaagaaaagggcggcttaggttttggtgctgctccagggacgctacaaagaagaaaatgaagtaaaagaagaagaaaaagaaaaaaaaaaaagaaaaaaaaggagtttatttgagtattattcaaagttttagtttagcatttttaatttgagattggcaaaaatcaagagtaagaagaagagaaatttggagaagaaacttaggttgcgtttggtaacacttt

SEQ ID NO: 130305 - DNA, 739 bp, Cannabis sativa
  modified_base (693)..(697): a, c, t, g, unknown or other
aaaatattcctctaacttatccttttatttaaggaagattgtattacttttgaacaaatttacagactccaatcaaggacccaaggccctttaaaacatcactggataatcaatctatttaatctttatctttgttactcactttttctgtacatgtaagattctataataaagctctttttaaatattattataagtataagcaagttttggacaaacatgctcccataaaattctatttttagctttctaaatatggtaaaatacaacattaatagcagcaaccatcacccctcttcaaaaccaattttgcttagatctccttaaccccattcatgtacctgaactagtgttttcttcctacaattgcagttgctccaagcaaacatttaataacagacaagccaagctaaatggacagaggaagaacaaatgatcatagttctcctctgagcctccaaaaagaagacaattcttctccaaaacaatgccaaaaagaagcaatctatctcttatttggagtctaccccacacagcaacgcaagagatgaatttgtgctttggaacactcaacttatgccaaaccctcttaaaaattctaatattattcacggattgagagaatttagaacttagggcccgtttggttggaggtaatgaaagcaatgtaataggaataggaataagaatagnnnnngtaatggaatggaataagaataggaataggattaggttgttt

SEQ ID NO: 130306 - DNA, 963 bp, Cannabis sativa
taacgagtgaatcaaagaactcaatgaacatgaatgggagttcatgtatacttaggattcaggctgatctactaataatcatcattgtgatatgaattattcttttaatggtaaccgccaagtcaatgaaagatgcttattacatattggtccaatcatgcataattaaattatacacagtacatatactacatgttcatctatatatgtgatccaaattaaaatgacacacacatacacactagaagtatagtgcataatcttgtacttagcagttccatattaaagattctcagaactttaatacattaccgacttgttttattcatctcgtataattcaattatcttatacatccttacaagattataccttctctataagaataaagaattttgagaatttaataattatactcttataattaatatatcatttatcttatagatatatttcatatattctctaatatattatccattaattacttgcatttaggacataaatcccaataatatataccatcagttgctgaaccaaatgacggagcaaggaggggctaaactgtatttccacctattcttttattattatataccagtatataaattaatataagaagtttaggacttttatacaacatatataaaacaacatattcaatatgcatacatatattattgagaaaatataaatacacatatacatataggaaatttttatggtgcactcataaaaataggtgtaccgatacatcgcttcttgtttttatcaccagatagttttaattttaattttttacatagtagtctaaattgtatattttttaataaaatttatattaattaacgcgctaaaaataagattcaaacagtctattcagaatttctcaaaactctgtataatttttaaaatttcgtattttaatattcctagttaaattatttaattaagtgattaatt

SEQ ID NO: 130307 - DNA, 1005 bp, Cannabis sativa
cactatgcagttataaatagtggcagataagattaaaagagaggaggcccaataagaagaaaaacatactcagaaatctgaataagattgactcgtggactatgtagagttttaactacaaaaccacgtaaaaatttggtgttcatatttttatttttctatagtttttctgtgttgaatcatattcgcgaggctcaatttcggttaacgaaaatctgcgttaatatgtataattatgtaactgttattttttaattaggaagagtttttaacaaggtgtatattttagagagtaaaatcaggtagtgctgaaagttcaggaagcaaaaatactaattatttattattttttcaaataagataaaaaaaaattaatcaatcctagtttaaatacattgcatttaagactattgtattacaatacaattgcccaattaaaacaaactattaaataccctctaaataagatattttttttttaaattccctaccttaaaaaaaaaaatcatacataaatatatgttcaaattcggagcattaaattattattattatttttttatatattaacggagcattgaattattgatgctggatagcttggcagaaaattgttgatgaataagtcatattggctcgggacaaaaccttctccaggaattaaaagattttattctttagaatttgtacgatgcatgtcataggtgtgtttaatttgttttattttcttacaaatacataacataattaattggatgtgttatttcctgtaattttttatcgtcgatcgagacattattttattttgtaaacgaaacattgaggaggcaaaaggtcagagctacatacatatatgtcatatagttgataaaaaattgaagttgctcctggttttactatatctagatacatatacactggaatctctatccaagaatacactcgagaccaaataaattatattctaattgagaggttataattaaatagagttacactaaaaaa

SEQ ID NO: 130308 - DNA, 878 bp, Cannabis sativa
tccaataataatacgcacatttggagaaatacaaaaataatgcctcttaattttggagaatttcttgctggttttagtttagttcaatatttctggagaatttcttaagttgcataattgattgtgtagggaatttcttaattttctctactgttattggacatatctcatctcatctctctcattgtgtttactttggtaactttgtaagttttttctcttcaattttaatcactctcttttgctattatcataaaagtcttgtatctccttcactgtacttttaccaaagtttcacaattacaagaattcaatttaattttctttttttcgttgatatttctataattggtttggtaaggcatgtgagtgagtgttctcctctttagaaatgaaagctctcttctctttctcttaactctaatgtttatgatttaaatcaatttggtacatccttattataagaaaatgtattggtagtaattagttattgttgttgttgttgggttgtagtggtggtggtggtgcgatattggttcagatttttttaaaaaaaaaaatcgtttgcttcggttaatataaggtaaattataaatttatattagtgcgaagatatacatgtatttttaaattatgtcatgcatacaatcacctaagctgatatgtttgaccattaccaactcatttactgtaagagtttaaaaatttgattgtgcatattctttatccctttccttattcaagttttgcaacgagctgcagttgttgcggctgttgctcgtgcccttgcaggtctacccccacatcaaagatataacattcctcaagctctgaagaactacgctcgatatatggcagcagacctcagagtcaagaaa

SEQ ID NO: 130309 - DNA, 732 bp, Cannabis sativa
aaaatggaaactgttttgttttattattttaatatttaatgaaaataaaaaggtatttgaacacaattattgtcctaaacgtcgagcagatcggtagaggctgttatgttcgtaggtatttgaaatggaaaacttgtttgttgagttgacatatttatataaaatcattggtctatttctttttatatatacatatatttaaataatttggttataatttagaggatacgccaatatttagttttcaattaaattatttataaaagcaattttattagctcaacaaatatatatgatatgatacacaataatcccaatttaaatagaaaccaaatgatgatgatgatgatgataataagttgcaattaagttataagaagaggactctttcaaaaaaaaaaagttataagaagaggaaatctcaaactcaatggctaagttggggtgtcaaaaaggggttgttgggggttgggaggagttggatggtcaccaaactacaaacccattttagacatcatttctccattattaatttacctttttcccaagcttaacttcatcattacaattatttagaaaaacataataatgatgcattgatttgggtgttgattaatcattttataaatccaaaaataatcgcatagtaatccatgaaagcttctttctaattactttctctttctctttctctttcaaacacacattttttataccaaaaaaaaaaaaaaa

SEQ ID NO: 130310 - DNA, 627 bp, Cannabis sativa
tttatggtactctgctgtaccataaattgtggatgatgcggaatgatatgtatcatcatggaacccctttggatttaactaagttgcagaagcaagtgaagggtggcttcattgagcacaggtgtttgctgcagtctttttctggttcttcgtaggagcttggcagtgtggagaaggttcgttggggccttccgacaccaggaagaatcaaaggttttgtggattttgcaaaatcggatgaggatggtgcggtagctgcagttttctttgacccgtccgattctgttatggcttttggagctaaaaaagtttcggtttcctctgtgtttcaaggggagttggaggctatgcggtttggcgtggatcttgcggctaggctacacttggggagtctgtgtatcctctcggacaacctccatttggttcagtctgtcaaggcgatgtcctgccctttttagaatatgcatcttgcgtttttttctctttgttggtgctttgcactcgggggggattgatgtttgttgggtctctcggattaataatgccgcgcactctcttgcaagatggggcctgtcccaccagtgcaatgggttgccgcgattttgggaggtgagtccccatgtgctc

SEQ ID NO: 130311 - DNA, 953 bp, Cannabis sativa
agcgagatgctcatggcttgcctctggagaaatcaagatattttgcctggtcgcatgaggacattattgggatcgaccctcaggtcatctatcatgcccttaacatagacaaagtaaaattttagcatgtacaataaaaacgcaggctccttgacaaagagcactccaaatttctcaaggaagaagttgaaagactaaaggagaacaactttgttagtgaagctttctacccggtttgggtatccaaccttgttcttgtgcctaaactgaatggtaagtggagaacttgcatcgacttcactgacctaaataaagcatgccctaaagactgtttccctctaccacgaattaatcaacttgtggacatgacaaccatccatgagctccaaacattcatggatgcctattctggcgactaccaaatcatcatgcacacacctgatggagagcatactagtttccaaactaacatcgggctttactgctacaaagtaatgccatctggactcaagaattcaagtgctacttatcagagactagtcagccgtatgtttcatgacttaatcgggaacaatatggaagtctacatcgatgacatgctggtcaagtcaatgaaatctgaggaccacatcaaagatttagacgaatgctttaacatactaaaagaatatcgaatgaaactcaatcctttgaaatgtgccttcggtgtctaattagataaatttctcatattcattgtaaactcaagagtaattaaagaaagaaaagatcaaggccttgcaagacatgaagtcaccgtcacagataaaagacgtgcaaagcctaacatgataaattgttgcacttagtaggttctccacaatgtcaaccaacaagggtgttcgcttctttaatttataaggaagcaaaaagaggtttgaatagaatgatgaatgtgagcaagccttccaagc

SEQ ID NO: 130312 - DNA, 1340 bp, Cannabis sativa
tctctaagagtttaattctcaagtgagttttagaatgatagagtgggagctcaagagaatgatttcgtgagaatcaaaatcggagtcactttactagtgacttcaatccccttatatgggttttcatctagaggactctcttatagtttaaaatctcttaacctcaaaagcactttcccataactatggtcgtgttaggtttaaaatacaaaagtcatatttcaaattagaatatctaaaaaatgataaaagattaaaatatcttcaaacttcacttgttgaaatatttccatcatgaggaacataggctgagtccatgttgtcgatagatcgcgagaagaacgcgagatgctcttcattttgggttgagagaacaagcccactgaggctcatcttaggtcaaaattatgagagtgtgaggcccctatttgggttgagatgatgatgagagagtgaggttcaagttggtccaagatgagtatcatctccttgagctgagatgaacatcttcgagtcttgttgggccaaaatgaatggacatgttgaaatccaagttgagctaagatgatggttgtgtggaccttcctgcctaggttctagatgttggtgtaaattttaggccgagattatggcgtgatctttgggccaagatgaaggtatgatgagttttgtgatgacggtgagagagtgaggtcgagatgagggcgcatgaagctctgagcaaggtccccaaaatggaatttgagacaatgcgacctttcccgtatccatataaaaaattaataccataagcctttaattttgtaagggataacactatcgaagacaattcaggcaaagacgtagctcctaaaaataccaaagacgtatgagggacctatatcttcctttatttcaaataaatgaagacataggccaccgaagacataagtatttatatatttatatataaaaaaagatatttataccataaatgggagccaccatttaatatcgtcaccgccgagccccgaacccaaaaaaccctaaaatcaaaattattaaacaacattatttttcaatcaccaccgtttcacgccaccaaattttgagcgttgtgcgtgattttctaaaaatcactgtggattttttgacaaccatgatatcaaaaccctatatcacacacactaagcttttggataaaggtgtaagaccttgttcaagtttagtgattctcctattatacacttatggtgtatgtggtgttgacattgctcacacatctcttatatatatatgctatttatatattgtgttttatgtgtagcttattgctttgagttgtaattcttctcttctct

SEQ ID NO: 130313 - DNA, 2192 bp, Cannabis sativa
ttagagaggcataagatcctttggtggtgtattttttccaaggccctttcgataaggactattcttagtaagggattaaaggttgaggatgttacatgccctttctgttgggtggaagaggaatctctaaagcagttttttcttaaatgcaatctggctttctatttatggaatctttaccgtgggtatctttgcagtggtcaattcaggaatccgtatgtagtacttggtcaaatttatttggagtctcaataacaggggcatcaacattaacgaggtctttatctatgcttctgttgttgttgatactatacggtgagcctgaaattaaaaggtacataagcataagatggttaacttgaattagtgttttgactctatttgatattcttatgcttaattacgagctactctaatccccactccttctcctatctgggtggaggattggcgtcctcttcctcctgattggatcaaactgaactgtgatgtcaaagtgatatcagaacgctcgtgtatagcagttgttgatagaaaccatttggatgaggtcatctgggtgagcacgatggacttggatttttcagatgctctttgtggagaggcgagaacttgttacttggcgattgatttggcaaagctcaaaggttacaagttcatcattatggagaacaactcaaagatagtaattaactctctcaatcgcaaggagatgtgctggaagattgtaaactattcctctttttgccttaagcttttcactgatctttttggctgtgttttttcttgtatttcctgttcttgtaattttattgtccataatatggtaaagtaggcatttacccataaacaatataataacttgcgtgtaaattccaacaaacttattttgtaatgaccttgagatctaatgtttgatcatatatatagtaaattaataatattacgactgtaagatttatttttattttttgatcacaatgagccattataaaatagatggttgagcattttattgttgttgatcaatatattttcttacattattttttgcttttattttgtatgaaaagtatttatcgaactttgccaaatattttatcgaaattttttgtagtaggcaaagtcattttggtagattatttatttatttcggtattcaagagagctttttagctttttttttttatggttgtatacgttgtagttatttaagactaagaaatttttttaaaaaaaaattgaattcagaaaattaagcattataaactactcataattttttgaaaatttacatgtgatcctaagtagctatattgtatgccatcatgaaagaaaagaaaattagattaaaaaactgtcttggatgccgaaacaagtagaggatctacaaaaacataaggtacattgtacttacccatatttttttaaccataacaaaattgataatcagacctctcgcccttcactaaacgagcccgaccatcgcaagcccatctcaattctaaaatcgttttagtttaacctttacctatcgccaaatctcctagggaaggagaaaatagtgaatgggtaaggaggatgaagaaagaaaaaataaaacagaaaaaaaagttaaagtaaaaaatttatttattttatatttagttttaatttaaactactttgtaatataaaatctgatattttgacacctattagatggtgtggacattataaaattatatagaccactcacaaacgaatatctaatattacatttaatatctaatagtgaagtactaaccgctgttactaaatattgacgttatatattttaccacaagaaaaaacttaaaagcattgaagtgctacaaagttgacaattttggtacttttaccacaaattactctctctatgtataaattgtcgctaaaatttaatttaatgtatctcgtcaagtttattatacaccatcaatagcgtcatactatccattcacttattttctttagtgttattaaaacacgattgaatatgaaataatatgaatttgagaatgatataatgttacaaattagcatgacatgatacgaaaaatatttatttaaacacaacataaaatgataaattcaaagacacaacgcgtattaagcagattaacctgaaagtatgatgtgttaaaaagcttaaattttaataataataataat

SEQ ID NO: 130314 - DNA, 692 bp, Cannabis sativa
cgattctatttggatcgtcatcgcgagtgggtttattgactctatttttctttccttgtcttgaatgccgacagagccattatcgatggtggggaaagagaacttgggatggacgaagggggcctaaggatcttgaggtttaaatagtcagggaggtctatagtggtctctattttggtcaagcgtcactagaggtggttcattggcactgagccaagagcaccaagggagagagacaaatctaagaaagggtgaagagggatccgagagagtgagggtcggggtttctgggtcttcgtctggggtggtcaagctcgagtcacgaaaaacaagagctgctccgccagggttggggctgcctatggctaacagagaaagagagagatgacagaagagagaaagaagggagaagaaatgaaaaagaaagaaatgaagagagagagtgaaaaaaaaaaccaaaaacaaataagaagaaaaaaaaaagaaaggacaagaaaattttgtttttttaatgattttctttattttaaattaatttattttattttatttttaaatatttatttatgtggatctctaaaaatgtgccatgtgtaaattttgtacactgtggcatatcttacttggcacttaatagagccttgtgaacagaagtgtaaagagcaaaacagaatgtgagtttggtaagtttt

SEQ ID NO: 130315 - DNA, 2115 bp, Cannabis sativa
caagtgagcaccagccagcaaaggtgaatttcttcacctttcttctctgagtttgagctgattcttcaagctaagatcaaccctagttgctgccctaatctttaaagtaagttcttgttactttccttcttgatttctagtggttttgagtgaattttggttagggacttaggtatttttggggctgtgagattaattgggattagaataagtttttaggttgtttcctaagcttgttaagtttgaactgattagaagtaagggctgttcacttttttttggattgaatgaagtttaattttcatttgggtgtatgattttgagtaaatgattgagttgtgatgaaatgatgcttgggataagttgtaattgtggtattgaactgttctggagctgtgtatcaggtttggtgaagatttggttcgagtttggggaaaggaaccctaaattcctggtctgccagaacaggtcgactggttggttctggtgtaccagaaccggtcgaccggttgcaagcaggggaaatttttgggttttcctcaggtttttgtgttggctcggggttgtacccagtatctattttaggttatttatgtgtggtatgacatatttttggggtgttggagagtaggccttgtccggttttgaattaaggtttattttcggggtgttgatttagagcattaatggaattttgattgtcatggcataggactgcgatcgtcaaactttgtttccactcaggtcggctcgcatgcttaattttaggactgaggtaagaaaagtgttttgcaccatttatggttaacgaatatagttgtaatagtctcgattataaatgatattacattatgtgtttattatgactcgattatgatcgaggtaatattaaggaacaattattatcgtctatgactcgattataatcgaggtaatgataaggaacgattattatcgttggagactcaattatgattgagtaaaagaaacgatcattaccgttatgagtaattactcttgaaaccacggataggtttcttacttatcgtttgctgtattgggcaacgatagtgacatatgtagctcgtggttaacgagtggtaaaggtgctttatgaagtactgaaattgtatggttacagtgttgtgaaactatcaagcatgttattatgtgatgagttgtaactaaatacattgtgttatggtatgattgatgaacgttatattacttatgaaattagtctctattcttgctgagtctctgtaactcacaggaggtaagaatacatgttgtagggatgtaagatttgagtgctttatgaagcactgagattatgtggttattgtaatatatgaattagagtgctttatgaagcactgaaagtaagtgtttataatgatgtgtgattggggtgctttatgaaatactgagattgttgattgtgaatagctataaatattctttattatgtattaagtgtgctcgcataaacgttatgttgtatttgtatatgtacattgaaatatgtaggacccattggtatgtatattttattatcatgaaatctgcttgcactttccattacgtctgattagtagcttttcttgttgagtcattgtgactcacgggtgtttcatggtgcaggtaaagaaattaggtgctgtgtttggccatgagtcagaggtctcccagtaatgtacaaatcagccatggtgtcttggcttccgggaagcaggatcgatttcttttctttatgtttggaaatgtaactttattttagtaatgatggttttgatatatgttataaggaaattttataaacaggggatccccatactttagtggtatttttaaagaaagaaaatttatatgtatattttaaattatcaaattttatttaaaccacacttttcctaagctagtagattggtgataataagattgtaaaagcacacacgtggtgttcttgaggttcagggcgttacacgtagactgaagatttaactttaaaatcacgttaaaaccttcttgttatttattatttatttagtaattaattgttgtataataaaactctatttcaatgtaatttttattggattttgtgccctaaat

SEQ ID NO: 130316 - DNA, 1275 bp, Cannabis sativa
attttagattttttatagaaaaaaccgactaaactgaccgatactcagccttaacaggtgtgaagacttgaaaagagagagagagttctatgccttagtgcttcgaagctcttaagtgcataaataaactcaggttggaatcctgagcgtagtccttttcacatatggttttgatcctttatatagttttaggatttacaaagttgttatttaaaaatacataaaagatggaaaatatccctacaaagtagtgttgctgcattctggtgttgaattcctaaaattgtgggtagtttgaattgtttcgaagttataggagcgcttggaggtcttttagaaagcccatgggagaaaacatgacccattcaggctgttcgaagcttggtgcactcgttggtcgaccaaccttatttgtatgttgtctggcgcatggtgccatccttagccggccaactagggtccgtctaggtcttgaagacttgttgcttcttcctagttgattccttctttgtctcttgacatcttgatggttgagaaatcgtacaacactaccctgcccgattagtgatgagctgttctccacgtgtcttctgcttttgactatgtggacataccacatcaggtgggcaaaaattaggataacatttgcttcccaagtctctgtctgaatgtttgtccagataggagctttacactctaattggtattgtaatgccctttgccatgtaggtatgcacaaccaaatattggtctcttcggctgacgtaattttatgacagttattaactttattattaatcattgtgggaaatcgtgtgacgactgtatactttccatatttgcctatttttgtgatattaactccccattaaatttttttttttggggaaaaataatttttcagaacatatataaatgtcttgttttctttttttatttttcatttctcctttgtattttatgaacaaactctctaaaaaaacttcctagaagtcgaagcttcgtgagctcgagttcttcgtggagtctgactttctcgacgcccacactcatttgaactgtgccccgccgtgcaatgttgctccaggtatgtggaataagctttcgaattcaaaaattttagagcgtcacaaggtcctctagtggagcattctctcaaatgctctgcctatctgctctctcctcgctagaagattacatattgaggaagttttatgtcccttttgtggtgagggagagaaaacaatggagcatctgttcctttattgcaatttc

SEQ ID NO: 130317 - DNA, 548 bp, Cannabis sativa
gactcagaagatcataagttgtatgtaaaagttcaagaagtgtaaattctggttgtcacgagtgtctttcctagggtatattatcggaaaggatagaattatagtcgagcctaggaaaattgaatcagttaagaattggccaaggccaaggacagttattgaaatccaaagttttcttggattagtagggtagtattggcattttacgaaaggattttttaagatttcaatgcaactgacagaattgactaagaagaaccaatggtttgtatggtccaataagtttgaaacaagcttccaagagttaaagttgcagttgatcacagaattagtgttagctttgccataagatcaagaaaagtttgttgtatgttgtgatgaattcagacagggtctggagtgcattctgatgcaagccgacggggtcattgtttatgcttcttgacaattgaaggagtatgagcaatgttacccgacacatgatttagaacttattgttgttgtgtttgccctaaagatatggtgacattacctatacggggagaagt

SEQ ID NO: 130318 - DNA, 726 bp, Cannabis sativa
ccaagggacctccaatgaagtctgcatttgtaaattttacaagatgtgaagaatatagacctaaagatatgcctggagagatggaattggtgttaagtttttccaattctcaatgtcaaaagttgatggccttgctttcttaaaagattgctgataactcttcactagatcctcaaaatgatcaacctatagtgtcacatttttcttgtaagaatttttttgttcatagttctaattggatcattggtacaggagctattcatcatgtgtgtcatgatctttccttatttcaaaacattcataatgatcttaatcttaaaatagttcttttatctactggtattcacactaaaaattgattacatagggacaattagattaatcccttagttgattcctgcaaatgtgctatatgttcctacttttaaatgcaatttattatcagttaattccttgacagcaacaactgattgtacattcttgttttcacctagaaaatgtgtgattcaggacactatgaagaataaggtgattgggattggtagaaagtgtggtgatctctgttacttgaattgtaatctatccaaaaatgtccattctattgttatttaatcttctatttaagattctaaaatctctcatgaaactatttggcactatagattaggccatccatattgtgtataaattcatcccttgaataaagctttaaaggttcattcagat

SEQ ID NO: 130319 - DNA, 828 bp, Cannabis sativa
ggtgatgaagcgaaggctgagattttggaacggcggcggaggaagagagaggtgggactgaaattggcggcggagataagggcattttcggaaagaattgttgggatggagagtatgaaaatggagatgatgaaagatacagagaggtgtagaagagagatggagactaagagaatcgaaatgattcatcgttcacacaacaaaattctcgattccattaccaaagcttttcgattttgaaggttcataattattactttaattaataataaataataataataattataatcaaaattttaataattctacatttcaacactttttctttttacaccaattgattgatggatttagattaatagagattatttctttattttctatatggatttttaacacttcataattgatattggaataaagatgttttaaagacaaactttgattttttttttcggtttggtactctttttgtaatttttgtaaatttgtctctttttttcgactttgggccttgtgtttgcataatgataaaatagatttggtatttttttgaacggagttttttctggctaaatcctcctaaatatcgtttcacttgtatttaatcctctaagttcaaatttttttagcgataaaatctttcaaattactaaacagttagtaaatttattgtgccattcggttaagtgtcaccctgaactgtttatatgcacactcttatacatgtgccacttttatattagtacacataatattattagttcaaaattattttaaaattaaataaattataaaaatacaatataaaacataaaaaaaaaa

SEQ ID NO: 130320 - DNA, 1453 bp, Cannabis sativa
  modified_base (538)..(543): a, c, t, g, unknown or other
  modified_base (573)..(578): a, c, t, g, unknown or other
  modified_base (608)..(613): a, c, t, g, unknown or other
  modified_base (641)..(646): a, c, t, g, unknown or other
  modified_base (1323)..(1323): a, c, t, g, unknown or other
  modified_base (1398)..(1405): a, c, t, g, unknown or other
tctcatctcttctctattttctttctctaaattataatattacataatactaatattttataataaaatgtaaattttttaataattacatgctataactacacctaattttcatgaggacatgagaattagaaagtataattcaaatatcttaattgtctctaattacatagttatagagtaattacactactaaaatattacacaaaaatgtgcaattacctttaattctatgcaattctaattctatcttgactttcccagttgaattaacaaaatatcctttaagtatttaaaaacagaacaactttccttgtataacattttacttatcaaccaaataagagtgtatacactctcatcacatacaacttgattatattagaatcataattacctttagtagctctcaacatgaagcctaattgaggtgttattagtaacaccatttggtaattttattcatttattttagactaataaatatttaaaacataaacttttatagcaaaatgatctattaattcactacaatatnnnnnntgatctattaattcactacaatatatatannnnnntattaattcactacaatatatatatatatnnnnnnattcactacaatatatatatatatatannnnnntatatatttatatatataaattatatgcatgacttaagagtatctaaaataacacaacgatacatacattttgttactacctctaagtagctattactaagtatataattaacacttcaaaattaagggtatccaaattaacagatcacacgttggttactatcaaaattaccagatctaaacacttcaaaattaacagatcacacgttggttactattacatataagggtaaatttggctacccaacgatatagtaaatttggtctttcaaaaacaaaaatatatccatttcaaaaaatatatatatttatgtataaattacctactaataagtggtacatgtaagtatttaaaaataaatagtaaattaaaatgattacatagaaaatataaattgacactttatttaaaaaaaatacctttataaggtgtggataacatttataccttttatgtgattttaattaccaaaatactacttacactatcacttacacaatcagatgatggttgcagggtggttgttgcgtggttgcgctatggttgcatcagacaaatgtttcaatcagacgatagttgcagggtagttgttgcgtggttgcatcagacaaaggtttcaatcagacgatggttgcagggtggttggtcgaaggttgcatcaaacgaaggtttcaancagacgaaagtttctgggtggttaattactgggtgattggccgaaggttgcatcagatgaaggtttcaatcagannnnnnnnctgttagcaaaatatttatgcaattgtaatgcaactgttgtaaaacat

SEQ ID NO: 130321 - DNA, 631 bp, Cannabis sativa
cctcttcttgtgtatgtaaatgagtttatcccaagacagatatatgtctcgtcaataccagtttaatagttattattgttgtctcgtataagactaagcagccaacgagtttgaatattatctatcaaacttatatttaattgggacgaattatttaaattgcatttaatgatacatcattattatattatcagagttgattcacattcattctgtaggacacgtgtcagcttttggtacatagacgaattttgggtataacagtactatacatgtgttattaattgtttgaaatatgttaaattattttaaatattttcaaattttacataatcttttaaataattataatgttaaatatcatgtaagaaaaattaaaatttaaaactatctggttgatattaaaatacaaaagataaaaatgaatatgcaacccaaatattttaatcaatagtattactatgtatataaatataaatcatcatgaatgtacatctattctcaccaactactataccaatccttttcatttgtaaaagttcaaattcaatcactagtaaattaacaatttaacactatagctatatatatatatatatggaagaggtttcaatggttacatttttattgt

SEQ ID NO: 130322 - DNA, 1843 bp, Cannabis sativa
attgaaaaagcgctgtagcgtgccttgacattagggcgttacaaatcacatctatttgattctattaattaagataattaatgaactcaatagatatcatagataatcaactcaatataattattttttagtttagttcatgttattaagttgtataaattataatttactaactaggatagtaattagttgattggaatggatccgggaatggaatgacttttctaaagtgaatccattcatttgtttggtttttcatttataataggaaagtttatataaatgtttatgtagttatttgtgttatgtcacctaatttcttacaactatctagtaattaactaattatttatgttatgtacttttcctttaatatttatgtatttttagtaaaatttatcctaattctactaaaatttcagcaggataacagctgtaattggacgttccaaaaaattttaaaaatgtcaaaaataacaaacaaaacaatacaaaacaaacaaaataacattaatatacaaaatttatctacccatccgaccgcagtacatgtattcgcagaacctacttcactatggttgaatttttaagatattcaaactcaactaatatgcatattattatacatccatccgaccacattatgatatatcacagaacctactttactatggatgaatatttaagatattcaaactccactaaccatgcattgataataaattatcataacaaaaagttaatgaatgtctatacctatagcaacttaaaattcgatcaacgccaaattattctgaaccttaaaaattagctcacaacctacaatataatgaaatacaacaaaattaaaattttaattatttaattacttactagttataaaaaaaaagtaacaagttactagttactaaattatacacattaattttgaaaaaattacatatatatacatatataataaaggaggaggtttcaatgcttacatcaaatattttaccatcattgttacatgtaattttaaccatgagatcattgttgaatggttgtgattaatttagaaattaaaaaaaaaaaaaaacttataacttgatactttattcctttataaaaacttaattaaaattaattttatttaaaattacattactgataattattaattaattttatgcaatttgttaataagtaaagatcttttagcaattattttttctaacttaaataattgaaataaatacaacaaaactccttataatttaaagttattacaaacataaccttaattaataaaaaaatagtataaataacatctaattagaggtaattttacgctcatgaatcttatttttttaacacttctaagtgccaaattagtgtgtcaatccaagattgattcaagttatttagtttttttctcttaaaaaatgaaaaattaagtaaagaaatgtaataacaactataaaattaatgattgttaaccattttctctcctcgttaaaatcatcttcatcaatctaaagattgttagaaaaattatcaaagtagattaccaattaattaaaattgttgctttcacaaataagcatatcagtaagaaatagctagcaaattattaaaaatcaaggagaaatctaactgtagcttgttaaatagagaaatggatttgtggcatagatgtaggagattgtatcgaagtagaaaattcatataatgttaggttgggacaaactgaaaatttaatttttaaaattttttttataaaggaggaagatgggtcaagcggttgttgcaaaataataattagatgtaatttttaaaaattaattaagtattcaaaaattta

SEQ ID NO: 130323 - DNA, 1565 bp, Cannabis sativa
aacaagaacattttattatgtttttttagtagtgaggggacccaatttctccccttctaattttgtgcttgtcatggagtatttgttccaaagaatctagcttgctactaaagataaaaatttcaagtatcacctctcatgcaaaagatcaaaactcactaatctttgctttgcaaatgacttagtgattttttgcaaagggaatgaggaatctgttcaagcaatcaatagtgctttggaagacttcagcaaaactttaagtctgtccataaactttgagaaatctcaaatttactttggtggtgttattcatcctgacactattgcttagaagatcaagttttctattggagaatttcctctcaaatatttagggatcccttttaaaccgaccaagtggagccttgaggaccgtggtacaattctgaaaaagatgaaacaaaggctttattcttgggcaaataagcacctatcttttgttgacataattcaattaatctgaactactttgattggcctcaggaactactggatgagagtgtttcttttgcctcaaagtgtgataaaagaaattgagaagttatgccgaggattcttgtggggtttgaaagagaattgcaccagaattcacttgataaactgggataggttgtgtctccctaaagcctatggtggtctcgggttcaaagatggctcaaaatggaacaaggcttcacttggtaggtttatttgggatttaatgaacaaaaaagacctactttgggtgaagtggatcaattcgatctatcttaaagggagagattttcggtcttaccagatgaagttggattcgagttggtactggaggaagttatgccgattgtgtagtgtgttctctccatttgaaatcttggcaactggcaaagggagtgttcttagagttaataagctttataactctactttacaccagtcattggatcccacctctagtgccgtctggtgtagtctcaacatccctgctcatacaaagctgctcactagagacatgttaggcagattcaacattcaagtgagcaacctgaactgtgtcatctgtgatgcaaaaattgagaaccaccagcaccttacatttcattgccgactgtctcatctggtgttggatggtgttttcaggtggatggggttcaaagggtggtcgataaacttcagcatctggtattcttggttgggaacagtcaagctgagtatggtagagaatttctcaaatactattacttgtatagtgaacaaagtcaaaaaaatgttaagtatagattgtatatgcttaaggataggaaaggagccaaagtggaactagatttattacatagcactactacaaaagtgggttttcccgacgtttttaaacagtcgtttaaagtattcttgtctttctataaccgtcgcctatacgaccgtcgtaaaatgggcagaataggcgacgattcaaaaccgtgactaatgtgagtttcctgatgttttaaaaacgtcgcctataattgggtataggcgacggtttataaccgtcgggaatgtaaaaaaaa

SEQ ID NO: 130324 - DNA, 2079 bp, Cannabis sativa
  modified_base (2018)..(2030): a, c, t, g, unknown or other
gagatgttctccattccagtatcttggtaggagaactaactccatgttctgattgtactcgctaaacttgtatgcacctttacttgttatctattaacttggtgtggacctttttaatttgatccatacttgctgcaggatcctcgatattaaggaatattcttcaaagcactaagtcttttatgaagaattttctctcattgacttgtttgttgaagtacctggcagctttttgtggcagacatgctgctttaagtttgcttggtcttttctttcttctattttgttaagagattctgctagcaagatgtggtttacttcttggtcaaagtagatgtaacgccctaatgattaggcacgctataattatcttttaattattgtgcactcctttgctaatcaaaggtgtttaccaagattttcgaaaagtgactaataagagcttaaggaaatggagaatattaaataatagacaaatggagtttttacgtggtttgggcattaatgatccctagtccacgagttagttgtattagcctttttggcaagtatttgagtattacaagtgtttataataataactctatattcctcttgtttctctcaaagaataaatctctttaggaatttttgcaaaggttttgtaagtaaagattattcaccttctgtacataaaaagtaggtatttataagcacacatgtgggtaagggcatactctttacccacctagggtttcttactctacatgcaaggagggccaaaaatacaataggaccatctgaccgctaatttggtaggtagtttttcatcgtgtggtgcttgatcaatgcaagatacctcgtaaaggtcttgacacgtgttgctcaaaggtttatcctttaaaagcaattgcttagacaagctgttggacaataagcattatagaaacacgtacacgtacaaccacggtctgacacaagggacaagatctgatctagtgtcaatagatatgcaatcgccgggcttagttttggattaagccttaaggagcttcaatgaggctcgtccaaggtcttcctggaacagccaatttttgatcatcccagagtgtatgagattcccattcattcccaatagcagaagcacaaggtgagaatctctatgatcatcttggccattactggacaagcattctttggggtactataacaccttccataaccttgtttaagggaaggttcatgatatcaatatttaattcgatgtggcacccatggcgacttccttgtagaatccatttgggaacagggataacattcacccccaactcctagaacttgagagtatcaggagcttgcatccttctcctagatgtttgttttatgtcgttaactcgcggacagaccatcaggatgtggaagggatcttccatgttgttgtgctttggcgatatcattaatgactcgttgatgtatggtgcttgtttagtggagtcgtgaaacccacgctttggattttagatgcattcttctttttatcttttgcgttattttggaaatgacacgaaatcgtctgtagaatttcgaaaacgctactaaaaagttataccgtcagttacaaaatgacacataaattactgaaatacttttttcacctattgcgtcggttataaaatgaaacataatgttcacagtaaaacctttgtacatattaaaaaaatacaaataagctatattattatatccatttaaaatataagctacctaaaattcatcagccaaagcatttaagaaaaaaataaaatatttatacataataataataataataaaaagtattataaatgtaaatacaatatgattgttaggtctttttttggcaattcagttgtcaaaatattttttacttaatgtgcattttattgagcttttaaattatttttattacattgattttatgcattttattactcttttctatcttaggaaagaatcattttttagctaactttttctttgtttggaaacttcttgtaagnnnnnnnnnnnnnttatgaaaagttgtctaattttggaaaacttgacttttcctttttttaa

SEQ ID NO: 130325 - DNA, 1423 bp, Cannabis sativa
  modified_base (32)..(35): a, c, t, g, unknown or other
  modified_base (1069)..(1097): a, c, t, g, unknown or other
tttagtcacaagtaatattttattgtgactannnntcacatttagttacaaaaaaattatgttgtgattaaaaaattatcattaaaaataacagttttttgtagtcagcataaataaaatatatttttttcctgatataatttaaatatatatataatataaaaatgtaattgtattatgtatatacttattatttttacatttacattaatgcccttgctcacaattatgcttaggtccgtccctaagtaaaacaattatgttgaatttatttttaacatcaaaacttatttgaaatttctctaaattaataaatttgttggaaatccactataactactatgacccataaaaaaatatcatatcacccataaaaaaaatcaagggacctcaatgtatccatacaaaaatatcatatcacccaaaaaaaaaaaaaatattactactattttcaataatttttttagggttatgaaaattcttttttttttttttttcttacaaaattgttatgaaaattcttaatactacaataatgagtattagggagtgagatttaaaaaataaataaactctaaccatacaaaaaaaaaaaaataataagctcaaattataaaaaaaaataactttgtataatagagaataaatatagggctctttatgtttttcgctaaaccttttctaataatattttaatcagaaacactattattttataaaattaatttatataaaatattattttaataatcaaatactaattaaagtaaaaaacatgaagcaacaaaaattaaaataattctttattttaacattttaactatttaagttaaaaataatagagagtaccattacttatattagtatattaagagcactacttactctactatatcctttaaaatatttcattaaaattttattttttttattatacttcaaatttttacataacaccacacattaattattctattttttctctatataatttaaatattatatttttatttttctctagataatgtgaaagaaagaaaataagataataataataatgataataatnnnnnnnnnnnnnnnnnnnnnnnnnnnnntaataataataataataaatgtttagctaaaaggtaaagcttaactaaatgtggagatgcactattcatgagctaaaatattaattagtgattagaatcactcataaatttacgatgtaaaaatttgcaatcaacgcagaaccttttcgaattttgaggtatattttaattttgtaactattagaccatctttaatgggagatataaaaattgtgctatatttgccataaaaagtagttttgtggtaaatttataccaaattttagctttgtgctccaatgcacaattgcaaaattttgatgtaaaatttaatagggcctttttca

SEQ ID NO: 130326 - DNA, 1141 bp, Cannabis sativa
aagataatatttgtttaaaatatatccatgtttctctagcagtgtcggtcacccatcctttgccctgcttatggtgagtggcctgccaagcatctgggatcggtgccaatcatccagactctggatcacactgtgatatagatgtaatttttattattattcaaagtaataacaacaaaacacaaataattcaaaaatctaccaaaatctcctaatcttacaaagctttgtaaagctttcacctattctttatcttccctacaaaatttcttcatattaagataatctgatctattacaaacaaattgaaccatatatctaaaagcaatttgtatttttttgatattgtttgaattagatcaaatgctaattactaaattactattgcacgtgccctgcttctccaacaagagcaactcaccagcttaaaatgcttttatgatatattatttataagtttaacagtctttttccttcactactactactctattctttttgctttgcttagctttgttgagattaaaagccagtaaagctagcttcatctatttatagcccaatccaagtaaaggctataaagtgaatataaaattaaatttgaaataaggttactttttctttaatgatcgtagtagagagtaaggtggtgaagtaaattgaagacattagttaagagaaagaagaaaaaaatgtatgccaagccattccatgccatcatatgttttgtacgctaatataaatattttcaaagcagagagagagagaggtgtaaataaaaacctcctcaattcaatagggtcttgtctatgcttcattgccttgtgtaattcacaaatgaggtcaaatgaccgttggaaggatctattccttttgttgagttacaattagaatgcaccttcgtagaaagagagccagcaatctacctaagtcaccttcgtagttaagctttgcaaagttaagtccattcattttcaaaggcatatagttaagatatctcctaatcttcattctgattatccttacagaagatataaacagcaatctaccaagtcaacaaaccacgtacataccatcttatgctatatttacatgtagctacaaacagcttagtcacaaacataaacacatagctaaaagc

SEQ ID NO: 130327 - DNA, 945 bp, Cannabis sativa
caactaaatcattaatgcaatgagaatgattggaagagagtatatgcaagtgtttttacgtggttgggatattaattagccttagtccacgaatctctgatatttaatatgtaggtgtttctttacagagaatgttctgctttattttttccgatccccattataaatgtagttgggggtatttatagcagtttttagagaggaaaaaaggcctcttttggagaggaaaaaaggcctctattgtcttaagtgtccaccttggctatgcataagttcccaaatcagcgaagtagggtatgcgcccttacctagtaggatgcgtagagtttaggtgagataagtctttatctttccttgattggtgtgacagtatattatgtagccgtcacttacatccttgattagcgcgtaattgctaaagagtgggtttaatgcgtctaacacgtcttttcatatttttttagtagatgtttccaccatactgcatttaatcgatcccttcggacttagacatagctctaggaggaaccgctaggttgtccaagggaatcctgtctacttaagatttgtttgaccacctccgagtccttaagctttatctgccacatgttgcgtcatggagttgccacgtatattgggagaaaaattgggcaacaataatcaatataagtagtttgccctccaattattagttcataattagagctggtcaaaattacaattttacccttataattatctcttgaattccttgtgtactatttattcattgtgaacagttaatctataatctcattacagatttggatctaactattagcactaccagcattaatagtataaaggaactaatatttgatcctttcggaaagcttggattccattattgtatagcatgttcccagccacttatgttattaggttcccaaaataaaagttgtaaga

SEQ ID NO: 130328 - DNA, 1188 bp, Cannabis sativa
gtaaaataatttccaacagaatagggattagcttaccttaatcttctcaacccttaaaccacaaaaatctaagctgaattccccttgcttggactaaattatagagaaaagggttgggtctctttgtgttgtcttgtagcggaaccctaagagagaaaaagagagaagagtatgtgatgagtttggataaatgagacttaatttgttttatccatcataattttaatctaattaaacttaaggaaaattagtagaaagatgatttattctccattactaaataaagccaaaagagatctactcttaactttactaggaagcaacctcaccttctaggggtaaaatggttcaaaaccaaactatggttaatcacaacattccaaatatctaaatatctagccccgctaattctaacatattcaaccatatctatgtgactctattggctaaattatcgcattccactgttaccgggcagaaaacataaaaattataaattttcatatatagcatgtataatgcatctagagttcaaatatatctttgtagttgaaaaaatatttttctaaggcatatttctggcaataagccttaatttctagtaagagacatataatcacaaaataaaaattaaatccttaattatatgctaattcccatggtttaacaatgtggtcattacatgtccacacaggatgggagcagcctcatctgcgcgtgcagaaggctgctggcagccttgtccgcgcatgcaggaggctactgacagcctcgctcgtgcacgcaggaggctacttacaacctggatcatcgaacagcagctcgggtgctcgggccttcaaacacgcacgcgacgggcttcatacaagggcaaaaacaccttgtctgagtggctgtgcacatggggctcaatgctagacagtcaacgcgtcaaaatttttaaaacctcatatctctctcgtttttaatcagaatcgagttccgtaaaaactaaacttgcttaatttttcacaaagattccaaataaaatacttttagaataaaaataaaattattttcaatgagaatttcataattcacattaaatcatcaattaacacataaactaacatgaacacatccaaatcaaccaaatatcattttaaatccatatttcatgaaagtaaatcattaccatggctatgaggc

SEQ ID NO: 130329 - DNA, 612 bp, Cannabis sativa
  modified_base (457)..(461): a, c, t, g, unknown or other
tttaatttaagagtcatcctttgaaaatgttgaaatagaaatagtgtggctggtaaaacatgaaatttctacgtaacttcatctccaccattatcaaaacaaactcaactatagggaactaattattatccttttatataattatacacacacattgaacattaatttcttgagctagctagctagctatagcttgtctctttcaaatgacaccttctttaactactctattgttaatcgtccttattttgttaattatcttcatccacatattgttgctcatcgatgttgtgaaagaagaacagaacttaaacaagatcatttacagaactgtacaaactaaacaagaattcaataatcaatttgaatgaataaaaatagtagggaagaatgaccccagaattttaagtagattgagctatcactacaaaaatttttacttttagtcacaataaannnnntgactaaaagtaaaaaagttgtgagtaattataaaatatcattcttatgttgtaattaaaaggtccgtggctaaaggcactagttacaaaaattacaatttattgtgactaaatgtatttttaatcacaatacttgttgtgactaaaacta

SEQ ID NO: 130330 - DNA, 1160 bp, Cannabis sativa
cattcctagtttgagtactcgccactctaggttgaatactcgcacttgttcttcatatagatttctttctgttattaataatatcatataaaatttgtgttgcgaaattcactcgacaacacccgtgatctaatttaaaagaatataaagtaaactatattcaatatgtatatattagataaatactaacaattaaaaaccctaaaatctaacattcgaagacaaacagatctgactccccctctccctctctcttcttctccttcaattcccaccaaaacggatcccctctacctctctcttccctttggttcccccctcacctgcaatttttaacagtggttagtcgtcagacacccctgcttggacgttggatgctagtcaccaccccatcgatctcttcctttcctcacaacagcctatattgctttttcggtaaatatttggtgtaaagattttagtatgctatacaaaattagggttttttggcataaaaaaaaacactcagattttaatgcaatgaaacacctacataaaatatattttttttttaatatgtgagaaacatatgtttttctatctctaaaaaggatgactaatattaaaatattttttttttgtttcttttttatatttttaggctatatattatgttattttattgtttaatatacattgaggttaatttttttttattaatgtaacacatatgatgttttagatactattcaatttattattaaaactgttttataaaaataagtttatttttattcaaccttgtaatgtctaaatataaaaataaaaaaaaaatattttttactaacttattaagttgtttgatgcattaaattttatttaaatttaaatattttttattcatttattaacaaaatataaaaaataaaatacttttagtaacttatgaagttgtttgtttaaacattgtttacttattggttaattaaatattaatggttagctaaagattaagaaactaaaatattacttttgattttggtcatctttttcactgatggtaaaaaaatatatgcttctcacatattaaaatgatcattgttgcccctgattttgtccaaaatacgtggaccaaccggattgagacacgtggactaaagaggcaagactttgggataatt

SEQ ID NO: 130331 - DNA, 558 bp, Cannabis sativa
  modified_base (531)..(532): a, c, t, g, unknown or other
aactaaatattagatatccttaattaactataaaactaaaatttgaattaattatttaaactaaaatgtattaaactgtacatcaatatttatatcacacagtataattttattatataatatagtacgaaatgaatgatttatttttatttaagttcattatgtatattatgcgcataattttgagaaaattacgcttggaaacgaaattttggaacatcataattaacactcttatgtttaattgtggaatatacgttttaaaagaattttgaatagatatatacgtagtgcttaatactttattttttatgtttttttttctctctttttgtatacacgctggtttttttttttaacatgtatttatctactctatatttgttgtcgagtgaatttcgcaacaccaaattatataatattattagcaacaagaaaaaatttacgtggaaagacaaaacctagaatggccagtactcgactgtgaatgagaaataattaacgaaagctggaaaataacaataagacagnnaattatagtggttcagtcagattatg

SEQ ID NO: 130332 - DNA, 1592 bp, Cannabis sativa
  modified_base (27)..(42): a, c, t, g, unknown or other
aggatgttaatgaaacatacatggtannnnnnnnnnnnnnnngtaaaatatttccaacaaaaactgaaaaaatagtcgaggatgtaaaccatcgataaatttgagacattgaggaggatgaaatgatgttgtacatgatacaagctcgtcaaatttttggatgactatggatctaggagagttaatttttgcaaccttcttaagtggcgacaataattgatactgcacaaaatttaaatgttaatcaagctaatgaaaatattgtagatgacgacattgacaatgtaatagatgataaaggtgacgagttgctagttgatcgatgtgaagacgatataatttctcaaaatgatgagagtgatagtgactattagttcaacttatgttttaaatattttgttaacgtcttcacatcgagtgaattggagttcatagacatttgatatgtttacctaattggagttcaaattcagccttgaattgagcgaatgtttttaaagcatcagatttgtttttaagcatatatatccaagtgaatctagagaatgcatcaacaaattagatgtagtatttatacccattaacagatggggttatagtagggccccataagttagcaaccacaagttgcaggggttcagtataaatagtatgagaagatttaggaaatgataatttgtgaattttgcctaaacaacaggctgagcaaactaaaaaaggtattttattgctgatttgtatattacatgatttgagtacagatttgacaatcctttcagaaggatgtccaagcctattatgccacaagtcatatttagatacatgggatttattacaagcagtacaggaaggagttatttgctcattattctgggatagggttgctgtgaaagcacttggaaagcatctggtggtgaggcttgaaccctgaactgggagggtttaaaagcattgaggtcattctggtgtatcccagtaagaaggatggcttgagtgacctggtcttttacaaaaaatttgttagcatggaattcaaaaaagacattattgtcacaggaaaaccgagacacaattagtaaattttctgttattttaggcacatgcaagagattatttagaacaaggatgaggagaattggaattaataaaagtttggccaatgtgtttgattgatagacctgaaccatctccaacatagagttgatcttgcccttcatattcagtgctggtggccagattttgcacatttggtatgcaatgatttgttgcacccaagtctggataccaactggtgtcatcagtttgagatgtctgggcaagattagcttgagcagtgggggaagttgagcccacccctgtgaagctattatcgaacatgtagaagcaatcaataaccgtgtgtccaagcttatggcaaagctgggactgaacacgattagctagtgtggggaacctaccacctctgttgacaccagaaacaccacgaccattagtactagtaggtaacactataagaaatgtcccttttactaacttttaccagcgcatttcgtaaactgcgctggcaaaaatgtcaaagttttaccagcgca

SEQ ID NO: 130333 - DNA, 1009 bp, Cannabis sativa
  modified_base (775)..(792): a, c, t, g, unknown or other
  modified_base (977)..(984): a, c, t, g, unknown or other
gagattaaaaagctgggcaaaaacgaacctctaaaaccaagtttgattaaccaaagccctgtctagacgaaccttaatccattcattagatccacagcccctttcccaagtaaatgggtacccctatagagctaaatcttggagatgacactcatccagcaccttttgaaatccatgaataagccaatgggggtaatggttaccacatttttttatcagcattagacaagacattattcaaatccctaatgatacaccacggcaatattgatgcagagtgaagagtacgaatttggtcccaagtttttgcatgaaggcttctattcggttcaccataaagtctgattaatctccaaggttcttctcgaaccattgttacttttaagtcgatataattgacagagatcccaagcaattccacttcatcattgaatctccacaacagagcaatgccaccacaatgacctctagcatcaatagatatcatgcctcaaaacccacaaccacttttaatcgatcaatcacatacttacgacataatgtttcacaaagaaagataaagttgggacgcttttggacaatgagctttatataaaatttatacctttaattgtactaagtttttttagttttcttcttccaatttatattcttaaaaaatatacatatcaaataaaaataaattatatttaaatattatgacaaaaagaataaaattaaaaattatatgaaatataaaataatgtgaggagaaattttttttaaaaaaaatatnnnnnnnnnnnnnnnnnnattatttaagtttattttttttttcaataatggggtgtactaatcattttatggggtgtaaatagaactccccaatcgttagataggctactttttcattaaactcaaaatattcctctcataattcgcccctcctctctcttcctctattctctctctctctcttgttgggttttatgccctannnnnnnntccatttcaatgtaatccattttat

SEQ ID NO: 130334 - DNA, 1088 bp, Cannabis sativa
gtaaaaccagtcagattcagccactacgagggcttgcactttctcgaggcgctaatcgagcacccgatcctagctccaaagacgcactggtcgataatcttggactcacatgctctgtacactttcgcccaagctctggggtacggaatgcaagaacaaacaaaccggttgatgaatcatcaaccagaccaattggaacggggccacagagcaagggaagcaagcgatcaaacccgataagtgttgatgacagtccgtaatcttcgaaaacctcgattggcaagggttccatgttagggttttggagtttgcgtcagagggaagcaaaaatgtgaagagaaagaaaaagaaaaaaaaaaaagagaaaaaaatttaatttttataaattgttttttttttttaatttttaaattatttataattattttttaaaattaaaattacctagactactaaaaatttgtcacgtatgtacacgtggacagtcacttgtgacacttaactgtgatttttggacggaggggtacagagcaaaacggaaccagggtttagagagttatgaggccaaaatttcaatttttgtgattaacggttacaaacctaagaattagggaggtttagccaccaatatccctaaatataataaatcagttacaccttatttatgtacaaaaacgaaagtacatatacaagaaagaaaaactatggtgatgactgagtatacatggagtatatatatatggccaagcagacttggccgttggacaagctaaattgtttctcattttcaggtagaaaatttaactctaacatgtatgacttaacttcactaaaaaaatttaataaagaaaagttaattcaaaatagataaatcaagaacaaaaccagcaaacacttatcaaatcaaaaacataaacacatgaatttagataacttttagacacagtaacacacgagattatacttagtactactcaaatttgaaagctctcactactacaaaaaggggtattttcgtcgttttataagtgacatataaagattttgcgtcggtctacagaaccgacgtgtaatccgtagacgtaaat

SEQ ID NO: 130335 - DNA, 844 bp, Cannabis sativa
  modified_base (687)..(696): a, c, t, g, unknown or other
atgggtagaacttaaattaataaactcttatgctataattttggcataggtgaaattgtgttttgcatttattttaatattttaaatgtgaaaattttgtttaacaagggtattttaagtacactacgtataaaaagaaatatatttcaattaaatataaattagagataaatttagttaattgataaataaaagagatatttttcaatttatgtactaaaattgtatatttagtactaaataacccaatttgggaagttagttaaatagactatcatacttatacaatttcaccaaatatatggttttttttttcaaaaatatcattttatagaaagaattattccaaagagagagagagagagaaataatataaggtaattggtttcctatatcttttttacatcttttgaatgttcccacaaaataatagccatatttttgtaaactttccattttattttaataaaaatgtgtaacatcgctaggaacttcttgatgacaataatattataatgaagaataatagtccatacaaaaaaaaattataggtaaatattattttagaccttatattttataaaagttattaattggaccctcttgttttgttaaatgacaatagaccctattttttctttttttaaaatggtaaaaattagtcctgagctcaatttttaacaattnnnnnnnnnnatataactaactttaagataatttctaataccaataggtatagaaaatataatcaattttgtcataacatctttagatcgtattattattaagttttattttgacaaaaaattaattcagggtcctgtttgtataattttaaaaaata

SEQ ID NO: 130336 - DNA, 623 bp, Cannabis sativa
acaataaaaatgtaaccattgaaacctcttccatatatatatacatatacagtattcatatatatatattcatattcggttgatttatatatatttttatatatacatatttcatttaacttacattctatcgtatattatatatatatcattttttatatcaaccgagaatttttatatatatattatgtttatatatttatatatattatatacggtaatatatattttcggtatctatatagatatgtttatatatattatatatacattttattgcataataatgattataatactctcattcatatatttataattttttatgcaatatatacattatatacgtatatatataaacacatgaaatttcttagtttttcgctgtgtatttgttccgattttaattttcatttcggtatctatttcaatttctatatgcatcactacattcatatagtattggaaatcgttgtaagcatgaaaactattttgaaaaataaaaaaaaactcaaaattttctggaaaatgttttacggacccgaaattttttggtgattttaaagtctttgttttacgtgttttcgatgcatgaaatctatatgaatgtcttaatttttgca

SEQ ID NO: 130337 - DNA, 539 bp, Cannabis sativa
tcccaattaactgacaaagaattattgggcttaaaataaaaactaattaaatctgttaataattcgggtatatgtgcttaacaccctatacttaaaacatgatatatcgttgttataatttaaaataaatataataaggtatagcgttaagaatattcattgggactatacttaatattcactactacaaaaataggttttccccgacgcttttaaatagtcgtttaaagtattcctgtcggtttttatgaccgtcacctatacaaccgtcgtaaaacaggcataataggcgacggttcaaaaccgtcgctaacgtgagttttccgacagtttaaaaccgtcgcctataactgggtataggcgacggtttataatcgtcaggaatgtaaaaaaaaaaaatacagatttttctgctattaaattttcccccattttttttctccattagctttataattttacctgaattaaaataaaacaactaattaattttgttacaataacaactaactttgaaacacattaaatttatacaataa

SEQ ID NO: 130338 - DNA, 1839 bp, Cannabis sativa
  modified_base (1645)..(1648): a, c, t, g, unknown or other
ttgaagtttactacactcgtcttgttgtcctcttgttttcatatgttcaaaggaaaaataataaaaatattgacagtgaagatcaaaagcaaaacaaatcttccaaggcttctttagggaagaagtagggtcattttatggggaactattttgtgctcgttgtttgatttttatattttaaatgattatactttttaatagatggtattttttttttctgggtttatgctctactttaagttctgtatgacttattgtaatcatttcatttcaaacaattgctggtcttttctgtgttttggtacttaatacatttgatattatgaaaactgcttagcaactgttatgctgtttgaaattaaccattctagtatgttcattctttttcatctttaacatcaaatgtgttatgaacttataatgaacatttttagtatatttgcttaggcatacaacttttaaaaaactattatctaactgttaaaaaactaatttggtagcaatatatttgtcaatatatttgtaacatatttctcaagcgattagcaactgttatgcaattttaaattaaccattctattatgttaattctttttcatgttaacaccaaatgtgttatgaacttataatgatatttttgtacatttttagtatacaacttttaaaaaactaatatccaactcttaaaaactaatttagtagaaatctaattataatatatttttaacaagtatctcaattgctgaaaaaaaaaaactatttcaatttaagaaagtaatagcaatctatcaaactaacttttcatcctgtaagagttctcatataaatttaaacaattcaaataaatatgttgtatctatttaattgcttggttgtttcatgtctttcggttgttaccttgttgtccatatttgctacacctattcagttttttgtatcccaatcagctataaatcttcttttccttggtcttctggatcttatcttctagtttggtggtagaaaaataatatttttgatgttctatggtacatcccatgctatgtaattgtgtacaggatatattgacccgctatatgtttcaagccatgctcttgttgtgtaatactgtgaacagtaattgtaaacattcaagttcatctctttcatcacagcaagagcatgagaacatggtagtttgtctagttgaaatctgttgcaactacatgtcttttcttttagattgaccaccattgaccttgttagttctaccacttcaaacatgctctcgtttattggtttcacctgtatattaggtgaagataatcaatgtattgaatgttatgaaaactgaaaagaaactataaagaaattgttatgcaacttgaagtttgtgatcttacattttttgtcaatgagtccacaaagttatcgattaacttcttctctattgtaggtgtcaaaattgtttagttttctgtgcttttgtcttgtttgtgtatgtttattgttgtatcaaagctctcaatgactccattagtgttgtgattggtagttctctagctgctaagtttgctgagtttagagatttaacaatgttagaagtcatagttgtatacctgttatgtttgttgtggtaccttgaccatttgtggtatccaacttnnnntaaatatggtctaacatgattgtccaagctgtcaagctcgctcatggtattcaaatttcctctgtgtatgcttttgctgctgcaaagaatgttttatcgagttttcttacattcttcttgaaggttgcttaataggtggtatacacagtagccgtgcattatttctgaaaatacatgagcaactgccttaa

SEQ ID NO: 130339 - DNA, 867 bp, Cannabis sativa
  modified_base (618)..(622): a, c, t, g, unknown or other
tttactattttacctcaacatcctctaaatacttgatactgcaaatctatctattataaactaaactaatataaatttattctcaaacaactagtggtctcagagctttattcgatcatcactgggcgtaatcttttcgcccatcaacatgaatttggagtccaatcgctcttctatactttttctaattttttatagagaaaactatgatttttgatccaacaaaatgaggacctatttttaatcacaaaattttatggaaattgttaaagagggagtcatcatttcgaaagacattacatctctttcagaagatcaaaacaaactagtggaagatagccaacaaaaatattctcacgcattatactgcttgcaacaagctattgtagacaatctttttctacaaattatgagcacagtaaaggcaacagaggcatgagaaacgctgcaagaggagtttcaagaaacaatcaaggtacgcacagttagactacaaaaactagaagagatttaaaaaatcttaaaatgaaagataatgagattgcaaaagattattattctataatttaaaataatagtaaatcaaatgggagcctatggagaaataatttctaacannnnnatagtacaaaatatactaatttcttgtagagaaaaatatgattcaatagtttatgtgatagaggaaatagaagatttggaaactctatcaccaactgaactaataggctctcttgaagcatatgaaagtgttaacccgaaaaattgacagagctaattttgaagattagtcaacgattagtcccagcagtcaagagacatcaactatgagagtcgctcgaagaatgactgagtcaacgcatatgg

SEQ ID NO: 130340 - DNA, 1155 bp, Cannabis sativa
attgatttgtttttgcagtataatctaatctgataattgagtgagctgttttgcattgagagaaaaataccaaaccaattatttatttataaccaaagaaaaagcttttgatgtgaccaaaagtttgtctgaacttttattgctttatctttctctctcaaattcactctatatttattttttaattttacaataaactattgattaatcagatagtatatttttcagatgttgaaatgtctactactctttccagatttaatgaccaaaataaaatacttcactctgctcaagttcttgagctatgaaactaaacaaaagcttaagcttgaatgaaaaatgtaatgttgtgatcgaatacaaaatgagagagttagttatttaactaactcatgtataggactaaaacagaaaacagaattgagtgagctgtattgcattgagacaaaagtgaataagaaacagaaatggcctaccaaaccaattatttgtgaccaaagaaaaagtatttgatgagaccaaaagtttgtctggaaaaaaaaagccaaagaatattgataattaggtgaatacatgaaccttggtggatatgattcttatctatttctcttttcttgattattttctacttctgtaccccactggcagtggcatatgtaataagactttatcatcatcttgtctcataaatgcaattattccattcctcttccattgccatttgctctctaagctttctctgtacttttattgttacaatactgcaacaactaagctactgaagtgatttaaaatcatggctgaacttgtgattggagcttttctctctgcttcctttgattttttgctggaaaagattgcttctccttatgttgaggaattcttcaaggggaaaaatgaaagttcatctgttgtttctgagaggcttttcaagttgaagtcaaccttcaattgtcttgctgcggttcgcttcgaagtggagaacaagagaatcaaaaaccctgctgtggaaaaatggctgggtgatcttctggatgccgtggatgatgctgaggacttctttggcgatattgcatacgatgctatgaatcccaacaaagctgatgagtcaaagaaagaaaaacgaaaggccatcagtaagttactctcttgttt

SEQ ID NO: 130341 - DNA, 1391 bp, Cannabis sativa
ttatgtatgaagaaaatcttgagttgcaaccaaccagatctatcatatgaagaacaaaaagtttagatcttagataggaaagataaagttctccagaacaagaccatagctctggtcaaggtgctctgatgaaacagtaaagtggaggaagccacttgagagttagaatccgacatgaagactcaatatccagagttgttcatgttagatttcaaggacgaaatccttttaacgaggggataattgtaaagactgcttagctttgttttagaattagcagataattagggtttatttatgaaacttgaataataattatgatttattattttatggtgatttatttaaatttaggatgtattatatttgccatacaaggaattttatgtttttgcatgctttgtgctcggcaatatcagaatgcggcatttggccattagaatcacattttagtatttttagtatagcgggacaatatagttagacattataaatgtcagtaatagtcgaggttttagaattgaccaaaatatccctaagtgacttggaagctttttgtttagtaaagggtaaaatagtccttttggccctaagattcttttgtctttagtgggcttattttaattatgcattctgaatatattcttttattagttggataattatgttttattttattttaactaaaattaagaaaaggtcacttctctctcttcactccctctctctctctctctctttcgaacccttgaagaaccaacagccagttggtgttcttcaacttgtttttgtggattatagttggttcttggtgaatcctttgaaggtaacctttatagcacttttcctcttggttttcttaagctttaagtgatgaattttgtattgtgcattagggttctgtgttgttgattggtgtttgtttatattttctaaagttgaattaaggctaattaggttaaattgagctaggtttgtaggttgttgtgatgtttgagcaagctttgagtttaagaactcaagctgtgctctttaatagtggtttttgattctgagtatcttgtgttgttttgctgcttgaaatatgtattttgtggtgtattaagcaagtctggaaggtttggtaaagtttgaggtcgaattaagggtgtagtgaatttttgagtgtttcctgcactgaactggtcgaccggttcagggggacttgtaggaaccgatcgactgattggtcctaagaaaaccttatagaactgaaattctggttggagaaccaatctatcggttagggtttttggggaaccctaatttttcccgttttacgataattgttgtgaaaattatatacgcaagtatacgcagtcaaacaagtaataaagtgataagtaagatcg

SEQ ID NO: 130342 - DNA, 983 bp, Cannabis sativa
  modified_base (129)..(141): a, c, t, g, unknown or other
gagaaagagagatagggagacagacgggaggtggtggtggttcgacgtatgagacggagataagagggacaccgacgggaggtggtggtggtccgacatgcaacagagaggagagggagaccgacaggnnnnnnnnnnnnnggagatcgatggacgagagagacgagaagaaagggagatcaagagacggaggaagacggcgagagaggagggcgatggtgcggaggcgtggatggggttttggagagttgagagttttgttttagggtgtggaaaatggagaagaaataagtgagaaaaaaataggtggacatgtgggaaatagaaaagaagtaggtgggcacatgaaaaatgtagcgagaagtaggtaacgattttttattgggcccttatacctgacggtttaaagccgtcgcctataaatttacgaatttcaattaaaactgttgcctattcatgtaattattgttataaactgtcggaaatactaatttttcctgacggttttaaacaattacttaatttttttagcgacagttctccaaaaagagtatttttaggactgttgcaaattctgacttttgtagtgtgtaatttaatcaataaattttacaaaatataaagttcaaaataatatttactctgatttatatcaaatattggatagccattaacaaaaaaataaaaaataaataaaggggtatgttgcactaataaaactcgacattaaattatgagaaatttacactctcacacgtcataatggaaatgattattaatttattacacattatattataagaaaattatctcatatactattttttaactttaaaaaaaaaaaattacggtttaggttgctctggtggtttcttcggttgtttctatgtatgtgagttgcaatgtcaattttggttacgatttgagttgccctgttaattgctataatagtttttatgtaaaatttcataaaaatgcaaaaa

SEQ ID NO: 130343 - DNA, 948 bp, Cannabis sativa
tctcataataactcttatagatgttgtatcttattcgaatattcaggctacgtcatatgaacaagacctccacatgatgcagtttcagatcccggagaccaccacatcatcattggataaatatacagaatttgattctagtatatttaggtaatcataattttatttccttcaggttcatgcttgtttgattaatcattaatattctcaatattaaatatatgtttgttcaaaattttattttaaaaaattgattaatttagaatcctcaatcacatctaattaattctttaattaagataattaatgaactcaatatattttttcttatttttttattattcaaaatttaattagttataatatttcttcaaaaataaatacgtatgccaaacaaataaatttaatactaggtcaaatatgagtggacatagaaaaacgacaaaaataaaaatatttatttgtaaggccatttacaattggacactaacattttaaatttagtgttgtttttattaaatttaatccaatcaaatactattctactattatttatgagacatgtagagtcaactaaaatttctttttatcttttttatagtttttaataattaaataataaaaaattaatgattaatttttcttaatatatttatgtattatatatttttgtgtaacttttaagtttatagttggaatagataaaaaaaaaaattaatgttaaaattatttttttagtattagtttaacactaaatttaactttttacttggcctaatatatattgttaatttaatggcattatatatatataataataagtaattgaaagcttttcttttaaaatttttacactaaaaatacaaaatacatattttattactaaaatactaccacacggttaagcctacatttttactcttcaactttattttattacaattttac

SEQ ID NO: 130344 - DNA, 859 bp, Cannabis sativa
  modified_base (26)..(67): a, c, t, g, unknown or other
acggtccccatactagttgagacaannnnnnnnnnnnnnnnnnnnnnnnnnnnnnnnnnnnnnnnnntataattttaaaattagactatgcctttaagtctttggttacttacagtaagttttggtcgtggtcatagtaataattgtccttgttgtacccatctcttatgtagtcattgttgtcaccttcttcattcccttcttcaatattctggtcatcactaaggtcgtcaaacacattcttagtgtttcccctcgattcttggcgttggttgtgcctccctctctaacactatctgcctgggggcaagagacaagagggtctacctcctccataacagtatctagggggttttcttgctcgtattcttttgagcattcaccatggttgaattaatgcaataattgattaactttcctcagctctcaatgaaagcaccagaatatttaccgtaatttttggaaactacttaataaaagcctaaggaaatgtaaagtattaaatgacagacaaacaaatttttttacatggttcaagtgttaacgatccttagtccacgagtcactaatattagccttcttgcggaagtgtttgagtattacaaatgtttacaatggtaatcgttgtattccttttgtttctctttattagagttagtccgacattggtaatgagtagaaataaattgtcatatataagatgaatgggctactctttccattcccaattagttttaagatggaaccccatgcattttatcctaaattctaacatggtatcaaaactctaatgaatatccgatttccaaaagagtctcttgtgatccgttgtgagcccaaagtgccaccggtccaaaaa

SEQ ID NO: 130345 - DNA, 584 bp, Cannabis sativa
  modified_base (554)..(558): a, c, t, g, unknown or other
tttttttttttttttttatggtagaggtgtccaatatttttgggatctttttataatttgccaaacatacaaacaattgattttttatgatgtttccttttgcaataaaaataattaatgtttttaatttgttgtatgaggtcaaaatgggtgttcatttgattaattcgcactaattttgctcataatgcattgaatgagcactaaatacagattgtatattatgaatccaattttatacagttcaaatccaatctaattcacaatagtacacaattattttagatttattattattactctatgtctccaataacaaattaaaacaaataaacaaaaaacaactaattctaaaaaagaaaaaaataattgtatgtatgagagaaagtttagtttaattttaaattatattttccatacatatataaatatatatatttaatattgaattttgaaatatatatgtaaaatatgtattaattttttaaattatttttttctataaaatattaattatattttaattttttgaatatatctttatatattaaaannnnntatctaacggcatttcttggtttaac

SEQ ID NO: 130346 - DNA, 567 bp, Cannabis sativa
aatatttattatacatgcttacataaaaaaaataaaagattttaattattcaattatcatgaggaagagtcatcataaaagtacatgcgactttctcttttcgtcttctctttcacttctaaagctttttgtactcctctcgactaagtcgactactactgtattgtgctattttggtgctttggccaagagaactcttctggataagatttggttgctcaatgttgggtgttgtcccctttttttctcctcactctacctcaattggtgcctgtgttttgcaagttgctactgggctcgattttgtttagtggtttgctagtggtatctattttggtgtttctaatcttaggcattctgaagagattgtaatcaaaatggaaaggacattggtttgtctccgagggaagtagttcactcttgggttgttttgtctcctgtaacaggtggttctgtttagtggtgttgattatctagatcttcttctctggttgtttgggatttcccccttgtgtaagtcatgtgttttgtctttgagttttgtaacgtccccgcttcaagcctcca

SEQ ID NO: 130347 - DNA, 787 bp, Cannabis sativa
gtcggggtctgagtcttatctgtgttcgggtataggttttttggatctcgatctgggttgaggtccgagtctaggtccaggttgaggtcctaggtctaggtcccatgttcggttcttggtcttcatctaggtccagttgcaggtcccgtgttacgatctcggtctgggtctgggttgatatttgggtctgggtttgggttcgtgtccatgttaaggttcgaatcccagtctcggttaggggcttggtgtgggtccgagatcgagtctcgagttcgggttcgggttcaggttcgcatctcagtcctagtctgggtccaggacagggtctgagcccgagttccggggctggcttctagtctagttccaggtcctagtccaggtctaggtcctggtcatgctccaaggtcctagtcaagttctagttcaagtttcggttagggtcccaagtgtgggtttggatccaagtcctggtccagcttcgggtccttgtttgagtcctagatcaagacatcgaccatgggtcttttctaagccctagctcttagatcccatgataagatttggatcccaataatgggtcccagtcttgattcggttcatgtcctagctctcggtctgagtctaggtctaggttagggaccgggattggagtccagttctgggtctcgaaccaatatctgggtcccgagtcctgttcaatattcaggtctaagtttaggtctgggtttgagtcccgagtcctagttcgattttgcattcaggttttggacccaatcccaaggtgggt

SEQ ID NO: 130348 - DNA, 512 bp, Cannabis sativa
ttcatagccttcagtgggctcttcgacatcagctacccattacttttgttgagacagatgcattggtggtaattaatgctcttaataaggctacttctactagttttttagctccattctatgatttagtagaggatgtctcttatcttttatccttctttcctggagtgaaagtatctcatgtgaaaagagatgctaatgaagcagctcatgctttagctaaatttgctcttcgattggatgaagattacacttggttgggggaaactccttccccaattatctctgttattattagagactcatatttttaataatagcagttttttctcaaaaaaagaaagttactattcacgtgttacgtcacctaaatttgatgtttctgacttttttgatattttttgatttttttaattatttttctgcatttttaaaaataattttttgattgtacggataaaaaactaattagttacaattttatttttacatcatataatttgagatatatt

SEQ ID NO: 130349 - DNA, 844 bp, Cannabis sativa
  modified_base (811)..(818): a, c, t, g, unknown or other
tcctggtaaaataaattcctacaattagatagaggctgggttactcctcaaaatatcaaactcatcctctaggggagttgtcaacccatagatgtcattaatcacatcaggagaaaaggggacactctgacccctcactctaacgacatcaggatattttggatcaagtgcagcataaaatataggggcaacagaggccacattaggcttgggaattgcacataacttttgccactggtgctctgcaatcaaatttgtaatataggtaggtaaggcctccggagcagagagaaaaccatgttcggccaattgattacaggatcgcaatatcttataatgctcttgagtagggacaggattggctttggcattaggaggagtggtgaggttaggtttaggtggtgggactgtggaagtggtactcttaagctttggatgagccttggaggttgagggagttactttggtagagggagctttgggtttaggtgctgagatagaacgggtacgagtacgaggtagtgagtgtgtaggttcaggaatgggtggtactagattggggtaacacaaggcaagggttggtggtattgtggtgattggttgtcgcggtttaggagcgggtgaggttttggatgaagctttacgcttacgaggttgagttttgccgactaccatggctcaataatcataacaataggctcacagccccaccacaggaaataaaaatatttactacacaacttcaacaatcttcacagtgataacaaaaattgaagggcagaaagataagtttatgttgggttttatgccnnnnnnnnaactccatttcaatgtaatctatttt

SEQ ID NO: 130350 - DNA, 2300 bp, Cannabis sativa
ggaatcaaggtggatccaggaaagtttgaatccgtcagggattgaccgagaccaaagaccgttacaaaagttagaagtttcttgggtctggctggttattaccgtcggtttgttgagatattttctaaaatctcaatgcccttaaccgaactcaccaaaaagaatttgtgatttttatggacagacatgtgtgaagcaagctttcaagagttgaagcagagattgattatagctccgatattcgccctaccatcagataattaaaagttcatagttactgcgatgcatccagacagggtttggagtgtgtactgatgtaggtcgatcgggtcatcgcatacgcctcctgtcagttaaaagaatatgaacaacgatacccaactcacgatttagaacttgtcgcggtagtgtttgctacagagatttggcggcattatctctatggagaaaaaagtgagattcataccgatccttaaatacttctttacttagaaagatttgaatatgagatagaggcattggttggagttggttaaggattatgattgtgaaatcctttaccatcttaggaaggccaacgtagtggctgtttccctgagaaggttgggtccgaggcaagtaatcagtatgattaagatttcacctcagctagcaaatgacatgatcagatcaggcatcgattttgttgtaggtaaacttcataatttgacgttacaatttgatctgttagaacaaattaaggttgttcagttaattgatctggaattagtgaagattcgagaagatgttttagctggtcaagctaagaattttacaatatcagatagcggtatgttataagaccagggtttgtgttccaagtagtacagaacttagaaatgagatcctcgaggaagctcataccactccatatttattgcatcctggcactactaagatgtatcaagatattaaaccctattgctggtggtgcaagatgaagaaaaatgtggtggaatttgtattccggtgcttaacttgtcagcagatcaaggctaaacatcagagactgccagatttacttcaaccacttacacttcctgagtggaagtgggaggatatcaccatagactttgtggttgggttacctagagccacggggatgtacgattcgatttgggttgtggtagatcgattcacaaagtttacacattttctaccgataaaaacaacctttacagcggatcagtatgaagatttgtaagtgaaagaaatagtgaggctacatagtgttccaaagtccattatatcggatagagatctgaattttacatcaaaattgtggcaagaaatgcaaatctcctattcactgggatgaaatgggagaaagaaaatacctaggtccataattagtacaacggactaatgaagccatagaaaagatgaaggccagaatgcttgcctctcaaaataggcaaaagagttatccagatccgaagcgcagaaatgtagaatttcaggtaagagatcatgtgttcctacgggtgtctccgatgaagggaattagacgtttcgggaaaaacgacaagttatgccctaggtttacaggacctttcgagattctcgaaaaggttggactagtggcatatcgtctagcttttcctccagcactctcagcaattaacaacatgtttcatgtttccatgctacaaaaatacgttccagatcctactcatgtgctaagttatgaaaatctttagctacaaccagacttatcatacgaagaacaaccagttcagatcttagacaggaaagataaagttcttcaaaacaagaccatagctttggtcaaggtgctctgaggaaacagtaaggtggaggaagccacctgggagttagaatccaacatgaagattcaatatctagagttattcaggttagatttcgaggaagaattcttttaatgggggataattgtaaagattgcttagctttgttttggaattagtagataattaaggtttgtttatgaaacttgaataataattatgatttatcattttatggagatttatttgaattcaggatatattatatttgtcatatatgaaattttatgtttttgcatgttttgtgcttggcaacatcggaacgcggcgtttgaccattagaattagattttggtattttagtagtagcagagcaacttagttagacattgggaatgtcgggattagttgagattttagaattaaccaaattacccctaggtagttttgtgacttttagttaaagtgagggcaaaatggtctttttgccaa

SEQ ID NO: 130351 - DNA, 568 bp, Cannabis sativa
tttttcatattatttattttttttttaagccttatggtatttttgacaagtgttcctcaagctttattgtacttgtgataatttaattatttggtgatagtccaaactgtaaaaactgcaccacaccacactattttttacagtacgatatctgcgtgttttagtttcgcggtgcgagtgcgacttgatgaaattagaaaaactgcatgtgcgaattggtttgaaaaaatggtcaaaaccgcactactcacaccgcgaacacccataatcaccaccaactagccataattcctaagactattgtttccaaatggactcttatcgagcttcaatctcctctatctcaagcataaccataacttccattccaacattctctttagtcgaagatttgttttggatttccaccacatattcaattttatcttaaagaatttgaaatattcgacattccaccgcttcaaggcctttgtagtgaatttaagtttttgcgacaaaataatattgtgatacccatagaccaccttactgttgtgaatattttacccggatctagatttactaacaa

SEQ ID NO: 130352 - DNA, 1108 bp, Cannabis sativa
ttactcgtcggatctcgtagcctctggttttgaagtagcgtctcctactacttccttcagcttgaatagcaggtccctttcttcttgcaaggtcttgagacctagtctcatgagaacgttgagaaagacttcgtggaggagtcatgtcggttctctcgttgttgcgaggtcgctcaacattaggtggaaggcccattgtttggcgccctcaagcttgagtcctcttgggctcttgcttgaaattaccttccctccgagaggtcccatgcctggtgtttgcctagtgcatgctcagtttttgggtacagtagtggcattctaagcattaagggtttttccttgggtactagttcccatgtgacctgttcgtcgacgaggagtctctctcaccaactcggaataacctctaatggaagtagttccatggttagagcgataagcttctctaatttattgagacaagttagctctctgttgttcctgttcaacacattggctttcaatgttcttccaattttccacgaactagtgttaaaatcgttcatgttgcttatcgagagagtctcgcaactgttgttgcaagttagccatagtttggctgagctaagcaacctaaggatcggcctcctcaggatcatctatctccacgtgtgtcccccaagcgggatctagtcgttagtgccagtctcaggagcagttggtggtggccttggggggagagctgaggagcaagtttttaggcctactcctggcacctgaggcgtagaagtagttctggttccaaccccactaagtggcgtgcccctagttgcttggctagttgttggagactgtttgtcaacacttgtagaaagtgttgtcaccctcttaatagtaactttcttaagttgtggctctcaatgaaatcactaaaatattgactcagaaatctagactacacttctaagccacactcgctcgcttgattggcgagaatgaaaaaatagttaagtaactgagagagacacaataagtttatagtagttcactccctatatcgtgatagtaatggagctacatctatttcgagtttttatttctcacaagatggtaattatagcaatagact

SEQ ID NO: 130353 - DNA, 525 bp, Cannabis sativa
atatgtttatctatggagttgaatcttgttgttgcatattatatgagtgttaaagaattttaacaaatagagcattgctattgggcactagtggtgcctacctctagacatgtcgccttacgattagctagcgatactccttaaaagttattacattaaactatataaaattcgatacttagttagactcataataatatttacatataggagggtgctaaacattactggtgcctttatcatttctcgggaaaataactcatcatcattagacaacaacaagaaggacaatctgtttagacattatatatatatatatataaattataattaagctttatttgtatatatacatgtatgtattgtgtaatgttgaagttgtttttggtaaaatctatttcactcctattaaattatcacttatgagctatccaaacacacattcaacattaatcatcattgctcataatcataaaaccaaaatcaatactttatttagaacatccaaacaaatacacacatacc

SEQ ID NO: 130354 - DNA, 913 bp, Cannabis sativa
atataaaagttttaatttgacatgattttcgagaaagttctttgattagcaaagatagcactgtaattaaaaaattattgtagcgtgacttagtattagggcgatacaattatcaagagtcaatttttaccaaaagatcatcatgaatcataatcaatggccatgattatcccaaaatattttttttcatattttttgtattttttaattgttattttaatagaacttcctccctataaagggagggctcatctagctcagttttcacattcttttaagtcctcacaaggtctgaacatctctctctactttctctctctagaaattcgagctccacacttagtaagttttcttgtaattctcatgagaaataaaaatttgaaataatcgtagctccattaccatcgcaacatgaggagtgaactactatagattttgtgtgtctctctacattatttactttaatttattattcatcttgccaatctagtcatgagctgttgttggccacttttcagcgtcaacacgtgaataccacaaaaggtattaaatataaatatcaaaatttcataaaataaagtcattcacctaagaatttttctaaatttttagatggcaatagaattcttaaaaattatcatataccgaaatttttctactaaaattttaaaataccatattctgaactacaagtgatttgatcattcacgagaatgtatgtaggcagctcgattaattaaatttattgagttttgttgtacgtccaaattctctcaaattttcccaagctttttcctaaactgtttaatatcatcataattagaatcaaaatgtatttcttttaaacaaaaagattgtaattaagagattatctttataatttttgtaaagtccttttttggcaagttaggtg

SEQ ID NO: 130355 - DNA, 835 bp, Cannabis sativa
gtggtggtggggtttagggtttggaggttgaaggaaaggacggtatgcgtgagctggagtgaagctgagacatcgagaatggctactgtattgggattgtgggattcagtagttgaaaatttgaaagagaatagcaaagtgaggaagaagaagagtaatggagtaattgccgccattggagaaagatgaagatgaaaatatggagactgtgagtcgtctggctttttttttattgactgattaaaaatctgctgtggctaataatctttcctcaacatgtttcacattgtaataagttgacacgtggtattaaatggtaattttgaactctcgtattcatatgatatgagcatgagcattacttttttggcattagtatttatgagtagatatggtgttttgtgattagttacttgaaagttattatattaaattatgggatttgatatttagttagatcaatagtaatagtatatttagcattataagcattgtaattgaatacctagtagttttacgattgattagtgatactttttaaaagttattatatgtgatctgagaaaaattattatatgtgatccgagagttaggggtgttcgcggtgcgggtggtgcggtttttgattattttcaaactaacccgcacatgcgattttttcaatttcccaaactgcacccgcaccgcgaaactaaaaaactgcaaaaaccgcatcgcaaaaaatagtgcgatgcggtgctgtttatgcggcttttgcggtttagactatcactaaaataattaaaatatcacaaatacaacaaaacttgagcaacacttgtcaaaaatacaataa

SEQ ID NO: 130356 - DNA, 799 bp, Cannabis sativa
tttaggtggattaattatatttaggtttaactaactacatggatgctgaccctttacgtggcaacatctaataatttgttattatttaaaaaacaagttacctaataatttttcataaacaaaaaattttgttatatagactcattttatttagaattgatatcagcttttcaagtaaatctcacaatataaactatattgactaaatttttatttttatattggcttatttgaacggtaaggctaattattatataaacatcttttttttttttatttaaaagtttttaattattttattttaaaaattatttctgaaaagtctattttagaagaaattacaaatcttatcttcttctcccaaaagactttttaattataaattgacttcttatattttttctatccaaacactaaacggaatttttttaattttttaatagaatgcctgtaatgctatattttgatattttatatatataaaaaatcttttttaataatgtgttaaaatttgtgctacatttcacacatattaaaaattggaacaaatttaatataatatagcattgtgacaaatcttataacaattaatatacattttttatttatattattatcatttaatattaatgacttattttaatacactttttaatacaatattgctattactttttgaaaaatattattaatttattgattatcattagtgataattattttttgtgacaatttgtgttaatttgttattataaattggagcacaattaaaatatggggaaattctataatgcacccc

SEQ ID NO: 130357 - DNA, 1919 bp, Cannabis sativa
aagacaagactcgaaccagaaaaaactaaaaggagaagactaaagaaccatgtcaaaagacaagactaacggaaaaactaaattagtttctgcacataaacacgatcacagcattaaaattaattaaggaatgaactcctaataattctaaccccataaaatattaattggaattaaactaataatagtaaattaataaatgaaaacaaaaacttttggcatcaatcaagaagatcaatacaatagtcttctctttcggtaatatcttgtcttcaagtttattgtctataccattgtctcaggcttgctgaaaaactctccaatttagactgtgcgtgcatgaattcttgaatggaagagatggtggacagccgataaaacaagagagagggaggaggcgattcaaatctgttagggctcttcagttgaaagcctttaacacaactcgatattttgattagacaaaactattgtgaatcgataagggtaaaatttgtagaatgattgaaataagaggtaaacataatagattttgaaaaagagggtaaaaatttaaaacatcaagttataaaaggtatatagagtaatttccttcataggggtttggatattaagtttacaaaaatgttggcatatcaaatatcataaaaaatcttaaattaaaaaaactaccataaaatagtgacaaacctataaataccatatttttgtaacttttttctttttataaaatttcatatttcatgtaattttctcttaattatatatacaattaacattaaatatttattaaaataaaaaaagtattaaattaggccattttttaagatacatttgaattggacttcttaaacctaatgggacttcttttagctgggagcccggccggggcagttgcccttctgccccacccttcagccagcactgaacaaatttaaacaacaaagtaaacatgagcaaattattagagaatctgaacctactgcatcacgtccatattaagaagccatacttacttgaaattgtaattaaaaaggaaaagagacagagccacccataaacataattagaaatcactaaatcactaaaattagagaccttgtagaacaactgaatgtatatttggacaatataatcaatgaccaacattattagctacaagcaaaagtgatagtgatagaataagaatgactttggatattatgacaacattcaaggcataagaatatatatctacaaaaaggaataggttaacaactaactattacaggacaggaaaactcaaactctattaaagaaattaaacccgataacaaagttactattactgagcccttggaaaatcacattaattacttgaatggaaaagagattattagcattttcgttcttactctagattgactacagtgcaagacatttaacacaaatattttcaaacttagagtgcccttctttaaggttcaaaatgctatttactaatagctagcatagcaaacatgacagcagagattatttcaatagtgttgtactcccataaacatatttcatgtttgtatctatatctatatgcatttgtagttgcccatgcatacagagacaaaggtgtgagtgcttacatgcctatgcaacatcacccctaataatcaatttgttttacaaattaaatagcaagtcaactttatgattcatgctataaccaagttaaaagatagatataaagttaagaaagataatggggcaaaatacaagatgacaaatgatagaaaaattacttatcttaatcaaattaacttttttgatttttttgactttataaagaatcaacattgtgaagaaataaggagattattaatatgagctatttttaaaaatatgggaaaaattattaaggttatgataaatatggcataaaaagt

SEQ ID NO: 130358 - DNA, 707 bp, Cannabis sativa
agaaagagaagtcttttcgtaaaagaatataatcatttgcaaatcttaaaattatgcatgtgtcccaaggaactaaatcaactagcagtgttagaaacaaaaaaacagcttagcttaggccgatggaaaaggtggattagatgatcatgagatttgtatatatataatcgagccaagttcaatgtccagtttccatcaaaagaaaaaaaagttcaatgtccagttcatttggctgtcgtctgtcaagtagaagcgaatccattgtcggtttcaacgtcaaaaaacaatctaaatatatatatatccctacttatataattattagcagtaaataagcttattaattaataatatatatcaaagatctgtataattattgttccgatcgttgatttagtttagggtatgatatttttcacagagatttggatggtccacgcaatctttaatcatttagctgttctgaggtctatgtcaactgtacatagatcaaggcgattaagtatttatatatggctcaatttggcttaattaatcatcaaaataatgtcacttcatacatacacgagtgcttagccctactatataggtttataaatcaataattgcacacccttcttaatcgttaattctatacgtacttcaacttgtgtatatagtgtatagtatttttttttttttttgacaaagtgattaaaatcactcat

SEQ ID NO: 130359 - DNA, 1070 bp, Cannabis sativa
ttttttcttttaattttttatcttctatttttcttgattaggtattagctaaaacaaagttcattaattttttttttactttccacatcataataattaatgacatgataagtaattgcctacttggactgcgccacataggcaaatataatgcggtcagggggacggaggtgtgtttttactaacagtatagtagtaatttaaggggttatcctgtagaaaaaattttgtttgggggttgttaagtgaaaccaaaacgaaaatttttccgccattgaatctaattttatttaattactataatctatttagaattttttgaaaacttataagtagtgttaaataattacaacgtaaacaattttaaaaataaaataaactaaaaatattttccaaactaattgtcaaaacatataaaaaagtgtatcaggacgaggactctttcaattaagagatgtacctgtaatttttttcatttacaatcatgattagattaactcaattagtcatgtataggttcgtaattaattctcatgcaaatatgatgagtcagctaattattcaacttgattatgaagtactttttttttgtatgaatgatataaataatttaaccaataaattaataacaaagtccttgttttactcttgaaaagaagcacatttaaatagatagcccttatcatcgacaaagagccactaagtatttgtgtataaccaaaaccaaacacccccttaatacactatttctgtttattttgtctttgtgtacttttggcttactagaaattgaattgagacaacataagaaatccatataacgtttgcaaaaaaagagagagagaatatatttttcctaaaccaatctataaggccactgggccactgttttaaaaaaaaaatcagtaaggttaataaatttatgagctgttaagcaaaacaaataaataaataaataaataaagaggaatactaattacaatctcctattataattttttagctaacctctacgttcgaaatcacatgcggaaatattttttttgattacggtattcgttatagttaca

SEQ ID NO: 130360 - DNA, 932 bp, Cannabis sativa
agaaatcgaaccatggaacaactttgtactgccctctacaaaaaagccgttggaatctcttgccacaaacccaacaccataggtagagctatcattaaacacatccgcatcgacattaatcataatattattaccgcttggaagacaccattgctccgccccatcccctgaaataaaactagtgaatagtagttcattgttaattttgagcaacacgccattgattaaagtagtttgttgcagacgccacaatgctttcgacccccatcattttgttttgtcaaactttaatgataataaattataaagtaaattaatgataaaattattattattatttatatttttaataaaaatattaaataaatattaaatttacatcaaattttataataatatatctgagcacaatattaaaaattaatataaatttttaatttatattttgtatcaagtataataaaattttagcattgatggtcttagttagtaattttcaaataatatgtgtgcattttagggatagcaaaataagtttcgaaacggtacacgaatccggatgcaatacaaattttatagtttaataattagacgatggttaaaagtgaatcaacatgatttgaaatagaaataggacaaacacgacacgacacgacttgcttaacacaaatttgacacatttaatattgttcttttaaataaaataaaatagaaaataattaataataatataattatatatgaatatataaacagtgattcaatattaagttaaaaaattttaaaattatttttttaaaagaaattgaaaatgtttaaaaaagtttaattttaaattttaaatatatacaaaaaaaaatatacaaaaaaatatatatatatatatatataaaaaaaactatatataaatataagttttctaatagaactta

SEQ ID NO: 130361 - DNA, 1408 bp, Cannabis sativa
tatgctttcaacattgaacagaacaaagaaaaccagtcgctttatctcaaccttttacaagaaaagcgcgatcaggctcacctaaaaaacgcggcttatcagcggcgaaccgcaagatacttcaactctaaggtcaaggaaagagtcctacgagtaggagacttagtccttcgaagaataatgccaaacacgaagaacccagcgcatggggtcttcggggacaattggaaatgaccatatcttatcgcagaaaaggttggcgacgcaacgtaccgactcgcaaaactcgatggtactgcgattcgaagagcctggaatggcgagagcttaaaattttattatcaatagtactcgcactgtatagtttgtactcgctatgtatttatacttagtcattttttcataaaaatcctaagtataaggggtatataccattatgtactattgatcatttaagagttatgaaattttttgaaattttccaagtgggccatttatttgtactattaagcatttatttgtttttttaaatgtctttttcttcttcttttttctttctggctgacttaactgaataatactaaaagtgttcacccaataaaagtgggctgagctaaataagatttgttaacctatgataaaattaaaaattgatatttttctaacaatataatttttttaaaaatcatgtttcccactgtaaaaaattaatatatgacaacattaagaattatatttttctaacaaaatagttagagtaattcctagttacagtaaattaaaaattataattgaaaaattgatatttgtcaaaaaaaatctgtaacagtaaagagttttaaactaaaagcatttttgtgcagtgtattacaatgtgctaccgccacctctttctcaaacttcgactaactgctaatttcattctccaaacccattaattgatcacatatttttctaggtaaactaaaaaatatgggtgtaaagaaattactcaacacggatttagtagaaatgggatttaacgccggcgatggagtcatcaattggttccctaatcacatggccattagaaatcgactcaagcaagctgaccttgttgttgaggtccacgattctcgaatacccttgttctctgtaattaggatcttcaatctcacctctctgctaaatgatgtgtgatttctctcattaagagaaggcccttgctaatcccaatattatgctggtaatctttcattgaattttgtgtattatcttttattttttgttatttctgtttatttgaattcgtttatgtagaaatgggttcgccattttgaattgtttcaacaagattgtatatatacctatttgttatcccaaaattggcactctgacgtggcatcacgagaatggtgacacgtggact

SEQ ID NO: 130362 - DNA, 876 bp, Cannabis sativa
  modified_base (793)..(800): a, c, t, g, unknown or other
cagagtatctttgccatacaagatcgtatcaacaaagtgctcatacatcttgggatgtaaactcaacaggattatagcgttgtcttcatcatcaatttttactccaagattattcagatctagaatgattctgttaaaatcatctagatgctttctcaattcttttgagtcatccattcgaagtgtgtaccgcagccttgctaatgccattgcagaagtgatatggctcctgtccttgttggccgaaattggtctttcaaatgtgcctattcccacaatttggtgtgataacccaagcactgtcctcatgtatgccaacgctgtcttgcatagtcgaatgaagcacattgagcttgacttatatttttttcgtgaaaggatcatcaacagaaagctctttgtcaagcatacccttgctcatgatcaaattgcagaaattcttactaaggctccctcttcaactagatttgctttattaagagacaaactaagcatggttttcttgtccaagcttagtttgcgggagtgttagttaggctttgtttgtatataattagataggattagttagttattttggtattttgtacagcgctcacctataactaattctgttagtctcctcttctaaaaacctaactacactttgtatttatagagccttcatgctcataattcagtaatgaatacacaattcattctttcattctctctcgttgtcccttctcaacaagactaatcaatagctctattagtcatatatatatcgttataaaataatataaaataatannnnnnnnatgagaagaaagaagaagaagaagatgaagagagaaagaaaaagtgaatgagaatttctgagttgtttattccaat

SEQ ID NO: 130363 - DNA, 970 bp, Cannabis sativa
tataatagcttttagggagtattgctagccaatcgcaacgcgacatgtcgagaaggtgttaggcactacaggtgcctaatagcaatgctcatgctaagataaccttcaatgatggtataaaatttgagtaaatttagctttaaaaaaataaataaatactatatttagttctttttttaaaaaaaaaatgtgcatacataaaaagttgtagacttcacggtcgttatagaataaatttatatgtacaaaagaagtcgaaatacaattacattgttggtgggtaaacacttactttatcacattatggactataaaattgcaatatctattaatacttgagaaaatacaactaacaaacaaaggagagaacctactacaaaaagaagcgtagttctcaagcccccaatgagactccttcccatttagcatattgataactaatctagagtggctctccacaataataaacttgcacccaatgtccttagttactttcaaagccaagcagcaagcagtcacttccccacacaaagcatgtgaaaactctaaatgtgtcgtatgaacccaaaccaccataccatgatggttcctcgctaccactgcaatacacatgctttccaatcctactttaacatcacaattcaatttgagcaattcccgaggaaggggtgccaaacatccaacaatatcagagtaggaggagggaaaagagaaacttgatgatctgcataagagatacgaataaagtcaatgcattgtttcacattatctagcttattattgtgtttgttgtttcaggcccgctaaatattgtcgacaacaatcgaagcataaagaaacactccatctgcattaatgccttagaattttaagtcccaaatgaatttgacacagtcccacaaacaaatttcagttccacaaattggaaagtgaaattccgtattttaatattcccagtttgattatttaa

SEQ ID NO: 130364 - DNA, 1380 bp, Cannabis sativa
  modified_base (1324)..(1342): a, c, t, g, unknown or other
aaaatagtatgaagtagtttgagttgagtagtaagaaaatgtaaaagaggaaaaaatatatagaataattgcttgtaaattttttaagaaaaaaaagaataaaataaaattttgtgcgataataaaaaagtgttaaaaaatgatgtaaaaggccatacttattatatttatattttatatacatatatatatgttacacctatatttcgagcaagcaatatgattatgacctgtgataagaagctggaaaacaaaccagctcgaattatgaagaaataaatacgttcaataaacttgtctcgaaaaatacaattggtagaaatattcaaactcatcattttaaagataaggacaagccatgagtaacaactacctttttataacaccaacgaggtaagtaatcaacgtagaaggtccatctcgggatacacagagtatactacagaacaacagtcagttgaaaaagggtagataatgagttctttaagagcttgcaaattattgatccacatactcgtgagtatgttgaaagactaaaggatatacacaatataattcatctcataattatcacattatgatagtgtctcgcgtttacttctctcaatattacagaaggacatgagaagtattttccaagattatacttagacacaaagttatcttcagcttcttaatatgatcatttatgtcgtaaagagaagagaagtagtcagtgtaactgcgtacagataaagacaaaagcagttatagcaattatttgtttttatctcatatgacgtaaatatgaaacatgaggattgttcacgtttcatgaacggttacatggataagatctcaagagaataattgttaccttaaaatacctataaataggggaggatcttccaaagaagaggacggccaatttcagaaatagagaatgtaattcaaaaagttatatcttgtaatatgtattttataaacacgtgaaattccaaaaataagacgggctcatggagtatgaagagttaactttaaaaccacattaaaaatcttcttgttattcatgtatattattatgatttcttattattctagagtttatttattacattaaggctcatttattggttaacgaaaatttgcgttaacagtttagtgctttcattgagaaccttataaaaaaactcagaaaaaaataccttcccagaaaaatattcaaactttctatccatgactggcgacacccctcaaaacgaagatactcaacctagagagacgacttagtttcttgggaagaacatcaaaattcccatagtacaaatgttgggttttatgcccnnnnnnnnnnnnnnnnnnntataatcagatttacttattattaaagatcagaaataa

SEQ ID NO: 130365 - DNA, 600 bp, Cannabis sativa
accagactcatctggtagtgaagacggtgcaggtggtggagaaggtgcaggtggtgtagtgtctctaaagattcgggttgcatctgctcgttcttccaatgtagagacaagcttttgggtctggctttaaaaagcaccatctgttggttgcccatcatcacccaacactagttcctccaagtcaataaataaaggagcctcactgccaatgatacaattcacaaattcactctcattcggtcggagacataacacggagtaaactgtaacctgaaaataaaaacaaatatattaatagatggatattaacatgaaataaatgtaaagcgtaagaaacatacatttctagtgaaaaatcaaatcactttgtccttgccgagtatcatcttaggcttactctcccagttgaccattctcaaaaagcgatgtggcgtcttaactgcgtactcgttgcccaactcttggatggccttgtatgtccaatactacaacgttgtagtatagccgtaagatgaatatttcccctccttctcactaactcccttttcaatctttttatgcattgatttcttctggccgaatggtatctggccgagtggt

SEQ ID NO: 130366 - DNA, 916 bp, Cannabis sativa
tgattattacttagttttaggacttttacatgaatctcaaaatgtaccatgcatacaagtaaaagatagtgaccctaaagttaagaaccattgtaaaactaacagtgctaccatttaggcctagggtaagaatacataacaattaattttggtttttaatattattctatataaattttattttggcatgtttatttgtccttaattaaaagagaataaaagagtatattcttcttctttgtactttctttgactaacatgtttacttgcaaaacttatgggtcccacacgtagtgcacgtgattaaggtatatagagagactggagaaaattgagaaaggaatacattacacgatctaataataatctaaaataatgatttggtttaagcttaagcttagtctagctgattagttagttggtattatttgtcattttagttacaagttagtaactattttcagcagcttgtatcttctgtacaaatactgatgtaattcatttcaagaataatcaatgaaataacagagtaacactttgactgtattttactaaaactagctaataattctatttatcattaatcattgtatttgtatatataaatatgtgtatattggtgcaattgtcctctcagagaaatgttctcacggtaaggaagttcgattctctatcttacttaagatttactatttatgtgcaataatgtaatatgtatcgaatgttgtaacatgtaataaatatgaaaaaaaaaaatctatttattatttaaattaaatcatcaattttaacattaaaacttatatatagaaattggataatgtaccatgattttattttcgtttatactcgtttcttaaatcatttacagataagtaaagggaaatttgattttctatacttacatatacctaat

SEQ ID NO: 130367 - DNA, 610 bp, Cannabis sativa
ggagaatcccctcaagtttgatccggacagattcttgaatgacagtaaatgggacttcagtggaagtgactttaattacatcccatttgggtctggtagaaggatatgtgcagggatagccatggctgagaggacggtggtgtattctctagctactcttttgcattcttttaactgggaattgcctcgtggagagaaaatggatcttgaagagaagtttgggattgtgttgaagaagaagatacctctagttgccattcctactccaagattttcggacccatcactatatgagtagatcactacttgaatgagtgttgtatatgtgaaaggcttatgtttatttggctatgcaatgtaaaaccgtaaagatttgggatgttcatccaatccaactcatattattttactcacagtgcatttgatcagagcggattttatattttggatctaattcaatctaaaaaatacaaattgaatcgattatttttggttagttactttttaatatgaaattatttaatatttattaaaaaatattttttttcacataattaacaacaaaataaaataaattgttgttgtcttatgtctttaacaacaaattaaa

SEQ ID NO: 130368 - DNA, 1903 bp, Cannabis sativa
attttaaaaatattaaatcatcaatttttgatctaatttttgatctaataacggaataataaaagagaaatttgaatttctatgcttagttaactacttaattaaaaaaaaattcaaaatactatataaaaatatatgttcatataaaaatatttaatatttaagtgaaactcaatttttaattatcttttttttttttgctaaaaactttgttttaaattttttttttcaaccgattgaacaatctcagcccatatgatgtaaaagtgagagatttttctaattagatagaaaaattaagcataaaatctcaattttttctaactttacccattcatgggtaatacccattaagagtgcactcgtatatagaaatttatattcatataatcttaatcatatttatttttatattaacgttcatatacatatattatatatacacatttatatttatcatatatatcatgtaaatatgtatgtatatatttctcaatatatatttatacattatatttcattccatataattgattatcacaatctattatatatatttatgatattttttatatggtttaatatgtatatgcgagtatatatgtataaatatgaagtttagttttcggtccgtttgttccgatttaagtttttatttttttatgtttattttcatatatatatatatgcatcaatatattcatatttatattataaattattttaagcatgaaaaaccattttaaaaaatgaaaaaaaaaattctaaagccatcgttcagacccgaatttttttattgattttaaagtttttgttttacgtattttcgatgcataaaatatatatgaaagtcttcatttttgcatttagattcatttggaatttatttgggctgttttggtcttcgaaattaaaaattttgatagggtttgggtcgggtccgtcggacccacgtggctgaaaacaggtcaaatttgacccggctggaggttgacgatgctccatacaacgtgccatttttcattttaaggcagccatcgtttgttgaaaacgacatgtcgtttttcacactgtggaaaataacgtgtcatttttcgtcgttgtgggcagccctcttcatgtaaaacgacatgttgtttacggtagtgaatttttttttttctaaaaaaggggaaatttttttcaaattttttataaattttttatttatttggaatattaattatttttctaatttgtgttaaatttagtcaataaattacatttattcaattttccattttttatttaatacataatatatttagtataaattgaaagtagaaatttgttttaatttggtaatttattacatgatttattaaggcatgtaataattgtgctaatttgtataattgtgcatttaattgtatattaccaaatttatgtaatttattgtttaaattaataaattttgaaaaatctgacattaattatatatttaattatgaatttatatttaattaattatcatacattaattgtatcaatttgtatttatttggcaaatttgtttttgatataattaatttagatttgtataatttaaatgctatatacataattttttttttttttttttttatagtggtagatatatttaaaaatattcaaacattaagataggttgaatattttatttagcaccttgagtttcataaaactattcataaaatattcataaaacttttttaaaatgaataaaacgtaagcaattttgtggtttgacataagaaaacatgaactttggacaaatgcgcatatctaaaacgatttttaatgatctttggacggccacactaggagcactaatctcagtgattgtttattatgttaataacgaaattacttttaggtagagccc

SEQ ID NO: 130369 - DNA, 1143 bp, Cannabis sativa
tgcgcttgctacatccgagttaatctagctggaatccatccttcaagaactgtccattcccactgtcactactcctgttctatggtgtgataatttaggtgttggttccttggcttccaacccagtctaccacgcccgcacaaagcacatcgagctcaatgtccattttgttcgaaatagagtgttggaaaacaagcttgaagtcagatatgtcgactcaacctatcaagttgctgatattcttacgaaaccccttcacaaccctcaattcaattttctaagggacaagttaacactcaagtcaaatgagtgtaacttgaggggggatgttagaaatagaaaagatagttagttataatcgttattggttatctgttaaagggttagtcagttagttaggattggggtttatttataactttctggtatacttgtttgtaattaaccttgtatataaatattagcttctcactctgttccaaacagagcttcacattacattctttcattcatctttctctctttcattttctctctattataacaaactcaaacattaaatttatttaataagatatactatatacaactaagtgaaaaaaaaaaataagtgtaaattattataccttaattttagtcacttctgatcatcggttgagtgtcccattcttgtagaaataaacaaattttaccatgtattatgtattatacatatatgtatatcctaacgcaaacattaaatttgtttaataagatattttactatgtaatagaaaaaaataagtacaaatcaatcatagtaccctgatctagtcactttaattagtgtatactatgagtaccttagaaatataaatagaaccatttagggcccgtttgacacaacttttcgaaaagttaaaaactgcttttctaaaagctgtagcaaaaaagtgtttggtaagcaattaaaaaacaacttattgaaaaatttatggaaaagctacagctggttcaatccaacttttaaaaaaagctaatttgattaaaactttatataaaattatttttttactaaaaatttatttaattatttattatatattacaaaaaataaaaatatttttttaaagaaaaaatattaaaaataaataatatttaatt

SEQ ID NO: 130370 - DNA, 548 bp, Cannabis sativa
ttaacaaaacacagggtccaatggataacttttataaaacagaggattcaaaatggtatttacctatataaaaattaagattcaaataatgaattgcaatcgtgctttttttattttataagcgtgctacagattaattttaactatattttaaatatcataaataatttaaaaaaatttgaaagctagtcacatgcctattatatgtactataatgtaaattatcatataaaaataattgagtttgagtatcaaaattgaaaatatccttaagaaaaattggctttggaaaaggcttgcattcgtcgtttctaaaaaacccctttgacgtctaataagtttttggaacaaattgttcttgtaaagttccaaaaagttcgtccctaaagtcaatattatttgaaacaaaatacttttttattttttatgacttatataattataatgtatattgacatatagaaatagaataattacataagacacaattttttgtaaaatatttacatttttacattcaaagaatgtttttttttttacatttttac

SEQ ID NO: 130371 - DNA, 782 bp, Cannabis sativa
  modified_base (725)..(731): a, c, t, g, unknown or other
ttgtgcgggaaactaatcttgatagcgtattcatcactaaatgttatggtgggctcccctgcccatggtatttttggttccctttcttcgagggccaaaactactttttcttgctcatgttgtactgttcgggcatacctttcttgggctttgcctgaatctctagctatgtgcgatcctccaataatgacttgcagatgtcaatctactggtggtggtagtaaatcttggtttttattgccccttttcttttgatcgaccttgacatatttttgcacatgcggattattttttcttatcgaaaattcaatttcccgctttaagttgttgcattcgttggtgtcatggccataatccccatgaagcggcaaaacttggtcatgtctctcttgctaacatcttttttcatgggtgcaggcttctcctacggagctaacgattgagtagccatataaatagtttctatatcctctgtcaagatagagtaagctgtatacttggtaggattctccttgggagcctgttcggttttgccagtgaactttccctttttccaatttccttgcctattgttattgttggaccgtttaccacttgagtttgaactgctagggtactggggaagctggacaaatgttccaatagaaagaactttcgactggctaggtttttgctcaacctttgatcgctgaatggcttcttcaagcttgataaaaccatctgcnnnnnnnaggaagtcactcatagaatctattggtccgttcttcctgatgtccttccaa

SEQ ID NO: 130372 - DNA, 652 bp, Cannabis sativa
tgtttttaaattttaaaaacaaaagacaaaaattattttttaaaattttatttttatttatttattttaggtttggatctcattctaggttgggattgagtccgagtctagggccaaggtgcgagtttgaatctaggttcgtgttcgagtccggagtccaagtcccaagatcttagttagagtaaaaatctaaaatattgattaaaaaatttatttaaaaaaaatgaaagtgatttttttttaaaattttaaaaattttaattttcaattaaaaaattaaaaagtaaaaataattttataaaaaatatttttacttttccaattaaaaaaactaaaaaattaattaaaaatatattaccaaatacatctttattttttatagggttttgtaaattacatggtttcaatgtttttatggtctcaataaaaaatatgggaaatcaccctattttcaccagttttatatattttatctatttttatgattttttaatttttttttccatattaatattttctttttttaatttttacattaaagatattcttttttaattatatttacgataaaaattattggaaaattctataatgcaccacttaaaagagatataccgatacatctctttctgttttagtatccgaaataatt

SEQ ID NO: 130373 - DNA, 918 bp, Cannabis sativa
tctctctctccctctctctctctgagcttcgatcgacgacaccctccttctcgttgccaacagcccctctctcgttcccttgtcatcgaccctccttctcatccgtctcgattttttccaccctcttgcccctagttctttatttgtttctcattcttgctcatgtgtctctctctctttagcatcaatggtgagcaccacccgtctttcctcatcgcaacctcaagaccattgaagctcgagcatcgcgctaatggaaaccatgagttaggtctaacgtttgattttttctttcaggagatcttcttttatgattttgtgtatatatgtgagtaactgtgtgtgtatatgtatgtatatctgtgtgagttgcagtactcattccatcgaatcggtttgggttgcaatactcaaggaaacgatattttgttcttgaagatcaccatctcaagaattttaaatcaattccttcttcaaatgatgaggttaattgtatttgctttaattcaagacaatatttgttaagacaaaagttatcaggataaaaagcatcatccatgtcctaaacaagacatggtagacgcttgttgtttgtctttttgagttaattaattatttaattaattcaatcagataaatatttgaatttaaaacgtgattaaaaatattttaaagtaattgagatattctctcaagtaattggtagtttccttcataaatattactaactaaatttttgttatagatttttatttatttcaataattaaatatgatttaattaataaaatttaactactataagtataagtttgatttgcaagacattatagactataactttaaggtggcgtttggttagaggtaatgaaatggaatggaatagaaaggaaataattttcattccattgctttgttt

SEQ ID NO: 130374 - DNA, 2229 bp, Cannabis sativa
ggttgagcagacattgcatgcatatggaaattgataggggtgctatatgagatagttaactcgagagtcacatcctgcgagatgcacttttagatggcattgtgtgcatgaagagtttggcggtcaggcatttgcatgtgggcatgttgttgaggacgccaacagatgaagtcggggagagaccttcatggttcactcaacaggctagttattcattacaagcatcgagatgggtatcatggagattgattgttgttcaggatgtaaagtcaagaagactcgggacacaggatgtcccagttatctaggatgaaagtctacaggactcaggtactaagataacaccatggcaacgttggcctaaggtgaaagtcggtaggactaaggtactaaggaaacataaaaatgtcgagggatgaagagtgagaatgatcgaggtattagttaaacatcttcatcaaagtgacatttggaatgcagggaccgtatgagagtatacggttagcttccgagctataccttgaggggtattcctctgagaaataagttcttcccaagttgaagtgggggagcccactaattcatatgtttgaagaatgagggtacttgttcagttttggtgcgggaatccagagggaaacactacaacagatgggttgttaagtgtaaagacttgcatgattgctgcaagctgcagatagacaatatgcaggggcgcaggctgagatcaagattgagctagtttgtgtcatgtatgggcatgttttgtgttaatgggacaccggtgttgtatgggactctgtaagccaaattgttcagatagcatatgccgatgggagataacgtatcaggatgacttcaagtcttaagactaagactttgtgttatcaagtttgtcaaaagttagcgagtcatcagagcatgcaaggttgattttgggagatggacttgtgacacagttttgagaaccgacacaagcaggagcaagagggcaaatttgtggttatgggtgattgaaagatcattggccatgttaaagaagctcagaggagcacgtatgcagagggtcagaggggccttttacatgaatttctgggtttgcggtagggccagagggtcaatgttgagaactttgcgaagagattttgtgcaagagtgcacttggtgctgcattgggtgcagttggtttgcgagcctcgtccttgtggaacgcttcaaattttatcctgcgatgagtgtcttgcttgattgctagcaagaggatggtgcgccatggagttggcatgtgaagctttcagagggacttgtctagagggacttggcttcagtggatgcatgttttgtaggtgtcgttgggtaaggttaatttgcgaacctcaacccgatgggtgcaccatacttaatccttgtcaaaaggagtatgcattggacaattcgcatgtgagctactattagaggatgtgttagcatcagggtcagtgttgcaagggctacttggttgacttgagggacattgtgtttgacttggaggagttcatgttgagggaagtaatatagtgcgcaggcactactccatgggagattctgaataacgacagtggcataggttctttgatcaagtctaagtgcgggggagggagatcgtcactaagagggtgtttctatggaggtagaggaacaagtaaagacttaggattcaggagaagcatggagtaagcttaggagtcgagatcaggaagattttcctagggtccgtcgatgagggcatcgacatgttgaagtggggtagaatgtaacgtgtgcgtgtcaagatggcacgttaaaagctaggtgattcccacaagttggccaagtggtggtcaactggtggcgcatgttgaagcgcatgttgacgggatattgatgcttagtttgtgtggcagtggcattttcgtaaatatcttaaatattgtccagattgtgacaggacttggtatttgccatttcattgggactatgaatacaatggtgcaataggatttgagcaactatatgatctggtgtatggtttggccatatgtctacagagccaaaatcatgtatgttcctggtagaaggctaaaaacttagaattctctttaagggcggaccctagtgtcagctctccacaaccccctggcaccttggtgctaagtgagctactactagtcagcggggctagtagggcaggcatatgaggaccacgagggg

SEQ ID NO: 130375 - DNA, 731 bp, Cannabis sativa
cttgcttgctaaatcaacaatttgtttgcttgcttctttctacttttcatcatccttagcagtattataaacaacaggtttattactcgtcagaacataagcaatctttttcatagtgaggaaaaataagattttctatctccatattttaaaatggtttaccttaaaacgaaaatgtttattaatatcaacaacaacaaaattctcattggttgtcatggcagttttagaacgtcttaaaattgttgaaaatagttgttgtagaaaataaaaagatcaaatttaccaaatcaaaatttgagttgagtcgcggactaggttgctctctttaagacattcgcggcactgcctagaattgtgcaagcagactatcagcctcgttgtcccaagttgaaaacactgtatcagagctctattgcacaatagagaaccgtcaaaataccacacccaataatcgtactactgctcggaatacatatgtaatataaaactaaatattatttttctaagaaaaatgggatatctttcgtttgctggttctaatgcattatataagaatgcacagaatgaagtagcaggaagaaagttattttttctaatcgtggggatcatgtgaacgatcatgtgaccgttactgaaaatacgaagttataaatcgtcatgcttcttggtctaaagtttgcttacctcactataagaaatgtcacttttactagcacagttcgctactg

SEQ ID NO: 130376 - DNA, 2223 bp, Cannabis sativa
ttatgttacagaacagttatatttcaattacaaccggtttgagttattagtttttattcatataaccagttatatttttagttatatatgagacatttacttttgtgacttttccaaaaatgttgactttttcgttgatttttctggcgacttttccgacgacttttccagcgaccgtgattttttcggcgacttttctggtgccggtgactttttcgtcaacttttccggtgccgacgaattttccggtaaaacttattggtgttttacaaatatgagatttctatttttttttacaaaaatatggcataaaaaaactcatataaatgtaaaaaaataaaaaaaaaccatagtgttatttatttatgccataaaaaagtaaactatattctcaattcccatatttatcaaaattccccttatttttttttgttaaacccttatcacactaaaaacataacaacccttcaacaaatacaataaacttttaaaaaaatgtaattggactttaattggaccttggtaaattaatcaattacatcaaccacataattcgaattattctctattttgaccattttgacacttaataggtccaaattttacgattgatctttttacaaaaatacacaacattgagattaatacttataaaatgagaaactaaattaaattgataaaatattacaaaattaatctaaaaacactaaaattaatctttatgcaaaactaaaaaaactaaataaaagtcactaaaataaactaaaaattcttgagaacaaggctgatttaatggccaaaaagatataaataactctattttcatagagttatcagcagcttgatacgggaaccataacgagccggtatttacttacttcgtaatactttcatgtaattgctttaccggattaactgccccttgtcttcttgtggtacgttccctctccagataactgaggcatcccttcctcctttagaggaaggttatgatccccggtcgcttgagttactaggcagatcaggctgatcatgggcattgtcctgcccctttacatattgttaaaagtgtccttgcgctatgagaccttctatctcatccttcaattgacgacactcttctgtggtatgtccaatatccctatggtattcacaccattttgttgggtcccgtttatgtctcccgtatctcataggttttggctttctaaaaacgacttcctgtacatgtgcgaggtagaaattttcccgagtttcattaagctcggtatattcaacataaaggggtataaatttattatgttccttctgtatcttatccttgggtagccttttggaatcgtcttccctctttgatcctgaagcttctgactcaaattcttcaacaaaatcataccccaattgccttccgggttccctgacttgatgccttctgaacttattctccaactcatctatttgcaaatggaataaatccctttgtttttgatcaagtcgttaatgaagattaggttttttaaagttcaagtgttcccgtaggtcccaccggttgtgacaactgtcagatattgctctacccatatactgcattatgcattttttatcattgctacgacgagtgtcttctcttccttgcattgattgagtatgagatactgtacgcctcgtggtattccttgcctcttctcgttctgttcttcctcttaaggttcgattcacctcgttccccctttaggggtttgcgtgaacttggagagagggttgatgatctatgactaacgttccacatgtcctaggccgtgtccccaaacatcccttaatttcctcaggttgcgtcccctgagagttcttggagtatctttgggttgtctcctgccccttggtttgtgagttgtgaggtttgcctggtggatctctttctccaaggtcaggttgattttgggaactattctcctgtgccaccttgactaaggctatgtcaagctctagttcagcaatatgccgatttgcttcctccaatcggtgcctaagatggcagttttctaactcaacgataggtatgtacctggttgcgtcgtaggtgccatcctcatcaacctgattaggaaaagattggttgtaataccctagaattaagaaatggattagcaaaatcctaattagataattatgaataattgaggaattatattactatatagttcaatttatgtgaattaatat

SEQ ID NO: 130377 - DNA, 683 bp, Cannabis sativa
ttagtggtatagactatatattgcttatcaaattcaaaataaatatatgattaattaaataattatcataacagtatatatatgaattatgtaacgtgtggatatgtgtgatcggctttttacgtgatcattaagagtctaagacggcaatcctgtatgtattaattaattattaaggctaattaataacttaatcaaacaatttgtgtatgtaagacaaattcatattagtaattcatagtgggggacatcgaattgaatacgattgctctcaactatttgaccttttctatagcaaatgtcgacgttttttgttaatcaaattatacttttttttttcttgtataaaaggataagagtgcaagtagtttgattcagcacttatcacaattggataagaatatatgcagataattaaaattaaagcagagaattttaaattttttgatcagaagagaattttaatttttcattaattaatatatgtgagtctatatactataatcactatttggttttcatcagaatttattcttccaatttccaaatatcaaaattaaatatatttagataagaaaaaatcaaaattaatattagttttaggtaaagtttacttttttttttcttcttatttagattgtatgtgaaggtatgattacacgaatgatttgttttagcaaatt

SEQ ID NO: 130378 - DNA, 577 bp, Cannabis sativa
agaagatgaataagggtttttgaagttttgggtgaagttttagggatttggggttgattttgagtgggaatgagtgattgatgagagaaataatggtttaggatgatttggaaggaagatttatggttagatttataggaaaagggttttgaatgggattaggtaaaaaaaatatggtggaaaggagtattttcggaggtgaaggtgagggattttgaataggagtgtgtttgaaatgtttgggaatttttcctcttttaaactcgctggccattctcaccgcggcgacatgaagcctcttcgcggccaaaatccgtgaaaagtcaggtctctctgtaaggcttaaatggccgcggcgacatgaagcctcgccgcggccagaattcgtgaaaattttgccctctctgtaagccttaaatggccgcggcggccctacatctggccgtggccactgggcgaatcccattttttttttgttttttttttatgcagtacataatgaaaaagaatactaaaaatttagttttctaaacaaaactagacaaaacagaaaaagaaaataacactaaaacataaa

SEQ ID NO: 130379 - DNA, 869 bp, Cannabis sativa
  modified_base (53)..(70): a, c, t, g, unknown or other
ttgaaaaagcgttcatctgcaccgcctttcagtacatgtattcgcagaacctnnnnnnnnnnnnnnnnnnatttaagatattcaaactcttctaccatgcatatatattccaccaatacgaccgcagtacaattaatcgcagaacctacttcactaaggatgaatatctaacatattcaaactccactaaacaaagaattataaagttttaaagattatatctttcttcaataaagatagctacaattttgcaattttcattcaatacaaagaacccaaaacctacatataaatacatacacaaaattgtcaattaataattaattaaatgattaaataaaactaattaaacttaaacataatgcataaaaaatggttaaatttttaactaaatttttgttttacctaataataatttataattataactaaactaattgaatgaataagctttttacctatatcaaaaacttttctattcaaaacacgtttctccaaatcttttttacatacacattaaatcttttacaacaacacttaattttataacaccttaatttttaaaacgcatcaaatttttacacattaaatatatacaataacaactaactataaattaaaattttaattttttttcctaaatattttcacaaataaatgtatgagctttaaaaaaataaatttatatataaataaatatatatatttataaaaataaatatataactatatatacatagattataaataaatattaaattacacagtggaaaaccggcggtggtggtggcggtggtgctctgaagtcgtcgtgcaatggtggtgcagtggtgctcaagcaagagagagagagagagagggacgacagg

SEQ ID NO: 130380 - DNA, 1078 bp, Cannabis sativa
acttggatgcccgcattttccattgcccttttacaggcaaccaatatctcttgcatcctcttattttggtctttttgttttaccaactcaacctcgtggttgatagttttttctcttcatgtatctatctctgtatagttatcttcatcgtagcgttcatattcttcttggttataatattctggatcattagtgtcttcttctcttcaatattcaccctagaggctacctcttcctcctttggatcctttgggtcatctaggtgttatggatgcgaagtatttctagtttttaccattacattaccatgctacttatgacttcctacatctctcattgaaagtaccaaaatatagatcgatatttttggcaaccagtaattagagcggtatgaagtaattaatgaatgttagaagatatgtttcttaatgtggtggagctttaatgagctttagtccacgagtaactttattaatgagagtgtttattatagataatttctcgatcgatcccctttttagtttatcattggggtatttataggcccatgatggaggtaaaaggccactattatcgggtttgtttacaccatgcttggaacaatttcccaatcttgatttaggacataattgcctattttatgatggattttgggctgtctatttgagtttggtgggatgtgatttatcccttatccatgacttgaggccttatttatatagttgtcgattgatgtatgggggctcatgaaatcaggaaatattggacttcaactcttaaacacgtttgttagagcaaggcctatgatgttctttccgatgctacattaaatgcatatagattgtcttgatttttgagtgatatatcatctttcattagtcttcttgtacaatcttctgaatatacttcactcgctgagaggagcaaacgggagatgctcgcggtccagctggatcctcttggagattaccaacccattattactccattgagatacccaagcttactttaaccaatgctctggaaaggacataacacttatctaaggtgcaagtaaactacattgtagattatcata

SEQ ID NO: 130381 - DNA, 1088 bp, Cannabis sativa
  modified_base (34)..(54): a, c, t, g, unknown or other
tttcaaaaacaaaaattttaaaaacaaaaatttnnnnnnnnnnnnnnnnnnnnnaaattaaaaaacaaaagtattaccaaacgacatctatatttatactttattctttattttagttcatagtgagtgctcttagttcccgcgggaaagaaaactatattgaagtttcaccgtgcttttgatagtgatcttcaattcttggttcaataaatatttggaatatttacaccatatataatttttctctaaaatttatatttatactttgataaaaaaaatcatattgctctgtacacacaagtgtacagttgtaaaatttcattaatctagctaatatttaaaataattattttttttattttattttcttcttcattcttttccctcttcatttctgggcattttttatttctttttttaaatctgaaagagatctacaaagcccccatgatttttggtacaccagccaaaaacatcattcatggttgtccaaagagatcttatttatttaggtattagggtcttctactttataggttggtttttggggtatctcatggttttcggattgcaattttttatttgtggattttgattgatttttggattagagctttcatttgtgggtttttggattggagtttttatttgtgggttttgtttgattttgcacaagctctctcccttgcatggacctctccaccattgacgacagcacaaatttccatcatcgaggacgactggaacacgagtgtccaccttcgatggcaacgcacggaccttcttcctctctcgacgacaacacttgaacatccaccactaggggtgaacataaaattcagaaaatcgaaaaaaccgttcaaatcgacctatcgaacaccggaactgaagctgacgaaactgaaaaacgaaaaaaccgctaacggttaaaatcgccattgaacggtcagttttttttttggtgataaaccgaccgaagaaattgaaaccgaccattatacacatatatattaatttattattttttttcatgtattatagttactaataatatataaaaataatatattattttttattaatattaa

SEQ ID NO: 130382 - DNA, 794 bp, Cannabis sativa
ttttaattttaaaaacagaaaattgattcaaaaagtgttaccaaacgacacctaagataatgagattttcaaatgatgatattatgtaaggtaaataatggagctttagaatatatgcatatatgtgcaacacttgttacaaatttatttgccaagttttgctggcttttttaccaaaatttttcaaaaatactggaatatggtaaactttacttttttactgtccaagccctttttgttttctttcgtactgcccaagcccaataattttacttttatacggtgaacagtaagaaaatacaaaaacggcgcctcccttcctagttggggacagaccggaatcgcagaaaattaagaaaaaaatcattaaatccggcgaagaggaaacactactaaatcaaaagacaattcaagaacaaacaacaacatttacagagtttctttcccaagaacagaggtaaacacaactaaactcatagtattttaatttttaaaaaaactagaaaaaaaaaaaaaacacacacacacctagatttagatctaaaattaaaaaaaaatgcaaaacagataaactgaggttgtttaatttaacatgggattttataaaaaataattacatatagattatccctgagaaacgactgaaaatgttcattcaaataatcagagttgttctagtgttatttttgcgttattaacacaaatttattgctaactagggaactaagccacgcttcgcgcggtgttgtccaatttttataatttatatatatatatatcatatttatattaaa

SEQ ID NO: 130383 - DNA, 1766 bp, Cannabis sativa
  modified_base (663)..(668): a, c, t, g, unknown or other
  modified_base (1719)..(1727): a, c, t, g, unknown or other
agtcgatccgacttttacacttagtttgcttattgcaagctaaggtatgtgttacttttctccagtgcctcgctattcaccttcagcgacatgtggtttcttgttaatccactaagtatcagttcgtacattaattcctcgcctaagaccttacagtcagctggttacaaatatactctgatacttacggaattaatattccataaaaagatattgcttcgattcacatttcctttaccttgacacgtgtcctccagccgaattttgggtataacagtaatgaattctagtgatttgccctccatgtgttggttcataattacttttggtcaaaacactgttttaccttttctaattacttctttacatttagttccattaattcactagtggaagtataatttaagatccaatctgaatatgtgcacaacattctagttttagaattaacaattaaagggaacctacattcgatccgttaggaaagtcaggattccataattgtacatcatgttcccaaccatccatgttattagatttctaaaacagaagttgtaagaattatcttctctgagaaactttaacgagtgaatcaaataaactaataacatgaacaagagttcataataactcaggaggccgatctactattgatcatcattnnnnnntgaattaggtctttatgataaacggcatgttgataaagacaactttattcatatctgcccttgtcatatataatctctattatatacagtaccttcactttgatggctcactacatctgtaatctaaaccaagattatttgcaccgagaacaggcatcagtgaatcgtactagcaaccactgattaaagattccataactttaatatgttgctaactgttttattcatagctaagtggtcttagttctctgtacagctacaagccacaacatcatatatgaataaggatatttctgatatttaatataaattattcaatagtaaatattaataatttaacattaatacatatatcaaatatttgactctttatttaataattagaaatgtctttataggcttttcagggcataaaccctaacaaaattattttctaattgaaaatatataatctcaaaattttccaattttataaattctcaaattataaatttattaagcaaaaaaaatctttttttattttttaaatataaaattattttttgtattttattttattaaatacaaatttcttttatcaagcaaaaaagatgtgcaatttttttttactatgaaactattttttgctaatttctttatgaaataattaagcaaatattttttttaaaatctaaaacttttttttttggtatactaaaaagaacatttccgaacagttataaaccgttgggtattcttagtattcccaacagttataaactgttgatgtttttcaaaatttttggaaatgggataaaaatactacgaactgaagaaataacaataaaaaaaaagtataaaatgctttaagaaatacacaagatgtatgttcgtatgttttcctgagcaaagtacatttgagagttcaacccctaatccatgagattaatggggtcattatagtagttgtaggattacattagggtttccccatgtccattctactagcgagtttacaattaaacaacgtctttaggctttttcaagaagttcatgttggaatttattttannnnnnnnntagatctactcacaagtatgttgtctaacaccctaaata

SEQ ID NO: 130384 - DNA, 784 bp, Cannabis sativa
  modified_base (710)..(710): a, c, t, g, unknown or other
agttattgtttgaattatcttagttagtgaaaaaatcattaaaatcaaaccaaagtatactatctctctctctctctcttgctctcttcactttggctccaaggagaacagaagaaactagggtttctccatcaaattgtaatgagttctagctaaaatcttaggaggattatcaaaggtaaggtcctagtacttttttattaagttatttggaagttttctttaggttgaacatgcaatttatgagattttcaactttgttcattttgggaatttaaagaatgcatcttcgattatttttgaattgtatagacgatcatatgttggtttgaacagttttggtagagattgaactaggtttgggcttgtgagttcaagtttggcattttaatggtgattttagttttagtagcttgatgataaatttttcagttggaatatattgttgttatacccaaaattctgttattcaccagaaacagaaacagacacgtatatcctacaaaagaaatatgaatcagttcaaagaataaaataatgaaataatattattaaatacgatttaaataaatcgttctaattaattaaagttgatagaattgttcaaattgactgactacgtaagtatatacgagataagaataataattattaacaaatataattggtgagacaatgggctcatttggaatgtcgtattaggtcgtatngtattgtattgtattaaattgtattttatgaaatatttttatgtaaaactatatgtggtattaacttttatgga

SEQ ID NO: 130385 - DNA, 1049 bp, Cannabis sativa
aatattataaaattaataaaaaatgtcaattaataggatattctattaattaataggatattctattaaaattaaaattaaagtagaaccacttaagagcctgctcgaaaaccactcaagagcctcttcgaaaacccaactacattggtcccaggcgtcaactttgagcatctcacaaggccatatctgattttttttctttaattccttgatatggtttttgtttattgtttattcaattgttctctttttatttatttgtttgatctttggtgcatgtttttttggtgatttggatctaaaaattagttgttgttctggtgtgtaggtggttggaagaagatgaagaaggtgaagaaaaaaatttgaaaatagattgaggtaaatgtggtttcaaaataggttgattttgtgttaatttttggtatgatttggatatgaaaaatatgttaagttgtggtggtggtagtgggtttagttggggctggtgtggtggttccaatgaagactggtggtgggtgtttggaggtagtgttgagagaaaatgggtgaagatggttacagtgaaagaaaatgaagagaaaaaaaaataaaaaatttaatttttaaatgagttattacattcatatttttatttatatttaaataattaatgttacgtttaccactacaaatatatcacattgtatttgtggatattgtaacatgtcttacttagcacttaaattttttttttgaatgaaagtatatagagcaaaacaaaatgtatgtttgataaattttgccgttaaaaaattaatttatagaattaagtatcacaaatcatataatttagttgaagttaatatcccaatttataataataaaaaatctggtcatcttctcgtatctgtatctgtatcctacaatttatgtatttatgcctttttaataaattttgaattagattattttactcacctattttaataaagagcttttttatttttgcacttcaaaagggttttttttttttatatttttacggaattctacatagaaatccctat

SEQ ID NO: 130386 - DNA, 663 bp, Cannabis sativa
ttgtaatcatcacatcagaatcatgagaaggatggactagattaatattttcttttccaatctaagaatacattaatcaattaaattaaaaaaaaaaaacgatgcatgattccacatcacatgtatgtatagaaaaaaaaaatcaatatcaccattttgaaatcaatggatcaatgtacaagggaactaaactaataatgttatcagaatataaacagacaaatttactacaaattaatactagtttttgaaataattatatcatattattgattagaggaggaattcagaataagatgaaattcttaattagaatttgactcaagaagaagaagacaatatcatttacaagaaaaatcaatcgatacaatccgaagaaacaaccagttcgtcgcgtaaaatatacaatcgacaatcacaatgatatagagtaaagacgaatcgtagaattagcaacaaaaaggaaaaaaaaaatataccgattagcagcaattccggttggttggggtggaactagggttagggttgtaaatgattaataggaagaagaagaagaaggttagaaaagagagtgaggatcgatgatgaagttgcaattcatttaggggagttatattttcaccccataaaattataaatacaccccattattaaaaaaaatat

SEQ ID NO: 130387 - DNA, 545 bp, Cannabis sativa
ttttttttttgtaaagagctgcaatatatgtttatatattctcaagtgacagaaattacaaatggactgttctactacttcacaaaaatggataatggccttctatttttctcatgctcgaactatatcaaatagataggtagttatgtacatgtttgtcccaaattattatcgccatcacaaggaagagatcgaaatatttaaatatttatctataaatacaatgaaaataggatttttagtgcccaacacatggttaacatgaagtattcgagtatgaaaatagaggaaattacaaattttatgggattaaattatctgtgtaaaaatatggttttttttttaaagttatttttcccagctgcgtttgaagatgttttggacaagaaagaatccaataattgggccaactctgtgacagcccactcccaaaacttgtttagataaacatataatattcgagccgagcctatccagcttaggcccattacattcacaaccattcaagaagcccactctctttgaaaaacgaccaaaatgcaaat

SEQ ID NO: 130388 - DNA, 626 bp, Cannabis sativa
cacgctaaattataatttttgtaatgcatttcagtacggagtaatcatgtaggcatattctagtagtttcacactcttctcaaaaaaaaaaaaaagtctcaagttagaatccctcaaaaaaaaaatacattaaaccacggtaatcatttaatcaagttaaattataatttttgtaactaatatatataatttaataagtttacacatatcttcacagaaagaggtcctaaattcaaatccttcccttaaaaaaaaaatacatggactaatttttattgatatataagcatgatatcacaaattttgtaaaagaaaaattatagtatgtacgagtcatatatatatgtcaatattacacacctaggcactaatttttgtaataaaattatatttttatgtttaaagaattttttatatatttttacagttttctataaaaacaacacgaaaacaacgagacaactacataaaaataacatggaaataatatctaaataatatcaaaacaacaacaaaaaataatatacaaattaataacaaaaaatcaacaagagcacaacataaaaagaccgtactttctataaataaaattaaaaaaatcttaaaaaatgtttaaaattccgtga

SEQ ID NO: 130389 - DNA, 509 bp, Cannabis sativa
caatactttcacatttaatccatgtgggacaatattctccaatactctcaaattgtgagagcaaaagtaatactctcaaataagaagagatatcacttttgctcttatatatggtattcaaaataaagttgaaaatagtttgtggcacgcatgtaaaataaaaaagacatctctgtaattgattgcaaattttattttcggtaatataaattatttagaattttttcaaacatgatgcgcaatgtaactataaaagacacaatcattaaaataatttctcaatatactatatctctctaacttcctactataagttcagcaagacaatattgaaagcttttagttggcttttgtatttataagtataatattgattcattatcctcctagctactactatccattaattcatttatatataaataaagatatatgtatatatattccagattatttgatatatctttatatattaagagtgcctatctaacggcatttcttggtttaac

SEQ ID NO: 130390 - DNA, 604 bp, Cannabis sativa
aaaaataataaaaaaaaaagttaattaattagtttttaaacttatttatttatttttaaattaatttttaattaaaattataatttggatcaatgaaaaatcaacacgtatttttttggaacaacaaatgcatcatcgaattaggtacctatggactaatgagaatctctagcttggggatgttgtcacaattttttgaaattgaggacttatttgcatgaaaataaacttttagggacttatgctataatttaatgtcaacacgtgtcattttagagaagaattaacggatctattaaaaagaagaccaatagagttacaagaatctcgagcttagagactattgccgctattttttgaggttggagtcttatctgcatcaaaatgaactttttagggacttttagttcaatgttccctttattaaataaaaatatacaggacctgatattaaattacatcaatagtaatatgccatctcttgcagtgccagtatggctattagagcatgatccaatgggggttgctcattgaagtgctcttgccacatatataatatggtccaattttcaagaccaattttatgtgaagtgttgctcaatat

SEQ ID NO: 130391 - DNA, 906 bp, Cannabis sativa
aatgtttaaaattccgtgaaaccatacttctgtaattttttttgtaatttttgtgtatgtgtaaaataatcccatttttatttcataaatgggtataaatattattttggtttcaacatatacataaaatgtatttttaataggttaattaagatttttaacccctgaaatttgatatgtattaaattatacttttgaatttttttgcgttaaaatttttttatgaactattgagattgttagatttaagaactattgtccaatttcattcaattttactaattcattgattatttatgtacaaaatcatgctctccaaatattagtatctgccaaattatgtcctttaaattttgacatttaccaatttatatcactaacttttatccatgttagattttctttactaaaattggacagaaatccttaaatttaataatctcaatagctaaatttatttttttaacaaccttaaaaattttaaaaacataatttagtaaatatcaaataacaaaaatccttcctatccattgggatgtttataacattactaaacaatttgatttgacctcaaaatcaaatgaccttttattccttaaattttgtccataattttttttatgtgatgcacatagaagtatgtatcaattttcagaataaatattgatatgacggttaaggaccactgatatttcaatttgtttatggccatacagatcgtatcatgtaatccattatttatattcataaataattataatatttcaatggcaattttacagtggaaacatttattgtgttattttcagttagggtgcgtttggaaagccacaatgtaattagatttgtgtgtaatgggaggtaattatataatttggcatgtttgtttgaccatgtaattacatt

SEQ ID NO: 130392 - DNA, 1247 bp, Cannabis sativa
cccatcaaactttcagtcaggcatggcctctttactgcatatttggatattatgagatttgattttaaattaaaacattatttttcgtcatattttcctttacgtgtttgtgttataatttttaaatttgtattttttatgttttgaaactagctagtacatcctactgatatgaattgatgggaaaatagtattccaacaaaactttcaaaaatttatttatgacaacttgtactaatttttcttgcacgtatccattattaattgagctggttcttgtaaaaattgaaattattaaatacaaattattaattaagttaattttcaataaagtacatcagcgtttttacagtctttggtcaaatcaatttcactaaacgatgacctgcagatactgtgggattttattaaaaaaaaattatttctaagcagttgtaataattttatacacgtatctattattaattgaactggttcttgtcaaatttggaattattaaatacaatttattaattaagtgaattttcaatgaagtacgtcagagtttttacagtcttaggtcaaatcaatttaacaaaatgatgacttgtagatattgtgggattttatttttaatttacacattatgaaaaaggattaaccaaactatatggacacatttatttagcagtctatgtgaacgtttggttaagaagttgtaaatgctaaaaatacattttttatgtaccacaaaaaggttcatcttctcaccacatcgaatattttcacaatttttaattaattgggtgacttattaagtgacctgttgtcctatcataattttttcttttcccattgtatctcctccttcacataataaatttaaatgcttttacttttgtctttaatatgcaaaatattattttattaaaataacgtacttcgagttgttttaataatatatgttacatcatatttcttttagtaatgagatattactaatgggatttatttccattatacacattgtttaactataaaatggttaattaagaaaaaatacttattacgtgtacatcaacccacccaaccactatataagtaaatatttgaattttacaacaacgcatttatagaaacctagtattagtattacctactaaacatggacccttacccaaaattcaaccctttcgaatcaagtcctgaaaagtccccacctcatcctttttcttcaacacgagccgtaggtacaccttcaaggagtc

SEQ ID NO: 130393 - DNA, 893 bp, Cannabis sativa
  modified_base (27)..(31): a, c, t, g, unknown or other
  modified_base (333)..(337): a, c, t, g, unknown or other
ttcgaacatcttgaacaataagaccannnnntgaaggcataaaaataccgctctaaatcgcttggacacacaccaagctatctgtttctaatatgactctatctcacgaatgtgttgcaatctaacttaatgcttctttaatgcttattatcttagcaatttcgagttgaacacatccaatcttttccttcttgaaagcttctactatagcaccatgatgattctgagctacacaacccatgcccagaaaaaactaaaaggaaaagattaaaaaaccatgtcaaaagacaagactaatgcaaaaactaaaaagaaaagactaaaaaaccatgnnnnnagacaagactaatgggaaaaactaaattagtttcaacacaaaaacacgatcacaacattaaaagtaattaaggaatgaactccttataattctaatcccataaaaatattaattgaaattaaactagtaaattaataaataaaacaaaaatctgaaatatatatatatatcgatccatatatagatgtataaattaagataagatggtgatgatgatgagttttacacgcccaatttcacaaacccaatctcaatttctttcgcgtcaccgagcgaaactataggcagctacaatagagtgaaattcacaatcaaaggccgagagagtgggagacaaaaaggaagaaagggaatgagtgtgaatcgtagcaccgatagaagaaccagagagagagagagagaggagtttagaaaacctgtagggatggtattgattagttggagaagttgagaataaatgagtaactaaattaagcatagaattcacttttctattttattatttattattgtattaaattttaataatttaatatctttaaaattaatatttata

SEQ ID NO: 130394 - DNA, 1251 bp, Cannabis sativa
tctagctattaatgctaaacaatgaaaataatgttattgtgacttagttcccttgaaaaaaaaatacaccgagcactcatcaatttttttttttacctaaaaatttcattcaactaaatcaacacggtcttaataagatcgtttgacaaaacataaaaaatatttaaaagaaaatataaattattacaattcttaacgatactactaaaaatagataagaaaaaacattcaattgtctaacagcttgtactaataccaaataattagattctataacactagcacctggaaaatttcgctataactacgaaagcaattccttgagagtcacaacttcagcaatttctggataagtacgcttaagccgcaatcacgaaattccaaccacgacctaaccctagtaactctgaacaatcccaccaaaatcataccttccctcctcgcaaaacaatgcagtatcaatgtttaccttgagtttttcataacttgatgtagtctatagctcagccccatctaggaaataccaaatatcaaacgacagaaataaacttctttcttgagtttctcttcattgatcaagagtgatacgagccaaattaacaacgaattctacctaacttttcttaccttcccacaaatattgattctgtgcgaactaaattgcccaaactaacatcactgcatgaacactttgctcatcacccagccgtgaaaataagtgtaaaaaccagtctctaaatgaccctgcaacaactaggactacaaccaaacatacacaattttacacctttgaaagaaatttgaactgccaaaacttcttccaaaatgccacaatcattcaacactaattttcaatactcagtttcaatactatttttttattttttattttaatttgaaagaacaaccattcaaagattatgaaaaaaaatggtacaagtcaagcaatttttttagacatttttgtgtaatttattatttttgaagttaatgaactattatgccgattactcgccccaacataaatttcccactctacccttgatggggaattatgtaacatgaggacattaatggattaagataactcatggatagggccgattttgagttaaaatgggtcataggcaaaaaaagataaataaataaacccttactatagagataaatgatagttttaaaaattattaaaaaaaaatatgtatatctcttaaaagatattttttttgggccctaaaatgagtggaccct

SEQ ID NO: 130395 - DNA, 733 bp, Cannabis sativa
aagattgcttatattataagactattggttatcaatattttaaaaagttattacaaattatatgagatttattatttaattatactaatcagcgataaaattatattggaagacatgggttggaacttgtcttgttctcaaaatatttatgagggaccaaataaccaaattaatcttgacccttcaaaatcaaattgttaaagatggtttcattaatgaaggggatttgttaggcatattctaatgtcatcatttatctaagctctattaattagttaaacatttattatcactaggtttgttgagaaaatttaaatcttattaacattaataattcgttagtcgaaatcataacaaactaataaaataaatgaataaatttaatatataaaacaattggatttattattttattatgttatttactaacaaaaaaaaaagtatcattttattttgtttatctaactaggaataattttaatttaactaaattgtcatttctaaaaagttaattattttggatttacagatttttcagaagtatatttgtctatttttatttttaattaatataaaataaaataaattatgaaaatttatacactttcttttctcctttatttatgttggacaccactcatttctaatagggattatttcaaaaaaaaaatataataataacaaaaaattacaaaaatatagttgtaccaaaaatatttttacaatttttaat

SEQ ID NO: 130396 - DNA, 2205 bp, Cannabis sativa
ttgctcatgtccactcccttccaatgataagcacgataaatttgtgtaatcttttgaattatagcttttcgtaaaataacaatttggaaccaataagtgttaatagacaacaagacagagttgatgaggaccattcttcctgcataggaaaggttcctcgtactccaagttttgattctggttgtcattttctccactataccttcacaatctactttagaaattcttgttgacctaattgccattccaagatatttaaaaggtatatagctttttttaaaaccagacatatcattagcttcaagcccagatgtgttcaaaaataactaaaagcctctaagtagtaggagagcagacttgaaatcatccttgcaaaagagaagcaagtcatctgcaaaacttaaatggttaagtttgaagctcctacatctcgagtgaaaagcaaagtcacaaatcttggcaattttatcataagccttctgccaatcaattttgaaaagacaagcagatttagccgctttcctctcatagcctcaaaccatatcttgacacaccatgatgtcgtgcacaatttgtcttcctttgataaatccactttggttttcagagataatctcataaagcacttgtctcaatctgttgcaaatcatttttttcgccacattatagatcatattgtatcaagtaattggtctataatcattaactgactcaaagcacacagtcttatgaacaagagtaatagtggtagcgttaatttccttcaacagcttaccagagttgagaaaagagataactgaattcaaaacatccttcccgattatatcccaagtgtctttaaagaaggcactacgaaaaccatcagggttaggagctttttcatctgggattgagaaaagagcatgcttgacatcagcttctgtataatcttcaatcaatttggcagcttgaaagtctaaaataacaaccccttctctcacaatgttattgttcactttggttctactagcattccttgtaccaagcaaaatctggtagaaatgaagaaaggcatgtatcactttatcttgctcctcaatccaattgcctcacatatctttgattgagtagatggtgtttcgaactcttcttttccgaatactagcatgaaaaagtttggtgctgtcatcaccattctttatccaacctaactttgctttttgacttaagaatagtaaatagttctggtgagtctcattgtatcgcaatatagcctctttctccttcttcaataatcattaccatgttggttttgaagagcttcttgaaccgaaagcaattccctcaaggcgatgctatccaatgtctcaatattcccctttccatcttaaataagagctctcaacccaacttttaccctctttagcttggaaaccaaattaaacatgggagtttcggtcacatttgtcttcttatagtcactaacaatttgcattaaattggtttaagattttctagaaattaaaatacctaaaaggcttacaagtatttttaatttcaggataaaccgaaacaaacataggacaatggtcaaagtctccttctgggagaaaagtaacttcagtcgtgttgtaaagaatgatccatgaagatttgctagcacccgatcgagttttgtacaatttctatctttcctttcttgcttgttattccaagtgaagaaacttccattgatcatgtttaccttaatatataaaaactaagacgattctagccacatttttattccaataccgccaccaatatgagcacccaaaattcctaaaatctcgaccaagtttttttaggtaatagatgtattttttggtagtcaatcatgagagttttataaaaaaaaaataaagaaaaatggttgataatgagaaaaatgcggtggttggtaagattttagagagagggaagagagagaacgagatgagcaaataaaacgatatgtgtccagtgtgtgatatttatgctaatgtcgcacctacgactttagttattaggaaataattaaagtcataggtaagatattaattggatttctcctctccatgagaaaaactgataaaataagccccattgatcctttatcttcggtttttaattttttcccgtaaaaaattaaaaataaataagttaattgtagtagtagtagtagtagtagtaataataataataata

SEQ ID NO: 130397 - DNA, 714 bp, Cannabis sativa
tatttttttttttttaaaaaaaaaaaagaataaaaaacaatgttacaagtagttctcaaaagatatatttacgattttatttatttacaaaaagtaaatatattcattattcaacggtaatttcgtgtcacaacaaaaactcctgtccaaaaattatacagaatatatctccatattttttcatatctataatgtaaaattctacatgatataggtcatggctgagggcatagattttatctttttcaatgaatttgtctagtgaaaaacaccaaccctcctttcaataagttaatagcaacactaaacaattgcataattaggttatgtttgaatttgatagaattaaataaactttatacttttgctatgaaattacagagcatataaaaaaaattaatcgaacaactcaaattagtttttaatatgagataacttaatcacatcaaaaaaataacattttttgtgcactgtttttctccatccaaacaagacctaaccagttactaagtgggaaagaagacaattcattaataaattacaattaatattttatgatgtgacattttggatgttatctgaatcttcccactatatattttcttcattacaagcagaagaaacctcagtcttctttcatcttagtaaagactggttctgaatttgtcaaagcttcattaaggtacctcttttcagtttcttagcaaaaaaaaa

SEQ ID NO: 130398 - DNA, 2296 bp, Cannabis sativa
gggggggggggggggggaagaagtaggtgcatttctcttgtcgattaagggtagctagtccttgtcgatttgaaaaatccccccctctctgttttttggtacccccaagtgtgcagcgtcattcactttaactcagaggcccacacgagtgccttctttaatttattactgcacaccaaaagcaaacttgctatcactaggaactttttctctcatagtagaactttacttagaggaatattttggatatttaatttttacaggttgtatagcagagacttcacttgaatgtatcagcttaagagtattggggtgttgtctaatagaccttataggggtctgacgagcttcccaaagtaaactcacttatgtccatctctaagaatctatatctttcctcgatatggatgtatttttccggtctctcgtaaaagtcttcaatgtcatccaattctcttctcagcatattcccccatagtgtacttccagggcgtatcccaacagctatggcaaacttatgttcatcgttggacatccttcctactttggcgactttggcattaaagtgttggatgtatctccttaacctttctttctctccttactttacatttgtcatactcgttacaggcacaatgtaatcactcgtcacttgatgttgttgaaagaattcctccaaaaattgtttccagtatgtaattgctcctggtccaagcctcttatatgcaacctctttaagtgtaaccacaaagtattggcaccttatcttgcatgacacctttttcatcttcattagctcattaaaacctcttagatggtattttggatcagttttagcatcatatggcgtcatgcgagactccttaaaattgggtggaagtggttcaatttgaatttccattgagaaaggggattcttcatcaacctcatcatcctctgaattttcctttaatgtgatagccatcttttgacgtagatcctgcatctatacttctagcttttttattctcttgttcatcctttcttgagagttggtgagtggaacttggattttccatgtggtttgcatggagcttgtgagtagtaatcctctcatcccattattgtgtgactttccaccatggttaagggatgacaccttgtgcttgctttactcttgaaaagggggtgcaagcgcagtgtctcctttcctagcataagattctttggctaaagtgctttcataagtctacacgatgtttccctcgttgtgatctaacctcggtgggtagattcatgttgctttgaacgacctcttgggttcttattttgcgatagggcctttccactctcatcctttatggtgtcatccgttgatgacatggagttctctccgtcaccatgtacgattgggatctcgcactcttgctgatgacttttgtacgaaaagtgtgaaccatgagtaactcaagtttaaagccaataaaaataactctataccatagagttattagtaacttgtatacggaaaatgtgaaccttgagtttcgcctttgagaatggttctcaataccttttgcatgtcaggcaccatagttttcagcctttggttctttcagtgaagatcatttatttcgtcttcatagtggcaagtttgggattttggactcacagagttggctcgcttctcctttctggggcgatgctacgaggtactgagatttcacagtgttggtggtggagggtgccttggtgaagatgggactttcctttatgtcacacctttaccttcggttatgatgaaggtggttactacatcgtgttgcttgttcattgggatctcttcacagcgattgtctccttgccttgtttgagatcttgtccactcgttccctctcctcctacttaagacctgttaacgttcacattttctcctcttgctagaggtctgtgaccattagcgcctccttctccaacaatgggtggagggaggtcttaccccgtagcgatcaactgattattgtcaaggtgaatctccatgtcctgaaggcggcgagagcatctaggcattttatatcgattgtgtgtaaagaaacgacttggcttaagcttgtcgttcccatagacagcaccaaatgctgacggtgagaactcatcaactaacttgtttgctagaaaactaaaccatacttcaagtttagacttaagatgaagagaaatcactactacaaaaagtataattcccgtcgattaagaaaactgacgtatataccatagtcgcaaatagttttttattatctacatttataaaccgacg

SEQ ID NO: 130399 - DNA, 2702 bp, Cannabis sativa
  modified_base (835)..(835): a, c, t, g, unknown or other
  modified_base (1103)..(1104): a, c, t, g, unknown or other
tctcgactaaacctctttgacgaaagtggagtcaaactgttataactccctgaccaaacctttttgacgagagaggggtcgaatcgctataacaccttgttcaaacctttttgagaagaagggatcaaacaaatataatttttgattttaaacctatctgatcggaaaggaaaatcaaaagttagaactcgcgtataaaactgaatcatgatgccttcataaaagtacttaaatggagaaaatcgatagataatataactattcatacgagcaaattaaatatatagaaagtgataaaatcattaaagtatatttaagtttgcttaaggaagattataactgctgtagcgaggcagaattgacaactgctcaaaaatcaaaaagtttggtagattgccaactagttaaacaggaagattacgagcaatggaaaaaccccaaaatactgaacatttgattaaaattgagttgtttacattgtgaataaaaacgcaagcaaacacaattgtattaagttcaaatgaaaatagtacaaggtatttaagataagaaaaaacctaaaattggttacaaactagtctttaagaaaatgccactaggggcaaaccattaggtgatcttcctaaacaaaggatgagaggagaagtcgatgaactcaagaaagaccatcttcgtatagcctgagaaagactgtttacacgtagctcggagaaagactgactacacatagcttgcaaaagactggatacatgtagggagccttgatctcttcacagacctcattctcctcatcatcagaagatctcatttcttgaagccgagatctctttcccancctcaggaaattcctcgataccaaaaagaggttcgcaccaagatcttctagcataggtttgggtcttaggttcgctggattctctgatagaaaccataccaattccattcccagctttatctgcaaccatgccaaccttcctttgaaattctttatcagcctgaacaaaacctttaagatcgctcacaagatctataccctcaaggatcacttgtgaggattgcccatgccgggctacagggctcccctggtttggattggtcggaanntcctcagccttggaatccatcatttctggccccggttgaggcttaaagtctttaggaacaaatggaaaatggtcggtgcatctgggtgttatgagtttggaagaatgaacatcttaactcaaaagggacattttgccaggaaagagatgatccattctaaaaaatgtatctcactaaagagccagaggtttatgaaaaatgacaagcttgagccgcccttttatacaaaaagtccagtgacaagaaagctaagtattgaaaaatccaacggttgggagaagtgcagaatatgaagagacgattcataatgaccctcgaaattgtacaaccgccagaatcaaacgatgcatattttccaagaaaagatcttgacaaaaatgccctctgtaattattaaaatgctctttttactaaaaaagatatttttaaggcgcaattgttatacctgaaattcggctggaggacacgtgccaagataaagggaatgtgaatcgatgccattgctttttatggacattaattacgtaagtatcagagtatacttgtaacgctgactgtaaggtctaaggcgaggaatcaatgtacaaactagcacatagtatattagcaagaaaccatgtgtcgctaaatgcaccaaagaatgcgacatgtatcaatcgtgagagaccttagctaagtgtaaaagttagattagttgaagaacaagtaaagcaaggtgaccgtcttgctatgggaacacttcctatagcttcatccaattgacggtaacaaggctaacaaccctggcgagtcagaatgactcgttaaaaataagaatcgcaattgacaccagcaaccttagaaagaagaatggccccagctcgttattggaaacactgtaaccaagtttctgtcgagacatctccagatacaacagttaaagacatgtttaatacatgattgttttgacccagcaaaagcgggaaaatcacagctacacgattttcaaatcataaaaaacatttacactgcatgatatgtaatcaaatcccatgattttagggatgattgttgtaaacatattctagtcaactttgtaattaactcaccaatatgtaattataaatagtggaagacaagatcaaaagggtgacaaaaaatctcatacgagagaggccctaaaaaaacacacaatcagaaatctgaataagattgacttgtggactatgcataattttaacttcgaaaccacgtaaaaaccctgtgttcatatatttttttctatttcttctattttttctgtttggaatttttgccgtgaggctcaaatttagttaacgaaaatctgcgtcaacaataggtttagataatctcaaacctataatactaggaacaggaagttttgctaagtctattgaatagacttattttcaaaatttcctttcttgtccttgtaatagaaaactttttggttacaccatatgaatggtttttaaccatagttctctttgctttgcttaatagttccttattctaactatccattacttgtttaaactaacaatggatttttaattacgagtgtcttccaagttataacagggtgagttctttaaaac

SEQ ID NO: 130400 - DNA, 700 bp, Cannabis sativa
tgaaacatggagattgtccatgtttcacgaacgattacaaaggataagatcttaagggaataactgtcaccctaaattcttataaataggggaggaacccaagaaatacgggacgacaaatttgagaaaaagagagaactataccaatctttcattgtattctgaatatcatttattaattccaaaattagatagacttgtggactatgaagaattaacttttaaaccacgttaaaaattctcttgtcatttattattattattttttttctattacacttcatttaattcctgagtgcatatattacaaaaatgcttatttattagttaaaatatatattaacaagtaggaaatatgactagcttttctataaatggaaagtgaatcataagcggtaagtttgatgacttaattaatttttatctatccagctgtgtatatctgatcttttgtgatatttctaaaatgtttaatcagatttcttgtgaagaaaactgaagcaagactttccttttctattaaaggaaagtctgctcacaattctgtaggtatggaacatgaaatttctgagttgattgaagaatttttcaggaaagtttccaagtgagatgtggtcttgttcagaccatgtataagtttttaataaggtgtatattgattataaatacaccttatagcagctaggttatgtacctcttt

SEQ ID NO: 130401 - DNA, 597 bp, Cannabis sativa
  modified_base (504)..(506): a, c, t, g, unknown or other
gccatcttcaactgtgtagtcccacacatacacagtctcagaatcatcacacttaaccttttctaggcgatgtgggattgcacaacttttgatctttccctttgcggatcatgggactctgactgtcacatctcatctgtcctttgatctcgtctctttacactaaagatgaaatggagcaaattatttgttcattgtggtgtatttggactgaacaaaactgagtggtccatggttagaccaccaagcttgcaagcaatcttgcttcctttgtcgtgaactacatgaacaatttcatatcaacacaggcaaaataccactcgactatctctattgctacagctacatcagttctctctccctgccctgctttgtcaatgtcgtggcagtcacctcctacaggcagtcttaaactcaatgttgatgcggctgtatttagccaaagatattcgtaatgattctgctcaggtagttgtttctctaaagtccttttttggcaagttnnntgacaaaataatttttccttttatggtaagattgctgtgcattcatacccgatttcttaccttgtatattcggttttgtagttgctctttt

SEQ ID NO: 130402 - DNA, 870 bp, Cannabis sativa
ccctagccatccccgtcaagccaccatcaccatccaccacaactgaccaattccaccaccaccaacccttacaactacccaccatcactaccactgtcaaaacaaatgcacaccatcaccactgtcgaaaccaccaacttctcaaaacgacactcactgccttcattactattactattattacctttgttgttcaacgatgaaggtccaggtcggagggagagcgagagagccaccgcggcagtcgtggaggaagtggaagaagaagagggaccgataactccaatatcagatctgaaagaaggtgaaaaagaagaagaagttgaacctcgaatgggctgaatgcgacaaagttgtggccaaacgtcgagagaggatgaaagccctaaaagcttcacaagagctcttaaataccacagaagatgacaatgaaaccaataaagaaaggtcagaactgtactattcatatctcttcccaactcatttctctttcaatcaattttttcttatttacttttgtttcaattaatgcaggaatcttaacatgaaatttcaaaattatgttcctcatgataagaagcttcaagaggctaaggttgcccctccagtcctttcaaaatttaaagaccctgttgcagcagagcctccaccatctgagaagaaagaggtatatatgattattaataacaatgaatgcatatgataatgataatgatactgtgtttgtaattttagttatcttcttgtttatggatcctgattcttgtttaattttcaggacccatttgtcaatatagctcctaaaaaatttaattgggatcttagaagggatgtgcaaaaaaagcttgataagcttgaaaaatgaaccca

SEQ ID NO: 130403 - DNA, 643 bp, Cannabis sativa
cctaacccactcagtgagcaactctagacgatcgacagctataaaatcagaggagaagaagaatcggtgacggtactccttcacattcttctgaaagttgaaaggcaccagaccctcattagcaaggtgggcctggagtttgtaaaaactatctttaaacttgtccccatttttggggactgataggagttcataaaaataaagaatcttagccggactgggcggggttcagttcttggaaacataaaaaatatacaagcctgataacatgtagtaagcttgtggtataagttggtagggcgaaaggccaacgaagaccaaaaatcaataaattagtactggagcagaagcatggccctagacatcaagtgggtctggctccatgccccgaagtcgttgtagttatgattatgcatctcttcgtccctttggagacgatggtaaacccatgagctagaaggtttgattccagaaacagtaatgatcttttccaactggtgggcacaagtctgtgtcaaatgtagttcatctgcttcccaaccattggagcgacaggtgaactttttgtagactactgggcccttcatttcttcatccaaagtggccaatttctttggccccttcttcgaagattttgctccag

SEQ ID NO: 130404 - DNA, 586 bp, Cannabis sativa
tgttaatcaacatacttgtgagtcgatctaagatcctggtaaaataatttccaacaccttccacctcctaatggtttattgcgcgttagagacacagagtgaacctctaggaaaaggatgcaagctcccgatactttcaagttctgagagcttggggtaaatgttattccagttcccggatgggtttagtattaatgtcgcaaaagggtgccatgtcggatcaaaccctgatatcacgggccttccctaagatgaggttatggaagatactacagtatctgaaaggaggcttccctggcaaaggctagagtgattcttgaagttctcatcttgtgcttccactattgaaggtgaatgggagtcgtatgcactctatgatgattaggaattggctgttctaggaagcccttggacaaactgttgggttttgtgccctaaataaaacacattacaatctgattagttatcaatttaagagatttgaaatggtttatgttaagatgtatatttcatgttgatgatttaatatatatatttaatatatgcacaaaattagttaagtccagaacatatatttattcacaat

SEQ ID NO: 130405 - DNA, 1057 bp, Cannabis sativa
ttttacaattttctataaaaacaatacgaaaataataagaaaattatataaaagtaacagaaaaataacatccaaataatatcaaaacaacgataaaaataatatactgataacaaaaaatcaataataaatgaatactacaacataataaaaagagaccggtaatttctgtaaataaaatcataacaattgtaaaaatatttaaaattccatacaattgtatatttgtaatttttattaatttcgcgtattatgaaataatcccttatttaattatttatttatttatctactcgctaataaaattgttattattaagataataacagttttattagagagtacataaataaataaattttaaaattgttcttcaaatttttttactcataattttgtcaaaatggctctcttcagttattttgcgaaagtttggtagtcaaatttacttcattttgtgttagtcttcttgatattttttgagattgacctgatgaagatttattttcattcaaacaaaataaaactgttattatcacaataaattaaagttgaatgaaaatgagcacttacgattaaagctactttgtgttgtatcacattaagtagcttttaaaaaaggaagcaagaaaacacaattgaaaatgagagttttaagagaaggtgtttcacgtgtgcacctcaatttacctattatagaatattgaaaattcaggtttttggctcaatatatggacaaaaataataatgcttccattccaaaaaaaaaaccatttttattttgtaatgtaattaatgtgagtaggaaaatacaccatatattattgtgagtaactccaagtgcacaaacacatttatatattatatgtacatttaagtatgagaatgattggatagtgattgtttttaattattattcataaatatttttagatttttttttttacttgtgcttaagtacaaattttaataataaaatcatctaaattataaaaccatgaaccaaatttaattaaccacttgaggctagctcaagtagccataggagggtgcgtgt

SEQ ID NO: 130406 - DNA, 2249 bp, Cannabis sativa
  modified_base (983)..(998): a, c, t, g, unknown or other
  modified_base (1831)..(1840): a, c, t, g, unknown or other
cttaactttatatgtgtttagttccattgttttagataattcatatttagggtgttcatcaacatacatgttagtaaatctagatccttgtaaaataatccccaacacctccaccactaacaccgcaagatcttggtacctcgcaacattgccccaaaacggagaagcaagacaacattgtaagcccaaaatccctaaactagccacctcaagggggctggccgaccagcctatagatagcaacaggccaacaagcctgcttcctacaggtgcttgatcagccaggattggacctggcaggattttggtgcacaaccatacacgtggactacaggtgttacacccgaaatttggctaccatctcaatggaggacacgtgtcaagataaagggaatgtgaatcgatgcaattccttcttatggaataactcgttaattatgttagtatcagagtatatttgtaacccgctaactgtaaggtcttaggcgaggaatccgtgtacaaactgacacttagtatattagcgagaaaccatatgtcgctgaatgcaaatagcaaggcaccaaagaaagcgacacgtatcaatcgtgaaagtccttagcgtacaatgtacaaactaagtgtaaaagtcggtttggctcaagcacaagtaagcgaggtgcccgtctcgttatgggacgacttcatataatttcatcccgttagcatcagcgaggcttgcaatcctggcgagcctgaagataacattcaaattagcctcaaagaattctttgtaaataagaaccgcgatcgataccagggatacatcgccgacctcggaaggaagaatgaccccaactcgctattgagatcactggaaccaagtttctgccgagacatctccagatacaacaactaaagatgtgtttaatacacgattgtttttaccctaaaaataatgggaagattacagtgatatgattttcaaatcataaaccgcattnnnnnnnnnnnnnnnntaatcaaatcccacgattttagggatggtttttgcaaacatattacagtcaactttgtaattaactgtccactatgtaattatatatagtggcagacaagatcaaaaaaaggacggaaaaactcatacaagaggagccctgaataacaatcaaaaatctgaataagattgactcgtggactatgaagaattttaattgcaataccacgtaaaaaagcgtgtgttcatatttttattcttacaccttttatttttttttctgtgtggaatcactactgtgaggctcaaatttggttaacgaaaaatatgcgttaacagtttggtgcttttattgagaggctctgtaaaaaagatcaaaaaaaaaaactttccattcttttgaagaaaaaccacctccttcatggctaaaattcaagaaaatcttaacaccccacatgacgaaactaatcatcgttctgggaaagagcccatgggctccagaaggtctaccaaccagcagtccagaaggagcacccattccaggaggactcaaccggaggctggccccagtgtacggaccacacgttcccagagaacccaacccgtcattggtcctagtacgcgaacaacatgctcgaggagaactcagtgtgggattggtcaaaatcctgggatgaaggatgaagagttcaatcgtggaggtgcccaatctatgggagaaggtacttatcaaatagaaaatcatcgccagagacgccgtctggaagaagcgtagcgtcgaaatgctgagttggagcgtgatgcaacctcggccaggatggcataggggacgaatgctcaaaatcaacctgaacnnnnnnnnnnaagaccatgaggcagacctcgtggctcatgaaccaagagatagtaaaatgcctgggaagaacaacccagggaaaatgagacaccccttgaaaatcagaatgaatagctagatgggagacaaccggaaactgatgagcgagaaatccctcatgagaatgaggaggatcttgggactcaaccaggacaatggaggtcacctgctagaaatcaacagcatccttcctaaacccatagagcgaggactcgtacaaaccttgataggggaaatacgacaaaccgctcttgggaggaaagaacagagtgtgaagaagaaggtgtgacttcgaggcggtcaagaacccatagtcgatcaactcgacgaggagaaagtactgaacgagccaatgatcgagaaagtatgggaacaagt

SEQ ID NO: 130407 - DNA, 999 bp, Cannabis sativa
aaaagtaaaaaataccgcctggcaatatttttataaaaaaaaggcaaaaattagtataccatgtaaatttcccaagtaatacaatattcgtattaactttatacttaacaattttttttttcttaaaaatagaaaattgctatgtaaaaacaatagggtatttgaccatattttttaaaaatagttttactaaaactaaaagaaaaaaattaaaaataaaaaaatatcaaacgttgttttctatatagaaaacattttttttttcaatatatataatttacattttctctcacattatttttaccgggtatggctagggtcgagtccaagatttgtgtttgggtccatgtatcgggatcagtttctaggttctggcttggtcaaggtttgtgttgagatatgaaatattgaaatattattattattgtaataaaaaaatgatagaaaaatcatttttaaaaaatattaatcaaacacattttgtactttgaaaagtgtaaagaactccatggaaggaaattcagttgcattggtgtcttcatcaattgtcaccgaaccaaccaagttttggcttggtcactaagatcatctttgtcatcttcaatagattttacttcacaatctttagataaaaaaaagtaagtgtttttgatatcaaaactatgtattttcaatgtaaagggcgcatttaaggcaccttattttgttctgagttgttaaatttaaaatatataatcttactataataattatactttatgtgtggttaaatttaaaatatataacctcactaattatagtttattcagagttattgagaactattaatctagcatattggtttctagaaaaaaaaacacacattggttacaagggtagccaataataataataagacatatttaggtaaatataaaaatataaagctagtttatataaatatgttaagaaaatttaataggaaaaaatatactattaaagtaaaaacttaacatatat

SEQ ID NO: 130408 - DNA, 537 bp, Cannabis sativa
  modified_base (465)..(475): a, c, t, g, unknown or other
atcggggtcgagttgtaatttgatccgattcttttaatggtgaggcggtaaagatcacgatctatcttagaagtcgtctttatcatataatcaaggtcgaattgtgatttgattcgattcttttaatggtaaggcaatacagatcataatttatcttagaagtcgccttgattatatcaagaaaccctgcaacttgaaaaagtgtcccattttgtcatctttacatttcttggactatatatcatcattcatgtttgaaataaatcatctaaatgtacaaaagtttatttttatttttattattatttgtatgggataaaagtacataaagttgtgtcttgataatttgaaagattactccgatttttccttcttttttataaacgatgaagcataatgtatcaattctattgagacttattaattgggagttaaggggttcatttggaacgtcgtattaggtcnnnnnnnnnnntattatattgaattgaattatatatcgtatttttatataatactatattaaactttaattta

SEQ ID NO: 130409 - DNA, 761 bp, Cannabis sativa
taatttctatacaactataacaaaccaaatgtctcagttctcttgttcaaaataaataaataaattgtcagttctcaacctagctagctatataagtaccaataacccatataataattaagactcttccttcattcttcaaatataaaacatcttattattagaactaaaaaagcacgcgtaaatttggttttcgaatatttgtcttttagattagagctacaaaaacattttgaacttttgacaaggcacgaaccaaacatgcatgagtttggaggcacaaacaagcgacacaacaaaatatatatagatttggatcaaatacaacacaatgatgtaaattggtatagacatgatgtaggcttgagtatgacacgatagattcaaaattgcaataattaagaaatcacaatcatattagtatgagggcacgacaaacaagcacgaatatatatatatatatatataaaatcccaagtccatgacacataaaatgtccaaattaaattcataaagagttcgtttggtatgcaggattggactgcattagacgtgctaacttatccaatccagcgtttgggcatgttgaaagtctggataactaatccagctaatcacattgataatttatcccatccaacagggtagtataaataaacccacatacaggtgagattttttattaatcattttttaatttttgattttgttaacatattttaaatttaataaaaatataaataaaagaattattacaattt

SEQ ID NO: 130410 - DNA, 573 bp, Cannabis sativa
aaaaatgaaattcgcacttagtgcggatcggatgcactatgagtaaaatagtgcggattagattggatgaacacccctaagatgatgctcgtgagtgattttctatagtaaaataaataggatctgaattaaattgttttaatatcgaaaagacacatcataaggatttaaggcaccatgacactttttagcaattttttatagagcattgttatgatgcattagtggtgcccagtatcacctagaggtagcactttgggattagttaagtattgtataaaagttattatattattatttggatggatcttattatgttactaagttataaaagtaaaaattacacttttattagaaattattgatttattatcgatttcactattattaattttaatccaaaagatctatcaagttaactataattaattttaaaaaaattaattaattagtttctaaaaattattaatatgttataaaatgatatagaatagatgagaagaaagaagaagaagatgaagagagaaagagaaagtgaatgagaatttctgagttgtttattctaatggggtg

SEQ ID NO: 130411 - DNA, 1079 bp, Cannabis sativa
tatatatatatatatgaaaacaaacattgtatattaatatattttcaaatctcagggtgggctttagccctcccttaacacccctaggtccgcgtatgattggagagaaggggatgtcattctaaaaatttgcatggatgctatgttgttgcgttaatgttattcattattttttaataaaaaattgaagctaaaaagttattgtagctaaaaattaagatatatattaaataataatatgtgagatcataattataacatttttaaagagcgctatacattagagtatttttagaagtaagagtgccaaaaataatatagaagagagataaaataaaatattatattttaagatgatgtgtaaatttttagcatctttaaagcatgctaccattgaagatgattttagatgacactaaatttatagagtactcatttaaaatagtgagtactcaaaaaatataatataataatgtatgtgattagtttgtaaataatataaaatagacaaagaaattaattatagtagctcaaataggaaaatttataaaaatactggaatttaggttaatttttataaaaataccgtcacacggaaaagttttcaaaaatattgtatttttataaaacaccagtagaatacaaaacagaacaactcaaaacaacagtagaacaactaaaaaacttcagtagaatactagtgaaaacttaacacagtatactgcagtataaaacttataaaacaacagtctaaaagtaaaagataccgcctgacagtatttttgtaaaaaaataacaaaaactagtataatatgtaaatttcccttcaaatatgaactcgacctgcttagtctagtttttttttaaaaaatatttttgctttgtatttttattgagatcagtctttaggtggattaggatataataggtgaatgatacaaaatatagtttaagatagttacaaatataataggcatattattatgggctatttacaaaaatatgggaaaataaagataagttttgatatatatggcataaaaacttaattacactaaatatggcatttttttaaaaaa

SEQ ID NO: 130412 - DNA, 1071 bp, Cannabis sativa
agtgtgggttgtttttccttatgatgtattctatttctcgtttcagattattgcactcattagtgtcagaaaccatagtctgcatgaaaatgaaaaatttggtggtgtccctttgctcatatcttttttatggcatgatgttttttgtacagcagcatggattgggtcgtcgtaaatatagtttctatatcctcggtaagtgaaagtagtaaacttcgatgcaatctctcaaggatgctactcgaagttgttgttgaacctccttttcttctcattaccttctagttgccataatttgacattttacaaccttgactcaaactactattattttttgaggtctaactttgctggacggatgtattggctacagtggtgagcgactgaatatttttctaccctaccatatcgacacgctgaaatgcttcttcgagctttatgaatccatcttctcagtctaagaattctcccaataaccctataatgagtcttttaatatctttccataattcctctagaggttcagtacctcctaagataacggctagcctcccctctttatttaactctttcaactttgttgctttggtcatgaatctgctaatgtaagcttttaagggctcccccgatatttgctttacttcgaccagatcttctaaataagatgggagtttcctagaagaggagaactgtgcctgaaactctgccatgaaggagttccatgaattgaatttctctggagctaacttgagaaaccactattgggcaacctctgcaaaggtagctgggaaaatcatgcaccgtacatcacctatcaccgcttgtaaatccatttgcattttaaagtatttaatgtgagacaaaggatcttctttctctgtgtacatttttcacgttggtattttgaacttgggcagtagatcaagagcattgatttctagtaagaacaatgattctttagtctagtctagtcttaaatccatgagtttttggtcgttcatgttttgtacaaggctcttagttgatctatttgagcttgcaccaatggatcaacttgatctgcctgttggc

SEQ ID NO: 130413 - DNA, 799 bp, Cannabis sativa
gttttatttagggcacaaaactaaacacatatattggagcataggatactgaagaaaataacttagattcaaattttattattttcctattactattaaaaatagagcagtagaatagtatttaggaaaatatgataaagaaatgaaagaaaataatagtaaaactagggctgaagatgagttgggttggccgggttgagggtatttcaatgacccatttcaataacatcggcttagaaatttataacccatttacatacagaaatttatctaactcaacccattttttcttttatgaattgggttggtttgggttgggttgggttataacccttatttcataaccaaaaaaaaaaaaaaaatcagatgtgaatgtaaccaaattcatactgaaaaaattaaaatttcaaatataaacaaattcatcaaaagtaacataatatcaaggatcaaatattatagtcatccaatgtcttaaaactattaaagttatccgtaacaaacttaaataaaactaaatcgatttccatatcggcctcaatcaacaatctcaaatctcaacgtcaataatctttgcttttggtgatgattccttcaccttgagtttattttctacaattataaaaaataaaattagtaaaattattataaacaaataaccatgataaaataaaggactatgttcaagaaaatattgttagagatataattacaatggaagaaaaatcaagatacattacaactctattgtaaaataatacaaagattagaataagagattgattaaatatatgttaca

SEQ ID NO: 130414 - DNA, 1171 bp, Cannabis sativa
ttgtgtctttatatttgttttactgtatatcgattgctataaatcacttatcgcttactaaataggactcattgtcgttggctaaaagcgacgtcaacagaaacaatatccttttcaacaaccaaagtccctcgaggttcttgaacaaactctatagtacccaccgactcgagggatattcatcacttctagattttccaaactaaccgaaggtcctttcatcttatatcttccttcggttggttccatttggttaccagcaataaactattttgctggcaactctgcaatcaacacaaccggtacttgagatgaaggcaacatatgaaatccatattgctttaatctcctaatctcctcctcaagatgttgaatcttagcttccatctccacaaacctttgctccaaatctaacagagcttgtggtggattttcgtgaccacctctgtaagttcttccttagctcctacctcgacttaactagggggatcccattctctccatctaccaccagtatcatctaccttagcccaactacatgattcatgccagacgtccattctataggacaaacccgcacattctaactatcgcttccaagggaacttagtatattcctattcagctatcaatctactaacatgctttctatcatatgtttctaatcatgcataacaaataaaactaataaaacacgtaaaaaattatcgaaccatgcgtcaagcatatctcagatgatgattttagctatcttgacgatcttggaaaaacaacctggcgactctgataccaaaattggaacaccttactagattaggcgtgttacggtgttttctaaatactgtgcacgcctttggtaatcaaagggtttattacaaaatgaaaataattaagactttctaaataactttactttaataattaaacataataatttacataattcgggatctcgttttaaaagttacaaaatatttaaacttcagaagttgttgtctagcgactagcaaagtgagccaaaactatcccaaagaccctgaacactcccggtttaaccatcttgatatgtaaaatcttcatccttagctttagactctcactggtttgattttagcttttacctgcacatacatgtaataactatgagtcgacagactcagtaagaaaagca

SEQ ID NO: 130415 - DNA, 765 bp, Cannabis sativa
gtcagacgacatcaacttctcgcctataacccttgtgtatgtttctgtgcacactttctctaatttattttctgtatgttagagaaaaaattagaaacataaccttatcattttagtcacatttgatttaagtggtatggtggtcatggcgaggaccgttgtacaacgtagctttttttcatgcttactgtcgtttatcttttggggctagaaaatgatttcctcgcataggtgtcatcgagagtttgaagtgactttcccactcctatctttttcttcccttttctctttttttttttatttttttatttttgtctttcatatatttgcacctgatgcttgcctaggagaatctataaatttcttatctttggcaggcatttggagggttaggggacccccattgccctcttttatcttaggtttggtttgggggctaactgctggatttctttctcaaatgagtaaggttcttcaagatcttcacgaccacggtttttttggctttgaccatgaaatcttagaacttcaccaagtcccctcctcaaccggagcaaaatcttcagacaaggtgcccaagaaactggccatcttggaagaagtgatgaagggctcggtggtccatgggaaatacacatgccggtccactggctgggaggtggacgagctgcactcgaccctgacatgtgcccacccactggagaagatcatcactgttacggggatcaagccttccgcgactggggtttttcatcgcctcccaag

SEQ ID NO: 130416 - DNA, 897 bp, Cannabis sativa
cccctcgaaacccagcagacagccgcaccagccccctcaaaacccagcagacagtcgcgccagaagctctcctcttcttcttcgtttcgaaagatcacgtaccgaccaccattcaccgcccttctctttctctattgcgttgtgcactactgcaactcttgctctctctttatgtcggtacgtagctctcttctccctctctttcgtctgaaacactctcttactttctctcgtctaaaattctttctcatttgaatagagcatcaagggaaattaaaaagcatcaagggtttaagctggatttgtaggttcatttttgaaacgggggttctttttctttcatcaatccttaaaatgccttcatactcgattttcttgaaggttctttctaatcaaaataatatatatgttttcttgtattgatttgcttccatgcctttctccttgtagagtaaagataaagagcgaagccataaaaggcataagcatatagtaaaagaggtaggcccgctctatcgttctttttcctcatgggcaaactatgtgatatttataacttctaatgtactgttgcacttagttcatggtatttctttaaggtagtgtttgaaatttttgagtttgggcatatgaaatgtgttgttcttaggcttttaggcatgcataggtaacaatacacatcaatttattttttgaataaagcttttgctaactggcaatataaattgccaattcaataactagaaacaaaaaagaaattaaattaaaagaatggaaaaagagtgggggcaagcaacaagactcattaaataaaataaaaaataaaaacacgttaggggactctagctccttctatacctaatcacttaattgttgaaaattattttaccaggatct

SEQ ID NO: 130417 - DNA, 946 bp, Cannabis sativa
actaacataatcttataatttagggtcatttgctatatttttttaaaatgaggacataaactaacatagtcctatgatttggggccatttactataatttcccttaaaaatggcatttttcataaatattgtattttgggtaagttttacatttatactgccaaacgacaaactttacaaaattactgccctcgctgtttttttcctttatgctatacacaccgaaaatcacatacggcacctccatcttccacacacactgacagaactgtcacagcaacacgagaacaatcagtaaataatcattaatttcggcgagatcaagcaaaaacagttaaatcgacgtcaaataaacacccaacagcttcatcaagaccaaaaattaatgaatcaaaaaggttagacacttaaacacattcaaattcttttaaatgcaaaattaaaaataatgctaaaaaataaatctcgaattcaatattaaaaactatgtgtagtttctgaaattgtatttatatacatatgtgattaaaataaatggggattaatgtatattatgcctgagaaaaaaatcgattagtaatttgcattgaattttaaaatattcaacgttattctagagtcgttcttagttaattacatgtattttattggaaactagggatataaattaaaaatggacacccaaataatagttggaccaccgaaacaaaaagaacaaacgtcgatggttctttttactattattttactattgttgtttgtttgttaaaatgttgaattgttaaaatactgtcaaaatattgtaggttatagaatttataccagatctcttgaagagcaataaatgatgagaagaagaaaaaaattaggctcattagcaatttttctccccgaactttgatatgtactaaatcatgccctctaaactcttttggccgttaaaaat

SEQ ID NO: 130418 - DNA, 801 bp, Cannabis sativa
  modified_base (114)..(145): a, c, t, g, unknown or other
aacttttaatatttttatactctaaaatattattttatttaggtgtccataaaagttattaccacatatagttttacataaaaatattttataaaatacaattcaatataatannnnnnnnnnnnnnnnnnnnnnnnnnnnnnnnccaaacgagcccttagtgttttaagttagtgtgtgtcgtaatatttatttatatttttaaaaaaataaatcatgttatgtcataacataaaaaattataaatcatgctttttcttatcgtatttaaaaatttttcgtgttatatcatgttaatttggagtattatgtcgtgtcgtgtttgaaactgtaatttttttttctttaatcatattcatgctttttagattggtataaattttgtgaaaaaatcccacctagtagaaccctaattgtagttactataaaatctatttttttacaataaaaaaaaaaaaaaattgtgtttgcttatgattcatttttttttcacctctatttaactgccacgtgtcaacaattttaattttttttttttgttgaaatggacaacaattttttaatatttaatttttggtgaattatttaatgttttgtttagttatagcttttgaggacacggtgtgtctatgcatcgcgagaatttccgcgaagaagcatagaaatgcggctcccgatatattcattttttaatacttttttcaataaaaataaagtatttttagatagtaatgataatgtttttgtaaataattagtgataatttataataattattaaattaaaatttaatattttatt

SEQ ID NO: 130419 - DNA, 1078 bp, Cannabis sativa
tcttagtagggtataggcgacggttttaaaccgtcgagagctattttgcccgtttacgatggtcgtataggcgacgattatagaaactgacaggaatactttaaacgactgtttaaaaatgtcgagaaaaaccaattttgtagtaacaaaaggaccccagccacttgttaatttcagctcctacctgctttgtgaaggtacagttgcaaaacaaatgatcatgagtttcagtcttttgatcacacacccggcaaagctccacctaaatgtttatgatcctacttaagaagtctctggtgaggaggtgttcattaatgacctgccagaaataaatcctgtgtttcggcaaagtcaaattatcccaaacagcacctgcataatccactttcagctcacccacaagcaagttataacagtttttttccttacattgtcctcctgttacatcaagattcagcatggtttcatttatcttgttgtggagattcataagtttagagaaataccagctaacatcgggctttttttgataattccagacatcctagttcttcagataaatagagttaatccatttaacccataagctatcttgcttagtcgccaaggcccaaaggaactttgccataagagctttgttgcacttttttccttctcggaaccgaactcctcctacctttttggggaggcaaacctttcacatgaaaactcaacctacatctattgaatctgaatccgatcttggtttgtcaaaaacataaatgctacgattgattaaaaattgtaatgttcttgagcctgtggtttattcaaggaagaacatctacaaaagaagtagagaccatccaatcatccctgcacaagaccaaatggaatccccaaataatagttcttcaagtaccccaggtaattcttcttctatccctagttcttctttgtctccaagtaaaattttttcttcacaatctatttcaagccctacatctgaaactctagatcttcctattgctcttagaaaaggaactcgtgcttgtacaaagcatccaattgccaaatacatctcgtacaatcacctatc

SEQ ID NO: 130420 - DNA, 639 bp, Cannabis sativa
gaaacatcattattgtataagaaagtttacaaagtcacaaagtgaagatattaatgaagcttggaataactttgttttatttggtataacgtttgtctcaaactcaaactcaagccttttttttttcttaactaaactcaaagtcgagtttagtatatagtttagagaactttttgacatgttgagtaaacaacacaatataagtgatcttttgtcttaactatgtataaatataagagacctagtgtgtaaattaggaaatttttcttgaaaaaaataactttttgaacactaaaaatcttaaaaacgacaataatattcgaaaacgacaaaaacttgaaaaatgacaaattttttaaaaacaacaaaattcttgataaataataattctcatgtggcagctgttgaagcatttgggattaaggaagcactgagttggattaagggtaacaattggtctaatgtggttgtcgaaaccgattctattgtgtcagttcaagctatttcaagtttagtttttatgccttcagttttttgtttgttaatttcttattgtaaacgtttgttaaactgtttgattgatgtgtctgtttcttttgtgtcgcgatctgctaacaaaaccgctcattgtcttgctcg

SEQ ID NO: 130421 - DNA, 1032 bp, Cannabis sativa
gagttttatatagggcataaaacctaacatatttgcacatttgcaaacaagccattcaaataccgaggcatcaagagccacgcaacaaaagtcaagagtcgatactacccacattcaaattttttatacaattatcataacttaaaattactataacaaactaggttataagccacaaaaatagagaaaatagcaaattattttagtacacaaattaactattctaatagaatttccattaaactagagggaatatcatagattatgatctcctcttcgaaagtaactcaaacattaatatactgattgttggtgtgagaaaatagagaaaatggggaaatagaaaatttggtgaactgggtttttttatgtgatcttgatgaaaaattagagtttttttttttaaaaaaaaaaatataaagttaattttggttgttgtacatatggttaatttgttcaataaccaatagaaattttaactttttatatattggtgtcagattgtttttttaatttactaaaatggaaaatttaatatgctacatacaattatatattaaacaatattgaccctcaaaagtcatatagatgaatggttaaaaaagtatatatatagtataaagacaaaactaatgtcaccaccataaaattattcattacgcatatatgttataataaataatattgttatatataatttaattaagtagaaagatttaaaataaagttttaaaaaacaaaaatggaatttcaatacgaatttaaatctaaaattagtaaaatatattaaaaatagaagtttttttatttttacatttcaaaacggattttttttatatttttacgaaattccatacagaaattcttatatcaactaacagagtaacctaaatctcaatcaaaatccgtatagcaaaccacaaaaaaaccaccgatccaaactgtaattttttttaagaaaaaattaaaaaaaaaattctgcatttaagaaatgcaatttgaaatgactaataaaataaataaaatatattt

SEQ ID NO: 130422 - DNA, 1189 bp, Cannabis sativa
ttagatatatttatataggaacattattttgtcacgtgatgtatgacagcagttagatgggggagttatttgatctgagagctgaggttgatctaggggtaaatagggttaaaaaatagtaacgtaccctgagacccatctaatgtaccctgagacccatctagtgtaccacggaatacattccgtgaaagtacattacaggacaaaatcgtgtccctatatatataaatatatatactgggcttgtggaagatgtgacataggcacgtagcttccttaaaatctgtgtgttataatcacatattttactttcattaatataattatataattatgaaaaattatattaaacaaggacatatagtgtggtaagagcatgaaaaactgctaactaattattaagtgtcatatatttatatagtattaggtatcttaagatgtcgactaataatattctattaataataataaaaataattcaccaacaaaaaaattgtaaaaggaattataaataaaaaaaaccagagaagctgttgtaaatttgtaaacaagcaccacaaaaagtaacatctaattattggtgcatttcagtttgcacaaattttaatttaatatgatttaaaaaattgctaactaattattgtgtatgtgaattggtatagtattgagcaccgtaaggtgtcacataacaataatagtacaaaaaattatttacaaaaaaatagtacaaagatcattcataaaaaataaaacacaaaagataaaaaaaaattactaactaattattaggtaccacatcagtatggcattgaacactttaagtgccaataacaagtaccaaatagtatatataaaaaaagatttataaaattgctaaccaattattgcgtatgtgaatcggtatagtattaagcaccttaaggtgacacatagcaataataatataaaaaattatttttaaaaagaaaattgtacgaagatcatttataaaaaataaaacataaaagacaaaaaaaattactctctaattattaggtatcacatcggtatggcattgaataccttaaatgccaataacaagtactaaatagtatataaaaaaagatttagaaaattgcttaacaattattgtgtatgtgaatcggtatagtattgagctgttagtttttgtgccctaaataaaattcat

SEQ ID NO: 130423 - DNA, 1033 bp, Cannabis sativa
ctctctctctctctctctcaaagggtcattagccctaaacaacataaccctaccattatttgtccatctcagccattctctctctctctctctatagctgtgttgcagccaacactttcactctcgatctccctcactttcccttgccttgcctagtccaagaacgtggcaccgatcatgtgaaacccaaccccgagaatcagccaccggagacaactcgtgaaatcataagtcattcccccgatctctctctctccatctttttctctcgctaagacttgttcttaaatacttttttttgcacatcatgtgagaatgacgatggtgacaattacttgaggtcggtgtttgttgaggcttggcttataatgaagatttatagaagcttattaatttcttttggatttttttttacaaatgatatttttcttaagactttagtattgtttttgttggtatagtgtgggtacgagattgttcgcattattgtattattgttgtttgttagtgtggatctgaaatatatttcagatctatataatttttcttaatgtgtcggtttaaagccgtcagcaatagtggtttattatggtcaacggtttagaatcgaaaaaagaattgtcagctgttctaaatcgtcggctttagtgttagttattgccaatagttttaaatagtcgaaacataagcatacccggctattttccattgatattattccaccaaattctacatcggtcgaataggcattagtcatagagactggcgataataatataacagattatttttaatagccaggaaatcccatttttttagtagtgcctctactcaggttcgggtataactcggtaccctgataaaataataaaagaaatactttaacttttatacttatatgctgaaattaaaagaaaaaaaaccctaaaactccaaccccctttctttcaagccactaaggctagcttagtggtgagggagggctgggaaaaagggagaggtcatgggttcgaacccaggacctttaagctat

SEQ ID NO: 130424 - DNA, 1821 bp, Cannabis sativa
  modified_base (1751)..(1755): a, c, t, g, unknown or other
ctctctctctctctccatttctcactctaatttctctctctactgcattgataattgtatctctcttgttattcctcttcatcttctttctatctccttatgaaatgagatgagtagttctctttatataggctaaaggacctaatatgcaagttgtcctttttgacagtaaagttagttaaagactaactaactaattgaatgttgattgggggcgtaaggaataataccataaattccaccttatttcttcaagccgcgacaagctaagcatttatccaatgggggtgtagtgctttcatgtgtagctacttagcaactaaggttgagtaagtccaagtaatgcttgaactaactaacaagtaacaccttattgccaaaattagtagggttctcttctgacttcactttctccagctcgattacttcttcttctatcttctcccatatcccatatccaaaacaattgaatatcaatgtgttttatcttctcatgataatcactgttagaatatacccttattaactttccaactagaagcttcaactccttcataaaaccttgtagccatattgcttctttgaatgcctctgatgtagccataaattccgcctctatagttgaaagcgcttctacagattggagctatgatttccaacaaatacaatctccattagtttgaaacagataagaggtagtagacctcctaatatccttgcttgatgcataatcaacatccacatcccctttcaatgttactttctctaaaactctcttgtaagttaatttaatatctaatgtccctctcaaatatctcaacaattatttgagtgccctccaatgattatcctaggatttgacatgaacctatataatatgcttaaagcatgagcaatgtcaggtcttgtgctaaccatgacacacatgagataccccaaagccattgcatatggaatttcttccatctcttttgctgtcattgggctttcttccttagttaattcaaattatcctctaagaggtactgaagtgctcttagaatcttgcattttgaactttgtttggatcttctcaatgtagttctttggctttagactcatgactccatcactcttggatctatgaacttctaaaccaagtatcttctttacttgtcccaattctttcatgtccaattttgccttgagtttccctttaattgctttgattactatcttgtattttcccattattaacatatcatctacatagtgtagaagatatgcaattgtcgactcttcaagatgcttaaaatacaaacagtgatcaaatttggaccttgtgaaactaatttcttgaacataactgtcaaatcttttgttccattactgtggagacttcttaaggccgtataaggactttttcaccttataaactatctcttttccgtcttgttccacctgaaatgtaggtggtttctctatgtatatctcttcttctagataaccatttagaaacacaacttcgacatcaaggttctccacctctaaaccttgttgagttgccattgccaacatcagtcgaatggtcttatacttcactacaggtgagaccacatcagtgtagtctattctttctacttgagtgaaacttttggcaactaatcttgccttaaatcttattggctcctcctctgtcacaccttctttaatctttaattagaatccctttgcctgggataaccttcttgtccttaggtcttggaaccaannnnnatgtcttgttctttctaagtgagcttaattcatcatccacaacccgagaccactccttcttgtact

SEQ ID NO: 130425 - DNA, 824 bp, Cannabis sativa
  modified_base (27)..(65): a, c, t, g, unknown or other
tttcactgttttagaattcatattagnnnnnnnnnnnnnnnnnnnnnnnnnnnnnnnnnnnnnnnggtaaaatatttccaacaagtatcccattgcctattcaaagagatatagtgttcaattgtgaagaggggatcaccaccataataataaggagtaaaagaagtatttccaggtaaccatggatccgttgcacaccgtacatttttccatgtaccaattttccatcttaggcctttcaacaacaactttttaccatcacatatactctgccaggtgagagaaggtagagtgcctttttgtgccgagagaaaatcaccattcttaaaataacgggctttaaatactcttgccagaagagaatcagggatatccaatattctccatgcttgttttgctaaaagatcctgattaaagtggatgaatgatcgaaagcccattccaccatcagcttttgagcacatgaatttccatttcttccaaagtatttttgaattatttgtattggaaccacaccaaaagttagccattatagactctaattggttgcaaaatttattcggtagactgaaacaactcatgtcataagttggaattgactggacaacaacttttaatagtacttccctgccaccgatagaaaagagcttagcctgcaattgattcatgagtttccatatacgatctttgataccactaaaaagctcctttttatctttaccagcatacgatgggatgcctaagtatttctcatggagagcacaaataggcatactgtagcaccgtaactaacacaggcgtattacgtgatttttaaacagact

SEQ ID NO: 130426 - DNA, 2104 bp, Cannabis sativa
  modified_base (1659)..(1675): a, c, t, g, unknown or other
aatggtggtcttgactactactagttttcaaagttgaagatgaagacattattataattttattaagttttgtgtgtttgtttgaattttaagtttatgtttatggtttttaagcttatgtttatgaattttaattataacattgaagggttttttattttacaatttatctaaatgactattaattatagaatgaatttaattgtatgttgttttaatttagtgtttgcaaatattagttttaaatacattaaaattattatattaattttgaatatattaaaattattagttttagcaattttgttaataaacgagtccccgttaaggtttcaattaccaacgggaaatccctgccccggtccccgtcagggagtatgcgaagatggtgcgggaatggggaaaaaatagggggcggggacgaggacggggcggggaatgcactccccgtaccgccccgtccccaatgtgcatccatacttgtgcgaccattctagtgcaatagaaaataattaccttttgagtttattaaattgtagaggagttttttttagtgtagcgtaatgatattttataatcaattaatagtttaatagtgcaagatattagcggctaaattacctatactttaaattttttaacacttaagcacaaaaattgattttttggggcaaaactatgtaaattctcattctgttttgctctgtaccaatccgttcaaaaatcactttaagtaccacagtggactgcccatgtgtacacacatgtacacgtggtacatttttagtggcccacgtaatattaattttaaaaaataataataaatatttaaaaaattggaaaaaaaaataattttaaaaatattttttttttatatttttttttccttcttctttcttcttctctttcttctcgaaccagaaccccccaatccaacttcttcttcttcttccttctcccgttatcaccaccaccatcccaccacaataatttttaacctcaaccattattatcaccactgtcccaccattaccaccaccctcatcactaccacaataccattatcaccaccactattatctccaccataccaccatagccaccaccacatttttactaaacctaaaacattttaaccacaattatcaccattacaagtattttctctaaattaaacaaaaaaaatacaaatttgaaaaaaaaaaaaaaaaaacaagaccgagagaagaagggtagggttcatcacctaacgtcttcaacgattgatgaccggagatggggccttgtggcacactaccctttttcgtcaaatagattgatagacaagagaggagagtgagcgcgagagagaccgagagaggagcacatgaccgagagagaatcggggtaggggtttttgggtcttgagattttctggatataaggattggttgttgatttggtattgggggttggggggttcgttgatggctaacagagaaggagaaggagagctgggagatagagagaaagagagagattaggatttgaagaagaagaacaagaagaataagaaaaaaaaaaggaaaagtaaaaaaatatatttttaaaattttttttttctgattctttaaatttttatatatttaaatttctttttttgattttttaatttttttnnnnnnnnnnnnnnnnnttttaaaattaatattacgtgggctactaaaaatgtgccacgtgtacatgtgtgtacacgtgggcaatccattgtggcacttaactgtgatttttagacgaaagggtacaaagcaaaacagaatgaaagttgaggtagttttgctctcaaaaaattaatttttgtggttaagtgttaaaaaatttaaagtataggtagtttagccgccgatatccctaatagtgccttagtggcttgtggaggagttttatttacatcttaaaaatttaagcaccttattttaataactagtaaacaactcgcacttcgcgtgcggttatattttgtttagtgataattaaatcataaaagtatattaaatttcaaaatttaatacttctatatatatatttgttggaatttattttaacaggatcttagatctactca

SEQ ID NO: 130427 - DNA, 825 bp, Cannabis sativa
  modified_base (796)..(799): a, c, t, g, unknown or other
aatgtcatcaacataaaggactacgaatactaccacttgattatccttgagtttaagtccataaatggacttattgagtttgcaaactttcttttcctgtcctggaaaaacatagcctcgattagtcttgtatacatcttcagcctgcaagcttatgtgagaatatgaacagacaacttgtaccatgaaggtcgcatacgttgctatagttagtgaattgggccgaaactgttcttcatttattgtatttacattttaattgatttaaatgtttatattaaatgtacaaacggtttgataattaaatcaacctctatgtaattaaaggacacttgctttgtctataaaggagtgatccaacatgaaatggataagacagaaaacccttgcaatagtggactaaggaaaccgatctgactgaatcactatattctctttgttttatttatatttccagtacatgtgtgtgtccataacttgaatactcgcaattttgggtcgagtaatcacataatcctactcatattttaaatatattattttatttggtgttgtctaaattcgtccaacaacagcaatcatctcagctttaattttatctatagcttcattggtcttttgaactaactcctgacccaagtacttcctttatccagtgttgtcccaattgattggggaacgacactttctaccctacacctgttgggttttgtgccctaaataaaacctattttaatacaatcagatttactaattaataaagatcagaaattgcttttatgttgcatggttcacnnnntttatttcatgattgtttaatgtata

SEQ ID NO: 130428 - DNA, 1167 bp, Cannabis sativa
ttttttagtgacggtccccgaaaaaaaaatcatttctcgaaccgtcgggaattttgatatttgtagtagtgcgcaaccgcacaacaaataatttcaaactgcattttttttatgcagtgcgggtgatttgtacggtgtgggttgtttgatgaacacccctaggaatgggtgtttgatcccgccaagttattttcaactcactatcttttgctattctgtatcatgaagacaaaaagaatccatttccaaggcctagaagttgaaaatacacgaaatagcaccctaaaattcaactcaggcacctagggttttcactaaatgcccaagttgatattccaactagggtttcaattttcgacgaccgtcttagtgcaaatgggtcaaagtttgtactagaacataaattagacatgtcatgaaaatactttaggtatcaaaatcatattcggagcactttcaattttgaacacgtgctccacgcacccaacatccaggttgacaatatgtcaatctagggtgcttccaaccaccaaactgataaaactatcatgagcatttctttcatcttcatccgaacgatgaaacaaatgcttttaaaggagaaacagatccaaaaaaaacgactaaaaaacttaaatggagcaacgatgaagaagaagaagatgaagaaaaaaatatgaaaagaaaagaagatggaaaagaaagaagtcttcgaaccctaaaaatgcactaaagatgaaaatgatgatgaatagtaatggaaagaagaagaagagattgatgatggcagtgatgatcaagctacggtcatgtcaatagcttcatgcaaaaacagaagttacagtaactttttcacactaatatttttatatattttaaaataaaaataaagaaaatgaaaaacaaaaaaaaaattacaaaagtatggcattaaaaaaccacaaaaaattaaataaaatacaaaagttatataccaaaaatattattttattatgctataaaacaataaataataaggatggattttgtaacatttttttaatcagttttttatttttaaaaatattttctaaaattatgttctataaaactgtttttattttttaattttttataggggtgttcatcaaacacccgaaccgcaaaaaaaaaatacggtttgaaatt

SEQ ID NO: 130429 - DNA, 543 bp, Cannabis sativa
ttgctggttcgaagagagagaagggaaagagagggtgtaatttgatttttttttttggcttttctttatttttcttctaaatgaaataaggtttatcaaattaaacctttcctgaaaataaaataactaggggtcactcccctaggcagccaccaaatctctcatttggcaaattactaaaatgtcgttcttcatataacttaaagaaaaataaagcctagaggtaaaatggtcaaaaaccataaccccgctcaaactcagtattctatttcctccaatatatatcactaagaaataaggttctaaacttactcatgtgattaaactagtcatccatcgcatttttcgttgtcgccgagcaaaaattgtatacataattcacatataatacaaataatactcctagagttgaataaaatctctcgaattgagaaattataactctaatgcccacttttgataatgggactcacaattaaataaattcacaaatgactataaaaatatcaataattagtgctattgtaatttacttattcttaa

SEQ ID NO: 130430 - DNA, 860 bp, Cannabis sativa
atcgatggctacttgctgagccttgaatgtttccatctccctgtccctccactcaatgaactggcgtcactgctcatcgaacgcaaggtttatggcggcacggagatcctcctgatcatgatgcagtgcgttattatggccttgtataagtccaagggcagcacggaggttttggatctcactgtcatcccccaccgtccgctgagcattggtggtggacgggactccagtgttaggagtggttcgatcggctgcagaactggtattcccaatctcttgcacacccagtgtgatcctaaccataggtcaagttacaccatggcccaccgtaggtggctgtgtgttggcctgctcaagattggtccccgatggtatcctcgtgttcccaggggtttgcacaacaggatctgtcaccattgcgtaactctgatccaccaggcctctgcgagtttacaccacaattttgtatgcctgttgagacttaagacaaagaacaaacttgggttgttgctctcaatgaaagcaccaaaatatttacctcgcttttagtcaacgacaatgagtcaattattaagcgattagaaatgtgataaaaatagagcaaaaaaccaataagcaataaagaaaaccaaattttgaagaggttcagtcccattattgtggtactccccgtagattgtattaacttgaggacaacaaacacggtgtttcctctcttaaagctcttacaatagaatctctgagtatttctcttagatctctctttacagcaattctttcgatccctttcacagtgaagctagatcactatttatagggcgttaatgcatgagggaaggttttctttttgcttacaatgt

SEQ ID NO: 130431 - DNA, 971 bp, Cannabis sativa
tctctattttctttctctaaattacataatattacataatacctctttatatataagctttaatataccaaaaatacaatggttcattaatttttatattattatcattattttaaggaaattcaatcaatttggcgaaacattctgaggttttgaacccaaagatctgatacaatttttctatcacgacccgagccttaggcaatagaaaatatgtaatattcataacttagatgcacaaagatcacactttcaccgttgttggaaattaatattcacaaatgatcttttaatttatattaaaaaatcatataaaaaatacatatttaaaataatggaatacctcctctactaaatagagtataattataataaaatatgacccctcattaatatgtatatatagaacaataatattctcacaattatgtagtcaccaaatgattagatttattatttgtaaaattcctccttacataaaaaataatattcctcttatggatgacaacgaagaaaataatccttatgaaggagccactcatcgtcttggaaaagagccaatgagtccccaaggatcatttgacctatcatttgaacaggccacaagctccaggaaagctcaggatttgggaaacagacttgaagggcctaagataagcaacgatcagtcccttcctaatctagttgatgaggatggcacttatgatcctacaaggtacataccaatcgttaaattagaaaaccaccacctcaagcgtcgattggaggaagcaaaccggcgtaatgttgaattagagcgtgaggtagctgcagccagggtcgccaaggggaatggctcccaaaatcaacctaaccttacgaaaatagaaccatgaggcaaacctcgcgactcgcaaaccagggtgcaggaggcaacccaaaggaatcctcagaatgctcaggagagacaacctgaggaaattgggggatac

SEQ ID NO: 130432 - DNA, 844 bp, Cannabis sativa
tctagtatcatcaataaatacaaaaccaagagtaggtcattacccgctaattaagggggcaaagttctataaaatctcgtgtattatttacttttctgttcttattgtgtaacacgtggcaagcatcagtaataaatatggctccgctattggttgaccaaatctgagatcaacagtttggtgctttcattgagatgagtagttaacttattatatcaaacgtcatggttaatgcaaggagaactctagttacgacatctgcctcctcgggtcttcctcaagatcctatggtgattgatcctaatgttcgcgtttcagtcacaactggaatctccacaaactcgacatatgtggccacccctatcacctaggtaggcaccacgaacctggccacaacactactacaaaaataggtttttacatcagccaatgcgtcaggtcaaacttcttgaccgacgcaaaaggcaacccacacttttttgcttcagctatccaccgacgcaaataattattaattagcatcggttatctatccgacgctaaaacaaaaaccgaagcaaaagatgaaatataaaaaaatttgtatacactattagtgtcgatctacaaccaatgcaaaaagtcattatatacactattagcgttggtgcacaaccgaagcaaaaagacattaaaaaaaatcagttatgggcttgctttagcccacccatttaaaaaaaaaatctaaccctaaaatacaaatctaacttctacccctaattttttctcagccgcccctctctcatctatctctctctctaaccttattccctctcttcacccatcatcaccttcatcttcttcc

SEQ ID NO: 130433 - DNA, 740 bp, Cannabis sativa
gtgtttaatttcattgttttagagctattcatatttaggatgttaatcaacatacttgttagtaaattttagatcctggtaaaatattcttaacacagatttcattttatttctcccaagagccaccatcatcgatctcttcaaagatccatagttctcacttctagtaagaacttttgcaacaagcatgacactaggatggtctcagtgcgacaaataatatggactttgtggatcatcatattgggtagtttgatctaatgcggaaaaacgattgttgttatcaggatcattgtcacgatttgaagtattgcgagtctgagctcctcctcctcttgccatggcagcagggacaaaaccgatgctgagatgggaacagaagaagagaagaacagagaaggagctcaagaatttcctggctctgataccattttagttttaggagagaaaagaatgaaatcttttattattgagtgaatgaattaaaagattgctccacagagcttttatacaacagttgccatcgactcatttttacaacaactaaaccagcacaactgtcataactaactcacacattacatctcaattacaacaacttttctaactaacttctcaactaattctacaaagccacagatccccatatcggaactcattcaatatggtttctcctaacaacacttagatctctatatgagaagtacgggtggttggtgttggaaattatttcaccagga

SEQ ID NO: 130434 - DNA, 895 bp, Cannabis sativa
  modified_base (826)..(827): a, c, t, g, unknown or other
  modified_base (859)..(867): a, c, t, g, unknown or other
agattctatatctatgattagctctcccactcaattgtactaccatgttctcaatattaatatgtaagtatttggaagatccacttgatcaaatttttgaacactccaagttttcacaaaaaaaaaaactctcttttcacaaagatgaaaatatgaagaaaaaaaatgaagctcaaagtggtgagaacatttagttgctctctatgtcctatttagttcataaaaatcctaaagacagtcacaaacacgttttcataattgtacaaatatttccaaaaataatttctgatttgtagtaacacgattggaatccgtagtaacagattgggtcaaaaaaggaaactttcgatataagttcaagatcatggtggtcttatttcctgtcataaaaggttaggaaatttgctagatacatagcaaaactgaattgtcaatcacaatataaatagaatcaattataccaaaaatagaccaatttagacgaacttttcataagaagcattaattttttatgcaaagtttcctaaatagaaaaggaatctataaaaaaaaaatatttatgctcataaaagattcataataaattaaaaatattttgacaattaatattgccaaaaaaaaacctaataatagtggtaaacaatgattagtttcataggatcttaataattttattaacaatttaaaatttcatatattttatataaattttgtgggagttttttccttaaaagtatagcattaaactagtaaatatcccgcgcttcgcgtcggataataaaatattgtaaattatatgtaaaaaaaataaattgtgtattttaannaataataattacttagtaaaattatattaaannnnnnnnnttattattaaaaaatttgtgacataaat

SEQ ID NO: 130435 - DNA, 1051 bp, Cannabis sativa
acaactctcttcttgttcaacaagaacatgaagaagaaatggtgaaccgacgtagtctctgtcttaatcagctcacacataactcagccgatgttacttctctctgtaatgagaatagccataatctcagaacgattaatctggagttgaaaaagcagttccgtcttctgttacaatcggcattacagaatcgtcttggttttggttttggtaatgaggaggagggaaacgatagggatatatactcgcgattgcctaagagtatctctgtgaaatctgaagattacttggaagtttcagctcaggctgttaacaaaaatggcggaaggagtaatcgagatcattcttctactgcgactactctgcgaaattttgttaaggtattatcgaaatcgagatagtcctttccattgttgtttcttcttttcgattaatctctctgatttataacaatacaatctataaaggaggaaaaccaatttctatgcaaattccttagtctctttgattatcactttctaattttatctaattttcttgatccgatcatttatgtttgataaacggaaatatcgacttacataaattttcacattctttcaaatatacacctatcttagtaatttgtggaactccaaatcccctgtttagatacaaaatacaatttgaaaaaaaattaagaaagttgaggattaagatttataattatgagaaaaatgtgatgctatgctctgtacaattatgctgtttttggctgttgattcaaattgttcttaattctaaagaaattttatgttttctgcatttgcaattattataataacaatgtcgttttagtttgtttgtggttgttgactgagtgaaatgtagatatatgatgagatatttcttcattaatttaccaaaattaatagtctttttctttcaagagtttgaaacttggtctagttcttggtatgattttaggatagttttacaactcaatgcagattaagaattggtctaaaaagtagtagtacaacaagctgaatgtcatcatatcatatgtcct

SEQ ID NO: 130436 - DNA, 1115 bp, Cannabis sativa
tttttatcaaattttactattatgcaatggagacttttctaatagagtgctataaatataatgtatatgcttttttagctcatgtttataaaattaaattctaatagtggtgtataatgtaatctaaatgtatgatctaaatttaacatatgctaaaagtttgccaaatttaacacaaatatagcataaattaaattttacaccataataaatattacttttttatttattttttaccacttattaatgtaattcataaatttttatatttttatttatatattaaatataatttttatataatttcaataatatttaatgttttgttgacattaatatacatctttctattaaaaaaattatttactcttaatgcattagaggacaatagtaaaatttggaccaaatataatattaatttattttttgagaaaaatttagtacaaaatttacaccatacacgaaagatagtctaaaaaatttaaatctctaatgaagtactaaaaaaataatttattgctatattttaacacactgaaagaaaaatactactccaatactgttttaaaaagtattttaaatttggcacatgctaaaaaattgtactaaattttacacaagatatagtattgtgttaaattcgatccacaataaattctgcattttttttatttattatagtgccattaaatattatgatttattgacttttacataattttatcttctatatttactatattgcaattatttaagcaataaaaaataaaaaataaaataatgacattcatatattttcaataaaatattgaataatgatcaataataattatatttttttaaaaaaaaatctttatattaaaatataattataatagtgacctaaatataatacaaactcatttgatagtctagagcatctccaatggagtgccataaagatggtgtattgctatattctagcacacttaagaaaaattatactccaataatattataaaaaagtgtgttaaattttgtacatgttaaaatttgtgccaaatttagcacaagatataatattgtgtcaaatttaacccataataaatattatttttttatttactataatatca

SEQ ID NO: 130437 - DNA, 1000 bp, Cannabis sativa
actattattatcattatgaattgattgccgtgtataggagagatgttttgtagcaattattattattttgacaaacttattattatttttattaattaattgataagccaatatactagaagaagaaaaactaaaccacaagaatttaataagagaaccatacaaagcaacaagttacaaggaaggtaaagaaccattccaaactaacttattatctaatctaagacctagcttaacaatcttatgagtaatcacattacaatccctaggaatatgacaaatagctagccttggactgaaagataacaagttcttaacatgaattaggacatcatctaaaacaatattattctaattacaagaagcaagtttatccactatagattcagaagcacatctataggaagattaatcaattgagcccattggatggcctgataaatggccttagcttcagcaacagcaggcggcactaaaccaacaaaaggggttgtaaaacctgctataaccctattacaagcatccataaccaccactccaatactgtgttttcgattatatgaatcagtggctgcatctgtaaaaattctggagcgacctgaagctatttgttgcatccataatcttcaatacacattataaaataaaaattaaataataaaaaaaacttctttaagaaaaaaaatagtttagagcaaaagtagagagccacctcatcgatatcaatttcttggctggctcctcaagtgctcccattgttgaaatgatcagcatcaaagaggcgttgagttgggtaaaggcttctaatctctcgaatattattatagagacagattgccttattgctattcaagctttgcatcggtggatatgccatttatatttagtcttattgtgcaagagtgcaaagttttattatggaataattacataaggcaccattttttttttgtaaaatatttacatttttacgtttaaagaatatttttttttacatttt

SEQ ID NO: 130438 - DNA, 1106 bp, Cannabis sativa
  modified_base (1052)..(1067): a, c, t, g, unknown or other
tgtactggcctcgagtacccccacatcggggtaggcggcaacaaatttctctaagatttcctcttcctcaggcaaagggttaggatggtgtaacacccattcaaagtgttggacatggtcagttttggccgccttggtaattatatcaacaacactagccactattgcttccttcacctcccttggaagttgacgttgcccgcaaatgctgacagtgcctatgctctggtacttagtgattagacctgacctagagagaagtccggtcatcactaagccgtcaaccctcaattactcttcagagaagaccttgtattagccctatttcctgacgctttgaggaggaagttaagctgcaaacaaaaaagaaaatgctaagtcacatgcaagaattagtggaatccaaaaaagagtaagacttgtaatattaatacctgggagttggaagcttaattgaagagatgccactctattgataggaaacccagagtaaaaaaaccaatattctcagagatcgtgggtacagtctatttggcaaataggacaataagagtttggatgtttatccagtcagaaaaaccctaacttagacctgtccgtcctcatgggattagccttaacaccgtaaaagtagaggatttcctcaggggaaggaacttccagtttattaatcttgcaaaatacataccacccatccaagagcctataagatgaagggatcagctggaagggcgcaatcccaatttttgtaattatgtgcacaaagtaagtccttagagggagatgggcaccgctggaaatgtgggaccaactccatgcgctaaaaccgtcaacgcttgtggatgcagattctctaagaacggagagtctgcgccacatcagaccagggacaggcccacgacctcagagtatgcttgtaacattctatagaatcaaaagcagttggccttctagtccatctcccacatagattcaggacaaacctgggctggcgaggaaagcccacctctcctgatagctgcgggtaaatttttgaggaaattacactctannnnnnnnnnnnnnnntcctcttttatttttaccctcttttttaaagtctatcat

SEQ ID NO: 130439 - DNA, 783 bp, Cannabis sativa
aactttccttctccccaaaaagaccactgataatattgatgccattataagaaagttttggtggactggccaatgtaaaaagggcagatatctatctttgaaggcttgggatagcctctgtaaacccaagtcttgtggtggattgggctttagaagagccaaggacatcaacttttgtttgcttgttaaattaggttggctcctagcctctggttctatgtctttatggactgaggtcatcaatgcaaaatactgcaaggatggtggattcctatcttcttctcttccctctaaagcctctcctgtggcgagaggtatctgggcaactagggacttcatagctgatcacagcatttggattggtggtcaaaactcctccattgattactggtgccaacaatggatctgtggagagagcactattatccacaaaggcctcatcaatccgttgacttcgaactcggcctcggttaatgatctggttgatagtgatcacttgggatggaatgaacgaatgattgataatgtctttactcctgctgtggcttcgataattaaatcctcggacagaaattctctcccatccatggacgtggcctgttggaaatctaccaaggatgggagcttctctttgaaggcggcgtactgggacttaaacaagacaagatttgctgaaaaggatgatgtctgtggagggatttggcttgctaaaattcatgatcgattcaaggtgtttttatggaagctttgccaagatgccttgcctttcggatcaaaattgca

SEQ ID NO: 130440 - DNA, 716 bp, Cannabis sativa
  modified_base (85)..(110): a, c, t, g, unknown or other
gcacccaatgtaaggtttcttaacctttatatgtgtttaatttatcgttttagaaagttcttatttaggatgttaatcaacatannnnnnnnnnnnnnnnnnnnnnnnnnaaaataatttccaacagttattacctctatcacgggatcgaacctctataacaatctcggtgctttctttactttatcttatatatcattgttattaaattattctaatcgctttaattattctaaaagcgaggtcaatattttggtactttccttgagagcgtcgaaacacaaatctttgttttgagtctttttcaaaacatacgaagatggttgtacaggcacataggggaaattaaaacaatacaattgatccgatggttgcagatcctaatgtgcaaactcccacaaattgaagagatccaatcaagacagatcccgacctaactattcctcagcctctaacaggtcctcaatcaataggacatggagtaactacccctctagctgaatttactttaggggtgcaagaaacttgaactaccagtacctagggcgagcaaactgcccctggtactaaaaatccatctgttggaaatccccgaagagcaattggtgatgacacctagctttagaatttacgagccactctagggtagatgcaaaagcacaccaacacccttctgttgggttttgtgccctaaataaaacgcatttcaatataat

SEQ ID NO: 130441 - DNA, 800 bp, Cannabis sativa
aaatggatttttcatgtaaaaattactaataataatatgtatgaatgtatttttttatttttcgatattcaagtaaatttttagtcttttttttttcatagtcatctatcttgtaacgattaagatatctaaatttaaaaaatttagaaacatttaataggttaaaaataaaatttaaatggtatattttgcacttataaaataaaagagccacaactacaataaattatttaaattttattttcaacatattaattgtttttttgaattttatagtttattttaaataattataatatagacaattaaaaaattagactgacaaattttccttgctgtcataaaagatgtagttcggaatatagaaaaaacaacgaaacagtggttatagttaaaagcttactttactatatcatagattacaaaattacaccttctactaataaaaaaaaattactaagtaataaaacaatgattgttctattactaaaagcaaaataattcattatctccaaacaaaaatccattacattgaacgtaataatacccacctttaaatcactctttacaaaataagttccagccattggtgaaacaaataaaacatcaattgtgtcatctaatcaatattgaaaattagcggtaagatcttgatgataaaataataattttttttggtaagacaaaaaaattaaagaagatgtatttgatttctcgtgtctaatcaagcagggttaagagtattagtcacatcaccatgcattgaacgagattacaattttcttttatacagtagtgac

SEQ ID NO: 130442 - DNA, 1211 bp, Cannabis sativa
  modified_base (39)..(47): a, c, t, g, unknown or other
  modified_base (975)..(978): a, c, t, g, unknown or other
ttatttctgatctttattaatctgattatattgaaatgnnnnnnnnntagggcacaaaacccaacacaacactcctgagtgggctgagaataaactcgcaatccaaaaaagattttcaaaaaagaaccccaaaatcaaaccctaatctctttttttatatgaaccctaatttcgaatttcaaattttgaatcacaaagctctaataccatgtagaaaatagtgaatcaaattgtgtatttcacagaatagtacatatttatatacaaagcaaggagactaaatgggaaactactaataacaaaataggaaactactaaatacaagttaccctaattttttacaactaatatacagctaatatcctaacaaattccaagtttacgaagcttgagttgattgatacgattaaggctagccctttcgaatacatttgggaagctagagagttaactttcgctgacactttggtccacatcctcaacttacgaaagataaaaattgataatgaaaaggaggatgaggtttggtttcatgtgggaaaaatgacatgagattcgggtggatagagtttggacttattatcggtttacttatgggtagtgcccctacagaggaagaaatgaaagccaagtccaaatatcgtctagtcaggacgtattttgaagggaagagttctatgcagttggattcactattgctccatctggagaggtgcgaagtaaaagatgacgcctataagcttggactgatcgtttttattgagggtgtattagtatcaaaagagggtgatgtccaagttttgcctgtcatgttaaaattatttaatgaccttgaattcttcttcaagtatctatagggcgagcgtgctttccgtaagttgatgcagctattgaaaaaggatatgcaacattactaagataatgttgacaacaagaaggggaagaaggttggtcatgttgggttttgtgccctannnnaaactcatttcaatataatctgatttattaattaataaaagatcgcaaatcatttatattgcatggttcacatgatttatttcatgattatatgattaatatataaattctattaaatctagaacatatagttatttatgattatagtgttgtcaacgcagttgaatataatcatgattatatgtttcaaaagtttgagactcatgatttgtcagtacactagatttagactg

SEQ ID NO: 130443 - DNA, 964 bp, Cannabis sativa
ggtggattgtgggggacgacaacaatgttcccattctcggtgagccatggcttcccgatcctgtgtatccaatgtttgtatctacttacccgagtctccaccacgccaaagtgtgcaaccttatgaccgctaatggttcaggttgggatgtcgatgtcctaacagatggttggagcagcgtgatcatgatctagtgttgcagactccagtgcaagctcaaccagacagagatactttgatttggtacaaggaaatgtcagggttgtatccggtcaagagcgcctacaaacttcttcaagaatcaaatggtggaactagcttcgatgatccagcagtgcattgattttggaagaaattgtggcaactaaaaatacctacaaaaatgaagaatctactatggagagtcggtaagaattgcatcccaactttgtctcaactccatctgaagcatgtcgaggttggtattctttgcccggtctgttccttagaggagcaaaccatcccacatgtacttatcacttgttcaactactcaattatgttggaatcaggtgagcattggtacaaatgtacaacagggttctatttttgttgactggtgcatcagtcatcaagctactggtggcctcgtgcatggctatttggaattcaaggaatgacagggtatggcaaaacaaagtggatacaattgtttcatcggctaaaaactatcttaatcaatggcaactcgctcaaggcttaggcaacgagctcttgtttacaagttttataccgagagacggagcggagcaatgggtagcaccaaatgaaaatagtattaagatcaacattcatgcggctgtgtttaacgagacccagtgctatggtgtcgggtttgtggttagagatgcttctggtttgctactggagggatgtacaaggttgttcttgttgggttttgtgccttaaataaaatccatttcaat

SEQ ID NO: 130444 - DNA, 1420 bp, Cannabis sativa
tttttttttttttttgataaggggtaaaaattttattcaacttgaaaaactatcatcccttacaataagaaacaaatctgatggagcataaaactcatcaaacatacaacctgactgtcttgcaatgcaatgagcagacctattagcagatcgtttaacaaattcaactaaattcactgactgcataatatcatgagttactgctggtttctccattgctttgttgtactactactttcttctacttctctaataacacatacatcatttcattctttaccttctaagaatcatcacttgtgtgattctgctgacaactctgctttgctcaaattcatcaactcattttccattaaattaaaacacaactccaatgctttctcttggaagaatggaacagactgttgtttgtgggatggagtctcatgtgatcaactttcaggacatgtcattagccttgagatttagttttcttaaaggtcctcttcactccagcaatacccttttctcacttggtcatctccaataattttcatggctctccaatctcagtttggtagtttgaccaatttaaaaaggcttaaccttgataataacaattcttctggttatatccctgttgaattctcccatctctctaaactcactcatctcaccattaatccattccaaatagataagattattgtggagacttatgtcttgaaaagtatgcttcaaaacttcaccaatctcaaaaaactttctcttagatatgtcaacatgtctaatgctgaattagttaattattataattttattggttccatgtctacatttaattggagcactctactatagggttccatttcaaaatcaattagtgatgagtggagtagtccatattcttatatatggctcattacttttacatttaatttgtgtaggacaatattctccaatatcctcctcaagatggtggctatttttgcttaccaatcttgaatcaccttatcacaagtcatgttatttgctcgtttattttttgttcagatctcaagcgtatttgcaccatctaaactttgtacggctggctaaccatctggataagtgtgaatcgaaagcccgctaggaatatggcttagggttctatctcaaaactaattggtgattagtgaagtagctcatgttcttatatatataatagctcaatacttttacatttaatctacatggaacaatattctctaatacactcgctcatataattacatctttccagcactaaaatctttgttgatacttgtctacaactgccaggtctttgaagacttgtcatatcactaacctcactcaattagtaaacctcacctgtttagacctcaatagcaacaatttcggtggccatatcccattgcattagggaaatttacatggtata

SEQ ID NO: 130445 - DNA, 1392 bp, Cannabis sativa
tgtacacgatcacacacttggattacataagtttatttgaacaaggataagacttagaaactttttctgcatataaatctgacagtgtcactctcaacaatggtgcatgaaactgttgcactagataaatataataataatgtctcatttaacaacacagaaaataaataatatatcaagcaaataattgtaataactgcataattaaatatagaaattatgctaactaattattttttttagataattatgctaactaataagaattataataaagaggattattatgtacatcatttaattatgacctttttgtgaaaaataaacaattatgtgaatagtaatctaattatagagttaaatgatcggtgtcccacattattattatgttattttatgaattatgttaatcatcagagcaacagtgaacttcatcgaattggtagaaagatagcaatttagaatttagtagtacgtgatattatgttataaattgcgggtcttagaaataaccaatttttgggtttagtagaacaggaaattacaactttatccttaggtttggctttattaaagttttgttatgaggggcattttggtacttttgaagtaattaatgaaactagatttcatttattattcctttaagaattttgatagaaatttttagacagaaatcaatgtcaccctcattttcttattttgtcgaatacttggagtcaattcttagaaaatgtattgttcttgaggtgtttggaagcttgttggtgaaataaaacattttatttagttttcaattatatgattaggcatttggtgtttaaataaattatagttttatatattgaggttagagtagagttatttgagtaattttttgtttagagttatttgagcttattgaaatagactttgaaaatgagaatttagagctttatagtttaaaacttgagctgtaatggtagattttataattatggtttaaatctttttttaaggctttgtattagtcttgtttagtacactaaactattgtggaaagtttggggaagattggtgatgatttaattaggttttgaaggctagaatttgaaaaaaaaaaaaattagttagggttttggcccaataactagttatctggttattggtacaagtgaataagtttccaaacagttaactagaatgtagattcggttaactgaatggccaatcctaaggggtgacctgattcttacattttaggggtatttagggtattttcactttatagattgataggaaaaccatagattttgtatctagttattcgaaagtgtttcagatagacatttactaatttatcgctaatgtgacttaaggcctccaattattgaacggaattccattcaggtt

SEQ ID NO: 130446 - DNA, 601 bp, Cannabis sativa
caaatatcaatcacttcaaattccttatattgataactaattagattgtaaagagttttatttagggcataaaacccaacattttttgcacgcacctactaagggatactttaagttgtcaagcacataccgctataaatataatttaatattaagtcctacatatttttttatttaaaaaaaattcttaaatattttaatttgataaataatatagaaaaatattaaccactgctacatcatatgttcgacacattaataaaatcattattatttaggattacaagtatgtataatcaattttaaataatataaaatttttcctttcaaactcaaactacaagcaagagcgctcgctcttttttttttttttaataaaagcattcatataatagataaagcgaaaattaaaactcacggtcattacaaaaaaaatgttcaagaatcgatggaataggaatacatctgaacctttggtgggtgaacacccacttagccacattatgggcaaaaaaattataattcctactaatattagagaaaatacaactaataaaaataaaaaatatatataattccaaaaacctatgccttcactact

SEQ ID NO: 130447 - DNA, 936 bp, Cannabis sativa
tactggtgttttataaaaacactgtatttttgaaaaattttccgtgtgacagtatttttgtaaatgttaacccaaatctcagtatttttgtaagtttcgctaagacaatgcagtaaagccccgaaacccgttcaaaatgggcttcttagtaagctgtaaacgggctgatgggcttacttacttcacctacttcggcccacgttaatgtcatattctttctatatcaatttcttgaagtggaaaagaaaattatttttgatttgaatgaacatctcctctctcctgtataattgtcctaaatcatgtctaaatcaatacataaggacatgtttacatcatataaaattattaattactaaattagagaatcttcattcatttgattttcctattctcctcaattagtttttgtatctaaatgaaattattccaataagacaatattaaatattaactaaaaatagaactattagttagtagtcaatgagtcaacaataatatctatcaatgatattattgatataattattatgaactctcacatataaattttttttttggtgacttgggattgagagacccacttttggtgttgcagaaataaataaaataattattaccaaaaaggaaaaagtttgtgggcccataattggagagaagggaataaattcggtgacacgcaaaggtatgcatgccactaattacacgtgtcacgttatgaggcgatttgggtagatgatatctttggcgttatctagtccttcaggtgaaacttcaacatataagactcaaagagaaaataaaataaattcagttaaaattaaaactaacgtaaatattatttaagatgttgtgttttgtaaaaattattaattggattttttattttgttaagtgataaaatatattttttattttttaaaatagtataaataa

SEQ ID NO: 130448 - DNA, 742 bp, Cannabis sativa
ctcgatggatgtctcttctcttatttattttggcaatggagtatctcacaaggttgctaattttgaagactaaggataaaaggtttcaatttcatttgcattgcaagtaacttaaattggtaagtttatgctttatgaatgatctagtagtcttttgtaaggggtcagtatactccattaaatgcattgctggagctttcaaggaattcattgattgttcatgtctcaatgctaacaaaatcaaataaaatgtctactttgttagggtggataatgatgaaaagagcaaaatactggacattattcagtttagggagggagcttttcactaaaatactcggggtcgagataaggcctaccaaatgaaggtatgagaattgtgaggcaataataagtaagataaggtagaaattgagtacatgggcaagtagacacctctcctatacaggaaaactcaacttataaactcagtccttattggtatccgtagttattgaatgagcatttttatagtacctcaaaaggtggtaaaagaggtaggcaagctttgtaggaattttctttggggagaaaaagagaatactagtagattgtacttgacatcatgggctcttgtttaccaacccaaactgtttggagggctaggattttgagatagtatgaataggaatgtcaatggagcgggtcggatctgatccgactatgatccgacctgattcagatcatgtacggatctgtcccg

SEQ ID NO: 130449 - DNA, 959 bp, Cannabis sativa
tgatatttatagacataacagtaagcttggtgtaatatttaagagagattacaaatatattagagtgtaaaggttcaaatcccactaactacactttattttttctttttaaatttatttttgcccttcttgtttttataaaaaaaaattacgcccccctcactttaaattttgggtccctcatgcattgacaacgcactccatgttatatatatgacttatggcatgtaaatgttatttgcatttcaattataagatcgtacgtaaaagtgatttttagtttttatggactaattttgtttgttcttattgatttgcaacaattagtacagacaattaataaaacaaaatcctatgctctctttacaaataatggactaaaaacttaatttgctgtttataataaacatatatatatatagacagtagctaggtgtaattattatgtgccaaggcaatattgcatttgttaacttttttgttctttcactttaattatcaaagtttcaaatcattagtgatgatcatttttcatgcgtgtgttgatttttcataggagggaaactatgtattctcagtacatgtcattatactattgactaatttattgcaatatttacatgcatgcaagctgtaatttatttattataaattaatgactaattaataattattctttttatctgatatgaaatgatggcaaatgttacttctgaaatagtttcaactttcatgcacacacacactaacatctgcattacatcatggacaacatgtcaacaagcattttcctttttcgagttaaagtgttgtcataattatattcattataacaaacttgtttgttttcaagctactctattataacatctacctgagttgtgcactaattaaatcttggctaattagtaaattttcccccgaactttgacatatactaaattataccccctaaactt

SEQ ID NO: 130450 - DNA, 806 bp, Cannabis sativa
tttcttttttaacaaaccacttcttccatgatcttatttaaaaaaaaaaaatgatttttttttaattccctccaccaattttaactataattttttctcatttataaacttttacttcgtaattaaataaaaatatttatatttaatatattaatatggaacctctacctatgttagtgtaactccttgtttgtaataattaaagattgaagcattttaatttggttgattgctctctttatcttccaagttttagtcataaaaaactcaattgtaaaatatgtatacactactccacttaaatatgtattgagaaaattttaaaatgtatttcttaaaagtaatttactgatacacccttatctattttggtattcgaaaaacttttttagaccaatttttttttatagtcgtgtatattacagttaatacattatgtaaaattttgaaaaatgttaaaaagtttagcacattgaaaataagattcaaactgtttgttacacacgtgtgaaataaactgtatgaacattgctttgtatactgtaaattatttcgaatttctcaaaatttcacaagatgtcttaaacaactataatgtacacaactatgaaaacaagtaaaaagaattcattgtaaaaacaccctatgtattattatagctcttttattcattatttacatcaaaaatcacaaatttcaactatttctttttttttttttgaaaataagcgtagttatatataagggaaactagacctctcggtcattacacaaaatgttctccggtaaagagtcgatcggaatag

SEQ ID NO: 130451 - DNA, 566 bp, Cannabis sativa
ataaatataatttatttattaaaatgtcataacaattttaaaaataaaatacttatgtttattttattttatcttttgaataaataattttttttattaaaaggccataacaattcttttaaaagaatgtattatgcttattaattattcaaaaatttgtttataaaataaacgaaattataattaataacagtaagcataaatatcatatttatattattattgataatttttattaattattaatctaatatatttattacgaaaatatttattatgatattgctgatataatgtgtttattaaatttagaatataaatttataaataaaacatatatgtttattatttatttttatcatatatagtttgtatataaaattaaaaaatatatttctcatagttgataaaatgtataataaattgtaaataaatttttatgcacatataatgtaattaaataatataaagcatataaatttataaatttctactacaaatttttttacttctagtcacaacaaaacttgtgactaaaagtgagaaaattgtgactaattataaat

SEQ ID NO: 130452 - DNA, 857 bp, Cannabis sativa
  modified_base (792)..(809): a, c, t, g, unknown or other
tttttttatctttttttaattttttcttttatggggatggggtcgttttgcataatattttttaaattcaataattcggtatattttgctattatttaaaattatcattcaacttatagttttattaaaatgagaatgagatctatttaagaaataaaagttttaataaattaagcgataatagttataagattgtgaactctattttaaaatccaataaatttgatctagtgataaatccaataattctcatgatcatcaataattatgaatatagtcaacaatcaaataaagtaccttcgttttggcacgttgatatgataaaacaaaacttcatatataatatataaatatatatatattaattttaagttgttggtcaatatgatatacagagtttgtacaaaattaaaactatatatcatcaatttaatcattagttatttggatccctccaaaaatctctatatcacctttcccaccaggctcacctcagatcacaccctaattattgtctccttattattattattattattattattacatacaacttaatacaatatatatgatcataaataaccacatttattttcgatgacaacgtgttgaaacttgaaacaaaatcttactgacatcactttcctaaaaaaaatgttactcacatcaatgaatatatgcatatttcttttcttaaaaaaaggttgcgatatttggaactgttttttattgagaacgacaaaatttacattcaataatatatatattatgaaataatataaaataatatannnnnnnnnnnnnnnnnnaagaagaagatgaagagagaaagagaaagtgaatgagaatttctgagt

SEQ ID NO: 130453 - DNA, 565 bp, Cannabis sativa
tttgtgtttacagtataaaagaaaaaaaaaacgaggatagtataaatgtaatttttgtcgtgtgacaataaaattgaaagttttatccaaaatcaagtatttttgtaaaaacccaaaaaagaaaacgggtgagttggactggtctaggtgaccctcgaactcaatgttgtgctaaataagaagtagaaattacactatatatggaaaaaaattaagagtttacttttttatggcataaataaataaagctaatggattatggtttttttgtttttttacatttatatgggtttttttatgccatatttttgtaaaaaaaaatagaaatctcatatttgtagacaataataagttttgctggaaaagtcaccgaaaaagtcactggcatcggagaagtcaccagaaaagttatcgtcgccggaaaaatcaccgctgccggaaaagtcatcgtcgtcgggaaattcaccggaaaaagttactgaaaaagtcaccagaagtagatgtctcaaatataaacaaaaatagaaccggttataattgaaatataaccagttctgtaacacaa

SEQ ID NO: 130454 - DNA, 716 bp, Cannabis sativa
  modified_base (670)..(671): a, c, t, g, unknown or other
ttcatgccatcaaaaataaaacagggggtcgggctggtattgccactttgaaacttgacatgagtaaagcttttgaccgagttgaatggcgcttcattaaggaggtcatggttaagatgggtttatgtattatgtgtatttaccacagtagtggacaaggtttatgtatgagaaccctaactctataaatataagaaaatacattcatgcaaagggtaaaaatctcattctttgagtgcttagacaaattctaaggttcaaatacttgacaaaacacttatgtaaatcaaaaaggtttttccaaccttatcataataatattgactcatggactagtggtcgttaattcttgaactacgcaaaaattcttgtttcattatttgtttatgatatatttctttacctttattatattttattaatttttgaaaatctcgataaatagtaagtaacaatttaaattttattttcagcattgtaaactattcagaattttttgaaaaatttacaagtgatcctaaatgcaacgtatgcgatcatgcaaattagactattttttttcttctaaatgttgaaacaaataagagtctactatagaaatttgagtaaatgccattttagacccgatgttttgcaaaagttatcgattggactttttgttttgttaaannacaaaatagaccctgtattttttaaaatagtaaaaataggaccct

SEQ ID NO: 130455 - DNA, 775 bp, Cannabis sativa
  modified_base (533)..(536): a, c, t, g, unknown or other
atgtgaaggagtaccgccaccgcttcttcttttcctccggcttccaagccatgggccgcccgaagcttctcacggagtgggtcaggatccctccctccctgaggaccacgcctactcaactgttcctccagcgggccaagactttctctacttacgacaaggaggccctcaatgttagggacttgggcacgacggaaaattgtcggaaggccaagctgatatttgcgaatcattcggtggatgactttaacctttccaaggtcatctgcccgaacgtcaggactcctgttgcagaaagggcgctccgggtggatataatcacctcaacggaggaccggtaccgaaaatacatcttccagagggagcagtagctagcttatattaaggcccaggctgcagccgggaggaccttttgcctagaagcgggcacggataggaggtcttcctggcctaagcctttggtccccgttcccaacactggcactccagatgccagtatttcaggttctagtaagtctcctttagtaattcannnngtcccctctgtccgagagtatacccaatgtaggcccataggatttgatgagcggctttataagtttaggatgccttgcactcggtggggggatcacgccaaagagttctatttttcccacttaggccatttcttaggtcgatgtcttccagctggtttctcccctcggacagctttcttggggatgacgaagccagcactgtagttgctagggctgaattagagagtcgggggaggatt

SEQ ID NO: 130456 - DNA, 594 bp, Cannabis sativa
aaaagttaagcccaatgtttataggtcctttcgagacactgggcaaagttagtcaggtagcatactgtttggccttgccgctaacattagcagaaacacataatgtttttcacattttcatgttacaaaagtagtacctgatccaacacatgtgcttaaatacgaggacttgacctttcaacaggatatgagttatatggcacatcttgtgcacgtgatagaaaaaggaacaaaagtcttacgaaataagactatacccttagtgaaaatcttgtggagtgatagtttgatagaaaagcgacataggagttggagacatgcatgcagaaatagtaccccaagttattctatggtaagtaaatttcaaggacgagattcatataaggtgggtagattgtaggagtatttgcggtgcgggtggtacgggttgcaacttttttttaaaccaaattgcatatacagtttttctaatttctcaaaccgcaactacactgcaagattttaaaaccgcaaaattcacaccgtgaaaattcagtgtattgcagtttgagcgatttacactatcatcattatcgaatattataataaaaattt

SEQ ID NO: 130457 - DNA, 1121 bp, Cannabis sativa
atagtatatggggtaattttcctttttattttcattttaattttttttaaaaaaaaaaaaataaataaaatagttcagtctatttttaaaccaaatacataattacttttagcataattcaatctttttcagtccaattcagtgtaatcttgagtaccaaacaggtcatgtatgtaatgtaaaaattgaaaagcaattgtaagatttatactttctctctgtttcaaaatggtcacaatcttcttcatttactccatcgatctaatcaatttttacacgaaaaatcagtgtagaaaaattaatacttaagtttttttttttgagataacataaatgacttcttaaaaaaacattaaaagaaagaaaccttcttttctttgctaataatatatagataaaaatcactagagagagaaggcatgttaactgcataacactgaataagtccttcacattagtgttatttctcttgcaaaaatgtgcgacgccaagttcaagactacggaaaagttttggcacgcatgatgagaaccatgaagggaactagaaaagggaaaactaagaaaatatagtaccattttttcttttggaaaggaagatattcaccaaaccaaccaaacaaatacaatagaaaaggccaagtccaaaacaacaaaaaggactagcaacctctaaacttggagttgatcaactgaatcgcagctagacaatccagcgcaatgcaaatttttggcagcttcttttctacggccaaatgaaccccagctctaatggctgtcaactcagccgcaagaggagaaagaggccgcatttttacctcattagcagcaggagaaagtccatttcagagtatcattagaggaggccaatttgtttgaatccaaagaggagttttaaaaatctgcaacatactttgtgcaccattcaacaacatcttcagcctttggaatcatctctccatgaacccatttatttctagttaaccaaatatgccaagaaaggatcgcaaacaaatcatattcagcaggggagagtaaggccttcactaagtcaagaaagtcaaaagaactactgcaatagtagcttccacagcccactccctttccatgttgcaactgttg

SEQ ID NO: 130458 - DNA, 697 bp, Cannabis sativa
aattagatttaaaaaattatcatttggtctgatctaattagacctcaaaatctaatccaattaattgagttggatccgttttttaaattgaatatccaattgcacatctaatttttaatattaactaaaaaatatggaaaaaaaatatgtaaaagctaaatatcatcctctatttaagtttaataatatcattgttacaaatataatacaactaaaagtttaaaataactaaaacaacaacattactaaataataaaatatgtagtaaaaatataattaaaatatgtattttttattacataaataaatataaataatttttttaatatatataaatgtaattggattgaaatcatttttaattaaattttgagaatgacatttaataacagatataatccaatatttaattttttgtaattaaattggattggattagataagtatgcccaataacaatattcaaatattaattaattaaggcatcattacataaaatactattatttgtaaaaattttacatttttatgtttgaagattttttatatatatttttacgttttttttatagaaataacaaaaaatcaacaataaaaaacatgaaaatacaacatttctgtaaataaatcataaaaattacaaaaatatttaaaattttgtacgataatatttttgtattttttatttatttattta

SEQ ID NO: 130459 - DNA, 624 bp, Cannabis sativa
agcctaaagaacagatgccccaacgttctttccccgctagctttgcagcaaacacaccaaccagatgagatggatgtgtaaggcatcctcttttgcatcttatcatgaacgttcactttttctaaagacacgagccacccaaaaactttgacttttgacggaacacaacttttccataagggccttacccaatagactccactgccgttcaggttcgatgtaaaccaagagaagactgacttacaagaaaaaattccagttgattctggtttccaaagtcggctatcatttgagatattgagtattcttcttagttttgttagtttgagttttggcagctggttgtttattttgcttttgttgtaataaatgatgttttattacccttgccattgtggtgtttggctttgggccgtttacttgtttctccttgtaatcggcatggttgtgccattgttaggtcatttccttgggatatttgtgcaggttttatttctacctgactttttggattttgtccctttaaaccgttgaatgttattcctcattcataaaaaaaaaaaaattaaaaattaaaatttcagtttgtcccaacctaatattatgtgaatttttcacttcaat

SEQ ID NO: 130460 - DNA, 717 bp, Cannabis sativa
ccactgggcttatgggttctttgtatctaacttgtaagtgggctttttaagtacttcgatcgttgggccttttcattgagcttagagcaatttttggccactacactaacttttggtaatcaaatggtttaactataaaatcatgtttaattaaaactttataataattacgttttttttttatataaataaacattgtaaatataaattgtttacaaaagtggagatctcaaaatctattttttttttttcaaatgtgaacataatgcaatataacaaaagtgactgtaatgctctaacccgtaaaggtgccatgtgtgcaattttataaattagtttataataataaactacagtttaagaaaaaaattgtgaatttaattaaaacactactaaataactttgaaattataaattacaatcttttaaaaattactaagctacgggatcccatttttataaacttttacaaaagtactattgtaccattttgttacaaaatattgtaaacaccatgatcctgttcacaagtacgccagacggggaggctaatatgtacattcatcagaaaatctctgactcatggttgatctacttttctttttccttacatgcaccacaaagtaggggtggacatccgatctaatccaacttttttttttcatccgatctaatccaatcagtaattggatttagaaaatcatcattcgatccaat

SEQ ID NO: 130461 - DNA, 1212 bp, Cannabis sativa
gatgaatagtaggattctcagagtcctttctgtccttgctgatatggaaaaccttcagttaactcttggaatataactccttctgtgatgctaaaggcggaaggtacatgctaattgtgcatagtctgaggtggcacctttctgtgattgcaacgtaccaggcatctaagaatacagataacatttaccctcaagctctcgggactcatgcgtgttgggagcttacagcttccttctggatgcttgattcgctaccctaacatggcagtcatgtgttgagatgcgaaaggtgttttctgtattactttgggtaactggagggttgatatgttctgtgatatttctatcatgttgctgaaacatgttgtccatttggtggagtcgtggagcttacacattatgctcaagcgcatttcttgtgggaagtgaatgacagctggacttaaaaagacgacaaattgatggcatgttggggaggctgccatgaaatgatgagtaatgaatgctccattctctctcctcaatcaaattaaatgcaaaacccttcgagtccccagctttcggatggagcaatttattttatcgataaaatcaggaccatccattgcaaaatgctctgaaacgttgccactcatataaatgggagacttggtgaatgctcactttttctttctcaccttaagcaacgatccttaacccaaggaatttctttagatgaaacctttggcctagaaaaaaccttcgccttcacacacttatctaagccaaaaacctcatctccttttcttgaccttactgtcgcctctcccaatgcttaaaatccacccaaacggtgagttctctgttggagcaggatgtgaccagatcgttgagcaacctgtgggattttgaactactacaagctcgcgactacatgccacatctccatcctttcttatactcaacaattgtatttgggaaatagattatgaggttagtttatattccgagctttaaattatgttagtaaagctgaattgaggttagtttgtggtttgatttggtttgtagtctttaatggtgatttttgattctgagtatgttgtgatattttgttgcttggtttatgttcattgtagtatattaagcaagtctagaaggtttggtgtggtttggaatcgatttgtggttatagtgcagtttttggtgtttcctgcactgaaccagttgacc

SEQ ID NO: 130462 - DNA, 979 bp, Cannabis sativa
aatatcaatttgtaaatttatattctaataaaatattaaaaatgagaaaattatggaaaaaaaaaaagaaaaataggtttggagagattttaggatgacacgacataattcctttactttatataaaagaaaaatagctttgattttagagtgacgtgttactgcataattcttttcttttatatagatacatagattatatataaaagaaattgaaatatagtaaaataaaactcttaaaatacattatttaaaatatatatttatgtatataaatatctaccaaaaatatccctagaatataccataaatataatttaaatttaaaagaaaaacaagtaaatttgcctagttgattatttttgtaaggctaatataatatatttattttcttattattttttatttgatttgattttcagtttttctagtgttatgtatatatttctataatattaatacatcgtgcagacaatataattgttggttgttcgtggctagcaataatattaagaggatggttttcgataaattgtacttatgaaataaattttttcttcttttttccgaaagaattaacttatgaaatatataattattaatgtatatatatagttgatcagtagatctttgcagagaataacactaatgggtatacttttcgtgtttgacatttttaataaaaaagtgttaattaattaatttgaattggttatcattgggatggttgaattaagctgctagatcatgaagaagagctcatgaaatatatgatagtatttctcacacgtaacctagctagtgtgtattaggtggagttattatattagttgagggaattgatcttatatattataaaagtcatatggaaaaaagaatttttactttgacattaaatcaaaagtcatgttcttacttcttagtttaatgaacatgatatatatatatatatatatatatgttccttcaaaaaaaaaaa

SEQ ID NO: 130463 - DNA, 1369 bp, Cannabis sativa
atatatataaatatatctttatgcactgactcccacgtgccaactaagaaccccatgatgctgacactaccacacttctctttctctttctctctctaaaactaatataaatgttatgtatactggtgattgtgtcatattggactcttcattaaaaacagagaaacagatatctatgttatatatatatgtacacatatatataggtgatgatgatatatattatgtatacattataaatcagtctactcattctttcttttctttcaattcaaagtttttctctcattccttttgccttttcggcctatatatatatattttttaactagctatatagctatatacatctatatatatatttataggatcgagtgatctgaatagagagataaaaaaaaatgtcattgaattgattaatctacacttctgtcttctctgtctcatttttatcaaaagcataaataataaataaataaataataaatcagagtgttaacttcagttaacagggtgtgaccattggtcatagctagctatatatataattttatgttatgtttttttgttgcctaggaaacatgagtagtcattcaaattattttggtataattttataatatatttaattaattaattaattaattaataaataggaaagtgtgaaattgaaaacacaaaacaaaagtactgtgttttgtttagttttagttatggttggcagacattacaggactctgttttggggtaacagaacccctcttgtcccttttcattaacttctataatattaataactacattaattatatttatatattttttttatttaattaatatctttgattttaaaaaaaaaatgtataccaacttcatgtgggatcataggaatatctacataaaatattaattttatattttatgtagataagacgaaaatattttttcatacttgtagagtaattcaaaaataataaaaaaaaataatattaaaacaataataaattataatatataaataatagaaaattaacaataaaaaatagtattttctctaaataaaattataaatatcatataaaaatatttaaaattttattatttttgtaattttttttattacttttttataatgataaaataatccctatataatatgtatgttgataatttttgtagtagggttttaaattttttttatttttattttttttataaatttgttagattttgttttattggtggattgattttgtttttagcattgacaaaaattataatattattttgagcaatttacggcgaaacccccttatgttttaatttttatacacttaacctctttatttttatttttggtggtaaaact

SEQ ID NO: 130464 - DNA, 1052 bp, Cannabis sativa
attgtgactaaaaattttgaattttgtggattttgtggttttttttttttgaaagaacctcagttcgaattagattgaaatagcaaaggaactgggattcaaagggggaaatccctcccctttagcaaactggcaaccagccatacaggttctagccgacttggctaaatcatcaacaaaagtaaaatgttctcttttaacaaaaacaaaatgacaggcagaaaaaaaaaaaagatagcttcattagaataagagaaaaaagggcagagcatttccaatccggaggtttttttgcacggacggcctccaccaacaccttcaaatcagagataatggtgaaattatcccaatgttgcagctcagcccactgcaggctcaccagaacatcttgcatctcggcttccaacgcagattctcccacaccagaggagatgccctgccaccaatccatagaatttttgtccatggccaccatagtacaaccataagttccgtccttgaaagagccatccaccatgatagacttgctggttattatcctcggctgagtctccccttcatgattgcttgactgactcccattctccccaactataagttgtaattcggcaactctgctggagatttctcctctgatcagatgcacattaggcacataaccccccatatggtacattttattcctagtgttccaaatgcaatccataatcactccaatgcaattgataaatttgggacggatagaggaatcgaccgagctacagagattgcgaataacctcctgcatgttggcacccaataccctctcgatccttatgggctaaggactagagaaccataaagccatagcaagactacatttagtaaaaagatgtaaagccgactcaggagcagtatggcacaagggacaggagtttgcttccatagagaaaaatttgtcccccgtaggcaacacattcgaacacactctccaaagtagcaaactcatcctaggatgtaccttagagttccaaatccatctccaaagttcgtctttttcaccaaacctctct

SEQ ID NO: 130465 - DNA, 523 bp, Cannabis sativa
  modified_base (477)..(482): a, c, t, g, unknown or other
agtcatacacatcaatgattaaaaaaatattcttatactatgagaataaaataagggtataaaattattctatatatatatatttaagtgttgaataatataaaaactttatacatttgaaaaatatgaaatttcaacttcctcaactgttcttgaattaagtacgagtaaaaggccattggagcacatggagacaacacaataataagttctctttaacaatttatttcaatgaaattgtaaactttctagatgtaatattttttttctaataatttctggacttatttttttaaaatattatattaagttttatttatagatttgttaaaaacataagaaaaataaagagaattataagtagcattttattttaataagatattaaggtagtgcaagaataatgtggaatgagattttttttttttttttttaaataggtgaaaatttagggggcgtttggtaacacttttgttnnnnnnttttaaaaacaaaaaacaaaaataaaatttgtgtttttaaa

SEQ ID NO: 130466 - DNA, 536 bp, Cannabis sativa
tttgatgcatgaaaattatgaaatggaagtaataatgtaatgttggagatctaattcaagagttaaccttattgtaatgagcatcgatatataaagtaaaatttctattcagtaaaatctttcgatcatattctagtgagatattagcgcctaaactacttaaattatacaatttatgacacttaattctataaattaattttttaggtgataaaaacttctaaactcacgtttttattctattttgttaaatgttcataattaactatcacggtaaataatttatgtgtacaaacttgtatacttattgtgttttgattagtccatataatttagttattataaaaattagttttaagtaatttaaaaataaaataaaaaaaaaaaattcttttttttcattttctttttctcttccttcttctctttcctcctcaactcaatggtagcctttttttttgagaaaattatattgtatactttactctatttattttaattttaccattatttctatattctttaagatatactca

SEQ ID NO: 130467 - DNA, 1016 bp, Cannabis sativa
tttagtggtacttaatccaattccctgtgggatcgacctcacctgtgtgagatttactacttgattgcgtatacttgcgtagtgtttaaaattatagcaacaaggggtgggggcgtaattttttttggtaagtgaagtggggcaaaaaagtaaacttaaaaaggagaaaaaatggatttagtaggattaaaacccttgtcctctaacctatatgttaagtagcttaaccattacaccaaagttaatattatgcttataaatatcatcttttttttataaatacatgttgtaactaattaaattgcatatatattttttttccgatttttttttcaggggggcgactgccccacctcgattatatgtgggtccgcccctgagtcaacatgagaccatgctataaaaccttataccttaaacaaaattaaccctacttcggttcgataataattaatgttaaaatgccattattaaaaatataaataaaaataaaaaactaaaacataaatagcaacgaataaaaaaaaaggcattaaccaaatgccaaactgaagcctttgagatcttcctctcccatggagtccccttagacacaccccaacacctcgacgcaaacgaagctcccatcaccaaaagccgcctaagcatgtagctccactccaccacccagaccaggcttggaaacacaacccaaccccaatgcctaaatagcgtttggttggagacaataaaagaagaaattacacccattgtgagattttaaaagttgtttggttaaatatgatatttttaagtttgatcaatttatatggtaattttttaactttaggtatttttatggtaattgatatgccatatgtatgtaaatttagttttcaaattccatatttaatgtttttatttgtttaggtagttttatttgtcattgatgtcagaaaagtcgccagaatttgctaccggtactggaaaaatcactagagtagctgtcggtgctagaaaaatcgccggagtagctg

SEQ ID NO: 130468 - DNA, 1578 bp, Cannabis sativa
cttatttatactattaaaaatttatacaaaaaatgtcgaaatttaaaatttaatatagttttatgacttaattattactaaataaaatacaaccacacacgaagcgtaatttatttcttatttatattatagcatctctaatggagatgcaagtgtaaaatataactcaatttgttgaaagtgtactccaatggtttgttaaattatgatgcaaaaatctcatataatcaaaagtgatctaaattttcatcacaatacaacatgatacaaaatttgcatcacaataaaagctatgattttatatttaccataaaactatttttaatattttattattaaattttagccaacttactcatttgcattaaatgacttgcattattataatttaaattattaaattttacatttaactttacattattagtattattttttattttttaataaattattatgtgagcattaaataacatattaaattttgcatcaagatttacaattatgcattggagcacaatagtaaaagttgatgtaaaaatatcaccaaactactttttgtaaaatatagctcaactattacatctcccattggagatggtcttttactctctattttgaatcataagattttattatttatattattaatgtaattatttatttaactatcaaaaaataaattattgttttaaatgccactaactcacaaaagaaaagagaaaaataagttgaaagtatgaagtcgtaacaacaaatttcatgaataaaaataatgtagtagtacaaaaaaataaatcaagtatcaaaactaaaaaaaaacttcataatacaaaaatatattgatgaattattattgttttacatattgtaattagattattgttttattatttttattactttgtagttatctttttgttgttttatagttattttcatgtcatttgttaagtgtttttagagttattttttagttggcttttttttttttttattttactaaaataaaataaattgtatacggtatttttgaaaacttgatatagtaaaatgtaaaaaaaaaagtgagtaaaaatataaaattaacaaaaaaaaaatgggtatttttataagatccaaaaaaaaggtctttttacattagtgaaatttcatattttttttttcttttgaaattttttcaaaaatacttgtatattttttataccatgtactgttttaatttttctctattatgttcacagttattttttaattgttctactattatttttagttgttcaattttttgttctactattattttatataaagagtatagttaaaacaaatggttttttttttcagttttaattaaaaaaaagtaataatattaaaaaaatacttccagctggctaaataaataaatatacagcccaaataaaaatttttacataaataccacttacacacacatttaatcaatgattcatgcttcttgggcaattatcacgcaaccattgtgcaattatcgtgcaactacgcaacaacccgaacacaaccgaaacgaaaatttaaccagaaagagaaccaccatta

SEQ ID NO: 130469 - DNA, 629 bp, Cannabis sativa
taatgaggggttgttcgatcactctccggctataatctccttatatccggctgttgctagtggcctaaagcctttcaaatactttcgaatgtggaagtcccattctaagtttgagatttgtttgttagatatttggtcaaagcaattaaatggatcaaaaatgtttcaggtggtgatgaaattgaaaagcttgaaaactgctctgaaaaacatcaacagagatggtttctcagatttgcaaggggctgttcatgaggctaagattagattggatgagattcaaactaagttacaaagttgtccgcttaatgaagatatacagaggcatgaaaaggaggctcgggagacatatgttaaggtacaaaaagactacaatttcatggtgatagaaatacatcactatttcatgcaagtataaggcaaaaactaagacagaataggatcctatctattgaacaacatgatggggagagaatccatgatccccagctggtgcaagatactgttattgcctactacaagcagctacttggtactaaaatggagaatagaagaggtgtgattccagggatattgaggagaggcccatggtaaccaaattgcaatctgagatgctggagaagaagttt

SEQ ID NO: 130470 - DNA, 646 bp, Cannabis sativa
attagttgttaaagatacttgtctttgtagctttatcaaaggtgatcaactcaattgaaatttctgtgctgagattaattgaaaaacaaaagtacttaaactgttgagaagtcaacaacaaaggagcagaaacgacaccgaattgatccaaaatagaaaacacatcgaaacaaaattatttactatgaacaaattagtcacctaagagtaaagaaagaaaggagttctagatattaaatgtgttcgcggtatgggtagtgtagattttaaccaatttttcaaatcaaaatgcatattttaatttttgtaatttctcaaactacaatcatacaacaccacaagattttaaaattacaaaaaaagtagtatgatgaagtgcattttgaacaatttatactatcatcattattaaacctatacactgatcaaatcattacattgtctctaaaaaaatgatgtaatattacatatatttgttcatgagaaatgttcaagagggagatatttaaattacgaagagtgctagggaaactttcttttgcactctcttttacattctctaatatgtgtaattttttaaactatatttaagtatagttacaattatatttcttttacttttcattaataattaaaatgtgttatc

SEQ ID NO: 130471 - DNA, 1062 bp, Cannabis sativa
acttaacctaaggtgtgaatagaaggcttaactattcatacatgcaatcaaaaatatacaaagtgattcacgagatgaattattaaaagtatgtttatgtttgtttaaaaacagatcataattgtttacgcgaagcagaattgataactacttacaaatcgaaagcgtagcagataataattgctcgcgcacatagtagattactaactacttaaacaatatcaaaggaaaataagagcactggaaaggcttaaagtattttagatttgatcaaaatataattgtttaaattgcgagtaaaaacgcaagtaaatatgttaagttcgaatgcagaaatacgaggcaataaataaaaaataagaaaaaaagaaaagttggccatccaacaatgcaaatttttcttcacaaaagtgttgcaatgggctcattgtctcagccatatgaccattttcctaaataaatatatatatatataaatgcaacttaaaaaccaagcctacattgtaggagacttggatggatcttctagtaccacttcaacctcttcttcctcgcccaattcatctttccttgtcttctcgcaaaaggcaagcatggcatcgacattatcacccaagaagctaaaatacaaatcaaggttagtcgaccagctttggtagatggtcctcctgccaatgttgttgaccctgtctttgattttagcctccatttccttaagttttttgtcatgatcagtctggagggacttgagagaatcctcaagttctttgatcttcttttggttggctagatgctgcttttctgcctcctcctttatgtgagaaaccttggccactgagtcactctactttttggctaaggtatccctatgctccttgatatggcaaaccttagtctcgagcatttcaactcactgagatgactgatgatgggtaacataggagaggaaagaagcttgcgaggtgaaggcaactcgaagttagtaaaaatgataaaatgagaaaaaatgagaacaagaagaaaaggaaattaacctgatgcagaagtttgtaactccttttg

SEQ ID NO: 130472 - DNA, 2718 bp, Cannabis sativa
tgctttgtcacccacactcaaacttgggaataagtaagagacgttatcaaagtggaagcaatcaacaaatcttgcgcaagacatttagagtctcagtcaccttcagttttatgacaatgctttatggtgctacacggtacactcaattccaaatttaacttgtttcataccaaatttgttaaaatttttatgttgatcagttactcaattccaaaataaaataaaatataaatatgaactcccatttagaacataagtggtaaatgtttcttctaaaagtcatcaaccccgctaggcaccacaaataaaaaatagatcacaaaaggagacatgttcgagttaatgtaaatattcaaaaaaaaaaaagagttaagacacatgaaccactaagcataatatcaaacgaaactaagcattttcatggggttcttcacgatccttcgtagtaccaaggtcaagtatctcagcagttgcttcctcaataaaagcatattcaagttgttcaatccttctaccatcaaaatccaaacccatgtgggcacggtaagtttcaatttcaccaaccacatcccacttttcattctttctagcctgcgactcgatcattagttctccatgagtcttgataacagcagtcaatgcaacttgttctgcctcgtaggcaaggtcctttgcccttttcttctcattaatcaactcttgcttcaccttctcaagctcacccttcaaagattcaatggtttctttaagttcacgctctatttctacatgttttccattctccagttttagggaagcattatcagcaatcaattttttattcttcttctccaacgtaggatagttttctctgatgaatagcatggcttgaagaatctacaaatgttataaccaagttttaatgactaaaaatataataatcaatcatagtttataatggccttatcttgtaagcgtgccactttattgttggcaaccccagtcgaaccaagctcaatcagtcatgcttgatcagcgggatggaaaattccatctacatgcccttcaattgatgaaggattagaatagaccgatacagtgtgagggatttgaagaatcatttcatcaacaacctctgcgtcaaataagtcgacattcctcttaattgtagtgcacatactaagagaagatgagttaatggaacattagtgaagttactctcagaaacttgtttggaccctccagtcttcaatttcttagctgttatcaatttggctctagccatggcatcactagctttgggaattctgatcgtcctcttttgggacatcttgtatgcaaatgcgttgctctttggtcatgtgagtcaaaatagtgaacttaattccaaccttctcaggttctcgagtttgaagaaggatgtgaatgttgtcaagggattgaagttcagagataccttattctataacatcttgtgatttttgcaggcaaccttttgggagaaatttcttgaaattatggtgctactcctttatagattcaatatcctcaataattcaatcaacaaactcgttcgtattaggttaaatcccaaagtcagtatctatgcaaaggaccaaaaagacattacaacatacatagccaacacaataaaagaaaataattcaacactcactcaatatttgcccagagaatgggaaactcttctcaacccctgactcaaataaaccatcacctctaaagaagcaatatgctttcttccaatctgaatcgtcagccttagccaaacaagttacaaatgatttttcctagtgcgacaaacaaataccactctacccttctcttttccatgctctttagcatagtaacatctcttaaaaattatggggtctactgtaataccaacctttttagtaaaaatgctcaaggctcaggagaaatctccaaccgttgggcataagttgcccagaagatattccataaaggttgagtatctcagtcaccaaaggagtgaaaggcaagcaaaatccacaatcaaaagctgctttgtaaagacacacccaatctcccatatcccagtcggctctctcataagacttaggcagtctcatttccacacatgaaggtatgtcataagcaattctccatatttcaaatcaacactcatcaaaatacattcaaggttcacattaatgaacttggtaggttcacaagagcactcatcttgacatccgtcctgaccttcatctgatggaccaatcaggtaacctattgtctctgggtcctctccgtttactatgaccgtttcacccacgtctgtttcgtcacactcaggattttgcacaagagttactcgctcaaatgggactcccacagggatctcattacactcaagatcctcaatcaaataatctggcaaagaccttttactattctctactgaactatccatgttttccatcgcatgagaacaccattacatagaagagtctaaaaccttcgacccaaagctctataggactacaagtgacaactcaatacttggacttggaaatattttgttccagccaacctaaataaattaacaaaagataaagaccaatcaacctccatagataactatcatgcatggatataacccaatttaaaaacataattggactccaacaatcaatttacaagtgagttaaaaatatctatgatcaattctcacttccacaagcaaaaaacatctacggt

SEQ ID NO: 130473 - DNA, 701 bp, Cannabis sativa
gtttcattctcgttgtcattggcaaatggtgatgatccagattcattagtatcttctatatcgaccatttttcaaacctatgaaaaataaacaaataacaatacaatatatatttaatatataataatagtaatccaaccaattattgcagtataggtaatcacaaaacttacttcactacgaataaatatataaaatatttaaactcctccaacatgcatttttacattcactccagtacagttaatcagagaacttacttcactatgattgaattaacatttaatgaataattttaattttttaatacactaaatgtaatgggaccacagagaaaatgagtccccagcaacaaataattaagtaccaaactgccactattgtcacacacaaacacataaaataaattataatcactacttcacaataataaacaaaaaaaatgataacataatctgttaacaagtgtagtatattaatataaattaaataatttataaatatttttagatgaaatcagacaacatcattactctaaaaatcaaattttttccaaattaatataaattaattttttaacattattcaatttaagagaaaattcaaccaaaaaaaatacacaaatttaactctaatctaactactaattctaataattttaataaaatttgcatgtaaaaaaaattaaaaaaacataattt

SEQ ID NO: 130474 - DNA, 574 bp, Cannabis sativa
tttttttttttgatgaatcaaagagtttcattgcacaaacttctttttacaaactaagcactcctttaaaggaagcagataactaggcaatcaatatttacaagttatcaaaccatatcctatcttcctgtttgattttctttagtaatacacaagagattcttgttttgatttgccattaagctcctgaatgtgtagaaatttcgggttctgctgccataggatttcatttcgctgctgctatatgaaatacactaaacaagcaatggtggccgagagaacttgctgttggaatttggatcgtttggacatgctaatgtaacggatcagtgagggcagatcagatgcagtagccttccaaccggtccactctttcatttgttggagcatgcttcttgttctgctgcattggagaaaaagatgaactctactttcaatttgattgctacagaaacaacagtcttctacatctgttatatgcattctttttaatctatctcttgtcttaagtctgtccaacacagccatccaaagaataaaactatgcttaggatggttgagtctagaccaaact

SEQ ID NO: 130475 - DNA, 966 bp, Cannabis sativa
gcatctccaattactttctctaacacgctctttagctaaaatagggagtcaaacttaaaaaaaataagcttcaaccatacaaaaaataattctctataatagagaatggataaggagctccctaattttttgctaaactttttcaatagtatttccatcaaaaatactattattattttgtcattattttataaattaatttatatttaacaaactcaaattataaaatatttttaaaataattaaatactaactaaagtagagaatatgattaggccaatacaataaaaatggttctttattttaactttttaactattttaattaaaaaataaagaataccactaaaaatgctctaacatagtaaaacaaaatctaaccaaatgtttttcgccttggttagattccataccctttaggaaaatataaaattacatagttaagagaaagaattgaaataccctttagaggttttgaaagaaatttttaaattataaaatcaagatataaggatatttttaacttatcagagaagagattggagtggattcaataccagccaatttttgaagctctaaaagttgaagaagctagtgttcattctcaaatcttggttgcttggtctaaacttgaaagtatgtggagacaacgatcaagagaaacttggctctccttgggggataggaatacaagatattttcatgctgcaactgttatcagaaaaaggcggaatagtatttgggcgattaaagacaaagaagggaagatttggaaagattagaggtctatagggggtatcattaacaattatttccaagagttgtttacctcttttcggccttgtattgaggaggattcatttaataacctgtttgacaatataattgatgttaatgcaaatgacatcatttctaaagtgcctacagatgtggaaattaaagaggtggttttctgccttcaccctct

SEQ ID NO: 130476 - DNA, 1414 bp, Cannabis sativa
tcctccgttaatggctaatgttgtcaccaactccggcaacggcttctaagctcaacctacgttcaagctgtcaacagatcaaactcgtggaacacaaaccagatgaatccaaggaatcatggtgatgatcaaagccttgtgttcttcaatcatactctgtctatcaagttaaacgatcacaactatcttctatggcgtcaacaagttcttgctgccatacgcgggaatcgtctaatgccttacattcaagaaaattcagctccacctcagttcttgactgatgccgatcgtgaaactgaaaacatcaaccctgcttactctgcttgggaagttcaagattctctactagtctcctggctgttgtcatccatgtttgaaagtctcctgactcgaatggttggatgcaacacctcgagtcaaatcttgagtactttgcaaagatactttactcttcaagtctctgcaaagatattggagtttcgcaccaagcctcaaaacctgaagaaaggatctctcagtttaaatgactacttgctttgagttaaacaaactgttgatttacttgcttcagttggagaaattctcagcactcgtgatcatgttgctgcgatcttcaaaggacttcccagcgagtatgataccttcgttatctccaccaacacacggcttgaaagttattctgtagctgagatagaagctttacttcttgcttcagaatccagaattgagaaaagtgacaaagaaatagatctcaatgtcaatatgacttacacagattctgaatttcctgaggcaaactacactaattcaaatcgaaatttcaggagctcttatcctagatccagtggatctcagccttcttacaatggatacaattttggatcctactttcctccatacaactcaggtcaatccagagttactcaatctcggtttggcaactcaaatctcagttctcaatcaccaccacctggattcaacagtcatagaggaagcttccttgggaatcgaggaggaagaattcccagtggcaataacaataggcctcagtgccagatttgctttaaggctggtcacactgctctagattgtttctacagatttgaccaggcctatatcaccaattcatcatcacaaagcaactctggacaccaagcacagatgcaggcacatttggccagttcaaactcgggttgggactcaaattggtaccttgactctggtgccaccaaccattgcaccccagactcccaaaacatcatgacacccactgaaaacactggttctgaccaactgtttgttggtgatggcacaggtttgtcgattctcaaaactggtcattctctgctatcttccaaatatactactcatctgttgggttttatgccctaaataaaactctgtttcaatgtaa

SEQ ID NO: 130477 - DNA, 1028 bp, Cannabis sativa
attattaaaatgaattacctttataattttttttaaagcactcttataaatttttacgtaaataaaactgtttttttttataaaatgattaaatttcatacgtgtagttcatgtttagggtttcttattattaatgacaacatgtagttcatgaataatatttatattaataataagatatgttaaattttatgatgatggagagtaattatatgtatagcaataatagtccaaatatatatatacgataattttgttacccctttcaggaagcaacaagtatgcacatatcataacaacaaattggtctgtaatgggtcacaaggcttaaagtcattcattggaagatggctcactctcatgcttccccttatactcattactaaactattatgtacttaattaaagaaaaatcattcttttaaaaaattaataattgtgtggaatttattatttacttttgtattttattagctaaatgaccatatatgaaataattattgtgaaccatcttgattgcttcaactaatgtttgtccaattatatatatcaaatatatgtcgaatttgtttattattatccatcattttcatagatataattcacacattataatttaattaatagttattaaaaaaattattcaccatttacaagacatgtagctcttttctcatactactagcgtctaatagttagcattgatttttttaataaaagcagcacaactattttttttttcttttagtagaaatgctaaaaggtatcagtggtgcttattattttcttacgtgtcattatcgctattggtccaattaagtatatggtcccatataatttaatgtaataacttttggggagtatcgctaaccaatcacaagacgacatgtctaaagatgcactactacaaaaatggattttcctgacgtttttaaacaatcgtttaaagtatttctatcggtttctataaccatcgcctatacaatctcgtaaaacgggcagaataggcgacggtaatgtaggttttc

SEQ ID NO: 130478 - DNA, 512 bp, Cannabis sativa
  modified_base (60)..(61): a, c, t, g, unknown or other
  modified_base (149)..(154): a, c, t, g, unknown or other
tgcggatcggattggatccaaaatatgaaattcgcacttagtgcggattggatgttgttnnaccaaaaaagtgcggattggatcagatgaacaccgctatgaagaattgttttcaagttagttatattaaaaaaagttgtcaaaaattnnnnnnagggtcctatttttaccattttaaaaaatacagggttcattttatcatttaacgaaacagagagtccaatcaataatttttacaaaatacatggaccaaaataatatttacccttaattaattagccttaattatgcaatttttcaacccattaaatttagaatacttttacaaatgctgttataattattagtataaataattaagagcaattggagatcgagaggaaggcttcaggattctttatttggaggattgggaacacagtggtggcctccgttttggttgtcggtaacatgacactataaaaaatcttacttttactcacaacaaaacttgtgactaaaagtgaaaaaat

SEQ ID NO: 130479 - DNA, 570 bp, Cannabis sativa
atgcaaggaaaatgcattatcatcgccattattcaactaaagtaaagtgagacttaaattcaagcagtaatggtcgatatgtttatttaattagttatatatatattctcttcattagcctagccgcttttcaaaattcatcaaatatatatataacactaaataccgcacttaaaattttttatttataaaattcatatataaataaaatgattttttcaagaaacataattactaaatgttcctaaaatctaatcctatgctagatttgttacctaccaggtctatcttgaaatttaatgagtggtaagaaaaaaaaaatagactattatgttaatttttaaaattagtgaaagacaatatataaatttaaaagagaaatattattttgaatcccgactagctaagtgaatcctaagcacaacactagtttgcttattcttaagatcggaccgagccggttgagtatttgttgtctaatatctttatatattaaaagtgcatatctaacggtaattattggtttaacgattcttggtttaacgatccaggtcaaagatgttcttgctg

SEQ ID NO: 130480 - DNA, 924 bp, Cannabis sativa
gaatttttatatagctttagcctttctttccgaaagccgaagcttgatacataacaattcaacatgactcacgtgtgcacattgtttttcgtgcaggaaggatcacttggggtatgatatgtcttcaaccctccttcccaaattagaaggactgcttgaagtgtttcctacccctcgtgatgctttccccttgatcttttcaagcgaagtctaagcttggatttttatataacgtcatccttccttctcagaatccgaagcttgttacataaaaatttagcatgactctcacatgcacgttatttttcgtgcagaaaagatcactggggttacaataggtcttcaactctccttcccagacttggaaggattgcttgaagtctatcctactccttgtaatgctttcttccttgatcctttcaagcaaagggtgacacctcgaaatgaatcaggcaaaagtcaagagattattgaggctgcccaagtaccttgctctgtgctcttggagagttagagccctattcttgtagaataggtttccacgagataattcttccctgatgcaaactgcctgagagattcccgtaagccagcaactcactccactctagaagccgagatcatatggtccagacaggaacatggatcttcaatcaagaaacactggttaggggtacgccttaaacccgcagaagctcaacccgggtgtgacaggctaccgacccaatggcagtgctctttttgatataattttagaagttgtcccccacgctacgctactgtgtcgagcatgtgtgtccttatgtactttgcaatataatctgacagctaggagtaaggataaatcaaatgagaacgcccgtcgagcgacgcgtccaaagcaccgccagtacagccagtacaatcttgttggaaattatttta

SEQ ID NO: 130481 - DNA, 594 bp, Cannabis sativa
ataacatttaatgttatacatatattttaaatatattttaactattaaaactatttccaataaaaaatataaaaatttagcacaaaaataattttatgatatttttacaccaaattttaatatattgtgattcattgcataattataaattttaatatatgcaaaatttagaacactgctttaaagcaccagtgatatacaacatcttttataggtggcactccacgattagttagcaaaattctttaaaagtcattttcttaaagagcattgctattaggtatcaatagtgcctagcaccttctagtcatgtcgtcttgcgattgactagcgatactccttaaaaattatcacattaaactatatgagaccaaatactatagttagattaataacgatattgacacataagagagtgttaggcactattggtcccttttatcatttctctttcttaaattatatgagacccgatacttaattaattacaccatagtggtatgacaccgagggtgccagacacctatggtaattttagcaattctctaaaatttaataaatcatttaatgttcacttaataatttattaaaaaa

SEQ ID NO: 130482 - DNA, 737 bp, Cannabis sativa
ataataacaataacagcagcagcaacaacacgtctaacaaatcttgatcgttctacatcatcaacaccaacttttcatactccttccgaaactattgatggtaagcggtaatatatacataaatagaacaaatgcttattggatggaaatttgttatgtatttcttaataacactgtcaattatttattatctgtattacaaatttttgtgattctttaaaatagtagttttaactataaaatattttaattattatatatcaattaatggatacatatatatttcacaattatatatatatgtacttgttagtaaattttaaaagtaattctatttataatcaatttatataattatatcactttattagatgaaagtggatagacatttttcttttttaatttaggctaacttttcattctattttcctctaatgttttttgtctacaccaatttattaattagggcttacagatcaatatgaacagaaaagacttttttaatttaaggtaatttattcatttttttctttattatctgcacttgtctacttttgtcgagaaagacaaaatatatcatattgtttttctcatcacaattaaattaaatactaaatttttagtcttcatcaaactagactaactatttattatattaattggtttcatttttggtcctaataattattcaatttttaaattaactctcttttatttattttataaaaacttataat

SEQ ID NO: 130483 - DNA, 679 bp, Cannabis sativa
  modified_base (27)..(28): a, c, t, g, unknown or other
tctggattacattgaaatagagttttnnttagggcataaaacccaatattatcaaattcaatgtgtttagttccattgataagtacacaaggaataagtatttgatagaagacccaacataagaccacatgagcacaacatacaatctagataacgacgttaaataaagtaaacttacaggaattttcttacctttttttattttattttgcattgatttttttttattgggccttgaggacaatgcttatattaagtgtggggaaaaaattatcgtgtctatccaatttattgattttatttattattgttttttttttttgtttatattagattttttttaaaattttagtgagcataatttgagtgaaatatttttcacaataattactcgtgtttgacatgttttttaataatagttgttaaatttgctacgttatatgagcacatcaaatttttgcttcagttcatctatattttaaaattctgtagcaaaaataaagaaaagaaagttagtaaaattaaacaataagaattgaataaaaataactcccagaaacagcgccaaaaatttaatgtatgtcatatactgtaacaaatttaacaattataatttcaaattaaccaactactttagtataatggtatagtacgagtcgatcccacgaggactatgatt

SEQ ID NO: 130484 - DNA, 716 bp, Cannabis sativa
  modified_base (691)..(691): a, c, t, g, unknown or other
ggttgtactcgaatccatcagcctaaggtaccatgcaaaacaaaaaacaaaacgtattgttatttgttgaatgtataaaccaaccaacttgtgccccaagattattagttttattacgttatgaatgagtgaaaaaattgagtataaaataataaaagatggaagaaacagtaaagtgtttgatgagttcaattcttcaacatttggtacatatataaagtataatactgtatacatcgacaagatcattgttgactaaaacgtttttaaatgttgactttgaaaaaaggttattagtttataatggttagccggtcacctttaggatacaaaatctttttttttttttttttgccttgttatatgtggacaggggcagaaagccaggacaggccgggaagccaactatttaaagtttatatttccaacaaaatatttttatacattgcacttcataaaatttatttataaatgtgtgtttagatgtaaaattataattactatgatattaattatgtaattatataaaatttgatatttaattgtactaataatggtatgagatttaggtgatgtttagtgttgaagagaatggaataggaaggaaacaatttttattctattcctttgtttggtttattttaaaatattgaaattgttataaagtaatataaagtagatgagaagaaanaagaagaagatgaagagagaaagag

SEQ ID NO: 130485 - DNA, 1025 bp, Cannabis sativa
aaaaaaaaaaaaaaagaaaaaaaaaaaccttgacttttagtttcaataaaaattgtgactaaaaaatttaaaatatcgtgaccaaaaattttggttacaatttttttttttttttgtgtgatgagattgtggctaaaaagtccgacttaaattttaagacaataaaaataatattgtgactgaaagtcacttttagtcacaactaattttcatgaagtgacaaaataattgctaagatgtcactacaactattttttgaataaagtcaccacaactattagtcaacacgattatgacacgacacaattattaaatgtgtcaacacaactaattagaaacgacacgattaaggtaaacacgaatacgacacgattaagataagcactaacacgacgattattaaacgtgtcagaaactcaatcacaaacacaatatgattattaaacgtgacccaaactcatttatttcgtgttgttttcgagttgtgtcgtcgtgttgtaacccatattgtcagccctaaacctaatataccaatttgtcttaaatctgaataatatttaattaatgttgagagaaaaattattatccaaccccaaaatagaagtttatataattgagttgaggttcttatcatcacgtagtcaatgttaagtcttaatcaaatagttgtaaagtttgatcaacttatatattaattattgctacgtacaattatggccacaaacacaaaagattttttatcctcgaacaacttaattattagttaattaataattgcacaaaatatataattttaactaattaaagtcaaaagatatattttttatccacgaagaacaagcaacaaagtgtttgatttgttttgattattaagctatattttttttcgtaaataatattaaaagagagacagtaatattcatcacacacagtacaagaaatttcagcaatattcttcaaactatgagcatgtttgatattgttttctgttttttgttttcgaaaaattgtttttagaaatgaga

SEQ ID NO: 130486 - DNA, 556 bp, Cannabis sativa
ttttttttttttttgtaattatattttcatgtaaaaatagtgtttttatcatatttgatcaagatgcatgcggagaaatatcactacttgtaggagccgatcagtttactcaatgtcgttggctcaaaatagactgaatagacaataggaaagcttaattaaaacattacgagcttgtttggtacgccatattaggtcacaaccaataatcaaagataaaacaagaaggaaaagaatattaaactcaaaacaattaaagcagtaaaataataaaatcaagaccaagatatatactcgttctagtcttatagattgatgtgatttatgactctactccaattcttgaacatcgcaccaaatcttatttattgattgagcaagaatagggtacaataccgtcgagatcgattctctctcagattctctcaaggtgtttaactctcacactcttgtgcaagaatcttcttcatctacaaaaaattcatcaaacaaacccaaatccaatctctcttctctgtacctctctatttctacctctcaatctctctcttcgaaa

SEQ ID NO: 130487 - DNA, 1052 bp, Cannabis sativa
aaaaatctttatacaagataattggtcaagttggagaatcattgatggttgatgatgttactagagaaagaggtaagctgagttatccaagagttcttattttgaggtttccctgacctcatagaatttgaggatgaattcggtgctaaagaattaacaaaaatgctaaacacaaaaatacaaccataaaaacaatactacaaagtagtgttacattccatgcaagttttgtatctccaccaacgttacatgagctcaaatccaacttattattatccaacgacgtcgtttcgttcacatattgtatcttaacattgtcgcaaatagccgtgacagaaatcacttgtttagacttagtatgatcacctttatacttaagtagaattcgatactcaaaccacattttactcggaacccataaaacatcaccactactaccgatcttgtcgttattggtggtgttgacgccatttgtataattaggcaacatcaagctctttagagtaatccataaagtggtattttctttactctctaactcgaaataattagggttgaatacagaggtcagtacagaatctgttatcttttgatcatcatcaatatcataataacgattatcatcatgatgatacgtaaacaaagtaatattttcgtaatccatggaaccaagggcgcggtttttggtccaaaaccctaagttcaaattttcaattgtgtagttgttggttgaagcattgtagacggtcgagaaggaggtggtggaaatcgcgagaacagcagagatagcgggcaagggagggacgagtaatttatcggtatagacatacataaagccggaagctacaagtacacaagttaagaacaacaacgttaaacattttaacaaagttgatgatttgggtctagtactcatggcgttgtcttccttcattaataattaaataattattgaaaacgatttctggtaattatgctataacactcatatattgtacatatatatatatatatatatagggttagtgtaaatctattccttttaggtttag

SEQ ID NO: 130488 - DNA, 1026 bp, Cannabis sativa
tgtggtgaagatgagctcatttggaactttacaattgatggagagtatacggtggctagtggctacacaatgaagcaaattgagaaaaaaggagcggagacgtcagacaaatcgatactaaggaggtggtggaaagaggtttggcactcaaacttaactccgaaaatgaagaactttgtttggagagtctgccatagttgggttccctcaaagagtgagcttgcgaatagaggtataaagatgcatagaacttgtacaggttgctggaaccatgttgagactatcagtcatgctatatggcattgccctcgactaagacatgtttggaaagaggcgggtttctggcacctctttcccaaaagccttggtttgatgtcggatttaatagagtttcttatgtttatggctagtaaatgctctaagcaggaatttgaaatgtttttgggcatgagttggatggtttggagtcaacggaataaacgaattttccaaaaaaaggatactcctttgaagagttggaccccttaggctcttgattttgtcaatcatgctcttatgcagtctactgtcatcaaggaaaagaagaaggacaagggtgttaacagatggaagactcctccgattggcacatttttgatcaattgcgatgctgctctgtgtacagaccagttggagagtggagtggctgttgtcatcagagattctagggggtgtttggttgctgcagaggctatatatcatcaaggttgtgtttcggttctaatggctgagagcatggctattagattgggtctgaagttgggtcaaagaatgaacaccaaaccgttttatctcaactcagataaccaaactgctataaaccagctgctgtctaggaaagctcctcgggcagattgggggctactgttgatggacattttctcttctaatctgctagatggttgtgtggatattcaatatgttagtagagattgcaataatgttgctcactccttagctaagtgggcctttaatctcaaatgtaat

SEQ ID NO: 130489 - DNA, 741 bp, Cannabis sativa
tccaggaaatttctcttgggacggtttccccgcctcttcaggaataacggcgggggctgccccagggaggtcagacacaccggccgacgaatcttccttctccaatctattaatatcttggatttcctccacctccaataaggcaaagccattttccagccgagacccatccttcagccaaggaccaaacaggggaatcgaacggccattgttggctgccaccaacctcttcaggccagaacagtcatcttcaagatgacctataacaccacatttgtagcaaaatatgggaaggcgctcatatttgaagtagctccagattttcttttggcctagctccgggagggagactcctgcaagaaggggccggttgaggtctagccggacttggaaacgaaggtagtcattgaccacaacaccatttcttctcacctttttcgcttttagaagggggcccattcggttagccatctgagcaagacaatcatccgttaagtaaggtaatggaactcccttagccttgacccaaatatcaagtttcgttagatcagcagattcccatcttccatcctccggcagtctggtaactaggagaaatcctccacaaggattccaagggccattttccaggacatacttgacttcccgggagctgttcaggcggaaaacgaggattttggattctggagattgaagtcgccacccaggccgaagtttccacataccggtcaaggtcttgcg

SEQ ID NO: 130490 - DNA, 903 bp, Cannabis sativa
aagtataaaatctcaaaattgtataaaatataataaaataaattcctgaaaaatatctaatttaagttgttctaaaatagctaaatttacaatagagcaaaatacaacaactagcacaagcaccaaagccacacaaggctcaaaaacaaagatcgccccttacaaaccaaccaaaacaaaccgagactaaaaaaactacctattgtgtaatctcaataagtaatctctctcctgacttgacatgtttcttttgtttaacagaagtaattagtacttaacaatattttttacatcatcaactaaaccaataactgatttagaatacccattgaaaatacacatgtttccattaagctagatattgtagattacagccgccaagatagtgatgttgaaccgatgtaaccctatttaagttgaaaattattttttttttaaaaaaaaagctaaattttcaacttaaataattttaaaaatttaattaaataataaattaagtatcttgaactaatcaccttaattttaaaaaaatatccctatttaagttgatctaaaattaacaaatttcaacttaaaaatatttttaaagaatattagaataactaatttcctagaaaaatctgcttaattattaatttcaaaattaaaatattctaatttaagttgacctaaaatcaatttggaaaattaatttttaacttaaatatactttctaagaaaattcaaataattaagtatctagaaaaatctaattagttataatgtctttatttaattaaatacaggaaaatacatatagtatatcttgaatacatttcattaaactaagtgtgtttttcttaaataaatttcaaaataatttgatgaaaaataaattttatatattttaaaaattaattatgt

SEQ ID NO: 130491 - DNA, 855 bp, Cannabis sativa
tttttcaaatttcccaattaaaatttgaaccactttgttttttgtttagttatgtaataattaatatttggtgtcattaaaattgagctttttctttttttaaaattattaagcttcagttcttaaatcaaatgattgatttttccagaagatacaatacaaataataatattatttgtaatagaaaaacaattataatagttttttttattacattacctttggaattatttttattacaactgatggtttaaaaataaaccaaatactattttttaaaatatatatataaatagagcaataataatttttgaaattaaaaaaatcattttaaaattaattttaagtaattttaaattagttttcttttgaaatgactttaaaataatttttataatatttaaattattagaacagcatttaatagaaataagtttgtcaacaaaattttagattgcgaggtattgctaagaaaattttaatctaagaaaattttaattggggattaattgttacaaaaaaaattgattttaaagaggttagctatatatatttttgaaaaaatttataatgcacttctttaaaagggatgcaccgatatatttctatttgttttagtatccgaaataattttttaaccaattttctttcatagtcatgtaaattatagttatttaagacatcctgtaaaattttaacaaattcagaaaagtttaacacgccgaaaactacattcaaatagtgtgttgcacaagtaactattttattttatacgcatgtaaaataaagaaatttttacaccaaaaatacaaaatgcattctttattactgaaataccctcacacggttattgtt

SEQ ID NO: 130492 - DNA, 878 bp, Cannabis sativa
ctaattatacatttcattatcatatattgattaaaccataacatacaacagtaggtaataatcaaccatatacatagaataaatatgctcatataattgcattgcctaatcaggcaagcccgtgtcatgatgaaatatcatatataatatcattgcaccacctaatataggtgagcctgtgccacaatctagcaccaatatatcggatcgcctaatccgacaagcccttacctacgcccatataccattaacactcgtacctatactcggtactcatatatcactgacgcgcgtacctacgcctgatacattgccaagaagaaccctacaacaatttcattctgtgccataacctgacaatgaggaaaccctacagcgggttcattctgtgccataacttggcaatgaggaaaccctacaacagtttaattttatgccgtaacctagcaatggggaaaccctacaacggtttaattctctgccataacctggcaattgggaaaccctacaatagtttgattctgtgctataacctggaaatttttatatcactgacacccacgctcgatacgtcaccaggagtatcacactactacaaaattcactatttacgtctgtttttaagtgtcacttaaagaatttacgtcggttttgtataccgtagtcgcaaatagttttttattagcgtccttttcaaaacgacgcaaaaaaaaaattttcgacatttataaaccgacgctaaatacttacttctctattttattttcagcatcggttaaaaaatgacgctgaatgtttcatgacattttgaaactgtcacaaaaaacttattccgtcgtttaaaaatgtcatatcttttacgaatttttttttttttt

SEQ ID NO: 130493 - DNA, 537 bp, Cannabis sativa
tttttatcatgtcaccaaacatggctcgaagagttgtgtttggagtttgcggttgcgaaagcttttattttacttatatttttatttcgacatttctttttgaagtgttgggggtaatagttgattaggaattataggaagagaaatgctgaagggagcctttgtctataaatagggttagggtgggattcaattttcagtttacgtctaaaagttgccaaagagctttgcaagttcttttttaatactaagaattgcaagttttttcctcttaaatgaaagtagagtttattaatggccaaactaccataaaccttcttaaaccttcttgttgtttcttctctaaatcttcaacctatccagtttgacttcaaatccagtttatgcaattttaaaaaggatagatactattttggacccgactttgtgttttgttaaatgacaaaatggaccctgtatttttaaaatagtacaaataggaccctgaattgattttttgtcaaaataaagttaaattataatccgatctaaaagtgc

SEQ ID NO: 130494 - DNA, 1004 bp, Cannabis sativa
atcagcttgtgtgttaagacttgatctatattccggggcagcacccaagagacccgaaactcattatatagctgggaccatatttttgtaacaaaagggcattctaaaaataaatgttcagcgttttcattgctggctttgcagcaaacacaccagtccggggacaaagctacaaaaggtcttcttctttgcaaattctcattaacattgtaatgtaatcaagaccaacaaagtttgagtgtggtgtgtgtttgtgaataataatatagccatagagtgagtgattagtggagagaacaaacaaccattgctctccattttctcttattcttacttcttttcaagattttgtctataaatcttattgccttgtagaaaattattatataaatcttattaatgttaacggtacaatacattacgtactgcatttgtacatgccattttatgattaaagctttgttgctgtcagatttatgtttttatgtttcatcatatgatttcataatcttatctcagctaattttctttctttcctagaaaatttctgtctctcatcaatatttgtttgtgaataataccaaagcgataattagagtgttgtgagctgtggggtttgattattcaattaaaagatacaatatttatagaaaatgttgcttaattgattacatgatctgtattccaattatattgagctgtatgtattccatttaaccaacaaatttataactcaaatttatttatgtaataattaagatgatcatcagatttcaaagtctgatctattctattcatataataatcaaagacgtgaaggcacatgtaatgagtactatatattattatatttctttattttaaatttatataataaagcatgcacctagcaccactcatattaaattaacatataatagttatagtaaacaaactcttatatatatgcttttgaattattactttgtgttcattaatcaattaatcttttctgtaatcctttt

SEQ ID NO: 130495 - DNA, 1116 bp, Cannabis sativa
gtttgccttcaatcattgtgtagcgaggcactgtataaaatagtttttgcgcctcgtttttgtcatttggaagttgctcgtcgagtaaatagttgataattggcgttagccatgttggagagctatctatcatctcgacgtcttcagtttcacatatacttggctcgcttagcatttctacctgaaccagatttagttcatccagatcattctgcgaggccaactttgctaaggcatcagcatttctaccgcatgcttgccacatgttcaacaataagaacaataaagtcaatgaacataagatttatagaggttcgacctccttactcaacgggtaatgacctactccccttttagttgtattgacaccgagatataatactactcagatcactatagatgggatttgaagtagctatgtaaaggttacaatgtaggaataagagttggaaaatatcaagtaagagaagagcagtagtgggtgtgtaagagagaaagagatgagttatcagacttagaacatagggttttgaacttctcacttagcttcagacttagggttttagagtttggttaaggctctttatataggagagcttaaacccttcaaataggtaaaataagttgatatttacatattaaattattaatatgcaaatgactaaaatgccccttgaaaatagatattttccctctattttcttacgctgttaaggccctattcgtagtttagcttgttgtccacgtgtaaagttgtgcacaaaaatcttgttaggccaatgtctggctggccatccttctggaagatgcatgctggcgggctctatgttgtccagaagctggctggcctatgctggccatagggctagccaggggtgtctggttcatcatttgtcatctcgtttgagtgcttggactccccattggttgaagtgctgagtagatgatttggccttcttgttggcgagctgtacttccacatggcagtgatattggccaaataagcatgcacgtcaggtgggcaaaaatttggataacaataagagtatggagtatcgcctaaaactggaacctcagggaaccggaagtaagccactactgttgggttttatgccc

SEQ ID NO: 130496 - DNA, 528 bp, Cannabis sativa
tttaaaattaagtaatactcacacaaaatatagatacaaaacaaaaagaagaccataaacttatagaaaactaatcacataatttcaaaataactgtcatcaacgtatctcacttatagttactactatatttaaagttgatatcatcaccatatcatcacatcactatcttataactcaacttcgtataaatatataaatatatagatagataaatatgtctacctaattaactactaaaaattcatatcgtagttgaattcataaaaaattctatataaattatttatataatttttttgtggcaatacccaccactcttctccattcaaaacactaataaggacattagtgactaatgtataaataggttataagaacaacacatgaaaatgtaatctcccattaaaaaaaattaaatatcaaagtaatataattgattctactcaataaagtaggaataaaataacctttacaatgcaaagtaaaagaataaataaaaaaaataacagattaacaataaaatat

SEQ ID NO: 130497 - DNA, 1122 bp, Cannabis sativa
aactgggttctgcagtaacagaattacattctgcttctgtagacgtatacaattttatatttttgtatatattattgacatttgcaaaaacttgatttttcactgtattttaaaagtaactttttggttactaatattgttgataaaaaaccaattagttacctttatatataaaaaaaaaactttatttttatatcatataatttgagatacattttggttactctctaaaaactgatttgtatacattttagtaactaattagttatttttaagttatattatggtagattataaattaaattatatttaagtaaccttaaaaaaaattcgaaactaatgagttgtcatgtaatataataagttaccatttttatatactgattattttatatatttttttattattttaaaagataattagttattttataatataatataatttaattaatttaaatctaaaatgaatattaactaagattttaaagaatttataaaatagtaacatatcactatattagtaaccaatttttttgaaaatagcgaagaaccatatgcttctcacattttgaaatgttcacattgaatagttaatcacaatgatagtttttttaagctcatccgagtaacgatataatcaaaaattatttttaaagtttgagagaagataaaaaaataaaaaaaaagagaaagaagcatgataaaaagtaagaaataaaaaagagagaaagaagcatgatataaagaggggggaggaggaaagagagaaagaaagaaatgtataaataaaggtaaaataaattattttggacaattttctaataatatatagaaccttaattatgcaatggctcaagctgccatatgcttggatcggtcctgttcggattccaaaccttatttaggatcccatatccagttgcagacctcaacccgcaaaaaaaatgttaaataaaatataaagctgtctttaaaataaaaaataatattttgatgtttttttttaaacttagtatttaaaaaactgttgttaaccaaatccctcattttagttttcaaaattaattttttatttttaaaaaaataaaaatatataattttttagttactttttttttt

SEQ ID NO: 130498 - DNA, 638 bp, Cannabis sativa
ttttatatagttttagtttagttcaatgattcccaatctgaacacgcatcaccacattattattattttatttattattatgatcactattattttctgaagaattagaaaaaaaaaatagtcccacttgattggaagatattatccatatgagatctattgcgtggagtactattcattcgcacctcttatttaaatcaaaacaaaaccaatttcagttgagaataatatatttgaaaggcttacactatataataaatataattaatattaagttatttattggtacaaggagttgtttgtaatatttttttacattttgttaaatattgtgctgggcatgttattactaaattattaatgaaatttgaattttattaaaaaaatatataatatttaatgatatatcaagaggcaattttttttttatttgttagaattttcaaaaaaaaatttttgatgaaaaattatatgtaattataatttttatttgtaaggtttatattattataattaattataggatagtatatattttataaattatatattattttatttaaatatcatgtttaatagttcaaaaggtaacctccgaaaataggtttgctgctccattcaaaaaaagaaaagaaaaa

SEQ ID NO: 130499 - DNA, 785 bp, Cannabis sativa
  modified_base (671)..(683): a, c, t, g, unknown or other
  modified_base (736)..(740): a, c, t, g, unknown or other
ccgctcttccgatctcaaggatgtttcgagtagttcctagtttttttttcttgattgtagaattcatgcatgtgtatcacaatgttcacttccactggcaacattgcttctgggaaaaatgctagtgaaaatagagtatgtcccatcatagttttttctattgttctttgggcccaaagcacctgtggtagctcgtcaacccgtctttctttagccgcattgagcttcttcttttttagtgtctttcaaggttatattaatagcctcgacttttccattagcttgtagcctagacactagatactgatgaaaagctcttaataattttattccttttgcataactatgtaaataaatctccatcaaactaagtaccttaatctgacactattttaattggaatgtcgaacctacaaataaagttcttaattacaaagttaagaactttcttacaagtgatggacaccaaaggtttgactttagtctactttgtaaagaagtcaactacgactacaacatattttgtgtcacctctccctcttggtaaagataaaatcaggtcaaccccccatatggaaaataggtaaagtgaggtcatcattcacagtttattaggaggtattctcgatatatgcgagatcctttggcacttattgttgggttttatgccnnnnnnnnnnnnnatttcaatataatcagatttactgattaataaaagatcagaaatcattttatnnnnnatggttcacataatttattttatgaatatgtttaatgtataaatt

SEQ ID NO: 130500 - DNA, 946 bp, Cannabis sativa
agtgtaattatgtggtcagacaaacatgccaaattgtgtaattacctctaattacacacaaatccaattacattgtgactaaacacactctaattttataagcacgatggtaaccaatattaattgaaataagttaattattagttgtctcattaatatactacacaaatggcatatttagtgttacatcatatttttataaaagtccaaccacaacatttattatttcacaagttataaacataaataataatattaataagggctttttttatttttacattttaaaacaattttttttatatttttacgaaattttacataaaaatccctattgcaactagcgttgcaacttaaattgcaacaaaaaatcatatagattctcttattgcaactagcgctgcaaccactttagaaacctaaatggtaaatttaaaaaaaaaaaatagtatatgaaataatttcccatttaatactatataattataagtaatattataattaatattaaaaaacaaaggaaatgtcatatttggctggatcaaattttggcaccaagtaccaactatgctatttaatttgaagatgcccttagaagtaaaataatattaaaaaaagaaaattaggggtatattagaaaacttgccattataaaatgcttctatagccattgaccaaattgataatcattgcaaataaattaaaacttttatttacaaatatttaatgttattttttttttggggtagtgaggacctaattaaaatatatttaatgttttaatttgagacaactttatataaaatttatattcataaaatatatacaaatatgtatttttatattttaataaataaattatattattatgattagagataataaatttatattgcaggaataagtaactgcgggaacccgcacttaatgtggagattccccgtct

SEQ ID NO: 130501 - DNA, 819 bp, Cannabis sativa
ctctctctctctctctcttatctcacacgtgtacacactattctatttgtgtgtgagattaaaactctaatctcattatagtgtctcatgagttgagtacaaactgtaatacctaaatctgttcatccaaataagatctaatagcccactccattcctgagtgttgaggctagcttggaagatcaatgtgtagattcttcaatcaagttcttggattggatgttcgattgttataccgaaagaatcaagaataccctgattgacatcaataggtaattgaatttctattagatttaatctatatttattatgttgagatctttaagcttatggtttatattagataaaagttgtttcattaaaattctccttccgcttttataattctgatatgaaccataaaaatcaacaatttacgttgggggacaaaagcagtcaagcgtaagcaacctcaacctgtactaatgaaatttcttaggtatcagtggcaaaggtgatgattgatgatacaacatcatcaaataccatgtttaaataaaccttggaaaaaataggtttgtctttgaaagatctggagtagggccggcaaaacgggtcaaacacgatgacacgactcgaaacccgcacgagagttagcgggtttgggtttgccttaaatgggtttgggtcgtgttcgggttgaatcgtataacccgtttaataaactggtcgtgttcgggttgatacgcctaacacgatattgacccgttaatgacctatttaaagttattttagtactttaacgtgtcataaatagattataaacgtgttaaatacttc

SEQ ID NO: 130502 - DNA, 799 bp, Cannabis sativa
agttcaatatcatcgtaactcaaattacgtgtcatatctgacacatacatcctcaacatagagatgtggaagacataatgaaccctggacaatgcgggtggtaaagccaatcattaggccacttggcttatccgctccaatatctaaaaaagattgatgaatctagagcttaatctttcatattttttttcaaatctacgcatccctttcataggtgacagtcaaacagatactgagtctcccacttgaaatttaatatccttacgctttaattcagtgaagcctttttttgtacccaatgaggcgagtatatatcattcatcatgtccttttatcacctgtgttactccaatgaacaggtgtccaacatctttctcataccatacttattaaagtacctaaccaataatacatataatcatcacttttaggcaaacacttcgtcggtggaaaatattattctaagataatcttacctttatcaattctaatcacaacatatttctaatattctattaatcctcatttattgtataaattatctacactggtagatagcatattaactcggtatgtccaaccattactactcagtcgaaaccataagatcccacaatacatagttcataattgggtctttctattcctcctgtgggacctcctaaaccggtctactgatttcacttattaacaagttaagtattcgtttttgaaagatagtcaattagagcacttcttaattctacttattaacatatgcttatctcgataccttataaatctttacttattaacacat

SEQ ID NO: 130503 - DNA, 1524 bp, Cannabis sativa
  modified_base (158)..(159): a, c, t, g, unknown or other
ttcgtattaagcattgtcttcaagttggttgtattaaaaaaaaattgtcaaaaattaagctcatggtcctatttttactattttagagaatatagggtctatttcatcatttaacaatacacagggtctaatatataacttttgcaaaacacagagtnnaaaatagtatttaccctaaaatatgtaaattttattttttacactataaattatttagaataatttttaaaattgacagataattattaataataacaacgtcctatagaataaaattacacttactcaattaattacacttaaaaaagataacaagaagaaataattgaggaaagaaagttaaaaaataaataattatttgaattattggaaagtgtaagacacgagctcggaagggcgcgtagattaatgttgggatgatcacgcgatcaggtagttcggaaaaactggatatttgccggtgaactagatcacatggggaagagagagagagtgacgtggcagtaaatgagagtgacgtcacctgatgctgacgtggaacggtaagatttaactacgggtggtagtggtggtggtgcgtgcagtaataaaaagatatgtcagatgacgtggacatttgtgtgggtcccacattttcttccacaagagtgacataatcatcatcggatctgaatcacactttcccaatcatcatgacgttagctggatgacacgtggcgtcatccttagctttccttcaggcatggaggtggtgttgttaattgggtcccaatcctatcccatcttctacttttgggtctgtttcggtcagctaatgggagaaggccacgtgggctaaatcgaaagtgttgcatgaagttgtgtgattgtggggcccaccaagcatgaatgggaaatgaagtccattaaaggagcaccgtcgatggtggttagtagggtgtctgccatatatgagattgcatcaccaccattcactacggcccacactcaaattttacttcaattattcttttaattttatctattttgatatttataaaaaaaatatagtcaaattttgttttaataattatgtaggttaatattattggttaagggatatactgatacatttttttttatttatttcagcatttaaaaaaaaattaatttaatcttttttatattcacgtacaatataacaatttaagatattttataaaattttaaaaaatttaaaataattacgtatgaatttattttaattttttctgctttcaatttttcataatatcttagtgggtgattctacaatgtaccccttaaaagggatgtactgatgcactcttgacttgtttcagcatccagaagaattttttagtctaaatttttttcatattcatgtacgttataattatttgagataacctacaaaattttgagaaattcagaataacttacataatcgaaaacaatgctcaaacagtctattttacacgggtataaaataaaattgtcacgcgtgcaacacgctgtttgaacgta

SEQ ID NO: 130504 - DNA, 822 bp, Cannabis sativa
  modified_base (26)..(50): a, c, t, g, unknown or other
  modified_base (557)..(558): a, c, t, g, unknown or other
  modified_base (632)..(662): a, c, t, g, unknown or other
atgtagaattccgtaaaaatgaaaannnnnnnnnnnnnnnnnnnnnnnnntgaagtgtaaaaatgaaaaagtaaatggggaattaccctatatatgttattcttttaaattttttttttcaaatttacggttagtgtttctaaagtggtagcgctataggggtttctatctgatttgttgttgcaatttaagctgcagcgctagttgcaataggggtttctatatagaatttcataaaaatgattgttttgaagtgtaaaaacgaaaaagccccaagattaattgcccgtcggaaaaaattgagtacacaatttgtttactcttagaatttagaatttgggataaagtaaatgtatggaattcatctcaatatcaatttgtaatgggatgagtagcccattcagcgtaccatgttagaatttggaataagaggtttcctctcaaaatcaattaacaatgaaaagagtagtccattcatgtaacagaacttactctaacatttactcaactaaaaatggctaattaggatttttgtctcctgaattttgacatgtacnnaatcatgcccctgaatttttaaggtcgtgaaaaatgccccatgaactattgagtaggggtgttcgcggtgcggnnnnnnnnnnnnnnnnnnnnnnnnnnnnnnnaacccgcacatgcggttttttcaatttcccaaaccgcacctgcagcgcgaaacttaagaactgcaaaaaccacaccgcaaaaaatggtgcagtgcggtttatgcggtttggactatcactaaataattaaaatatcacaaatacaacaaaatttgagcaa

SEQ ID NO: 130505 - DNA, 610 bp, Cannabis sativa
cctgccgatttctaagaagagatgataaactttcagcacaaaggatgaagaggtagggggacaaaggatccccctgtcttagacctctcgaaggtttaagggaaccataaactgcaccattaaggacaaaagagagattggtggtagaaatacatttcataattaaactaacaaaactgggagggaaattaaaatggaacataagactttccaaaaaaggccattcaacacggtcaaaagctttagccatgtctagcttaagagcagcccagccacgcttaccattttttctattattgattgcatgaactatttcttaggcaataagaatgttatcaaaaataatacgcccagaaacaaaagcactttggaaaggggagattattttatctagtactaatttaagccgattagctaggactttagaaatgactttatacatagtagtacaaagacttataggtcgaaaatcttttagagaattagcatgctgctttttaggaattaaaactacaagagtagtattaatatcagaaaaatcaattcccttatttaagcaatctaaaatcgcattaacaaaactagctcctaacgtggtccaatttttttg

SEQ ID NO: 130506 - DNA, 664 bp, Cannabis sativa
atcaattataaagaatacgaaataccataaaaaaaattaaaatcgtgattttttttttcgagatagcaactacaagagctagtttttattttggtaaaaccaaactacaaaagttaaaacaatacttaaaataattttgttcatgcgataagttaagaaatcagttaattgcatataatcaaaatcggtttcttaacgaattctaaaactcatatataaatttgacatgcttctcaaaaactccaagactcgactatcaacccactactaaagttaaaacaagcacagtaaccaaattaaaaccagttacaaacttccatctcgaccatcaaaccattaccaaaacagtcactattcactaagacaaaaaaaatagaatgaaaatatttgctagagttgttatcatcgtcagaacaatcatcaaaaaagtcatcaaaaattatcgttgttaccagaaagtctttagagttagacattggaattgtcataatactaaatcttagaactaattacgtaaaataataaaagtaataattacatatagaaactaatttcataatacaatcaactaattatatgaataataaaaagagaaatcaaatacgaaaactaattactcaattaactgtggagttctttcgagatggctaccgaaaaacaagat

SEQ ID NO: 130507 - DNA, 1004 bp, Cannabis sativa
caaatgggacttgagatatgtaggacaaaccctcagcatcatggccaccgcttcgagttcgaatctgcaagccaactttcttagagcataaaatagttgcttggatatgggagttatttgaaggagtgacaataacgagtggttttggggttgtatcagagatgaatctaagattttgtattgtcgaattcaggacagacatatacaattggtcgtgttgagtgtatacgagttttggatttgctacattgttgggaatatgttttgagaagcatttaaggaagttttctcgaggattagctattgaaatttggatattgaatgagagaaagaaaaatattattttgcaaacaaaccaaaaggaaaatgctgagcaattcatttttcttcagtcctaatgattttttgaattattaggaattgagaactatcctatttataatattatatattggagttggggcaaataaattgacttaaatattttataatttgatagtcattaaatagtcacatgtgataaaaaataaatcaactaaaattaggcacctttgttaggtgaagcccttattgaaaataaatgtacattgtacattgaatagtttggcatcaataaaaattggatattggaaacaaaaaagaaattggctatggtagctagtttgtgggatataggtgcctatggtagcaagtacacataatgacttttatagtttattatggttcccataaagagtgaatatcaagtaccaatatctattttactttttatttggtaattaaaattataatttttgaaaagtaaaataacaaatagcaaaattaaatgaagaataacaaagaacagtaaagtaaattcaaatatttaaatgaaaaattataaattctaacctcctctactatctactttattattcaactagggaatagatccgcgcttcacgcggttttaataatttttttttaaaattttacattaaagaaattaatttttagttacgaat

SEQ ID NO: 130508 - DNA, 1270 bp, Cannabis sativa
  modified_base (834)..(840): a, c, t, g, unknown or other
tatatatatatatatatgactcaaaactcgattaattaggtctataataaatagagggcattagaagtgagctatcagaataggaaggtaagtactaaaagctactattcaattgttttacattcaatatagcatttattaataggataattatatgaaatattaatttttataaattttttatatttttacgttcatggttttttattcataattttacggtattttataaaaataacaagaaaacaataagaaaacaacataaacatatgcacaattaacaaagaatcaacaacgaaataacaagaatataatacactaaaacacagtattttatgtaaataaaatttaaaaaattataaaaatgttgaaaattatgtatagactgtatttttgtaattttatttttattttgtattttttttgtattttttgaaactattcctttattaattttgtagaaaaataattctcattgaaggtacccaatgggtgtatagctcaaattttgaaatttttgttgcaatatcgaacaaggcaagcttaaataattatgggcttcaaataatgacatatatattgtcaaattcttatgctacatgctaagaattatttagatcctcaagggtttgtttggtacgctgtattaaaccgtatcgtattgtatagtattatattgaattgtattttatataatatttttatataaaactatatgggatattaacttttatgtgcacctaattaaatatataatgttttagtataaattaaagtttagcataatatcatataaaaatatgatatataatccaatttaatacaatacaatannnnnnnacctaatacgacgttccaaacgaattctatcaaaaagatgtcatattattaattaatataatcaataagattattagatatgtatttattcttcaaattcttgacagtttaatcataatggtatatacatgaaaagtaaggttcctattgatattgagagattctttccactgtagcttttttcaataaatattgatattgagattttgattgggtacaattttgatgaatgtactgtaaaaaatttattttgggcttatataaacgttttaattgttttgttaaaatataagttgataatagatttttgtcgttttaacttataaaattaagggaattttacaaaaatactgcttttggaccaaaactttacatttatactggaacacggcaaaaacaacatttatactgccccagcccaatttcatta

SEQ ID NO: 130509 - DNA, 604 bp, Cannabis sativa
aatttggtgctctaaactaaatccattgtatgggtttacacctgtttaacacaaaaaagcttccattcaaaaactaaaaatgcaaactttcaattactatgtaaataaagacactaactttaaatcaattagtaaaagcacaaactttgaattactaaataaaaatacaaactttaaattagtaagtgaaaatactaactttgaattactaagtaaaaatgcaaactttaaattattaagaatgcaaactttgaattactaagtataaatacaaattttaaatgattaagtgaaaatgctaactttgaattactaagtaaaaatgcaaactttgaattagtctctcttcttcattatataattataaaggtttttgtaacacaaaatttcataccaaatcaaacaaaaatctcaaccataacattttcaaatataattaattgattcacacttgttaacaactaaaaacaagtgaaaaaaacaaaaactttaaatcatttctcaatcttaacttttttttttctaacacaaaatttcataccaaattccacttaaaaaaaaaaaatcaaattcaaataattaattaaaacactaacttgaatca

SEQ ID NO: 130510 - DNA, 997 bp, Cannabis sativa
gtccaggttcgagtttggggcccaggtcccccatctaggtcacagttcagttctcaggtcccaggtccgagtctcgggtcccgggtcccgatcccgatctttggtcccagtccaaatctgggttctagtcccagtacaggttagggctcggtcctagtttgggtcttggtcccagtcttgatgtcgatccagctccaagtcccgggttcgagtccgagtctgagttctagtatgagtctggctctaggtctgggtctaggtctgggtctgtgtttcggtccaagtctgggtcttggtctaggtttgggtctgggtccgccttctggtacgggtctgggttctggtgcagctcccaagtcacgggttcgggtctgggtccgggtatcaatccatgtcgaggttcgggtccgtgttcggttccacatttagatcgggttttgggtcctggtccgattcttgttccaaggccttgattccggttcttattccgattttgggtcttgggtctgagtttgggtttgtgtcctggtatggaaattattcaaggttcgggtcttggtacgattccaagatccagacactaactaaaggtggggtccaagcctcgggtcgtgggcaagatctggatcccaatcttgggtcccggtctcgttccgatttttatcctgggtcatggtccgtgtccgtgtccgggttaaggatcgagaccgggattgggtcttaggtcccagtcccagtcttgggtctcaatctagttctaattttttgttttgatccccaatctaggtgttggacctgggtccatgtctaagtctccaatctcagtctgggtcctgcgtttgggtctgggtccaagttcgtgtcttggttctggttcgtatcaggagtcccgatcaaagttttaattcgggtccacgtcccggtccaggtctaggtctgagtcctagtcttattctagtttcgggaccgagatcgggtcctagtcccctagtcttgt

SEQ ID NO: 130511 - DNA, 698 bp, Cannabis sativa
ttttacaaaaacacagtatttttgaaaagatttccgtgtgacagtatttttgtaaaagttaactcaaattccagtatttttataaatttccctatatatatgacaaagtttgtatttaatttctagggtttgataagagataatatatgtacgtgtttcaaactaattgattaaatacacatctcaagtaattaaagtgattgttaccaaaactaattataaagacataatttgaaaattgtcgaagatcattactaatattacatggtcaaatttaagtcatcattaaaatcaattttaattagtaatatattatctaataataataataataatatatttatatcatttcaattccttacgtgtctctgtatataactaacacgatcgatttcatcatcaatattttcattcatatagagtgataatatagtttatttttatgtatgtcgaaatatttttttttttaaatttttttatagtgttttttttttttgaaattacagtattattcttataaatttaaaaaaattatgaatagtttattgtactgaaaataattttgatattttaatttattatgcgtgtttaaaaaactttaagaactcatttaaaacgtcggattatgttgtattgtaatgtattacattatattaaattggattatatatcatatttttatataatactatgttaaa

SEQ ID NO: 130512 - DNA, 574 bp, Cannabis sativa
agatcctggtaaaataattttcatcacattcttactattttttttattaattagtgttatgtgtgtaataattttaaattataaagttttgttacaactatttcaatagctaagtggaaaaaaaaattactaaaagatatttacttagtaacaaaatgtaaaaaattaattaacaattattagtaatttataattaattttaattaagattttataaggaataaataaagtatcaagttattataaggttacaacttacttattatttatttagttttaatttttaaattaattacaactattcaataatagtaattcaatggctaaaaagtaaaaatatttaatgtaaccattgaaactattaaaacttgccccatatatataaattttttcaaatattactatatgtagtatgaatcacttactaaataagtaacatgttgaattatgtatatatggcaaccaattagttttcaaataaatttgaagtttgccaaaatatatattaaataacaataagatattgttttttttttggcttttttatttttacacttcaacacagttttttttt

SEQ ID NO: 130513 - DNA, 647 bp, Cannabis sativa
  modified_base (42)..(62): a, c, t, g, unknown or other
gaaccatgcaacataaaatgatatttttgatctttattaatnnnnnnnnnnnnnnnnnnnnnaatgggttttatttaggtcataaaacccaacatagaaaagcgtggaggacatgttagaagactatagcatggcgtcatgcagacacaatttttcaaaaccccacctcctaaaagatagtcaatgacaatgattgcttgactgaggtggagaagcgacttgaacagtcagaggaacgaggtcgtaggaaagatgaattattaaagcaactcctccaactagtccaaggccaaattggtgttgttggcaccttagatgcatctagttcagttgttgggagagcatccaacaaacaaacttttgttactattacatctggtctaggagcaacacctactaccagggcctttgctcaacaagctgccagggcttttactcaactagccactgtgcgtgatgacactgcattttctccaacacttcaacctgttgctctactagccacaacagatgcaagttttccaccaggacgtgttcgaagaagaaggccaagagtattggatcagcatggatgaggtggaggatgtgtgcaagctgaagatgattgaaaatattataatgtctctttggtgcaggtataatagtta

SEQ ID NO: 130514 - DNA, 581 bp, Cannabis sativa
tttaaagaatcagttacatttctaattgttttttttatacttacaattgattattttaaattagattaatattattttgaatcatgtgtttgacaaaaattgctaattaaattatctattttgtaaaatgataaattggactatagtattaagaattttgttaaaatatttaccgaaacgattttggatgaggacatggtctctctggagatccaattgagtttcatttggagaacctttataaagagtgttaattcttaccaaatagacattattaattgaggttgtttaaatgcgtacaaaaaaattttatgtagagatcaactaaatagcattgtaacaattagtattggatttaaagtttatgagaggtggtgtgtgatctgtagtgggcggaaaaatagcatgtttgcttagtgatagtagggtcggaatattcccaccctccaaaacaaatgtgaaggtctcccttcattcggtttttcgtttggaatgttgtattaggtcgtattgtattatattgtattatattaaattggattatatatcatatttttatataatgctatgttaaactttaa

SEQ ID NO: 130515 - DNA, 997 bp, Cannabis sativa
tgttagttagggtgttacaggtagaccttgttgatgtcgcccacgctaatttctttgaggatcttgaagtggttgaacgccaggctagattcccgagtggcagaccggatggcagagtaggcaaaatcaaaggatgtgtgtggctttaatgaaagctctataggtttcctaactatttttgtagggagaagaagaatataaagtgaagtggatataattagtgaataggatataagaggagagactgaaaacatcaattacatatattatattttgttttgccaactcagtaaaataatgtagtttttaaccctttttttattttttattaaaaaaaaagagaattaaaaaaataactaatgcatatttttttttgaacatattatattgtataagtatgacttaaagatcataaataatgtcaatttagtgtatgggaagtgggattagtttcatgaaatattatcacatttacttgatttataaaaaaaaaaacaataagatatgcttacttttttgttatctatatatactaaaatgacattaactatcgataagtttatttagatgatatatatttattgatttttaataagatgtactatatcattaaagatttaattaagtatataacttcattttaaaaaaaaaaaatacttaaaatgaattcttagggcccgtttagcacagattttgaaaaagttaaaagcttttcaaaaagttgtgataaaaatgtatttggtaagcagtcaaaaaataaccttttgaagaatttttggagaagctaaagctactccagcccaacttttaaaaacaaaactgttttgattaaaagactataatacattttttttactaaaattatatttacttatttattatatattcaaaaaaacaaaaatatttaaaataaactaattataataaaataaataattattaaatttattatttttttaaaaaataatttataatttattttaatattaaccaacaa

SEQ ID NO: 130516 - DNA, 673 bp, Cannabis sativa
ttttctgcgatgagataaggtccttcccaattgtctccgaagaccccatgtgctgggtttttcgtgtttggcattacttttcgaagaaccaaatctcctactcgaagaactctttccttgaccttatagttgaaatagcttgctgtttgctgctgataacccacatttttcaggtgagccaggtcgcgcttttcttttggaaggtcgaggtaaagtgactgtttttcttcgttctgtgcaatgttgaaaacatctctttgtagggaacctgccccaacctcgactggtatcatggcctcgcatccataggagagcgagaaaggagtttcaccagtcatggatcgcggggttatgttgtatgaccataaaacttatgaaagttcttctggccacaccccttacgctcttcgagttttcctttgatggtgtgcttgattatcttgttgactgcttcagtttgtccgttactctgcgggtaggccactgctgagaacgcctttttaatccctaactcatcgcatagctgtcgcatttccttacagtcaaattgctttccgttatctgaaattagcttgtaagggatgccaaatcaacaaattatggagttatagacaaactcgcgcagtttagctgctgtgatggttgttagtgcttttgcctcagcccattttgt

SEQ ID NO: 130517 - DNA, 954 bp, Cannabis sativa
  modified_base (180)..(180): a, c, t, g, unknown or other
atatatattggttcaagtcctatagatcgatgtaatcgatggctctactctagttctggaacaccaccaaaatcttctttattgattgacaagaacagggtacaatacaatcgagaacaattctctgttggattcttacaaagtgtttatctctcacactcttacccaagaatcttcttnatctacagaagattcttcatacaaaacctaaacctaatcactctcttttctctgtacctttctctttacctctcaagatcacctctggaaactcgtctgatctcgttctccttctcaaaaaaatgataagtattagtggtatttatatatccgggatatagatcctaaagtcggtggctgcaagtgctaagttgttaagtttgttatgaatatctctacatcagctctagttatagtggtctcaggtgaagcgaacgcttttgggactatgaattgaagcacacgctaaagtatctcccaaataggaatagagacagctagagttgactatcctggactcccttccatgagaggacaactagccatctgaaactcccttccaaaggaggactagctttcctaaagactccttctaggtggacatgataaatattcgggaacacccttctggatgatatccaccattccacaagaattcttctggatggacaagttagactttcaagaactccctttcgaatgtcatctaactttccataaccagaacaacttttagagatttttttatttataggaactatatcacaaattccacctagtttcttcaaaattaaaaattttggcagtgatgaagaaagaatgcaaccatcatgtttggtgttctagatatctcagtatactaaattctgagattgatcaagttcaagcaatgcttgcactagtttactgttaagaccttagtcccaactagggccggcccaagcattgggcagc

SEQ ID NO: 130518 - DNA, 1009 bp, Cannabis sativa
ttctttcctcgattattcctcttctcaagcccaaggcatcaccgtcgacaatgtgagatcttggtttgagtgatcctcgtccttgtgatggtaagttggaggtagctttggcttgcgagtttggtgtgttctgaacttttgggttaacgacatcggtgatgaaggtaaactgagaagcagagttttggattgtcgacgacggggacgggagatgcttgtgtacctggatatattccagatttaagttttcaagggagacgattttgatttttttttgggttcactccccacattggatctagatttgtgtttttattgaggtgtttgttcttggcttcaaatctgtaattcatttatgagtttgttgttagattgatttgagaatatggattttggaatagttcctcgaatggttaaacttaagttgatgaaaattgtgaatgcatgactttattttgttaatggcttttagtttcaatgcttcgacgtggatttgggtatggtttgaatagattttccaattacttttgattataatatgacagaattggcaatattgttgaagttggaattgtcgatctggattaatgagaagaagagcaggcaatatcgatgaatgcaacatagtatatagtattagttgattgcctttattttaaatttatttatttaattatatttaattatttttataatatagacttacattttactagacttatttttaaataaatattttaaatttttttattttaaactcaagtaataatttttttccatgtattctatactttgaaattggtatgatggtttataaatttatttattttattaaatcaatataataactgattaatattaaaatgagggtagtttcggaatactaaaatcttaaatacactaaaaatgattggattggactggacaagattggattgaactggattggactgaaaaagattggactggactggacaagattggattatgctgaaagtaatcctatgtt

SEQ ID NO: 130519 - DNA, 1232 bp, Cannabis sativa
  modified_base (1160)..(1187): a, c, t, g, unknown or other
tctctcaaatcgagaagaaatggttgacggacaccacaaccactgaggtgaaaaagatagggggcttcgtcaatgagtactattttttcaaggggatggataccattcacactagttttagtacagacgccttccattcacactagaacttaagaatagggctttaaaaattcttcaactctctcctgctaaacggaatatctcactcttggatacggatgctaacttcaccaagtacaaactctatctagcagactttgtaccaaaggctgaggcactagaggagactagttccaaacaagaggctccgagcaagaagaagaagaagaggaaagccctccccaaaatctaagtacctgctgagcgatctatcaggattagggaaaatcttgagaggatttctcgaccttcctccctagtggtgggaaaggaaaggccatactggtggagcaggaacaggaggattctttgaatgacgatgctctttctttacttgttcaagaaaatgcccctgcccacgtgcagtgtactttaacttgcattcaaatcttttgcatttcctcatattgtacttgtttgtaaccttctttattttattcataaacaaatatgtctaaaaaggtgtatcaggctctaaattaagaagagatcaggggatagctttggcaaaatacctccggccaaaagatcaaaggtggatgaggtaccgcccaaggagaaaatttcggttgagtcacccattaacctcttcgaggaggtggtgtcagtggtggagcttccagtcaagaagaactccaagtctaagaaggccaagggaggaagcacggagggatgtgtactgtccaagtcctcaggtgctcttatcgtgctgaaccctgagaccaagaagggcaaagagatgcttcaattttataaggattggttgctccaagaggtgaacaattagttgtccggaggggacggcatgtttgaagaattgctgatgggcaggatactgaaggaggtaacccgagtaagtacttctccttcagttcttatttcattcttttacctgtccaggttttgacctttctccgtgcagctcaacttgaagatggcctacacatattcttgacccaagtccacggccttaaggactatatgttggaaattattttacnnnnnnnnnnnnnnnnnnnnnnnnnnnnttgattaacaccctaaatataaacttctaaaacgattatgaaata

SEQ ID NO: 130520 - DNA, 600 bp, Cannabis sativa
tatatagaattttgtaaaaatgcaaaaaaaattattttaaagtgtaaaaatgaaaaagccccaatagaataatatatttatatttttacataacatatctatattatgtatataaaacattctataaaatcaggagttcaattctaagcctatagtgtagtggagtcatgaggaactataagttaggaaatatatttgttaaattttatttctacttattgaaagtttaattttataaacttataatccccacaatgtctaggatgatgtataacattaggttatactaattatttaattaaacaattagatttcacattattgattatctattttgaaattttttactaagttggtgaaatttaaaagaaagagagaataaaagtttattttttttgttaagacattttgttgtcataataattaaaatatttaaattgtattttttatttaataattatttggatacgattattacattaaatgtaaagaccgcatatgtttaatgctttgaattattaaataattaaggttcttaaatgagattaaattaatacttatgaaatgcatattttaaaaatatatttaatatatcatatg

SEQ ID NO: 130521 - DNA, 1988 bp, Cannabis sativa
  modified_base (249)..(261): a, c, t, g, unknown or other
ttttttctttttttttttctcttccctctcttttttctttttcatttttttcctcttttctttcttttttctatctttttttttttctcacactaaatctttttattgttatatatagaacactattcaatgaatattgcctattaaacaaatttaattataaatattaattttaaaaatattaaaccattagattttgatttaatacgaatataataaaagataaatttgaatttctatgcttaattnnnnnnnnnnnnnaaaaaaatatcaaaaaatatatctttttatgctacctttattttcaaccaatgaaacaactcgagggcatatgatataaaaatgagagattttttaattagagagaaatttaattaaacataaaaactcacaaaattttgttttaatatttttttcaaaaaaaaaaattacaaatacttattctatatcgtcaaactacttcataattaatcattataaaaaattttaataaatttcttttaaccgttactaaaataaattttttttactttcacactttttcaaaaataggaacactcctcctatatcgttcttcctcttgcaagattaataaaagtatttttttttgaatgttttgtagcttattcagagtttattatgaatgattttcatatttcaacgaggttgatatcttgttatttttctattcacttatagctgtatttttgttgttttataattatttttatattgttgcttaggtgttttatagttattttataggtatttttttttcgtatatatagttgtttagtttatgtgcattttttggagtgtatatttttagtttattctagataattttttttattgtgtatatgtgtatttgttttgttattttttgttgttgtttttttagttatttttaagtggcttttagaattttttttgttaaacaattatttttttagttattttttttgtgtatactcttagtttattcttgataattttttgttgtggtatgtgttgtttgttaaattgttttaaaattattttttagttgtcctagttgtttttaagttatttttttttattttactgaaacacagtatttttgtaattttgaaactttgacacagtatttttaaaaacttgatacaataaaaatataaaaacatgtcattaaaaaaatgtaaaaattaaataacaaaaaacatgagtatctttgtaaaatttcattttatatacctaatgcgagttcgggacgggatgggggtgattctatccatcccatatttgattcaaatatatagttttcaaactttccatatagttttctaattattttttttttatgaatcaaatgattttattatactccactatatataccaatttacaagcaaagagcaccccaattttaggacctcaaggctgtgatctatacagtatatattataacaacaaaggcatcttacaaacaaagcttacaaagctaaaaatcactctgcttcttctactttaacttttttaggccatatactatctattctgtgtttaacactcttttattactgcattaattccattatgtaatgggaaatttacaccacatattgttttttcatattttattaagggaaatattacatttttactgttttttttttctatactatatatgtgtactgttttttttttttacttttcacaattgactatccacatattatatatatataaactaaacaaaagtaaaaaaacttgtgggagtggtagatttttttatttattttcttttaattaaaattatattatattttaaatgatataaaagtgtgatgtgacttgtgttgttactttagtgacatattttttttttaattttcttttaataaaaattcatgataaaaatatgataccctaaattaatacccatttctttcatttaatctcacttccccattattctctcttactattcatcatcttcttcctttttt

SEQ ID NO: 130522 - DNA, 644 bp, Cannabis sativa
agttctattaactaattaataagagttagtttaaaaaaatctaagtactcatcgctcttcaacgatggcctttgcatggcatgtcaagcaagggtagccacttgacatctttaagtggacttcttattttgtaagcttgtagaatcaattaatgtcagttgcatagcaacaaagactaatccatgaataaaaatagtgtttcaattcaaatataatgtgtctaacccacttgctaacaagataacttcttaaacttattcttttttcagctccacatgtgtacacccagtagcaccccaagaaaattcccaagcaagatctacaaaacatggtgatttgcaagtgaccaagagactgtaagtctgcatgctcacttagggggcacctacatcgtacaaggcatcaaactagcacagagaaattatgtagagaaaattaaggcttagcgaataatcttcaatcttgtcactaagtcactgcaggcatacttcagcttggcataaagaaaagtaaatctagatacttacatgttaaggaaataagacgatagctaggattaaagatcgcctggttggtcacatttctataataaaaggctttaaggctaaacaaaagtagtgttaaaaatagagtgcctataggcc

SEQ ID NO: 130523 - DNA, 738 bp, Cannabis sativa
attaaacaagtaatgaaataaatctgtttctttattgataaatgaatatataagattacattaaaataaagttttatttagggcacaaaatcaaacacttacaccatgaaaagtggcatgtattttccaagatattgctaaagtagactagtattgaatgcataggtttacattggactgtacaaatattgaaaatagaataaatattataatcttactattatatctattctaagtcaatgtcacttagttgatcataaatcaatttgatatgaatcatgacatgattaagctttcagctaattgtgttatttaaggtctttgacttgttcattactagctcaatctacggactagtctatacttacatcttagaaactcggtagtataattgagttggagtgttaatcatagatattgacatctataacttctatgttagaagtaaaacaatggttcccttttagctttgttaaaaacgtaaatgataaagatatcatttgagtaatgatatcagtttactaaaattcatttacaaggaaccgagtgttcaaggataaaatataatatagggttaaagtgggataaagtatggtctggcaaatatcagtgggaaaagtgtatgaacactacaacattacagagcaatagcggcgggcccctcggccgctattgctccagtttttggccgctaaagggcaatagcggcggacctcggccgctattggtccgccgcta

SEQ ID NO: 130524 - DNA, 1281 bp, Cannabis sativa
  modified_base (602)..(610): a, c, t, g, unknown or other
taccatgcatagatcatgataaacataaatgagctgcttggagtggggccaaaaagaatgggaaggcaacgtagaataaatcagctttgtgtaaaccacaaaaaattgagttaggggcaattgttatacccattttttagactatttaatgaaaagttcaaattaaatgccatatggaataaataataaattctcgcaataaatactttgtcggacaggtaaaaaaaactcaaaactcaacctatgaggtgatctcatctaaataagaatcagaaggttcatgaagtgaggtattttaacattgtcgatatgttatttcgataaacattcaacatctctcaacaaagatattacagttgctcgtaatacacagcagtgatgaatcacctcgtaatacactgcagtgatgaatcacctcgtaatacactgcagtgataaatcacctcgtaatacacaattgtgatgaatcacctcataatacactgcagtgatgaatcacctcgtaatacacaagtagcaatgtattgcctcttattacatagcagcagtgtacttgctctcaaataacattatttggccaagtcaaataccacttcaaagannnnnnnnntgtattttaaatataaagcagttatttatacttatctgaatattcagttatatgtgaaacgtgggaagtaaccacccgtcaattgtaacttttcattaagataagattgagttcccactatcctattcctataaataggggttcactcaaaggaaaaagggagaggcaattctgatttacagaaactttgccaaattgttaacacatccaaaactcagaaataatgtagactcgtagagtatgtagatttttattacaaaacaacgtaaaaatatctagtgttcatttaatatttttttttctcttcttttcttgaatttattcttaaattaataatcttcttagattaagttgacgaaaaattgtgtcaacagttgtattggtaactggttccttccctcctatttatttagttattatttttgttgttttaagtaaatggctctaacattctactttttaattagattgatttaaataattagtttctcagttatagttttaactatctgattattgtaactagtttcagtatgtcaaattcaaacgtctaacaccagtgacaactccaatgtctaacttcggtgacttttcagtaatgaagacaactactgtaatacccggaattaagaaaaggattagcaaaaccctaattagataattatgaatta

SEQ ID NO: 130525 - DNA, 1138 bp, Cannabis sativa
aaaaaaattaaaaaataaaaacttaaattaattttaaaaaatcaatcttaacatttttttttttacattattttgtgttaatttcaatatgtaaaagaaaattatatattttttaaagaacaaatgctattttgaatcttttattttataaaaattaccaatcagactctattttttaaatgacaaatctgacaatatactttctaaaatggtatagaataatactctaagttcaattttgtcaattattttttaatttaaccaacttgaaataagtttttagtacaaatagatgaaaatatatatatatatataatagtctattcataactcttctataagttaaattattattaagtttattttaacaaaaattgatctcagagtatcattttgtgttattttaaaaaatataggatttaaattgtcatttaataaaataaatggatacctttgtaatttttgtaaaatatagggtccaaaataatatttatttctttttaaatcacatataattttttattttttttaaataaaatttcatgtaattttttattttgatttttttgatttaatatttaaagtatattttattttattttagacaactttttatttattccaaattttagtagaaagttgatttctatttcatgtttgcaattgtcacattataaattgaatttttgagttttgattcgattatttcctgtaatgatgatcaataatgtgttgccactatggaataagggctttatgttcttagaccagatgaaccatttgcgcttaataacgaactgtttaagatagctaaacctagaaaccataaaaagcaaaagatcgataataaagacaaaatatatctatgacatttacgtcttggtcatataggccatgatagacttcgcaggggaaccaaaggtggtccattaaaaaatgtcacctcaggtgaattatcagtttgtgaatcttgcctacaaggcaaaatgataaaacgttctttctctgcaaaagaagagcgtgccaaaaaaccactagagttagtgcattcagatctttgtggaccactaaatatcaaagccagatgtggttatgagtattttgtcactttcattgacgattactctagatgtggtca

SEQ ID NO: 130526 - DNA, 698 bp, Cannabis sativa
taggcaccactggtgcctagtagcaatgctctatattaaattatatgggacccaatacttaattagaccaatagcgatactgacacgtaggagagtgctatataggcacactggtatcttttaacatttctcttaattataccaataaaagtaataggcatcaataatactttttaacaattctcattaaagaaagatactcatcaaatgcatttgttgtattaattttagtataattagcaaagtcttcaacaatttttagttcctaaatctaagaaatttgtgagcattaaagatcttggtaagtgaacgattgaaggttcacaaaattaataaattcattttgggctataatcatcacaaagagacacttccattgatttgagtttgtaagactaaacatgctctctgaaatcaaagcaaaatccaaatgcaaattcttctagcaaattgggctataattatcgtatatattattttttttttaatttttttttctttttaaatttacggtttaggtttctcccgtagttttcaaattaataaataccagcagtttttaatattattaccggcggagatttctaccagtaatattgttaaatgttgtagtgatttttgtgcgtttggaaagccacagtgtaattagatttgtgtgtaattggaggtaactacacaatttgtcatgtttgtctgac

SEQ ID NO: 130527 - DNA, 813 bp, Cannabis sativa
aatttgaatatttgggtttccccccaaaagtaaatgttagtactcattacaagtagtacagccgtcacgcatgcagtatcatttagtaattagtgtgtgattcaaggtacaaattttaagaggcttttaatgcttagacaccaaagagactttcaatcaaattcatgttagatcaatctcaaccgtcaagacatgcgtcacccatctagacaagattcttgaccaaatgtagtccacgtgcgaccaagaaaatcccgcacaaacttgggggaaaatattatcctatttctttcactatgatgtggtaattagctggatgatatgtgtctaacaattcctacctgggtggaaggttatactcctagcagtttccaaggattgatagaaaggtccatgttatctgtacttagcaagatgtttgagcagagtcaccaagggacatctgaccaagatcgattttgtgatcaactcgcatgcaccaaccataaaatgtgaattagtattttcataaagggacatcgttgctttcaagcttgcattacacaaaaataatccttatattcatggaattaattcaaagaataaaggcaataagcctaggtttcccattctttacattgtaactatagaattaaattagtttcctattttgtttattatagattaagggataccattcctcatgtaatgagcccctataaatagtagtttgatctcactattcaggcgacacaaagttgattcagaaagaacacttaagagagaaagagtgatttaagagagaattactcagagatccattgtaagagcttt

SEQ ID NO: 130528 - DNA, 1460 bp, Cannabis sativa
  modified_base (588)..(592): a, c, t, g, unknown or other
  modified_base (691)..(691): a, c, t, g, unknown or other
tttgtacattatacactaagtgctttcgcagtcgaaacgtgtcgttttcgtcttcctaaatgtaacgtactttatccctcgctattcacatctaacgacatatgatttttcgttaatatactatgccgatatatgtgacaattgatgggtttagttgtgattcatacaacgaacactgctttgatcctatattgatataattaatggacgagattgtacatgtctatggttatgataacaaaattttgagttcagtaagtttaacacatttatatgtatacatatgtggcccagtgggagtattagaaatttattaggatcacaattgtatatataaaattaggaaacaggtcgcgcgcgtgcggtagttaaataattatataaatattaattgagcaataaaattagtatcaaataattttaaatttatttttgtgtattttttaaaaaaaaatgtgcttattaaaaaataataaatccatatagaaaactttaaagaataaaaaaaattatcatacaacttcttatataaataaaaaattagacaatttttttaaaaaaaatatacattatagtgaagaaaattannnnntaaatatttcttacacaaaatagagattaaaacagaaagaagataataaatctattaaaattcatcatataattttaaaacaactatcatcaccgtatntcatttgtagtcaccactgtatttaaagttgattttatcaccgtatctcacttgtaatcatcattaatgttctttctaataagtttattttgtacataaaataaattaaacaataatcggtaagtatttacttttattatgtgagggaagagagggtgataaacataataagtttagaattttcataattttggcatattaattaataatttcttttgataaattaaatttgttaatattaactatatctctctctaaaaaaattatatgtagattaatttttttaatacatatatagttattaacaggcccggcccttttcgtgtgcaaccagatctatttcacagggtccaccaaaaaaaaaagcccaattttctctaatttatttttagttttttctttaaagctgacttcggtcagcaacctattcttaactaaaaaaaaagttatttattttaaaggcccacttttcaaaaatatgttttggccttttttttttgttaaagctaactttggaagtcatcaagcttattcccaacaaaaagaaaaattattagtttttaaatcttttaaaatatttttatttttttataaaccaatttttacataatcaataaattacaaaatttcctagattctagtaaaataagggtactaaatttattaatgctatttaattctttttttttaaaaccttttatattcacctacatgactatatatctttatatattaaaagtgtctatctaacggcatttcttggtttaac

SEQ ID NO: 130529 - DNA, 1678 bp, Cannabis sativa
  modified_base (1650)..(1651): a, c, t, g, unknown or other
acgctgatgtggattaagacacgccgcaaaacatatctcgttgagatgtcttgcccggtacataaacgacatgatttattcataagtcttccaataatggcatgaccaccagcatactgagcaaacttaagaactgctctttgaccataaggccttgtagactggacaatcatgtcctgggagttctcaatagcaacaataaccccggcggcgagctggagcttactaggagtatgccttcctgtacatagcgagatgggtgtctcgctatgcgttatctatgtccttcaagctattacacttagttagtataatgtattacactctaagtgttctaacagccaattcaccttatcaacacctccttacatattgcgaggtagatgcctcgctatgtattatcgatgtcttccttgcgattacgtcctctggcacgaaattgtttctcgttaatacgtgattcaatggttcgtacatccttgtctccctaaagactgtgcaatctgcgagttataaatataccctattgactctgcattcaatgagttattccattcaatatttattaatatgattgccattatatttgctggttcatattctctgagattaacatgtgtcaccttctgaagtaccagccgaatttcgggtataatacttatgctctaattaattagttttcgaaaatcttgataaacattttggtgctttcattgagagctgaggaaagtttactagtcgttgcatcactccaaccatggtaaatacctaaaagaatataagcaagaaaattccattggacactgttatggaggaagcagactccctcgcctttggccctcaaaaatgtaagataagagaagaaggtacgaccaatgccgagaatcacagggaggatgccgagaatgtgttcaatggcctagatgacaaccagcccctgagagtggggaagaagaggacatggcaatgactatgtgagagatgggtactacaaagatggttattattatgaccatgaccctaacctgctacaagtgaccaaagagttagaagctactcagacggagttagcagaatagaggaagctcactgtaaaaatgaaaagaatgatggatgtcttcaaaataagtttgacaacttggtgaagtccgaaaacgaaccttcggtggaggtaatggccaaagagcgtgctcacaaacaaaaggaaatcgaaaccttgaatcctcacaaggataaaggtaaaggcaagggggtgagcccccacaaaaatttgctcctcaacctcctcaaaaagatacgaattcggctagccagccctcgaggatgcagaaggccactgatgctttcgagcttggatgcccttctgatcctagaggcaaaaccgtggcaagggggaaaaataaaagagtacctaagcccaaagggcggaggaaccaccctagcaattctgtcaatcaggacaaaaggacaattgtggaacattcggaggacagctggtccactacagaccttcgacgatgattagatgccaagtacgagaagtataagagtgaaaaaggcaaggccacgtggggtgactgttggaaattattttaccaagatctagatctactaccaagtatgttttattaacaccctaatatgaattcnnaaacaataaaataaacacataagagtt

SEQ ID NO: 130530 - DNA, 907 bp, Cannabis sativa
ttgttggcctgggcctaaacatcttacaaaaatactgaaatgaaatttgaggtagcttttacacaaaatattgtgatgggaatttttttaaaaaatactatatttttatatcacaacagttgaatacaaaatagaataactaaaaacaacacaaaataactaaaaataataactaaaaaatagccgttgaacaatagtaaaaacttaatacaatacacagtataaaacatacacagtatttttaaaaaaaaattcgcctcacagtacaaaagtaaaaaagttaaaaatttcaatatgtggtgtaaataatcctaatttaaaggaggaaagttgtagctaaaataattttaattttaaataaatcacatattatggcaaccgtattttgaaagaaaatagagtaatttgctgagaaaataaaattaataacaaatttattattttcttatattttaatgaaaatattaaatttatatcatgtaattatatattaaggtacaatatttaaagttgatgtaaatatattataatttctttttccaaatatgagttatggttagtgattattattgtaataattaaatggtatttcttttcaatattgttctaagattgctattagtgttgcacattctttatctttagcaaaattatcactttacgagattatcatgtttggtggtttggtcacttgattgtattagtgctagggggtgtttattagaccacttctaatatttgtaggtctattcagcttcgatccaattatatattagatgttaagttttatcatctaatctgatctaaataatttctgtcatagaattggttcaacatccatatgatgttagattagatcaattctatcaattggatgtatttcatatatactagcaaaaagctacgt

SEQ ID NO: 130531 - DNA, 818 bp, Cannabis sativa
atatatatatatagatagatataattatacaaatatcatttttaaatatctcaattttttttttaaaaaaaataataataacaccaacaacctaaaaaggtaataaaatgtgatggtatttttttaaaaaaataaatgaaaataaatgaaaaaaataaagagaaaataaatagaggtgtatattttatattcattaacatttataaagctaataaaaaattaaagaaatgagaaaattaagaaaaaaagtaaataatactaattaaaaagatgttcgaatatcatgtcactgccttatatctttgctttatatatatagatagatatagataaataatataacataattattttattatttttgtttatttgaattctcaattagaatttgaaatgatataacacctttttacacatagcgaggttgatgtctcacttatgtattatcgatgtcgtcctttcaatcatgtcttttgacgtgaaatggtttctcgtcaacacgtgaattaatagttcgtacatccttgtctcgctgaaaactgtgcagtccgcgagttatgaatatactctattgattctgtatttaatgagttttccatttaatattcttttaatgtaattgtcattatatttgctgtgtttttcaagattgacacgtgtcatcctctgaaatgacagttgaattttgagtataacaataggtatagatagatagtataacataattattttatgtgaaaattacatgaaatatgggattttgtaaaaaagttacaaaaatatgatatttataggtttgtcactcttctatggcattt

SEQ ID NO: 130532 - DNA, 1425 bp, Cannabis sativa
ctaggaatttacttattatgattctatgttcttttaaagcacaaaattgaaattagtcaagagtataatatcaccaagcacacagatttttcgaaataaatgaaatttccaaatcatgctatctatctactttcaaattcactcacattaagcaaattaactaaaaataaagaaccaactaaaaacttaaaattttaaaaataaactaaaaataaaaatttaaatccacccccaaactaaagtgacacattgtccccaatgtgacattaaaaagaaaggaaagggaacttacctaagcgccacatcaggatggcggcagtggggggggtggttgcaaatttaattgggatacagtccacctcttgtatccatacgacccttgtaccaaatgaagagaactatcctccaatgttgctaatttcgaagctatccataagatgagattcaccttcacagtttatacgcatcagtcttttcatacatcattgaaaagtttgaaatcgttctttggacttccctttcttcttgttggtagttacttctcgattatccttcactaattcaaccttacaacatgtaggaatttcaatcggagtaaatacattaaatttatttcttcatcttgaacccgcaactttaattcccccttttgtacatcaattaaagctcttcccgtagccaagaatggtcttcccaaaatgatgggaatattttcctcttcctctatgtcaagtattaagaaatcaacaaggaagataaacttaccaaccttcaccaaaatatcttcaattataccccgaggatgagtcaaaggacgatctgccatttgtagagtcactgttgtgggcttggcttctcatgatcttagtcttttaaacacaaacatgggcattacgttaatactcgctcccagatcacatagagcttttatttccattgaaccccctattgagcatggaatattaaaactacccggatctttaagcttgtgtggtagtttcttttgtaggattgctctgcactcctcagcaagtgccaccatattaaattcttccaacttccttttcttggatagaatttcattcatgaacttcaggtaagttggcatttgttccaaggcctctataaatggaatgttgatgtgcagtttcttgaatatttcaaggaatttcaaaaacttcttatccagcttattcttgtgaagtctttgtgggtaagggagtttgatatgatgatcaatgctaacaggtggtacaacttctttttgttgcagaacttcagtagtctttttcttgtcttgagttggtgttggtgcctgttgattctggtcctcttcaaccacttgttgctctgcccttggtccctcatattattttccacttctcaaggaaatttgtaaagcccgtttagttaatttggaaatta

SEQ ID NO: 130533 - DNA, 832 bp, Cannabis sativa
tgtttaattgagttatttctccagaaaaaaaaagtaaacttaaaaagaaaaaagaaaaaatattattagccagtgggaatatttaactttttgaactttaacatatatatgtctataaatattatcttttattataaatatatattgtaactaattaaaatacatatatagatatattttttccgattttttctttgagaggggcgactgtccctctcgctacaatacgggttcgcccctagtagactccctatttattttggcatacgaaagaattttttagtcatttttatttcataatcgtgtatttatagttattcggactacttataaatttttaatttacaaaaccggcaataagatttacatattttgttggacaagcaactatttttttatacgcttaattaagaatagcaatagtgtggatccaggactattcttaaaataccatccctatcctcgtaggttaattatatacccatacccattccaataaccatcagtaatggtgcatgtaataactagtagcctattgaaggaaaactatgattacctgtaactgttaatagtaactatatggggtgatgtatactaataccgtacctacaccatacccgcatatgtgcaatgcagttattccccgccccagttatttttcccatttgaacgtttatttccctcaccgtttggattgaataaccatgtatacccgtaaccgtggatcatattgccatctttacgcgtagtaagtaattgtttaaatctaatttccaatactataaattatttaaatttttttaaaaatttacaagtggtcttataactacaa

SEQ ID NO: 130534 - DNA, 665 bp, Cannabis sativa
taatttcctttaatttataaaattttaaaatacacaaagcaaaaataaaaactaaaaatataataagtataattacacgtaacaataatctaattttaatataattagtatataaaatttctaacaacaagctatttttattatgttttattattattatattctgattataacactaatttctttaataatttttttaagaataatttctttagtaacttaaatatttatcacaaaaaagaataagaattttagcattataatttagcttttttctttatcactaataattgaatattgtaaaatgaaaatgagaaaatgtgtgatgaattgatttaatttatcacctaattatacttaaattggataaaactttaaaagccaaattatattgtatcttatcaatttaatcaaaaaaaaaaaatagaaaaattgagttataaaatgtaacttgaattagatgtatgaaaaactacataaaactatacatataataacaatactaatactgtgatttcaataaaataaaataaattaaacaatactactgccactcaaaaataagtattgtcttcttacattttttatagtgtacttaaaagacgagtgtacaatgaacccttgggaattttaattttctatacttaaaaaacttaatttttttt

SEQ ID NO: 130535 - DNA, 535 bp, Cannabis sativa
  modified_base (455)..(455): a, c, t, g, unknown or other
gaattaaatttaattagtactacaaacagtcttcaatagtgactaatgtatatcatcactttaatctaagaaaataaatcaaagtatatgtaaataaatcctaatagttaaatacgaagcatgttaatgttgaaacttcgtgtcccttatgtagcttagccgaggagaccatcttccatattctattgggttgtgcatttagtaaagcttgttggaatttatcttgtgttagtactgctactatacaagagaatgatttcaagctttggttctttagattgattgattctcaacctgtagaagttatccaagaagctgctatggtaagttggaaaatttgggctgtgcggaatgatgttgtgtggaatagcaaatcttgttctgccttagaagtggtgcgatcggctagaattacccttgactaatggagtagtgctcaatcacaaaaaatgggngcattgttagtagatgatattaacaatgttagagagcactggcggaaaccaatgacaaatacggttaaggtcaatgttga

SEQ ID NO: 130536 - DNA, 1084 bp, Cannabis sativa
  modified_base (913)..(913): a, c, t, g, unknown or other
aaaaaaaaaaaaaaaaaagatagtcatccaacttactctctatgccttatttttcataaatagaaaaatttgacatatttcctttcatatataaatcaattaatttaaaaatatgaaagttaaatacacacctcaaccacctcaaccgaatttaataaataaattataaaatatttttgtaaaattaaagatgtcaaaaatagaattaacaatcttcgcctatgccaccttaattgataaaatattttataagaagaaaatctacataaagtgttagaaacaaaaagaatagagcatagaaaatactcattctgcatgaaatcaaactaacacataaaacatataactttttaaatgaaaaaatttacagactacaaaccaactctcctaagagtcttgtaatcaataatccaaaaaataaatactactcccttttattttgaacttttcaaaattttgcaaaatataatataactaaaaaaaataaacaaccatgtaaaaaaaaactagactaaaaaattcatccttatatattgaaaccgatagagtttgcagtacttttatatttatttttgttttgacactcttattagaaagatatatcaactaattagtgggctttaattacaaaatttaaacaatcaagattctagacaatttagaatataattaaactcaataatattttttccaatataagatttattaagtgacaacatgtgataaacttttttcaatttttttttttaaaaattaacaaactacatattgttttttttttctgacagaaaaatgtacacaaatattgtctatatatttgctgataataattaagaattttaacgtttgctaacaacttaataataccatatataaaaaggatttccctacagaaataataataataataatnataataataataataaaagaagtatgagtctctgaaagaaagaaaagttgtataagatatatatttatagggcaaaattatagtaggacttagcataagttccctaccggtagggaagcttttttggccattaattttagatcatgtggtcattatgatataaggtgtata

SEQ ID NO: 130537 - DNA, 698 bp, Cannabis sativa
ttaatttaattaattctattcctcttcttcttatttttatattttcattcattccatcgaactaaagatattaggagaaagaattgtatcgatggtactatgcattataaatagcacacacctcaccatgtaatgggacttttgacctcttagaattctcgacctaattagacttactcaagaacgacactactaggagaacataactttggtaacaattcttgagcattgatcgattaataaaaattgagcgattaactttgtgcacgtgttatttttctttagttaatttttatatgtttttttttaaaaaaatcttaaaatcttatgttcaatcgcttctaagatcttcttaaaaatattgacaaaaaaataaccttcacactttaatttacaccatataaaaattagcttataatttctcctagtgcaaaaatttgagacatgatattaaagatcaaaatattataattactataaatttttctatataacagtctcaaaatttattaaattactatctacacaattacttttcatctagactctcaaattataataaattaaaacaaaaagtgatttagtcagaagtagctaccgcacagtcaatctgacgaagaagcacataagcaagataatttctctttttataaaccttgaatgcaagtatgatggtattgagctatgcagttctttta

SEQ ID NO: 130538 - DNA, 947 bp, Cannabis sativa
  modified_base (642)..(646): a, c, t, g, unknown or other
tatctagctttcctatagaaagttgtagtagaattttttaggccagactatatttttgggaagacatgtgtaaaccaaaaaagaagggggtcttgagtttagaagaataattgtctagaacatggtcgcaattggtaaatataattggacaattatcttaaaacaagataatttatgagtgaggtggatatatagtgtctacttaggggattcagattggtgggattataaaatcccacaaaatagaacctagtaaggtctgagtaaatactcagaaggtgcgagactcaatctcgagcctttgttcactacaagaatttccatctttgctggcgcaattgctcaattgcgccagtaaatgtcaaccaataccggcgcaagtcaacatatgcgtcggcaaaagaagtcaaccaaatttgtttaccgccatcttttatcggcgcatagtatcgtcgacatgtcagtgaagtactataagttcatcgataaaagttggcaacccaaccgccaaaaggtaggaatttttggttgttcgagccatcttttgccggcgaacatacatgcaaagggtggaagaagaagaagcacggaacgagtggcaacaacagatgatgatgactcagaatcagatcatgagtgcgnnnnnacaacaaatgatccaattggccagcgctgtttcagtatttaacatgccgaatctgcctccgatcccatcaattccaccatttcagccttctggccatgcagttggttcttcctcacagacttcccctcccggtgatgatgacgatgatactgttgatttgtagttttttttagtttacattgtagataataatattgtttatgaattcaaaatacttttacttagtttatgacgtttaatatagttttgtaataatattataaatgtcggttttataatatatttgatattatatttagta

SEQ ID NO: 130539 - DNA, 777 bp, Cannabis sativa
  modified_base (682)..(691): a, c, t, g, unknown or other
tatttaggatgttaattaaatatacttgttagtaaatctagatcctggtaaaatatctccaacagatcttctagccgcccttgcccggacccacagccctgagccggacatgccagagcacccttgagtgagtgtgactccggggggacttgccaaagaagttatcaggaaccaggaggtggttctgattgaagaagaggaggacgaggtggttcctccactcgactggaagtgcaacagtgtcattttcgagcccaaatcttccaagaagctgaagcgggttgttacccccggttcgagtattgattcagggattccatctaaaattgatgagtatcctgcccctcctggcatccttctaatccctgcctatgctgacgaggaaagggtctagctctgtatcgccaaacataattatgcagtggaggaattgtccaatggtgacactgaagctgaggccctgaagaaatggttgagcgaagcttaagatgggcctttccgaggtgagtataccggaaaggtaggggatctgaacttagatcccatgactgaccggtttaagcgcttcttgggccctaacctggcaccatttgcttcagagatggtaagtcactttgctgctgatttggcccagcttcccacgaagaggtatgtggcctgtgttgggctttgtgccctaaannnnnnnnnnttttaatgtaatcttttatattcaattatcaataaaaaaacagatttattttcgttacttatttagtatgttatttggttcatgtg

SEQ ID NO: 130540 - DNA, 774 bp, Cannabis sativa
agcagaggttacgcaactgcaatcaacaacgccaataaaactacacgattacagttttgggtagccatatttttgcttttctactctaattataatgtaatactatcaataattattcaagagaaactttatatatatattgttatattatttggtataatatgatatatagtgaaattttgagtataatatatatatatatatatatacatatattagattaataatataattgaagatttggtgattttatttatgaaatttggaaattttaaaaattaagattttgatttttctttaaataatattgtaacttaatattttgggctttaatttcaatgtatatatatatattgaatttttggttaatattcggcgtaaaaaattttaatttatgaatatatatattctgattagtgttatgtattattgaatcggaattcgatagtggctttactgcatcgatatatttttttggtagtttgactttttttatataaatatatatataagcgttattttaattttcctttcaattacttatttctgcatgtagttgccttttgttatgggaaatttgaaattctatacttaataaaccctaaaattattttcctaaacataaatgttttaaaatttctcatatatgaccacttttctattatgcccaaaataccgtctttatttacttcatcccctccctctcagttcttctctctttccctctctcttcttttctctgctgcccgaagctacaccacaaagggaagctca

SEQ ID NO: 130541 - DNA, 1402 bp, Cannabis sativa
  modified_base (912)..(925): a, c, t, g, unknown or other
ataaatcataataattcacatatactgaactatataataatataattccttaattattcataattatctaattagggttttgctaatccacttcttacttctagggtattacacttactctttgtgttctcaagtgtggaaatctattgggcatgtcttgtttggttgtaaatacgctagataagtttggcgatattcaggttatcattttaacttcacaaggcaagctcaatggctcaaggggattttttagtccatttatcatctatcttttctcaaactgagttgaaaactatcatttgcatcatgtaaacaatatggacagaacaaaaaaggggtggttcacggtggtcgtgtcaagcctacattgaccctttccaactatgctgcaacttttctgttgcaatttaatgcaacccgaacaccatgaccccattatgctggtcccaatgcctacaccagccccaacagaaccatggaaaccgcagctgatggggaaggcctcaaattgaatgttgatgtagctgtcaagcttgatactcgtcgaactggtattggagctattatccgacgaagtccttgctacactttcaaagccactaccaggatgcttcaaatctcatgaaatgtaggctatgtctctatttcatatttactttgggcttctcaaatacagctacctatctcggaggtagaaacagatgctcttcgagttgccacagttgtgaatgacccaaaatttgctcaatctgctggaagttattttatcagggtctagatttactaataaatatgcttgaatataaatctataatctaacatcctaaatatgaattccctaaaacaataaaataaacacataaaagttgtagaaaactgtacattgatggcagcggaataatatgactcctnnnnnnnnnnnnnntaacccttgatcctttctatcgtagagtatgatcaagatctgaacctgaattctccttcaattgacagttacacaatcttcctcactatgttgattattgctgtaacatgtgtgggcatattctcaaaccaaggaccacgaaatttagtgaaaaaatactaagaaattcaaaattaatgatagaaaataataggttttcttttgattcagtttgccaaacaaaagagagtcttcagtcataaaacccttaatgttctattttaagggattcattaggtttaggattagagctaaatgggttgatttaaaagatccaatgacttaaaataaaccactcatggtcaaacccctataaggtccacgagttagatttttgtcattattttacttcattaatgaagcaaacttctttcttcaataataccattttttttttttgctctagttatttaaatattaattctatctatttaataa

SEQ ID NO: 130542 - DNA, 822 bp, Cannabis sativa
tagggcataaaacccaacaactgtttccaccaaacactgtaaaatgggaagcaaaagaaaacccaagtagttaataccctatatccaaatgacaaatagggtattcaggagggcctctcccaaactggtggagtggtccctgtcggacttgtcacaaaaaaggccaccctcacggagcaatctattatggtgacgaatcgagaacccaagaatacaacagaagtagaaagtgttgattttcccttcgcaaacaaaaagagaaaaggggattgtactagaaatttgcctaaactaagaaacacttaacctaagcatctgaactaaaacttttcttaaacaacagatgctcacaccgacctaggccctaagaaaaaaccttggtagagacatagcttcagaggtattccctcggggttcgtacgaaccatttcacacacaacaaccctaatatttaaatctaaaccctacgcgtgcaaaaaagtgtatttctaacaaacttgagacccatttcatgataaaagtagaaaatagcggtctaaatagaaagaatacttacttgcaaatggtttatagaagaatcgctggttgcttgcgattgttcaatctcatatgggccgcttgatggtctcgttatgactcgcctcaattgttggaaaatctagcaataaggttagaaaaagaaataaggtccctagttcggagaagtgtgtaagggtgagtgttattctaggttgagggttttttctgaggaagttcttgttgggttttgtgcactaaataaaacccatttcaatataatcggatttacttattaataaagat

SEQ ID NO: 130543 - DNA, 543 bp, Cannabis sativa
  modified_base (515)..(517): a, c, t, g, unknown or other
gtaaaataatcccaacaataaccagctctcctaatgcacagagcacccaacaaaatataacattttaaccaaaaaagtacaaaccggtatagtgccaacgcaaccccccaaagcacgagaattatggcatgtagacatgagtttgaacttttggaaaggtgaaaatgggccacgaaggatgttgcacatgtggaatgaagcttgaatggtgtaagactgagagatggtgaacgaagatgggttcgaggggaaatcaaaggtggtgataggctttgacatctcgattgggtcgaatggagagggttgggaggggtcttacgtttaagcgtgtggaggacagttggtggtggtcgggttttgggcagaatggaaaaaagaatggtagggcttttggggtctggcgtggaggaggaaaggtgaagatggtgatattgcaagagattgagggagatctgtgtgtggctgagcaagaaagggagcgaccaagagggagaagatgttgggttttatgcccnnnataaaactctttacaatctgattagt

SEQ ID NO: 130544 - DNA, 1639 bp, Cannabis sativa
tacatataattatggcagggaagaagatgagtatgtgtctattttgatttagttttgtaagagttaaaaaaggaaatagaaaaatatttaccaaactattaaattaggcacattatttgtaatctttttgacatgtacgtatactctttaaaatcaaccagttcagagcacaaaagaattaacgaagtattataacactatagcctatgatttaaaactgtcggctatagtatagtcaacgactttaaactataggctatagtttctactattaattacccacagatttaacctttcgataattatttttgttgacaattttctacagtcaccttttctactaaattttgcgatggttgaataggcgacagttatagagacagatgacaatacattagcgaactatttaaaatagtcaagaattagaaaacccaattctttagtagtgttaaagtggttcagtaactttgataaattattaaaagataacatacgaaacttaccacataattctttagaaaaatttatttatattaatttaataatttgcatattatgttgataagatactaatgagttacctttgtaaaagatatatttttacttttctgcataaaacaaataatattttcgttacttatgaaatcaataggattcaaatgagttactccttttaagataaaaatgatttcatatatattttagttactttatattaaaaagaatttatacgattgattacatatgaaaaaaaaaataaggacaactaattattttttagtaaaataaataacaaaaaaatattaaattgggccctacaaactctaagttccaattatgcaataggataaggtggaaaatgaccccaaatagataaataagttaaataaatgttatttttctccaaagtttagaaaaatggtcaaatataataaattaaataataaaaattataaaaatacatttattttatgttgatttttctacaaattaatataatgataaaattatgttatataaatttgtaagtatttcatattaatttattacaattacaatgaataaatatattaaatcattaaatatatacattgtacatatgtctgatcataaaaatattgatcaacaaaagaattatttctgtgtgtttatttactcaaatcagaatcaccaacacacagtaaactagacaatttcaaattcaactaaattaaatctaaaattctcatcattaaacctaaaatattacgttgaccttcagtcaacttggaattgatatttttaaccacaatgttatcttgattaggaaataacatgaattttcactgaatctttttaccaggcttgaaatataaatctcattcttgaatcaacaaatgatatacaacaaacaaacactgtaaactataaaataaataacaaaaaaatagctacacagtaaaccataaacataaaattttgtaaactaatttttccattgctaacacaaaaaaattacaatctaccaaaaatacacatcacaatactaaacaataaaataaaccctaacattactaacataaaaaaacaacaaacacagtaaactaagatggcgtttggtaacacttttttaatcagttttttgtttttaaaagtagaa

SEQ ID NO: 130545 - DNA, 1001 bp, Cannabis sativa
cgtcaattccttgagaactatgttgttcaaaagaaacccaaattcatttttttaagtgaaactttatgcaaaagtgacgttattgaaagactaagaattcgtttgggctttgaggagtctactgtgtggaggttcaaggtcataaaggtgggcttgctcttttgtggagattcaacgatggggttcgacttctcggtttctctcacaaccatatcgacattgaaattgctatgcccaactcccctgtttggcgtttaactggtctatacagggagccaaaccgtagcctacgattcaagacctggcagctcatcaccatcctctccaccgaatctctgctaccatggtgtatcataggtgacattaataacattggaaaccaaagtgagaaaaaaggagggcgtctgtacctttcttccttgatcgaaggcttccaggaggtcctctgtaattgcaacctcactgatatgaaactccatggtcatccctacacctgggaacgtggcaaaggcaccagtaattgggtcgaaattcgtttggataaggctcttgtttcttctctttggctcaacttttttccttctacaattctcacaaatggcgacttctcttcatctgaccacacgccactgtttcttgatatttctccagctgctcccactgttttggttcaccacttccgtttcgagaatgcatggactagagaacctctttgtgctcaaattgtccaagcctgctgggacaacaatgcccatctgtctcttcttgataaaatttccctctgcagcaaacaacttgaggattgggggaggagtttaacttgcaatttcaaaaagcgactcagacaaagcaaagccatccttacttctcttaaaggtaattccgatccttcttcaattgctaattttggttatgagcaaaataactactttgagattcttgctcaacaagagttatattggaagcaaaggtccaagcaattttggcttcatagtggggac

SEQ ID NO: 130546 - DNA, 971 bp, Cannabis sativa
taattcttttaaatatttatataataaaataataaattagatttttaataataataataataagatgactattgagtagtttttgatcaaagaatgttttttttttttaagaaggatgagattgaaagaatataagaagccctaaaattaattggtaaatgggcaattttaaaattagatgagggcaattgtgtcaagtgaaaaatttattagaccaaaattgtagtttcaagctaaaatctcaaagctagagtggggtaactttttctaaaagatattaatttcacttaaatttttggaaaagctattttttaaattttaccaaacacatattaactcataacttttttcaaaagtgattttacctttttaaaaagctctacaaataagacttaaaaggttgtaataggaggttgtaattaacatttattaagaaaaaaatacagtctaattaatggcacaactggattttttttttttttttgtaaccagtcacaactggatttttaaagactagaaatggtacagatcgatgagatctcagacaattcagatactaaaattcaattaagtactatacatgtacatccacacaaaaaaaaaaaaaaaacaatgaagttagttttcttttttcaaaatatatatatatagattgtttgttatttaaaagaggttttgtaattgagattgagaatcaacggactccattcctccagctatcttctcatcaatgccgtgttgtgacggacaacaaacgtgcttcaatttggctttgttctcaaacaagacaaacttgtatattttgtagtcttctagagtagtagtggatgataaatatcgttatgattgtggatgattcctttcatcctaattagtaattttttcccccgaactttgatatgtactaaatcgtgtttcctgaacattttttgccgttaaaaattcttcccgaactattcagattgttaaat

SEQ ID NO: 130547 - DNA, 928 bp, Cannabis sativa
  modified_base (151)..(154): a, c, t, g, unknown or other
tgaaacactttgcttttcgtgctatcaactcaaccctgccaacatccaaaaatctagtttctaggaaaatcatacattcatcggtctgtgatcgctgtggaaatctggatgaatctgtatcacacgccctgttctactgtaagagcattcnnnnagtctggaaaggtacgcatttttacccttatattttttctagctcttgtgaaattacttttcatgacgctgcacatatgatatatgtctctttaaccaaggaagatgtaaaactttttctttgtattgcttggtttatctggtacaacaggaacagagctcttaaagatcaagcacatgatcaggcccatgcgttagtgaacttagcgaaaagtttcgtggaagacttcaatagtttagcgtcggccccatctcctctagctcgctccagccaatcttcagctctcccaacttggtctcctcctgagcccggtctccttaagctaaatgtggacgctgcaatccccaagggaaggggaaaagttggttttggcggtgttattagaaacagtgacggtctcgttgtagcagccctggctctcccttacatcggaggggggaaagtggtcactcttgaagcaaaatcccttctccttgcgctgcgttggtgtatagatgagcatttccatgtccataagatagaaacagactacgaagctattacagatgccctgaatcaccccaaagaagatttatcggtgttcggagaccttatttgtcaaatcaaggaagctttgtctcatctccctgctgcccgtatttttcatgttaatcggtctgctaacacttttacggataagctggctcactgggcttcggggttagacgaagttgcaatttggataggcgatgacccctgcaatcttagagactttctttctctctagtgggctcc

SEQ ID NO: 130548 - DNA, 975 bp, Cannabis sativa
tagaattcatattaggttgttaaatccaacatacttgttagtcaatctagatcctggtaaaataatttccaacagggcacaccctttacctacctagggttatgtcctccacacgcttctaaggcccctgtactataaaaggacgatttgaccatccactagggggaacctgcttcatcatgcggtgtagagcgactaatgaggaccttcgtacgaccttggacacatgtcatctaaaggtctctcctttacgaaatagtctttacccaggctgttgagcaaaaagcatgctcgagggtgcgtacgcgcactattatggtctagtacaggggacaatatctgatcttgtgtcagaaaaaggtataaccgtccatggagcgctattttgtaaggagctgacgtatctaacgtatctggaacttgtaccgcttttcgggttccttagtgaaggatgctgctcccggaagccatttcctcttactaccctttggatccgagagtcatttcttttgattccctcagatgccttatgtagaaactgagtccccactctagtcgtgccacgtgtctaattaagaaaaacttggataacaattagtattaaactagtttacaaaatcacacacgtggcgttcctatgggataggacgttacagtttgacatgatgtccacggatgatagctgcgaaccaaagcctgccaggccaaaggctgaccggccatatgatgtccaaaagttggtcatcaagtgagtaaaaatagaataacatatctaaaggtgatatataattttgtaagtatggtataattattttatggttctatttaatttttaaaatatggtatatacaattttttaataatattatattattttttattgtacgtatacatattttgttgtatgatatatagtttttgttgtgtatagtatataatttatttaagataatatttagtttctattttattata

SEQ ID NO: 130549 - DNA, 910 bp, Cannabis sativa
cacaattttctctattttataaataatttttttctgagatcttttgatcttttttccatcttattcttttgatgatattttctaatcttcttctattttaaatctgtaaaaaataaaagttaaaaagcgtaaaattgctccaaacaagagtagaactaaattaaaaatacactaactcaaaataatattaaaaacaacctaagactaaacgtgcccaggatgacaccactgtcatcacttggaccccctgaagcaggtcagtttaagctaaatgtggttggagcagttttagcaaaagaggagaaaacaggtgtaggggctctggttcgtagctcagtaggatagatcatagctgcttttgccaaaagcaatcatggtatgatgcaatcaaaacatgcagaagcatgggcgttattgtaaggcctactctggtgtcaaaacaatcacattttaattcaccaagtggagaccgattgtttgaaccttgtcaaagacatcaaatctcaagacaacatcttatcaaaatatggagctcttattgatgctcttaaagaagtgttagcttcctttcccactattttcttttcacacgtcagtccttaaaggaatacagttgtgcacaaccttgcccaaatatctattggattagttgaaacttggagttgttttggaagtgacccctaccccttgctctttgtagttgttgggtcactctcccctaaaaaaaaatttattcagtttatatatatatatatatatttatatattgggagaagagggatttcaatttgggactcctagatagtgtgaacacttaatcattacaaaattttttacttatagtcacaataaaacttgtgattaaaagtaaaatagttgtgactagttataaatcaacattcttatgttg

SEQ ID NO: 130550 - DNA, 1113 bp, Cannabis sativa
atataaaaaaaaaatactcagactgaaaatcttattattaataaattattttacaatatttatacatatgtctttcagtataaaaaaaaataaaaatccattgtctcataattttttttcgtaacagattcaaattaatataataaaaccttaaataatcattacaataaaaaccaaaaacactcagcaaccacgaaccaccatcgataaattccacaaactgtcgtcgacgccacaaacttaaagcaccgtggttaacgaactacgacaaacctcgaacctccattcacataagaaaagaaagaatgagagagatccagaatatacgaagaacaaaattggtgtttccaaaaaaaaataaaaataaagaaagtgatggaacgatacttggaggtttcagagggtgtggagctcagatcttaactacattagtcatctgtcgtgggaataaggtcactaggctacttgccgaagaaagaagtggagatgaaggagagggaacggcgaaagagagagaacatgtgtgagaaaattatatcagatctaaaataaaaccctaaacgggataaaaagattagggaaacccttatatcctgattttttttgtaaaaaacaagcataaaagggtttttcctttaccctgtttggctctagcaaaacaataaagggtaaaaatttaattttttggtgaccagtcaaacaaggtccttgctccaaaatgtgatagaagacccatcatgggcatgtttgactagtcaataaaaaacaatctttcaattctattttagtgtaactttcatttttttagtgctcaacaaaacatggcccttgtgccttatatagaagtgggaaaaaaactatcaacatactttttatccaattttttatatttttcaagtataaaatgtgggataaaatgtccctttttgtagcagtgagtagggtgttacacattcatttgccgctatggcttatcaaacggtgcgtagttgatcacttttcagcgtcaagatctgcagaggacaacggacccagctctgtgtctctagtagtagggacctcctcttctgagatcgaggtcagaatgaagctatcttcctgatcgccatcgaa

SEQ ID NO: 130551 - DNA, 805 bp, Cannabis sativa
tcataagtataataagtataatttagtagtattaatcaaatttcttgaatttcttgtggttcttgtggttcttgtggttcgacctcacttgcgtgagtttactacttgattgcgtgcacttacgtattagttttacaattttcgtaacaaagctgatctctctcattctttgtagtttgttggggctttgctaataaagatgttctttcaaaaaaaaaaaaatatgactgatcttaaatgaataaatgattgattaattaatgaaatattttgccatataattatgcatcaaatttatgtataattttaagagaccttattggagaaaaagtaaatttatatactcatataataatatgataaaaaaaataataaaaaaaaaggtaagtcgttgttggagaaaaaaatcattctaatcattacccaatttaacataattttgaggatacaaaattatcttcattccttctatcaaaataaataaataaataattatcctccctcgtgtgggcggagaatactcgctccattaagacaagtccattcaaattttcatccttaaatgaagttgaagagtattattttttattattattttataaatatacaaaaataataaaaaatttcaaataataaaattgtacagaattttaaatattttggccatttatataattttatttatagaatagtttttttatattatactcttagtaatttgttgttgattttttattatatgtatattattttttgttgttgttttgatattattttccttttacttttgtgtagtttttttatt

SEQ ID NO: 130552 - DNA, 1065 bp, Cannabis sativa
ccataccctgggagagtgtatggtgaagatcagcaagaccctagagaccttggcaggctattcccatgtacggaagttggtctaggatggccaagcctatacccagctgttgtgcttggccagccagacttgtttgggcagagttcggctacctagtacttctccatggctggccaaacctgcaaagggcagggtctggctgcttttgatgcctccttagctggccagacctgcattgggcagggtctggccacccgtgactccacagttgactggtgttggttgtgtgtttattgggcgtagatcacagcaattactggagtttggtgaatctagatgcctaaagtgaccgacttcacttctcaattttttttggtgtttccacttgctctcgatcctcgtcggttgaagatcgacctctatacacctccctccctttagggaggaagtgatgtactctggccgaccatgggtacccttgttggtggctagctgaccaatggctgcacaataagggatgctactgagccagatatccttggtcagcctcccataccgctggtcatagggatattgttgttctcgccatttgacgtttgaggaaaggtctatcctccctctggcaggggaagatctgccctagttcctaaggaacttggcgacagtgttccttggagtggatctctaaggagatcctgacctcttctgtcggttctctgattgaagcatcttattaaaactctggcctccaagttatggtgatctaattctgcttggcaagattgaaggatgtactcctagtcatccatccatctcaagaattcacatctctagtaagcgtaaacattacaattaacagcgcgtggttcttcagttaggcttgcacaacctacaacttccctaactctggaaaactcaaggtcttctcctatgtccacatgaggatcttcaatttctggctcgcccacttcttggctagtctctttagcgtaaaactggagttgggtctagttgttattctagggagttgtcgcccctaggtccttcctgttgggttttgtgccc

SEQ ID NO: 130553 - DNA, 769 bp, Cannabis sativa
agcacatttaaccaatatttttttaacctagattgtaataattatacttcgtgaaaattaatagtctcgaccactattagagaccatagacttaataattttcttaatggtaccacatgttttcgaatttatgagctgtatacctcgaagacttaaagttaactaaggcaggcccgctcataggcccaataaattaataaattggcccacaacagagtcgacctatggctctggatccaaatgttagtccaacttagagacatgataaggtcggaccgtattggtcaaggaaggagcatatgcctagaagacacaaggtccatcaaagtgtatttggatatatacctttatgggataatccaaaacgggcaactaaagagacatctataagtatccgaaaactatcctcgcagcattctccaaacacaggatccctccaagtcaaaaatttatcccctacgtatgaggagtgtgtgcaccaccaaaagggacatactttggtccaatgccatattctttgacatttattacaattttataactcatagattatttactttggattcaattcaggcttttatgtttaataaatttggaatatagtatatatatatatgtattttgattgggtcttacacctaaataggtattattgagaaaatttgagattttatatacttaatttttctttctaattaaaaaaaattattttttttacattatataggttgaggttgttccattacataaagaaaattatacgacaaaa

SEQ ID NO: 130554 - DNA, 653 bp, Cannabis sativa
aatctgaggtcaacagtttagtgctttcattgagagcgagttataaaattatatgatcaaacgccatggttacacaaggagaatttcagctacaacttatgcctcattgggttttcctcaacaccttattattgcatatcctgatgttcgtgttccagccacgtctggaatctcttcaaacccgaaagatgtggccaaccataccatcttggaaggcaccaaaaacttggctaccacgacatatcaggtggacacttctgttattccattttttgcactatgacatggcaacatgtactagtgacatgtgtctgtcattctttacaattggctggagaaatgttccaacaaacttcaagcaacacatctacacgcacaaagtctacttgactaagcaaaccaaagggcagatgatccgagcaaagagtgaagttaactctccaagccgtgtatcaagacttaactacttcagagttgatatcgtgaagttcaagcacaaaggcaatccctacaattatagatattgtaagcaaaaggaaaacattccctcatgcatttagcccaataaatagtgatatagcatcattaaaaaaaggatcgaaagaatttctttagagagagatctaagagaaaacactcagagatttcattgt

SEQ ID NO: 130555 - DNA, 1107 bp, Cannabis sativa
atctttgacagaagggatgtggggaatagttaaaggggacttacaagttccagaagtattggcaccaggggccctagagttgggaatcgaaaaaggaaacttaggacgaatgggggtctgctccttcatagctttctcccttagggtcctccctgaagcagcctgcgcttgggcaaactccagctcttgttccttcttaaatatgtacttattgtatttttcttccgcataagaaatgatgtccctttagagcgccttctcggtctcaagattccaaatatgggggcaaagaaccttcgatagattgaagtcatccaccgattggttttttgaggttagcttggccctccaacagttgactatcgtgaccaagtctcctacgttcaactcatccttgttatagccagcttatacttatgcatggtttaggaagagttgagtgggggtggtgcggtgcatgggtggaaccctaacctagtccgtgagtagatccggacgctcgaaggctttaaagtcgatggagaagaaaaatcggtgacgatattccttcacattcttttgaaaattaaaaggcaccagaccctcgttggcagggtgggctaaaagtttgtaaataccatctttaaacttatccccttttttggggaccgacaggagttcgtaaaaatataaaacttcaatcagactgggtggggcccaattctttgcaacatagaagatatacaagcctcacagcaggcggtaagcttgtggaataagctggtaaggcgcaaggccaacagaaactataaaatctatgaagtagtcttggagtgggagcatggctccagacatcagatgggtttggcaccatgccccaaagccattgtagttgtggttgggtccttcattacttggaaggtgatagtgatggaaaaccccaacaatggaaggtttaatgccgacaatagtgatggtcttctccaactgatgggcgcaggttagggtcgagtgtaattcatctgcttcctagccattgaaactacatgtgaacttttcgtagaccactgggcccttcgttacttcatccaaagtggccagtttctttggccccttctttgaagattt

SEQ ID NO: 130556 - DNA, 937 bp, Cannabis sativa
  modified_base (638)..(640): a, c, t, g, unknown or other
gaggttccccaaaatattgtgttgggtacgtcctcttcgagtgcgcctcgtttcactatggatcttcaatgatcaagagattacaatggctgggattccaaatcacagctacaattgataatccgaatatatttacagtgttttctcctcttttttctctctgtttctctcagatttttgtactaaagttgtgtatttcttctttgttacatgaactatcttcctcagatcttggatatccgaagcacaacctatggttccaaaacttattccattgtaagcctcctccaaaaaccccccaaaatcaatctgtttcttctctgtgaaaactgatgtgattttgttgtatattgatctgcctctaaatttctcttgttgctgtagtactgatatgatgttgttgttattctgatttgatctgagttgttttctctctgatgctgtatttttagctttatatatgttgtagtggaatacagtaaatcagagagttagttataaagttctaacaaactttataactaacttaatgaactgtctaggtaaatagaggcctaaggccacataagctttatttactgcgttgttaatctccttgtaactattctggtttttacagtgaatgtggggatttactnnnaacaatttccacctaaatccccatatgcattgtgttgatgttgtttaagtgtatctgagggtcttagctcgaactcattaacggttttaccaacctatgtcaagccccaataagcttaggcaaagcttaaacttattgagggccacaacctttgtgcccatgtatgctgaattcacttcagtaggcactttgtctatcccgatctgtccttgtgaaattgtatccctgataaagtgatattttatctcaatgtgttttgtcttgtcatgaaaaaccgagtttttgcacaaatagatg

SEQ ID NO: 130557 - DNA, 1998 bp, Cannabis sativa
ggtggatgccacgaccctatgcacacatgggcgccaacggtccatgcaaaagatattttttgacaaagtttggccttattttgttttgttttcttattttcttgagtttaaggttttcatccaaacaaatcctatgtggccatgcaagccgcgattttccgttgcttgtggactcagtggattcctcgaccctaagcacacatgggcttcagtggtccatgtaaaagatattttttgaccaattttggttttgtttagtttgttttcttgttttcttgagtttaacttttggttttaatccaaacaaatcctatgtgtccatgcaagccctaactttctgttgcctatggactcgatggatgccatgaccctatacaaacatgggcgccaatgatccatgcaaaagatcttttttgacaaagttttgctttgttttgtttctttttcttattttcttgagtttaacttttggtttcatccaaaaaaatcttacgcggccatgcaagccatggttttccgttgcctatggactcggtggatgccacaaccctatgcacacatgggcgcctacagaccatgcagaagattttcttttaccaagtatggctttattttgttttttttattcttattttcttgagtttaacttttggttttcatccaaaaaaatcctatgtggccatgcaagccagaattttgtggatgacatgaccttatgcacacatgggcgcctgcggaccatgcaagagattttttttgaccaaatctagcttttttttgttttcttttccaaaaaaatcctatgtggccatgcaagccacaattttctattgcctgtggactcggtcgatgccacgacccaatgcacacatgggcgccagcgatccatgcaaaagatctttttttaccatgtttcgctttgttttattttgttttcttattttcttgagtttaaatttttgtttacatcgaaactgattccatgtgtccatacacgctctaatttttcgttacttgtgtactcggtggatgcgacgaccctatggacacatgggcgtctacagaccatgcagaagatttttttttccaagtttgtctttgttttgttttgttttcttgttttattgagtttaacttttggtattcatccaaaaaaaatcctatgtggccactgttttcttttgcctatagaataagtcaatgccacgaccctatgcacacatgggcacctgtggataatgtagattatatttttcgaccaaatttggctttattttgttttgttttcttgttttcttgagtttaacttttagttttcatccaaacaaatcccatgtggtcttgcaagccacagtttttcgttgcttgtggactcggtggatttcaggaccctgtgcacacatggccaccagtggtccatgtaaatgatcttttttgaccaagtttggctttgttttttatttttttcttattttcttgagtttaaattttttttcatccaagcaaatcccatgtggccatgcatgccccgattttctgttgtttgtgtactcggtggatgccacgaccctatgcacacatgggcacctacagaccatgtagaagatattttttgaccaagttttgctttgttttgttttattttcttattttattgagtttaaattttggtttacatccaaacaaatcctatatgtctgtttgagctacagttttctgttacatatggatgcggtggatgccacgaccctatggacacatgggcgccaacggtccatgcaaaagattttttttgaccaaatttggctttgttttgttttcttgagagtaacttttggttttcatccaattaaatcctatgtggccatgcaagccacagttttctgttgcctatgggctcagtgttgggttttgtgccctaaataaaaattatttcaatataatcagatttactaattaataaaagatcagaattcgttctatgttgcatggttcaca

SEQ ID NO: 130558 - DNA, 1390 bp, Cannabis sativa
taccacagtgtaggcaccacttatatagggatttgtttttgggttaattaattaattaattttaaaaaataaataattattcaaatttgaatttgaaaagtagttgagatattttcttaaatggttgagagattcccacaatctgttatagtatataaatatttataacaaaattcaattatattatttattcaaataatttaatatgatttaataaaaagatttaaatttaaataattaattaaaaaaaattttattgggtttatttaatataccgtaataaccaaattaaaaaaaaattgtactaaatttttctaaaagcctataaaaagattaatttgctaacctttttctccacatcactacattgctcatgtgctgagaatacaagaacttgacatacacttttatcctaccccacactagttcttgtgtgtagtaaaaaatctggaagattgaggtgtgagtttgacgtcaccgttccgaggatacaacaaacgaaaagactcaaggataccctaataggcttagagaggtaaatattattttcatctatttactttcaagtttaatatatatacgtatggtggtcttgggcatatggtacaatgataatcagtaacaatttccattgcgtacttcatttagtaccgtaaaaccaacagttagctctagagagcttgttgtcagataaaagtgacacaatggggttcgataattaaagtcatggtagcaactgaaaatatcaataaacagaaattaactattggttcaatacaaattcatacatatattttcaaagcaattcactgatgcaccactttctgtttcagcttctaagagaattttttcagtccaatctgtttcatggtcgtcttataagttatagttatttaagacatcctgcaaaattttgagagattcgaaaaaatttaacatgccaaaaatatggttcaaatattctgttgcaagtgagactcttttattttatacgtgtgtaaaatagattgtttgagctctattttgggcgtgttcaatttttttgaatttcttaaaattttgcaggatatcctaaataactacaacgtagaccacaagaaaaaaattggacttaaaaattcttccaaatgtcgaaaaagataggggtgcattgtagaattttttaataaaatatttaaaaatttaagaaaattctacaatatccccttaaaaggtgcacccctatctattttggtattcaaaataattttttagtcatattttttctcatggtcatttgtgttattgttatttaagatatcttgtaaaattttaagaaattaagaaatatttaacacgctgaaaattaagtttaaactgtgtgttgcacacatgactattttattttata

SEQ ID NO: 130559 - DNA, 508 bp, Cannabis sativa
attacttcttcaaagatagggtcacaactaactaataactaccaaaaattgcactttctttgtattttttttctctttttttgggttgaatatttaagtagggggcattgttattatgtactagtagtgtctaacattatttaaagtagtattttgtgattggttagtaattatgtaaaaaaaatatattatattaaattatatgagattcaatacttaattataccaatactaatattatacatttaaaaatattaacgatccattttaacaattctcaacaaagaaccatttattatcaatgattatataacaaatgtaattcatttttttttttttgtaggaaactcactaaataatgtcagttaagtcaatagtataaaatactataaagagagatattaacagagaaatattaaaagacgccaatagtgtttaacaccctcctatgtgtcaatatcgttattggtccaattaagtatcgaatctcatatagtttaatataata

SEQ ID NO: 130560 - DNA, 510 bp, Cannabis sativa
  modified_base (478)..(484): a, c, t, g, unknown or other
agagagagagagagagatgaaagcgcgtgagactgtgaaggcattaataatgtgatacaacttgcaagtgccattaattatttatgaaaaatgctaaaatctactcttagtattagtttattgatattttttagtagtagtatttttttaaaaatgctaaatatttcatttttcaaaaaaaaaaaaaatgctaaatatttctactatagttatctttctttaatattatttttaatacttttacttttaaaaatacttatagtacaacactctttaaaaatattataattatgatctcacacattattatttaatatattatttatttcaattataaatattatcacactaactttttttataaaatatcatcaatatcatgtagtagtttcaacataattttttttataaagtattgctattagtaggggtgttcgcggtacgggtggtgcgatttttaaccattttttcaaaccannnnnnncatgcggtttttccaattttccaaac

SEQ ID NO: 130561 - DNA, 662 bp, Cannabis sativa
  modified_base (222)..(229): a, c, t, g, unknown or other
aattaagtgttgctcacacagtgttgatattagtgtatgtagataactatatgcatgatataatgatgattatgcaattaggtttataataagatggtcagttttattaactgcagttgaggtacatgatagcaccctaataactataaattgacttgacccatcaaaccaaaatccaccatctcttgtattatgagccaaatatatatataaatatatatnnnnnnnnatatatatatatacacactcactcactccataagctctctctctcacacactcatgctttgatacttagaaagattcatggtgattcaaggtaactcacaatcaagcaaggcatgtttttgtataatttaatgctctaaataaaatgtgatattagttgtgataaatgcaatttaataacattcgcaaaattgcataataaaattcatcattcgacaattcacccctagtttttttaagtctagctagcttgtaatatcttgaagaacttttgggtgatgacattggtaggcttcaaatgatgatgcatgttagttagtgaaaatgtattcaatcttattctagctatttatgtaatcatcataatacaatgaggttcatatagggaaatttgattttctatacttaaaaaaccttaatattttattcttaaa

SEQ ID NO: 130562 - DNA, 1629 bp, Cannabis sativa
  modified_base (77)..(89): a, c, t, g, unknown or other
aaaattagtacaatgttaaaaaaaagaggtaaaaatgatagattttaaaaaataaggtaaaaataaaagaggacaannnnnnnnnnnnntagagtgtaatttcctcttttttggactcttattataaagatgaatgatatttttaaaaattattaaaaaaatatgtatattttttatttgggtccctaaaatgagtgggctctaggcacgggcctagccctcctatgtctagggccggccctggcgactattatggtcatacaatgtaaatttatagtagcatagtataaattatgatcgcgatcatatatataaggttattttgctaaggccgttttgattgggcacattttttataggtgatacttcacgattagttagcgatatctcttatattaaagttatattaacataagttatataagacttgatacttgattacattaataataatattaatatcgaaaaaagtactagacactattactaacttttaacaattttcatttgctaatagaaatatttaaaaagtcattttactaataaaattagttttaataaaagttattttaataaaagactcgcaattcatggtcatccatatctaacttgtagagagacaaaatttattcgcatatgttcacattttatataaatgcatacatataaatattattatataagataaataacgatataaatacttaaaattttatatttataatcggtatacataaatttaatgatttaatttaaaaattttgaaagaacagtttgacgtatatatatttctgttcagatttaataatttataacattgagtctatactaaaaaaaaatagaaaaaagttacacttatactaacgtggatacttataaaaaaactaataaaatttataacacttacgaatttaatattatatatttaccctattatatctaggtagtatagatcgaggatccgcaaaataatttttaccaactttataattttccttagtggttagcaaagtgacaagaacccatagtacgtacacataggtagatatcaatcaacattattatatatagtacaaattattacattattttactacgtacaaggctgtctctctccacacatttcatcatcgttacattattattatgaccatatatagtgcaaattacattattgtaccacgtacgtacaaggctctctctccacacatttgatcatccttatcacctatagctacctcctccatggcaaaattattaattaaacacctccaaacatggagggagagctagacttaaactttaaagagaaaaattaaattaggaggccaaagtacaaatttttaacaaataagaaaaaactacgtacgtacaatgaattaaattggggaggacatgcatgaccaccttttaccttcctgcaagtgtggacaataattaaattgttgggctccctttcaataaatgagcatttatcttatcatgataatgataatgacaattagtggtggaactagttgtattttttagtgttgaagtttttattattattatttatttttatttttttttgaaaaaaaagtactaatgattgttaggttatttttagtattaattttagattaagtt

SEQ ID NO: 130563 - DNA, 1135 bp, Cannabis sativa
tttttttaaaagaaaattttacatttatattttagcaaagaatcttttaccattattcttccattcttatcactgttttttgcacttattaatcagctttgactcatttttttttaaacagttgctcactttttattttttatatttttcttcttttatttttttttttcaaattctctttctcttttttatttttatttcttttctcaaactattttttttttatgtttgtatatatatataataagtgtacatttttatatcttattttttaacactctttctatctcttacaaaaaattaagagcactctttctatatattttttttttacataattattttttagatgttttgtatattattgagagttaatttataaataatttgtatattttaataatttaatatcttgttatttttttgttaatttatagttgtcttttttgttattttatagttatttttatgttattgtttaggtgttttatagttatttatatttatttttatatttttttttagttgttttcaatttatagttattttttaactatcactaactcaaaaaagaaaagagaaaaaaaagttgtaataaaaaattttatggaaaaatataatgtaatagtataaaaagataaatcaagttgaaaatattttgcttattccaattaaatcaatgttttgttatttttctattgctttgtagttttataattggttttatgttatttcttaataattgttttcatgttatttattaagttgttctaaggttattttttagttgattttaagttattttttcaattttattgaacacaatatttttgtaattttaaaacattaaacacaatatttttgtaaagttgatacagtaaaaatgtaaaaaaatttgtgttacagtattttttgtaattttttttccccattttacagtaatcttgtaagttttctatattttcatcatttgacccaattatttagattattgaatattgatattattttttttctattaaatgattgtattattattattattaaattttatatttatttttgtattattagtattattttatattttttttaataaattattaagtagatattaaatgatatattaaatttt

SEQ ID NO: 130564 - DNA, 682 bp, Cannabis sativa
aaaaaaatttaattttaatttaaaatacttaaaatattgtatatacaaaaattttaattataaatattgcttatattatttattttcttttttttctctcttttcgatcaatatatgtagagtgaaacttaattattattatgattttattaatcgatacattttacatatagtttttaaagacacgtgatcttaaaattaatttatataaattattttctaatatcaaaatcaaaaatattttaagtcaaattatatttgtagtaaattaaatttgatatatcattaattattgataagagatatatatacattaatgttaccgcaatagttagaaaaataatctcaatgatatctatataattagtcaattaattaataaatataattaaatttaatgatatctatattttagtcattttacaatgggtatttatatttttagggtgcacttataattatatgtagggtgtaaatattattacaaaaaaaattatttttagtcacaacaaaacttgtgactaaaagttaaaaattgtggctaattataaattattatttttatgttgtgatcactaaaagatctgtggctaataaagatattagtcacaaaaattataatttgttgtaactaaatgtatttttagtcacaatatttgttgtaactaaaactaaattagtg

SEQ ID NO: 130565 - DNA, 1501 bp, Cannabis sativa
tctattgacttgttattacctattgaacttaagactagatttttactagtgttaagataggttaccatcaataagagacacactaagggagtttaggtcccatccctcaaaattcatgctttaatcatgtacggagattaagcgatttgttataacctctcactattgatttcatgtgaatcatgcatgccaaaatataatgttcactttgtgaccacttttctccttaagtactcaagctttgaaaattcaatcataaaagattaaaatttacacaactcaaattctcaataattttgataccaaacatatcaaaattaataaacactaatttagacaccaaaaatgtctaaattatactttattttaagacaccaaaaatgtctaaattatactttattttaaacttttcacgttggagtatcacccctacacttttacatttcactatcaagataacgtcttgattttaaaatatagaagactgttttgtctctataatttctcttaaatttaattttcttctttaaattattttcaccaaaatttgacaccaaatatgtcaatattttcacttatgcacatagtcaaacttgattttgaatttgaattcaaaatcaaataaattaatcaataatgtctcaacacatttttgattaaatttgtggctcaccccacatttctagcataaagtgaaatttttataaaatatcacttgtctatttttcccttgaaatgactctttaaggtcactttgaaaaatatcatttaatatttttagttttctcaacaaaattaaaatatcaaactcacatcaccacttacaaaatcatatttaaacaattaattatgatttaattaaagggttttaactactataaatagaagcctgatttaagaaatcatgacacttcatttactctattattttcaaaatacctagagagtggaaagtaaattgtttctccctcaactgttcttgctcatgtgttgagaactcaagaagaacattataaactttatactaatagcccacattattccttgtgtgtggtggaacgattggaaagacactggtgagagttcaaattgcatagtctggatttagggatataacatacgagaagttttgaggataccctgatagtcatcaagaggtatttattctaaacttactatttattttgatttaatgtacacacatctggagatccattaggatatggtacgatgataattagcaatatgaaacccttctactttgtatctgatttagtaccataaaaccaacaagaaggaccatggttagaaactagatatggaagattaaaaaaagagaggaattaaaatacagaagttggctccacttacttgcaatgttgatgtccaaagaagtattgaaacccttttcaacgggaaacccgtggtgtagagccagtaatcccgaagtcatgagtgtgcttcatggagctgactaggtagtgttgggttttatgcctta

SEQ ID NO: 130566 - DNA, 1247 bp, Cannabis sativa
  modified_base (37)..(37): a, c, t, g, unknown or other
  modified_base (739)..(740): a, c, t, g, unknown or other
gtggcggctgggatgtgagatagagagagagagaganagatgatgcagagagagaattgtgaggggtatttttggggttttgaaaaaaaagtatagtttttgtagagtttaagttttaagtttaataataaattttttttatttttttaagtatataaaatcaaaattcccttatataataagtaataattcaatttgtgcattgctattgagatttttcccacaggatttaaggttataacaggttttaatctaaaaaaaaatgtgtgaaatttgtcttttattccaaaaaaaaaaaaaaaatggagattaaatactagcacgggatttgagacaggattgtccctagcatttttttacttgaataaaaaaattattgattaggttgtttgagaaaaaaaaaaactatttttttttattaacttttagtaagaatgcacacgttattattaatttgtatgttacaattttttaagaaaaacgcttaaaaaaaagttttattaaaaaaaaaaaaaaaaacctagggtcttaaaacataggaataggaatctacatttctctcatgcgatgactttgccggaacccgctcttgatggggtaagaatttcccatttaaatgggaaacaggacgcgaacgaggattatgttttgtccctaaatattaaaagaagcgggacgtgatcagacttcccgttctaacaggaacttgtttagtattttataatttataatttatgtnngtattttttaagtatattagtattatttttataatttttaaattgtgttttgaataataattactttattgaataataattaatgtataatattttaatttttatgtagtttaatatttttattataaattttaattttttattaggagattctttatcgcgtcctcgctcccattaagagattctctgtcccatccccgataaaaaataaacgggaatgtaaattaaaattcttaaggattagaaacaggacagtactcccagctaattgtcgtttcgtgtgcaggagatttccaaacatataaatttatattctcaaaaaaaataaaaaactaaaaaaaaataatatatataaaatatcttacatattatttttttcatctacaacttcactactaaaagttaaatttaaagttaaattattaccaaaaaatataattttagcattaattttttggggttttttcatttttacactcaaaacaatttttttttatatttttacgg

SEQ ID NO: 130567 - DNA, 855 bp, Cannabis sativa
ggacaaatgtggttgatgtcataactgtcataacagaaaaaccgttatgatagttttgacatgttcgagctggtgtgagggagattcagcaagtgtaggtaattcaaatgtgaggccaaaaataacaattcatccacctttggctttacatttgaattgcataaaccctgacattgaaggagctgttctggtcttgcgaaaactcagcagtcaagtatatttagcaagttcagacaaagtctgaactttgctagaggaacatacttggttaacatgtctgctgggttttctttggttccaatcttcatcacttgaacttcaccttttgcaattacatctttgataaagtgaagcttaatgtctatgtgattagacctttcatggaacatggggttcttcattaaatgtagtgcactttggttgtcacaatgcactacaatgttttttgtattgaaacccaattctgatgtgaaaccccttagccaaattgcctctttgattgcttctgttgcagccatatactcaacttctattgaggataaagctaccaccttttgaagattcgatttccaactcacacatccaattagcacagtgaaagcataccctgtgatggatcttctaatgtcaatgctccctgcataatcagagtctacaaatccctcaacctcagtagttcttttgttgttgttgttgtagacaagtcccaaattcattgtgccctttaggtatcttagaatccactaaaaagcagtccaatgtccatttccaggatctaaaatgaacctactcaccatgcttagaccataggcaaggtctggtcttgtgcagaccatacagtacatcaaacttccc

SEQ ID NO: 130568 - DNA, 595 bp, Cannabis sativa
tgatcgtattttacgcgagagtaatgctcccgcggagttcatttctgtattgatgaacgatttgaattaatgaaattttttctcattttgtcaaaaaaaaaaacctaccttttagatgtttgtccaactttaatttaggttattattttaactaaatgtgtgtatataaaaaaaatcaaatttcccttttataattgttttgaaaataattagagtagtttgacaaatttacttgttttaaatttagtgtaacaataatttaaaatatattaataatactatatatggtagcaatatttaggtttgcttagtctacttttagaaataaagttactagtataatgcaactttatttctaaaagtagactaaattaaaaatataataataataaaaagaatagaacatgacaatgccaatatattttatggcaaacaccaaactcatcagcattgcattgtgatgctcttacaaagatacacatataacatatttctttgggaattttacaaaaatactgcttttggaccaaaactttacatttatactgggacacggcaaaaacaacatttatactgccccagcccaatttcatta

SEQ ID NO: 130569 - DNA, 726 bp, Cannabis sativa
  modified_base (686)..(689): a, c, t, g, unknown or other
aaatgaccggacacggtattctaaactcctttttttgtttcttttatttatttattaaaggaaataagggaaaaataaaataaataaataaacatggtataaaaacaatgtgttgaaaccctaatttcattcccactaactttttcttacaaacaaaaaattttctatctctatctcgtccctatctctctgcctcccttttttttgttgcaaggatggtaagccatcaacaaccctcctctaccccagaaagtccctctccacgtcggcgtataagtcgcctacatcaacgaacccattccatccatcgaccccaaccccagctcgggtaacttctcattttaaccgattcgacctgaactattggattcaaacactgcattactacctgcaattcctacaccacaacactcaaaagcccgcctatgccctgtgcgaaaacgtcctggatcacagcctcagtctttatgaacgaaaaagtcccaccagagatctctgaaattgagtgcatggacgaggcatcgtggtctgcaccaaacccaaatgcgtggaccggaatctggaaacctacattgtcaccgccatggattgacagagggaggagcaaccagtagttcggttgggcctgattcgttccagagccatttacagtgtatttttgttctattaatttttgtatttttttnnnnttagggattttagatgtttatgcccatttgtttataa

SEQ ID NO: 130570 - DNA, 1124 bp, Cannabis sativa
  modified_base (972)..(976): a, c, t, g, unknown or other
aattatttatatatttacacaatatgcttcctatactaattttattataatcaagcttattcacatcacaataaacaaatctaacttttagtctagtaaaaaaatcataaaaattaaagaatgttatcttaatgataaaaataataatttagtgtatgtaccactaatatattttaatcttaactaattatataatataaatatctataaaaaattaattaaatacaattactttttagccaaatgaaaaaactttactagagactaaaattaataatggaaatttttgttgggagaagaagattatctctatataaattaagaattttggtaagtgtgtgataatgtaaaaaattcataacaaaaaaccaagaatcgatgaagagataaagtgactttcggctgagatttattgaagccccttacatatataaatatagggaatgttgacattacttttgttcttattatggggtgcattttttgttttgggtacttgtagaatttacaacttttcttttatgtgaaaacacattttgaagttcccgtcttatgaatggttaatgataattcaaaaatattatattaaattatatgagactcaatacttaactgtaccaataaaatatgatcgatcttgtattcaaatgagtcttaggaaaaaaaaaatggggccttattataagaataaatagtatttttaagaattattaaaaaaatatgcatattttaaaagttttttttatttgggcctctaagataggtgagtcctaggtgcgtgcctagcccgccttagcctagagtcagccctgccagtagcgataacgtaacgtccccgcttcaagccttcattggatccttatatccacagaataatgactcttatacacaagtacgtcactttggctgcttcctggactgatgattgaccctacagaaagtgtttccagcatgttttgtcctcactcgcannnnntcctgagaaaacttcccaagaggtcacctatcctaaaattactctatgtcaagcacgtttaactgtggagttctttcgtgatgagctaccaaaaaacaagatgcaccttgttgatatagatagcactaatcaatccatttaagctctc

SEQ ID NO: 130571 - DNA, 817 bp, Cannabis sativa
taaatttatgaattacatacacataattatcataatatttttattaaattaatctacacaaaagagatcactttggtgatattttgtttcaattaatttaattatttattagatatccttaataaatattaaaccaaaatttgaatttaatcgttaccgtattattattatttaaaaatattatatattttaataaaataataataataataattaaacaaatgaaacaaacgaaaaacagaacagaatgcatcacatgcattctctctggcaggaagaaaacaaatgaaaaatatatattcctaaatcatatatacaagaaattactgtatatatgccacataacttaattgactaacataattattatatatgagattagaacacaaaacttcaatctttttgtctcatgtgagacttattatacgaaaatagttttcgtattcaataaagatccaaaactgtaatattgactttttaaatgatttgcatgcgtacatacaatacatcaacaataataaaacaaagaatcttttcatatacctttcaaaaaaaaaaaagaatcttttcatatatatatatactaaattagatagtatatatatgtattccagaaaattaaatcgcatatatatacaaacttcggcaagcctctatcaatagtcattcgccattaatgtatatatatgtaaacgattatgatgaaaagatatatatacggcatttaatagaagatcaaattactataaatcctcaagaattaatttagggaggctctgataccacatgttaaaaatactgtaaatctgtatatagc

SEQ ID NO: 130572 - DNA, 653 bp, Cannabis sativa
cgcaccaaagttttcaccatgacagcaaagtctttgttcttctctggctctgacaaccacgacagcaagttctgcattcgtctctaactccaactagtttttgactattaattcctctagttgaaggccaaggcagcaccactgactttctcaatcgaacccaacatttgcatttgaatcttgagtaatgggtttgggtttcaagtttatattttgggttattttttgttgtgatattcattgattgaataaggaattttgactattgattatgtttagggattttccattatgagatctttgttactgtttttttattctcatggtggtagtcttgccaggattggggtctcgtcagggtttgggtttttgttggtggaggtggtgttgggttttggggtggggcttagtagatggtggtttttaggggtggtggtttctaggcatcatgaagaagaagaagaaagaaaatagaaaaaataaataaataatttatttagtttttttttttaaaaaaaaaaactttgaattattttcaattaaaaatatgattatgaccaattatttgttaacatgtgttgttgcccttgattttgcccatgtggacctggataaggatgacacgtggatacgaaaaagaccagcacttatgg

SEQ ID NO: 130573 - DNA, 958 bp, Cannabis sativa
  modified_base (886)..(914): a, c, t, g, unknown or other
ttttatgtgtttttatttatcattttagaagttcatatttaggttgttaactcaacatacttgtgagtagatctaagatcctggtaaagttaattccaacaactccttcttgtgttggaaattttagggacaagtgtttgattgaacttactacccctagtctaattagtgttgggcggcccatcaatgcattgtatattgatggaataccaacaactaagaactcctgcatatatatcgttgataggggtggctctcctacagtcagtggaagctcgatgatgcctaggttggcaacactgtcgcctgtaaatctacacaagctcaccatgcatggtttcaactttacatcctctaaccccatctttttcaatgtgtccttgtaaaggatgttgcctgaactcccattgtctaccaacacctttttcacccttttattggcgagttggactgttatgatgaggggatcaacatgtgggtattgtacgttttttgtatcttcctccaagaagataatcagaggttcatttgattttgcccttttcaatggctctggagcaaatgtcgattgcccattctttacttcatttatatacctcatttgggcattattaatattttttgcaaggtgcagtcctcccgagatgaccaggatatccttgcccttaacaagaggaggtttcattctctagttattcgggttattagggttgtcagcttggttaggctcgtttccttgatttttaacatactatctaaaatatccccgcgagatcaaactttctatctcgtctttcagttgtcgacattcctcaatagtatgccctatatctttgtggaatcggtagtattttgttgaatctcgtgttggaaatattttaccagnnnnnnnnnnnnnnnnnnnnnnnnnnnnnttaacatcctaatatgaattctaatataatgaaataaacacata

SEQ ID NO: 130574 - DNA, 584 bp, Cannabis sativa
acaacaatcccagctgctgctctcaaatctttgaacgctgcatccacaaaaagaaccgttttgcccacataaagctcctcaaaaacatgctgagccgcctccgaattaggccgagagtcccacaccgacaaaaggcaagcggcagccctttgaactctagccaacacgcccctccaagacgggtttatacgatcatgaaaagctcgattcctagcagtccacaactcatcaaacaagcaaatcccaaatctactgaactctctgatatctcctacatccgcatcactcatgaaatcaggagataaaatccattcaaccatctttctcggggaatcaaagtgaaggttctcacttctaatggaccagcggctagcaaaccacactgtcttggcaagagggcagttccagaaaaggtgtagagctgaatcttccgatgcgccacaaataacgcagctgctattattaccaaagatcctccctattcggctcccaaaagggaggatatctttgcaaagtttccagagaaacaatttcagcctctccgtgatcttgagcttccaaattcggttccaaaacaagtccgg

SEQ ID NO: 130575 - DNA, 936 bp, Cannabis sativa
tcaaatgtctcaaaagtaaaatcaatcttgtttagattggaattcttttgtttaataatagtagtgtgtgaatgaataagaaagagacaaagaagtatttgtagaaacataatcttctttatcgtgaaataaataataaaatagagtgaaagggtatatatataaagaaaagcaacattaataagagtgttttgccatataattgtggcaaagtttctaaaaagaaaatttctctaaaaattatttctgtaaagttatctgtctcacggaaggttgttctcgaacatctttcttgctatcaaggaagaagtctcgtggaataataattgtcctcttagaaggttgttctcgaataactatcatgtccactccgggtgtaatcttcaagaaagctaatcctccttcggaaaggagttccggttattagcaagttgtttctcctagaaggtagtctcaaatagttgactccatctagcttgttcctatccgggatggtccttcaaccagtgccttgatccgtgactccaggagccttcatactcgctcctagatgcactcctacttatggtgatgtagagatctcgctcaaaggagaggtggttaagttatttattgcctaactaacttaacaacctaagttcttgcaactaccaagtttaggatcttgatcctaaacctataaataccaccaacacttatcattctgagacatcgatcaaattgagagagagagagagagagagagagagagaagatagagaggtacagagaaaagagagagattgtgtttgaattttgtaagaagaattctctgtagataaaaatgttttgggtaagagtgtgagatgtaaaatactttgagagaactcattagagaatcgatctcgtctgtatttgtacttgttcttaatgaataaagaggatatggtgatgttt

SEQ ID NO: 130576 - DNA, 710 bp, Cannabis sativa
atcagatctatcccagttgctcaagtggatacacaaagccaagatcagtaagtttaagaaaaaaatattggcagctgctattgccctcctggtttactcgatttagcatgtaagaaattaatgaccaaatatagaacaaccatacagaaaatagagatgtagttgtacaaaaaaaattaaaaatagtgtcaaacatagagtagaattgttttggccaaaaaagtagtcatcaagatcgagaatggttttaaaaattgtaaaaaagttgttctagaggtcttttgtcaatgatgctctttctttgtaaatgtttgtaaaagatttgtggattaataataaatttcctgatttataaaaaaataaataataggtgatcataatcatatcgccacatgtttaactataaatgcatataaagccaatacattaattggattaacataagtcttcaagaatataataaacttcgaattttgcatgcaattttgaatatttcatacctatcttgaatatatgctaacttgactatttcataaattagcatgcaaatcaaaatttggggtaaaaattgagtttgatgatattatattatggcaactttttaaatatacctatcctctatgaaaaaggacaaaggagagtaaacgagtacaaataataaaatgtatgttgaggggacccatgtctacatatatatacaatatatatat

SEQ ID NO: 130577 - DNA, 580 bp, Cannabis sativa
ggatcgacctcactctttgtgagtctattacttgttaatgatacgtatacttgcgtgttgcaaattaccacaacacttaacgtctagtcttgcctccaacattgtcagcaatacacaatgtatttcatgtctctatgttaagaaaatacattttaaacccaacacatatcttgagttgtgaagctttagagctccaaccgaacctgtcttacgaggagcaaccaattcaaatccttgataagaaagataaagttcttcaaaaaaagatcatagtattgttcaaagtactttagagaaatagtaaagtggaggaagccacctgggaattagagtctgatatgaggacacaatatccaaagttattcaggttagattttgagcaaaaaatctttttaatagggggataattataatgacccgcttatttatgagaattagtagctatttaagggtatatttaatttacttatcattatatgcctctttatagataattaggatttattgtgagaaatatgctttaaattattatttctcaatttttgagatatatttgaattctagatttattaaatatgat

SEQ ID NO: 130578 - DNA, 518 bp, Cannabis sativa
atgtgttattttattattcactttatattttatgtaatacaactatacaaatcgcttctaaacattcttccaaagtcttgtttatctccttttccctctacatggcgtggtttttgtggggaatgtgaaccccacagaaagtatattctgaagaacggttggataatgtgggcggggcctaccaagcctcaactgcgagttttgtcactggggtggccctctatactagcagcaacctcttgcctttgtttattcctacgaggatcgttgtctcccacaacttttgaactacagaccttctctatagcaaatctaaaggtacctgcataagccagtatgtgattaagcgggtttacacaagacaagatgtcaattctccctttttgacaaagactatacaaacaggactaacattcttgtaacgtccccgcttcaaacctctattgggcccttacaaccacggaatgaatggctcttatacacgagtacgccattctagctgcttcctggattgatga

SEQ ID NO: 130579 - DNA, 1533 bp, Cannabis sativa
cctcctaaaagaattaattaagaaatatgtaggtgtatatggagacttttctagttattgggcttaagtccaaaactaaaacaaactagaaaactctagtaaatttgagttgggctatttatgagaaaaaaaaaatttgatatatatcacatgcaaatttaattacactaaataagatttttaaaaaaaaaattcttaaaatatgagataaatcatcatggataagaaaaaaatcacaaaaaactcatatataaattttacttttttataatcaaaagtagtttcttgatgaatgatctttggtgaattttgctctgactgagtatcaccagatgggtggatcgccagtcgctgtttaccgaatgtagaacaagtgaacgaaggtggataggtggagttgttgaggggtgatggagttagggtttgacaaagaagaagaagtgaaatttttatttttttaaaattgatttatctaaagattaaatatgggttgtgaaaattaaatttacacatacatggcatagcaaatacataaaatagttcaaaaataaaaaaaaataaaaaaataccataaaaaatgaccaaacttaaagctgctatatttaagtaaaaaaaataaattagccactataaatacaccttaggacctaaagtgagtgtgtgcacaagtgtcttctaagtgatcaaacaataaagagtcccaataagtaaagtgtgtgtcttaaagagtattaaacatacaagtgtgtgaaaaattataggtgactgctccaaataaagtatcaaagtattttaatagtattctggttaaataatatatataagttttggtgtaattacttataataaaaataattatatttttcacgtgttatattgtcttataattagtggtatcaaagtaatattagaaagagaaccataaatcaaagacatgaaacaagggaaaggattacgatggaatagtaggactagggctagagaattattacgtatttatttattaattttgtgtgatctaccacaaaaaacatttacttttagtgataattttttagtcataacttaaagtttttgtgacttaatgtgatttttaatcacaacaaaaaattgcttatgactaaaacatagtatttaatttagttacacgttgtcactaatttagttttagtcatcaccacaagtactgtgactaaaaacatatttagtcacaagaaactgtaatttttgtgactaatacttttagtcacctttagtcacaacataagaataatgatttataattagttataattttttacttttagtcacaagttttgttgtaacttaaaatattttttttgtactgatcttatagataaataattagtactaaaattttaaattcaaataatttaaaatctaccctaataagttgtgcaataaaatgtcttgattttgtatggtttattaagttattaaacttgtttcatttgtgtctatcagagtgttagagtttgactcaaattatttatttttttctttatttatcta

SEQ ID NO: 130580 - DNA, 2002 bp, Cannabis sativa
  modified_base (1481)..(1484): a, c, t, g, unknown or other
aaaatccagcgatgaatacttcccagactacaaatggtgagccgcaaaatccccggtcatgagtttcgcttgtgggcctagcgctgggcgggcataccttgtctagtaattcatcaggagaggtcatacctgatagttccaaccaggttaacggtgtcattgcacctgtcaaccaagcaaatcaattactaagatagccaggcgcttctgtattcgataggttggggcgactcatgacctaaggagcgatataaatggaaggagaggagtagacgattacattgtcacgaagatcgtacagcccggagcccgtgctaaaatccccgctcaaaaagatactgatgtgatccaaatcgactagaatgtcgagcaggttagtctagctgtgcagacacatctagacgaactaaaaaatatgttccaaggcatggctggacagagaatcaatgatctgagctggaccgagcacgttgaactcccttctctcccgagataaatcttctagcgttgccccacaagtttaaaatgccaacatggaaaatgtacacaggaagagaagatcctctttcccacctcaagtatttcgagatgcaaatggatttgcaggggatacgaggggatgtgtgttgcagaatctttcctgctaccctttcggaagccgcccaccaatggtatttcaagttggcccctagaaagttcaactcatggaaagccttctctttggaattccatgcataattctgctcctctcgccaacttttgcgcatctgggagacctggtcgaagtcaagcaaagactaggcaaacctgtcccagcatacatcaacagattcatgacggaggccaccaaagtttcgtgggtaactaaagatggaaagtagtttgcgatacttgggggcattgaagtcctcggtgaacatttgaaggacaaaaggaagaatggcccggtagactcaatgagatattttcttgaccgtgctgaaggcttcatcaatctcgaagaagctatccaatgagcgcaaggtgaacaaaatcctggcaagtcaaaggctccttccactggaatgtccgcccaactcccccattacccaaatcattcaagctcaaatggtaaacgttccaacaacaacaacaggcaagggaatgggaataagggaaagttcaccaacaaaaccgagcaagctccccgggataatcaagcaaagtacactgcattcaccatcttgactgaggatatagaaagtatttacatggccactcagtcactggccccgtacaagaagcccgggcccatgaagaaagatgtcagcaacagagacatgacaaagttttgttgtttccaccgagactacagccacgatactaacaaacgcaacaacctgaagctggaaattgaattcctgataaggaaaaataacccacacctgcagaagtatgtcaagaccgatcagggtcagaggaacgacaataaccaagatttnnnncctccaccggtagatggacatctggaatttatcgttggaggcccgcatattgctggagactcatgaaaagctcgggagaggtatgcccgaacagcagcacgaacaagaggaagttatcctgaccgtagaagaaaggaagcccaaaattctacgagcaggagggcctaccataaccttcaacgatgaagacactgtaaaaatcaggtttctgcacaacgacccgctggtcgtggaagtccagatagccaataatggtggtcagaaccatgattgataatgcagcctcttcaaatatatagtttaaactggtgatgaaaagatgggactacagctgaaggatctaaccccatgtctcctgcctgtctatagtttctccggtcaaggagtggcacctctagaaaaatttgtctacccctcatcgttggacaaattccaacaagcatgactatcatggcacagttcctggtattagatgttcctttagcattttaacgtaatgctaggccgaccagccttgt

SEQ ID NO: 130581 - DNA, 606 bp, Cannabis sativa
caaaggtttcaatagattttaagattatcattattgattaataataataaaaaagcaatagtcttctacttggtaagaatacattcatttagcgtaatcaacactcaataacaaatagttcaaaatgaaaaacatttaaataatgtaatatataattaatccgccagttttcttcttatatataaacatctgagtttcaagagtctggacacccaaatatcgatttccaaattaaaaaatataaaaatggatggattaatggtgaggatgatgaataagaagcaaatgaaaatgggtatgtttgttgttgttatggtgggtctgctaaaggtggcagctgctgacacttacaccgtcggaggtgatatgggatggactaatcctctatttggagaggcagcctactctgcttgggctaaatccaacagatttgacgtcggcgatgtaattggtaagctattaacggattattatattattatgggtaaataaaagggaaatgcacaaaaataacaaaaaaacaataaaaatacagttttatggaattttaaacatttttacgattttttttttattttatttacataaaatagggtttttttatgt

SEQ ID NO: 130582 - DNA, 956 bp, Cannabis sativa
cctaattattatgtattattattgagtttgatgttatatacaaattgatcttgggtttatcattaatttttctaacatgtggtatcagattgcctaatgtatatgacttagaacctataatttgtattaacaattaatatgtatatgttaattttcttcaattgcatattaatttcgctattattttatgttgaattttttatttttaaatcttaaaagtttaatagttttattcatcataaaattctctttctattgatcttatatgactaaaatcgctgagtaaattaagagaattttaagaataaacttttagggtttatgtattttttatgaaattaattttagggtttttttgattccattagttattgactaaaattgattgtgcaaaccttattaatgaataatcgacaatagttttacaacatttatttttcgaatggatgagatataataacaataattatatattttagttcttagtttttagattgagtttcatgtaggtctcttaatttttttttttgttttttcttttttttgatgtttctactccaaatcaaatgcatgaatctatttgaattagagtcacaatcaaaactactcaaattccattcaaaatcgggcattttttggccgaaaaactacctccgacccgatcggatctgtacaaagcccactcgcggctgccggagagtgagagagagtgaggtagtttcgtgactccattttcgacgattcttttttccagcgtgtttagaatttaatttatgttttttgtatgatttttaaataagttttttgactccgattaataattattattattttaatcataattatgtagttaaaaagttattaaaaataatttttgatgatttttcgaaatctgtcgatcatagaaaattttttgagtttcttctcgttccatatgacatagtcactctcttatt

SEQ ID NO: 130583 - DNA, 1854 bp, Cannabis sativa
tttttagggtagatatggtatgagttagatatggtatgagtgtaattaatatggtatgagtgtaattatttgtttgtttgtgtaattatttgtttgtttgttttttttttttttttgataaatgatagcgtaattatttgttgggttggagcatgttgaatgaattatttgagttattttatttaattagtttttgtatgtgagtttttatcttagttgttttacggaactggttttttgtctcaaatttttaactagttgataaatataaccagtttatttatttgtgtttatttattttattacggaaccagttctttttcgtatttatgcctcaatattttttagaattaattcacgtttttttttaaattataatcagttttatgaggtattttgttgtagaactagttttgtttttaatttatgttttagtgttttaagaattgattttctctttattattttaattgtaatcggtttgaattattgtgtgttacttgtttgtattcatcatgttatataagcggtttgagttatttcgtattatttatttttattcattataacactgttatagaaccggttctattaattataactagtttgagttattctgtgttgtttgtttttattcattatgttacaaaaccggttatatttcaattataaccaatttaagttatttgtttttttattcattatgttatagatccggttctatttttattagttatttctgagacatctactcgtggtgacttttccagtgacttttatggccacggtgacttttcggggacggtggcaataactttttcgatgacttttttggcaccaacgatttttctgacaacttttctgacgaaacttatattgttttaaaaatatagaatttttcactttttttaataaaaatatggcataaaaaagcccatataaatatataaaaaaaatccataattccatgatattaattatgccataacaaagtgaattatactatatttcccatatttattaaaaaaaaaaaccctaatctaatatataatcatagttggatcggatcagatgtaaattttgaaaatctaattagatcggattagttgttggatgagacatccaatccaatgaataatcgaacccaatccatttatcatccagttatatttatatatttttaaaatacatttataattttatacatttaatatattttatgtaaaaaaaatattaatggattttattcttattggtcacttgcacacatgagattaaaagaaaaaaaaaaacttaaatctaaaatattaattctcatatttctaaacactaataaaattattaatacgtattgagtaagttttattttttggtaattttattattagatcatgagaatttgattagactaaactaatatttattatgtatattagatgattagattgtaaattatgtttttctatatatatattaatgaaatcggcttaaatagtagctaaaatagattaaatggattcaatctaattcaatagaaaactaattaatgcatcaaatggttagaaccaatctaatttaatacatcagttggatcatatcgaattgaatcgaataacaaaatctaatatgaaataaataatttaattagatgtttaagtttaaattcattaaatacgagtcaataaatattcctatgaaaatgactaagtttaatttatttttatttttaatattgtaattttatatatatatttagggggtttatgtaatccctcactatgctttgaggtgtgagatcccacacataagacaaaattcttttactatagatccaggtaaactttttattatttg

SEQ ID NO: 130584 - DNA, 838 bp, Cannabis sativa
gagtacactccctccccgaggggaacaagccactcaaaggccaatcttcaaccggcttggactgggattgggtggaaacacccaaagcaacaatttcagaagagacattgatcactttaggtatctagatccaccaaactctagcaatcaatatgatctacctcctatcaacaaacgataatgtctaacaactggggaatcacaggcagccagattctgccaaatgtagggttggctgaccatggacagttgcctaacataagtttggccggccagagccaacatcccttcatgggagtgaccgaccaaggtcagcaacatagcacagggctagccaacctccatcatacactcttccaaagtatggtcggccagcccctgacagtttcaagcctgcagccccttcaagagggccagtcagtcaagtctctacaacaatagatcctgttgtgcaagcacagttagaccagattaaggacatgatcaagggcctagatggtccaaaaccctcagaccttgagttagacaggtcaaagggatcaccattctcagcatacataaatgctttgcccttgtctaagttcaagatgccagtatggaagatgtataatgcgcgagaagaccctttggcacacatcaaatactttgagatgcaactcaatctccaaaagattactaatgatgtgcgatgtcgtatattcccgacaaatttgtcagagatagctcagtaatggtactttatacttgccttaaaaaggtttaattcttggaatgagttttcccgagagttttacacacaattctcatcctcaaggcttataccatcacaactagaaga

SEQ ID NO: 130585 - DNA, 746 bp, Cannabis sativa
ggtgagtctagtggaggttcgggttcctcattggcttcgtctgtcttaagggtgttgcaagattaatactaattcaacacttgactgagggttaggcacggttggctagagaatggtggtttgggacgatataggtgtggtgttggcttctgtggcgtggagagttctggcatgttttgactcagaaattgtagaggcttttgcactttaacagtctgtctcccaatgtaagttgtttggctttgagtgtgtgctagacaaattatcaaagtgtggtccttaatcaatttttctatgcttaattcttattttgaccttattcttaatgatatattatattcttcacatgagttttccattgtgaattttttgtattgtcttaaaatagtaaatgtaattgttatagggtgaatttttgacctataaatatataagtacaatctcgtgtatatttgacacatggactcagttcccagttagaaaaggatgaagtgtcaacgaatagctctagtagtgctaacctcgcatgacagaaacttacgagtaggtgcgaccgaaataaggtctagtcgcacactatgttcactatataaagagcaggaccgagttatcgtaagtcacgtatatattgattatatggaatgatgaagtgtcccatgcgccccacgtaaagactgcatatttatggacgtcaaatttgaatgactaatgtacacgacacacatcttgaacccacgagttctatg

SEQ ID NO: 130586 - DNA, 667 bp, Cannabis sativa
  modified_base (607)..(632): a, c, t, g, unknown or other
aatgtaaactttggagaaaagttactatatggtgtaaatatcccttattattattattttatatacccaaaaaaaattacaaatatggttgtatgaaactttatggtttatgtatttttttttacaaaaatacagactattgatgttttcatgttatttttttttttgtttatttgtagtaattttattgttatttgtatgttatttttatgttgtttcattgctgtttttatagaacaccgtgaaatgataattaataaaataaaaaatcgtaaaattaacatatatatttgaccttaaaaatgttaaaattttacctaaaataatactttgtataaatttccctttttcgagaaattcaaaatgtttatccagaaactgactctggtgacgtggacatagatgtttgacacgtagcaagaaagaagatatctcggagttgagtagtcccgagtcatgacagttggcctgggaggggtcctaagccctgcatgcagcctcctcgtgggcagcatcacctatttgcgatttttgtgggatttttttaattttctcgaattttcccaatttcagaccctaaaattcaaaataaaatattatttttaannnnnnnnnnnnnnnnnnnnnnnnnnaaattaataatattaatttttaatagattattatt

SEQ ID NO: 130587 - DNA, 753 bp, Cannabis sativa
  modified_base (162)..(164): a, c, t, g, unknown or other
  modified_base (712)..(727): a, c, t, g, unknown or other
gaaatataaaatataccattttacttaaaatatatataaaaataaaattattaaaattaacacagaataacatcatcaatttttttaaagaaatgttattataagtaaaatctaaaattactttaaattaaggggaatcacttcatatattatttttttttnnntttttttttcaaatttttaattttgagatactaatctaaatttttacaatataaatataatgcccttattttgaattgtgtgaccataattgtttgtatgtaaattttgtattgaaaaatcgtgctatattaatatatttttctattcatttttacacatgatacgatatcaattttccctatttttaacgtatgaatattttgaaaaattagttataaaaattgattaatataaaaaaagaaacttataaaaatattgaaatttgagttaatatttacaaaaatactgtcaacaaaaatctttttaaaaatactgtgtatttataaaataatagtaaaacacaaacagaacaactaaaaacaacagtagaataataatgaaaacttaatacagatagtatcttatacagtatttttaaaataaaagtaattttgaaaaaaattagttttggaaatttgagaataattatcccaaaaaaatgagctttggtgggctatctagaaacttcaaataaaggaggagaaaattacactctataccctttttnnnnnnnnnnnnnnnntttttaccttcttttttaaaatctat

SEQ ID NO: 130588 - DNA, 1324 bp, Cannabis sativa
  modified_base (29)..(59): a, c, t, g, unknown or other
  modified_base (1254)..(1290): a, c, t, g, unknown or other
ttttaggaagttcatatttaggatgttannnnnnnnnnnnnnnnnnnnnnnnnnnnnnntggtaaaataatttccaacaaggcgatcgtaaaatcattgttgggttgccaaacaaaaccgctttcaaagaagacttcttatagacaagtgctctctccccaatcaacacaaccacctttcggataatacgtaagtaaatctgctccaaacttggttttagattattccatgtctttaatgttggcctcgctgactttaattttactttttttcgacagttgtctcaaaaaagaccaacccctactctcgagatggccgagcgatgcaagcttctacttggtcttcccttcggtgtccgatcagctgagtttctcctgaacggggccaacctgagatttgttggcctactcgccgaaaacaagtatacttgcgattataagtatcccaagtatgtgtcgtgctagcaggttctagtgccagctgacgaggagactcaggactacgtggctcgggcgcattacctccaaaatgcagtccctcaagaagctgaagaaggagcatcccgaggtaattaatttggatggtcacccatagtgcttagggcagagcgtaccacactagtgtctttttgagatagtcagtataatttttacacctggaatccctttctcatagattgcattgcacataggttcaatagttggtacctagaattccacgtttagattagctgtactaactcctactatgaaattgccgagcagtatggaactctgctggataggtcagatcatatacattcgagttgggatttagaactaattaacccctatgacatattcatgatcacaagatctagagaatttagtgaatactatagtcctccttcttcatgttcttatgattatggtaaatcccttaagtgtgaaataatttctcattttcccctttacctatttttaaacaagtgttaacacattgttttgtctcgcagatatggatctagaagactttctccactcttcaagcaaaaaggggaagaaaaggttaattgcctcgaagacctcctcaaatgtcaacgtggagcccctaaaaaggcccaggaagacgacgaccaataagaagcgagcctcacagaccatagacctcgaggctcctgagaaccaagttcaaactcatcctcctaccctcgcacataccgaagagcccattcccaaaacaagttaggttgcagttgttgggttttgtgccctnnnnnnnnnnnnnnnnnnnnnnnnnnnnnnnnnnnnntaataaagatcagaaatcacattttatgttgcat

SEQ ID NO: 130589 - DNA, 1193 bp, Cannabis sativa
tgtgattgatggtgtagttttttttatttaaaagattattttcttttttacctccaaaaaaaaaaattacgtaaaatagttgagagatgactaaaaaaaaaactaaaaaaatttattctatataaataaatgaagaatttatttattttttatataaaattacagtttgataaaaataaatattataagaaattttaatgacagattagaagtataaaataataaaactaaaaaaaatattaaatataaataaagaaaataaataatataaaagaaatatagatataattgctaccttctctcttttatttaaacaaaaatgtattgtactttgagtatttatttaaagataatataaaaaaaatttacatgaaaaaaataaaattgtatcttacctaatatgctaattcaataaaaaaattaattaataagtataaaatattacattttggtcttttatttttataagtatgataaatatataattttatgcatatcgtaattaattttatttactacctactactacttgtgcaattaataatttaataactcttctaattctttatgaatcatttgttaaaaaaatacttcataattcatataattaataactaatttatattgaaaaataatagccaagttcttaaatttattggtattagttaatgataaaaaaaattaaaattatgatcttatataatattgttgatcctttttattatttcattatttagtatagaaaaaaattatatgcaataatagcaagaaaattaaaatataaaaaatattttttgaaagacattatatatagcatttcttgaacgattattaaaataaaaattattattgaaaatattaaatatttttaatagataaatgcgtaaataaaataattaaatcacactaatcaatgttttaataaagatgaatgatattaaaatattatttagacttatatatatactcatcaaaattattttatgatgatgttttcatatttttttatattaatagttaaaaattatttattgcaaggagaaaaaactggaaatatataatatatttgaaaaaagattatatatatttatagagaattgctaaaagatactacttattctttagcattctttttgattggtataattaagtagcaagtcccatataaattaaaaaaataacttttagaaaat

SEQ ID NO: 130590 - DNA, 853 bp, Cannabis sativa
  modified_base (790)..(792): a, c, t, g, unknown or other
aatattttcagctttaaagcataaaaaataactatataccatagagttatcaaatttgtataaagcatatctcaatcctaatccaattcatatatttatatatataaatcaattgagcagaagtttaattattgaaaataataaaattttatatacttaaatactagcaaaatgttcaagtttaccttcatattcttgcaattaatgaatcttcttttaggattaacttctgtccaagtttgaacccatggttctttacggtcacaattattaggatcccttaattttgaaaaatctttcttcatgccataattactacaagggcttaatctatgcagattgcttacatgagatgaagaggaagcatctcccatatttctgctagttcgtctgaacaataataggagtgagtcgagttgggggctgttcttgagaatgagaaagggggaaagggtggaggtttgtttagggcttgctcttatgattgagaatggagagggaggtcgattggagtcgaagctctggttcttcaaagcttcaaagctcagttcttccactttgaaaatggcaaggggatcaactgaaaatggcaggggtagattaggatagagtcaaagctctaggtttggttcgagaagaagggtcgacaatgatgattcttttaggttgaagtttgcttttttattttcttttgttttaattcattaaaataaatctagaaaaattgatttcaagttattagagatattaggattaattagtttaagtttttttttttatttaagcgttnnnatattacaacatgttttacctgaaactcaaactcaggacctccaacactcacacacccacc

SEQ ID NO: 130591 - DNA, 734 bp, Cannabis sativa
  modified_base (49)..(57): a, c, t, g, unknown or other
tttagaaagttcttatttaggatgttaatatacttgtgagtagatctannnnnnnnntaaaataatttccaacaagaacttactatttttatcaccattttttaaccacagttgtttggaccgttgtcgccaaaaaatttcacgctggtttagcacctcaaacagctgttgtttggccgccgcatattgctctttcccttcaatatcacgtcttcctttaaggtacttgagcttcctattacgctgcttgatacgtgaagaaaaattcccagcaaccgactctccctaggcttgcaattccttgccacaatgatgaattttctagagcaattgaccccctcctgaatggctccaactctgcctaataacagtctcgcaatcttgaaaactttagcataatatccaacaacaaaggattatggtcagaaggtgacacatccaaattaaaaactttagcatcgggataacgagttaaccaattaaagttaaccattattcgatctaacttagcttcaatccaagccagagtgtctctactcttctcccaagtgaagctatgaccttgtaactctaagtcacacagaccacaatgctgcacaacctcctggaaaccctcaattagccatctcgggtaaggtttacctcctctcttttcattatggtgcagaatgttattgaagtcacccataatgtgttgggttttatgccctaaataaaactctgtttcaatgtaa

SEQ ID NO: 130592 - DNA, 1050 bp, Cannabis sativa
  modified_base (744)..(744): a, c, t, g, unknown or other
tcttcttcatcttcttcattattttctatttttcttcttcttcatcttcttcatctctttttctgttcttcttcttcttcttctcgcccagcccgtctcgctgtattttttcttcttcttcttcttgcaggtggctgttggatctgggaaggaagtacttagatctggattgagtctggtcagatctagactaggatcagtcggatctgggctaggttcccttaatctctccttcttctcaggccgagctttgacagaaagaggcgggatagtggtggccttcgttttgatcgtcagtgatgggaggcagcggtgcgggtggctggggggagagaaaggtagatgagggatttgagttttatttatttaatttgagtttttttttaggttagatatgaaaatagaattactttctaattttattttggtgttgatttggataaaaggaatagattgtggctattggtcgatcattgatagtaatagagatgggcatttatagtgatgatggtggtcgactgtggatgatgatgtagacgatagttttggtgatgatggtggatgaacctgagatcgaagaagaagagaagaagaaaaagaaaaaaaaaataacttattttattttatttatttttaattttaaaacaatttttgtaatatttaatttttattttattttattttatttttgtaaatagtttttgtaattttttattttcttaaatatttatttacgtggaccantaaaattgtgtcacgtgtacactgggcctacgtagacattccaccatggcagttaacagcttaaaatggatggaaatattaaactgctaatagaacacgagtttagggattttaccaccaaaaatttagaattgggagttagttgcaaaaacctgactactttagggggttataccgcaaattactcgactaaaaatacatttagtcacaacaaattataatttatgtgactaatacatctagccatggaccttttagtcacaatataggaataataatttatagttagtcacaacttttttactt

SEQ ID NO: 130593 - DNA, 545 bp, Cannabis sativa
cagtgtgagatcatcaatggctgcagttgccaattgctttggttggttcagtagtctttttacatctactactctttcttcttctaccctatctgtgcttgcttcgctccctatccctggaacctcttgacgagtgtttaggctcctccaaatccaccgacgccggaggcggagaaggctcgtaccgagaaggcttccttttgaaatgcctatcctcatcactagactcgtaatccatagaaccagctgatttccttcctccaccactaaccgccgccgccgctgccttcaccgacgaagacgaagacttgtggtggtgatcctcgtagtacccgttcgacgacgccgttttgtgatgtgtcgaagaaacagacgcaccaccaccactacctcccgtatctttcgccggagaagaagaaagcttacgctttttcgaaacttctccctccggaaagctaatgcgagagaaaacgctcgccttattcttgcgatctaaagccgccgccgccgcctctaaagcagcagctgaagaggcagaagccgcc

SEQ ID NO: 130594 - DNA, 1395 bp, Cannabis sativa
  modified_base (397)..(398): a, c, t, g, unknown or other
caactttttcttctccactatagtttttacaagatctacaaagaaacagttatcgcttgcctttggaaaagtcattgcctttagaacattgaagaccacttcttctccttgcattcttagcttcaattcacccttctgaacatcaatcaatgcttggcctattgctaagaatggtctcccaaggataatcggaacattgttttcttcttccatgttcagaacaataaaatcagctgggaagataaatttatccactttgactagaacatcttcaatgaccccccttggatgagcaaatgacctatcagccaattgcaaggttattgtagtagactttgcctcccccaactgcaatcttctaaaaaccgacagaggcatcaaattgatgctcactccnnaatcacacaacacatttatcccctctattctctcgatggtaaaaggaatggtgaaactcccaggatctctgagtttgggagggagtttcttctgcagtatcgcactacaaccctcagttaatgccactattttatagtcttccatttttttttttggacaggattgctttcatgaatttcacgtagctacgcatttgttccaaagcttctgcaaagggaatgttgatgtgtagctctttaaatacctccaaaaattttgaaaactacttgtctaggttggtcttttggagtctctgcggataagggatcttaacatggtggtgtatgctgacttgtggagaagctttttttggtgcgagttaatagtcttcttttttgttgatgttggtgccggttgatcctgaacctcttcttccacttgttatctcccatcagggccttcatacttcttcccacttctcaaggtgattgccttacaattttcttttgggttcacctctgttgtgctaggcaagttcccttgaggacaggtagctatcttagttgccaattgccccatctgattctctaaggcttttatggatgatctagtctctgtcataaactgcgcaacaaatctatttgaagactagatcctccactagaaccttgttgatgtggttgctgttgattttgttgggactgatttctctgctgatagaacccctattgttgctgattagagccactatttattcgacccctccttgattgtacccaaagttattattttgagaataatacccgatgactttttcttcatccattgtcaaactattcacatctaccagccattcatcataggtgtgagggcccccacagagctcacaaataacttgttcatgttttgtcaaggcctctacttgagctatcaatttggtgatggcatctacctcgtgcataccagctaccttcttcattttacttctttcagttggccattgttgattattcatgg

SEQ ID NO: 130595 - DNA, 533 bp, Cannabis sativa
aaatagttaacgatattttataattaatatatattaaaatgtataagatttgatatttaattacatcattactaatataatactttatagtgataatactaggcaccattagtggggccttttagcattatatataggtcggtcttgaattttagtgggtcatagaaaaatatatttgaacctttatttaaaatgaaatgtgatattttcaaaatcaataaaagaaacttgtattgttcaaaggggatttttttttggctcctaggtagagtaggccctaagtacaaacctaatcgtctatgttcagggttgggcctgtatatatatatacatatatatttttttaataagaaaaaaattcattaatttaaatcaaataacaagcatccttaatctcattgggaatgtcactcatgttaaacacacagtcagatataaaataagacgcttttgctaaacaataagcgaccctatctgcagaccgtttgacaaaaaataaagaaataaaaaaaaaagtcattaacagacttaca

SEQ ID NO: 130596 - DNA, 1181 bp, Cannabis sativa
cttatagttttgtttagaatttagaatgcatgaatgcatgaacataatgttctggaaagttataattgatttgaacaagtttaagagggttataactcaaaaaattttgagttgcagaaattaggcagaatcaagcgaccgattgttttggaagtgcctataattttggtgaggcctaatatgttggtaactgttgtctgtacgcaaacacgctgctgacagtgacaggtacacatgtgccgtcagtttagagagagaatgtatgtcggtttatcttgattttttacctgacgtagcatacgagttattacatgtggcaagataaagcatcacttttaataaacgtgatcggtacatacaatgagtagacataagaatcacacacttaaagacaactggtggtcggcaaaaaggaaatgatcaacattgtccttgcatgacacatccttgcttgatgaaaacctaaatttaggagaagtaatcacagcttccactaggctcatgaaacgaaccctggtcgatgactgacgagagcatatacgatacaaatctggtaaattagctcctaatccctaaggattcggtattcattccctccacattatttgttatgatctttaactaatgatttattcttaatttattgtcatttgttataattgatatgaaaaacttataaatataggtccttcacacaaagtgaggacacaaaaaaattcacatagcacaaacaccactaaaatctctatacaattctttttacaccaggagtgaccctaagtaactatagaccttaggaatgaaaaaatcattgggccctcattgaagaaatatataatattttcaaaaattagtaaaaaaaatatttatattttaaaaagatttttttagggggccttaggcaaagtgggttctagacataggcctagcccgtcttagtccagggctactcctgttctaaacttggaaagctcatttgaatcttgttcatattactctaggtatgaatcttgttcatattattctaggtatgaactaagaaatttatagaaaagttaagacaattagactattaccattataattgatatagaacctctataaattctattcttattatattacattctttgttcttttattaattataaaatctgtaacaccccgatttcccgagatgt

SEQ ID NO: 130597 - DNA, 609 bp, Cannabis sativa
cgcccttctcaatgccacgatgagtaacacgagcgtccgaaaagcctctcctatttccaacccgagccagaccatcaccccccaaaattctagcatctcccactccactagctcaaaatactgtcaagtgcctttaccagaaaatatcccacttctggatactagtaaaagacttgaagccatgaatctcacttactagccaggtgctgcaactcccacgggctcaaaggcttcgaggaaaaggaacaagcctgactccaaggataaattcaaaaggcaagctgaaatggtcaatgggagctccgtcatcaaatcaagcgatcccgctctgacaatcctcctgtcactgaagcctctcctggaagtgcaggcctagccactaagcaagcctgcctgccgccatgaagcttgtgagctggaatgcacgtgaacttgggagtgaccatgcatttcgaaatctcttccgtttagtgtcttcatgtaatcctactattttatttgttatggaatctcggcttgttaaaaatgctatcgatcatattaagatcaagctccattttgattcgggcttagaaatacctagggtaggtagaagtgggggcttgcttt

SEQ ID NO: 130598 - DNA, 1030 bp, Cannabis sativa
agagagagattatatatcaatggtgagagttttgaaagagatcggcttcggctcaacagggagcttagccggcttcgtaacagtattattggctcttttaatgactctggctctcatatcggctctggtcttcgtctgtgccgatggaccctctaaagaaggaaaagattccggtaatacttacggcagcggtggctgcggaggtgctggctgcggtggcggtggttgtggtggcggttgcggcggttaaagattcggttacgttgtttctcttctgttagttatatttttatatatatatatatatatatatatacatagaaaattatatatttcagaatttacagttcataataaaaaaaatatatgaactgcccaactggtttttttgtgtggataagttagttattattgatgtaactgttaataacttacaatacaatctataacactgtttaattcagtcagtttgagctctaatatacatgattgcagtactaattgtgcttagcaaataatgaaaatagtttaaaagaaagaaaaaagaacgagttatatatgattcaaatattaaaatgaagtgtttgattatgattgaaacccataattcgaactatgtgatgtgattgctcggtattagttgagactcgtgtaaataccgagcaatcacgtgattcgagttgtgagtttgaatcgagacatgcatcattgctttaaggatatgtttcgtaagaatgaaggagagtatgattagagagaatttcgaaaagaaataaaggtaagaggaatggagagtataattggtcgttttactttctgttgattcgtattaagagtaaagttagaaatatgtaaaataaatattaaaattactatcttatcatttttaatacaattatatattatttttatagggtacaagagacattttaaatgggttttcttgaaatctactatatttgaaagaattgaaatttgtgtatttcaagggattgtgtttccctcctctctcctcttcctcttgtcaaag

SEQ ID NO: 130599 - DNA, 636 bp, Cannabis sativa
gtgccttgggaagacatgcatgtttaaagagggaaggtggcctaggctttcgaaatactcagatatggaacgaggcagcgattggaaaatatctttgggttgtgaccacaaaataggataatctatatgggtgaaattggtgcatgtggcttatttattaggtgataattaaagattggtgagattacgaagctcaagtaacaacagcaacagctgctaaggaggcctggggttcaagttaaatataattttaaggaccttttacggttcaacaactcatgtcacactcttgtttttcaaattttgttagctaaaaattaacaaggtaattaaaagacttgtacattctattctacattggtcgtgagaggtaattaatatgtgggatttatttctgttgggaaaaataataaacttcaagtgcatcgacaaaataaagaatttaagcaaagaagatggtttggtaaaattaccgaactcacaaaaagagatatatttcatttataatattcaaaattacacactcactatctcaatctctccactcaaatgtcgtacaccatctgtttcttcctcactctcaccacaggacaaactcacactcacttttcttttcacaactctctctctctctct

SEQ ID NO: 130600 - DNA, 966 bp, Cannabis sativa
caaaaaataattctcattttgattttttttccttcttcttctcttctactttaacttctttctctcttttgctaatccctaacccagctgcaacaaataattgaacccaaacaggtttgttcttcatcaaacccaggcatgttttttgttggtttttcctctaacccacttcaatgctgatcttgaacccaggagaccgccactgtttccactgccatttttagttatcaccagcagtgggtctctcaccgctgacctcagaatccccttccccgattctcactcccttatttcttctcaatctacttgaatagttggtaatttttcaaagttttatacttatttttcagtatttttccctaatttttcaaatttttaaaggaatatttgacttgagaaaaatggggatggtggtgtgatggtgtgtgtggtgtggtgtggtaaggtaattttctctttgatgttatggtggtggtgataatggtgtgatggtgggtatggtggttgtagtaattattgtggttatggtggcattggtggagtagttatggtggtgatggtggaggtaatatttagatgtcgaagaagaagaaaaaagggtcgatgagaagaagaagaagaaagggccgatgagaagaagaagaagaaattactttttttttttttttataatttgtttttagtgatattaaatttattttctaatttgccatgtcaattaaatttgtgacgtaagataattgggtgactaggatcgaccacataatcatttaactgggcaaaatggacaggacaccaagtggcgtttggttggaggtaatgaaatggaatggaatcaaatggaaaggaaacaagttttattccattcatttgtttggttgtattgtaaagtattggaatagcattccaatggaatactctttccaccactttggtagaatgactattccattttaaaaaggaagg

SEQ ID NO: 130601 - DNA, 1181 bp, Cannabis sativa
tagcaacgagctgcacagtacattaaaaatcacgtcaacacgcctatgctagttaaggtgttacaaataatataacagattatatatagattcacaacaagaaaaatagagtacaaacggttatggaaattagttaatggaagtttgaaaaattgcagaaaattgggtgcgaaaaaatgggttttgatcgtgggtggagacgaagttcagttatgaatattttattttttgaaaaaaaaaactgaaacaaaattgaaaagaaaaagaataaaaagaataaaaatagagagggaaagcatggagtgattaataggggtcaagggtctatcacatgacgtgttttaacacttgtgttgcatgtaatgtgtgtgtaggtggtataattgtaaataaataacttgaagtgtaaaaaaataagtacacgcgtgtgtaagtatatatgtaataaaaatttcattttatatttgggctattttcaaaaatatgggaaaattattaaggttatgataaatatggcatataaagtaaatcctactaaatattgcattatctaaccaatcaaactaaaagtaaaaaaaaaaaaccatataaaacattaaaaagaaaatctgaatttaagattcataaaaaataaaaagttaattaaattaccacaaaaaatattaaaattctcttcatattaaattctcttcatattaatttttcttcatattaattttttttttaattttttttaaaaaaataaaacaaataaaactatagtgaacgtcggagttatcactcgtgccggaaaagtcaccagagtttgctgtcggcaccgaaaaagtcgtgggagtagctgttggtgccggaaaagtcgtcggagttattgccggcgccgaaaaagtcattagaatcagcattgtcgccgtaaaaaacacaggaaaaatcaccaagaaactcaagaaatcgatttcttgatgaagaaacaggtttcttggtgattttttcggtaaatttacctatgacaatgccaatttcgacgactattctggagtttgatgtcggtgccggaaaagttaccagagtagttgctgttgtctgaaaaattgccagagttattgccagcatcaaaaaaatcgtcagaattggcattgtcgccagcaaaatcactagaaaaattaccaagaaagtggtttctt

SEQ ID NO: 130602 - DNA, 1623 bp, Cannabis sativa
acaatgatcctattttcactgcacacactaatgacttacaagtgtgtaccaatttgtaagtatcttctactaaaattgaaaaaaaaaatatcttggtttatattttatgtaactagtctatttttttcaacatctggtaaatatcattattatttgatacactaaattattatcatctttgaaagaaaaacatgattttttgtcactttgataaaacaaagaaagatgcatgctttagaataacttaatttttgtataaaatatttgtttctttgtatttttttttaattttgaaattcatatatctatgtaaaggggagggggagtcgtgtgacttggcttatgggataagaaaaaaatttcatttgtctttcttttggtaagtatcaacatgtacttaattgataaatttttgatgggtttcctcttaaaattaattttttattaattgtattttgttagattgttgaccttaatttttttccagcacttaattcaaatctttaaaatatcttgattaattgcactttgtttcctattatatttttcttttctttttcgtgtgtatttaattttaaaaaataattgaagaatcttttttaaaaaaggagcgattttcctttgcttggtgggaagtgaattggtggtaatttagttaacaaaatatttttaattaatgtgtatttttattgtgcaattaaaaaaaaattcttgtgttaatttcgtggtgttgattgatcttttctttctaggaatcttgtatttacagttgatctttttgtttaggaaacttgtcatataagagaatgaattctctttatagatagttgcataattttgaaaaaactgacttttcctttttctagttgttaatttcgatttttctatgtatataacacatcaaataatttttatttggcaggcattgaagtccaagtcgctttcttggaaagtttctatttttggcatgatctactgcagcagaacacgaacgtgatgccgcaaatcaaggatttttttaggaaagatttgtacagttgtgtaaacgtgtttgtggttgtctctagcatttctatgttctataaataggacctagagagcaaccaaacatttctcacctcttctagtttcattttttatatttttatctttatgaggagagagttttttttcgtgaaagcctagagtgttcagctaggttttagtctttgtttattgttcttatactgttcttagaataggttgaagacttgtcaaagccttaccttgggaggaagtaagtactcacacatcaaaagacgaaggaattttgctatttggttgtgttcaaaaatcagattggcaaagtaaattacaaaggattgcagcaaagctttagaggttgtctaaacttgtttaagtcatttgtatttgtaagtgtttgagactttactaattgatttcattctctatgtgtagtcccgtggactaagagtgtttgaaagaatactaataccacgtataattcaattgtgtgaagttttgattttctgcactgttatttctgttctgttactgcaaatttgtgatgggctatttacaaaaataagggaaaataaagataagttttgatatatatggcat

SEQ ID NO: 130603 - DNA, 1225 bp, Cannabis sativa
ggcattatctctaacaatcgcatggaaacagtataacctcagaacacatctcaaacaagtatttttatcctagcatgaaattgaaaagtttgatggtttctggaaaacttacttgtaatacgatgcggggatgaaggaggatgagggtagttggccttgaaatcgagagcccagtaaaagacccgatcaactcgcttgaacgttgatggcctcaggcgactggggctggttcacaaacgggttcatagggtgcttctagaaactctttctctcaaattcgcaggaaaagatgaatgagaatgtcatagagctcactcattcaccaaaagatcagacttgggtgttatgggatttttttcttcatagtttttattctttgataaagagagggctattgctcaaaaagcttgaaaatgctaaaaagaagaacagtggccatttcacgcctatttatagtaaaagatgttgatccatgtgattcaaaattaaaggctaggataatctctaggagagcacagaagtgatccaacatatgaggagtttaaaagattgcatttaatgccatttagtagaattgaggcattcttcatcatgttttttcacctcgagatctacattcgcattaaatagtcattacatcataactcaatcttcatttcgtttctctgcaatagatgtatcccctttgagtgcgtggcattcacggatccaaaggatgggcgacacatccacactgtcagttgtttatcaagaaagttcttgactcatcaactgccaactgccagatgaaaagaaacgtttccacaattttagatttgccctcgtgtccaaatgtttagaaacacattggagcttctcgacttcagtttggccatgacgagtcttagcggaccaagtgagttttaaaagtgggattttctagatctgaaacttatggtgggtcgtcgcggtggtttagaggagataaattggttgtggtgatgggatggtggaagctatagaggttttaaggggagaagagagaggtccgggggaaagagattagggatttggttgtaaaaattaaggtaattttttttattataaaaaaaatataatataaaataaaatgaggtttaatatgtgtggggaattaaaatagtgtattgatggtggtgggtagaatgggagttacactgagagaaatagtttttgggaagagagaaattgtaacaccctaactaac

SEQ ID NO: 130604 - DNA, 661 bp, Cannabis sativa
ggggtgtgaatataatgtcccttaatatattggaagggaataattaatcccagtcttttttaatttatcaacattaccctcatcaagtgtattaatattactaaggaaataacatttcaaggttaaaccctcaaaacaaacaagacaatgtttcacattaccattcccttgctagcattaatccattccaaatacctcctaagtttatttttctaataatagggtgtacttatcattttataaaaacttctaaaaatcaaattatttaccaaattattcttacttttattttaattttcccattttatccctcataataaaaaaactaaaaaaatctctctatctctatcccatcggcaagaccattaggaacccatttgagaggtgacgagaagacgactggcaccgacatgaccgaaccctatcctcgaagccctaccgtctatagtcccatctccgtcgaagccccactcttctctttttcgttcgtcgaagtcccaccgaaccagatcccgagcccaaaaggccatatcacgagtccccaccttcaccttcgtatttgtttgtttttttttttttagatttgtgtttgtttgagaccttagatgatggtggttatggtgttttctagccaaaacgtgcttattgatagattatcgat

SEQ ID NO: 130605 - DNA, 901 bp, Cannabis sativa
  modified_base (818)..(821): a, c, t, g, unknown or other
aaatatttaaaattccgtaaaattgtatttttgtaaattttttttattgtttttgtatatttctgaataatcccaatattttaactgtaccagtttgatcaagaggaaataacgccatttctgtccaaacattcctaaacaacaaaacattttatgaaaataattttcaaagcgtatatattatgaaggaaaaaattgaatatattctattcaattataaaattaaattagaaaaaaagtatatcaaataaaaaaaaaaagttgaaaaagtattatgtaaaaaaagtaatgaataacatacaagattagattgaaaatatagtgtgaatattagtttatgcaatatgaatgtgttttattactactttaatgtgtctaactactactctaatgtgtcttacacaaagtttctataaataataataaattattatattaataacgactgtagacaaatataaccctatcaaaaaattatattttaaataaaaaaatacaagccggatactacaagtataaatttaattttttaattgtaggtgggtccaaattatgtgacacatgttgaagaaagtacaaataatagaataacttttcagaatatttaacaataaaccccaataaatatatgtttactaatagagcgcaactcaatctgctaccgtacaaagcggattggaatccgacacctaggaaaatttacaaaaatatttgaattttggaaaacttttataaaaatattatcacacagaaaagttttcaaaaataatgtgtttttatataacagtagtaaaacacaaaacagaacaactcaaaannnnagtagaacaactaaaaaacatcagtagaacaccagtgaaaatttaacacagtatactgtgttagacatttatttgtatag

SEQ ID NO: 130606 - DNA, 1399 bp, Cannabis sativa
  modified_base (851)..(851): a, c, t, g, unknown or other
ttaaaaagttctttttaattaaaaagagctttttaatgattacgaatggtatttccgtcatgttcctctttttcgaaaagacgcatatcctctgatttttgcagttgtgcagtttcgaggtacatcaaaattaaatgaccatcttttccacttctgcttcgaatcatgtccataggatcaaatctttctctgatctaacttaaccatcctcatgggtataaaataaggaaaaaggaaccacctttgcaccatttcagaaagtttgggaaaaacccttaaatttcttcgtcaaggatcaccattaaatccgtccaaagacttgcataccatccatgtccttgacctttttcctgcgagtttcctcccacttcatcttctcaaagcgatccttgcttcattcgaaggtttgcagacggaattaccaggcattgccccaagtcctaacttcaaacgataagttactttcttctttctcatgtttgttacatagtgtggatcaattacttgattcatttgtatcgttatcatcccatcttgttttggtagttttttttagggttaaaactattcatactaggattcaggcaatatgtaggttgttttaagatctccaactcattaccttttggtttgataaaattctctctagggattgggactggtttttgctgacagcaatgtcccactcttgttcaggaatttatcgtccagaagttttagagtttgagtttcctaaagaatcggccatcccatataaacccaacccctcaaaacccacctccaaattagagctaaacgacgctagggccaacgaacacatagtgagaacccaacaggaagatatttctagngctacaggcgcttcttgcaagaaatatttgaaggtaaacgtcgattcttgcgagaagcagcctgaccagaaccacccagcgtgtcctttattcctatggcaaagcctttgtttttacccaacgtcacaattgctttagaaccaaatgactttgatttcaaaattatgcctctcaagccatgtatgtcaaaaactcctcaggatcccagcgtcaccctaaaggctgagttgatagaatcaaaggtgcgatctatctcaggctatacgggcgagatgcttaagacctgtggaattgcacgcgggcaatcatgccaatttaagtcaatgcgagagggagaattcagttgctaccccctgcacgctttgccagcagtaacccaggaaccagtggtgagactagtactagtggttcaactagtctgggcgcctggagccttaagcatatttttgcaggggccttctgttcggttttgtgccctaaataaaacccatttcaagataatcagatttactaattaataaagataaaaactgcattttatgttgcat

SEQ ID NO: 130607 - DNA, 848 bp, Cannabis sativa
caacataaaatgttatttctgatgtttattaataagtaaatctgattatattgaaatcagttttatttagggcataaaacccaaaagtccatttaaacatacctaatcaacagttcatccagtgccataaaaggaaagacccctgaggaaaggtggataggtaaaccacttgagctatctaatttttagtctttggatgtgcatatgcacatcaaaacatagggaaattagagcctaaagctctaacgtgtgtattcttgggatatccagattatgttaaaggctatatattatgggccaaaaggaaaggaagatttaaaactcgtataagtagggatataatttttcaagaaaataattttccttgtaaaaatactaatgagctcaatgtaggtcctacagaaactaaccctgcaggtacaacttttgggatgacccaaaatgagagagaacctgaaatagaacctcatctagatcaggtggagttcaggtggaatctcaggccaaactagatcaggtggaacatgagatccaggatgaaaaagacagaaccaagaggatttgaagagtaccagcttgttagggacagggccagaagaataactaagcctaatcaaaaatacatctataatgtatgggatgagagcattgcatatgcttacatgtgcaaattagaagcagaaatctatgaaccacagtcctatgaagaagctcttaaagacagaaactacaaagcctgtttaaaagctatgaaagaagagatatactttctcataaagaacgaaacctaaagagtggtgcttagactagaaggcaagagtgtagtatcttacaaatggcttttcaaa

SEQ ID NO: 130608 - DNA, 899 bp, Cannabis sativa
aaaaaatattaccagttaaaatgttgtaaaacaacggcaatccaactcatctgagtctttcctagagttgtgcagcaaaaaagtgattatctaactcatcaacctacaacaaaagaacgataattttataataaagatccatgtttttacttctgttccaaagagtctcaactccagccactatcttatgattaattatagtgacgtccgagcattttaaactgcctagcttctgtaatccaaaacttgatagaaaaataggggaaagaattcgaatgaaatcccagttcacttgtgaaaataacgaaacgacatgctctggctggaattgatatatacaggtatctaacaaagttagatctagagcaaagaaacctctcgaacttagaatcgcatcgataaagacaagcagaatgagaaaaacacaacagatccagaaaattgagagcaatatcagcaagctaaacgacccgattatgtttatcaaaataaactaaaacaaaaatcaacaaatccatcattgaaaaacgtcacagatcacggtgttcatattagaagtagatcaaaaactttcgtgcaaaacacagatcagcacagaaatgagcacaaagcgaactattgaactcacctatcgaacaaatcgaaaaaattcaaagcaaatataaaagaaaaagatcgagttagattatttgatacccttgtaaaatagaatgcaaagacaatcgaagagaaagccaacgagatctagagatgcgatggggtcgacggtcgggtcgggtcgacgaagatgaaactggacgacaataaggagaagcaagaactagagctttgggtctttaaatagctgggtattgtaatgcacatgaaaatttacaccaaatttatattaatatttaaat

SEQ ID NO: 130609 - DNA, 644 bp, Cannabis sativa
  modified_base (36)..(51): a, c, t, g, unknown or other
aggcggtgtgggattgcacagcttacccggtatttnnnnnnnnnnnnnnnnggactactgactgtcacaataaccagatttgaggtagacaagttcaatggctccaatgatttcagtttatggaggatcaaaatgaaggcgtttctggttcatcaaggtatctcagaggctctaaatgttgaagcaatgaacctcattgaagtcaggaagaagaagattgagattgaagcaaaggcacataatgccattcttcttagcctcgaagatgaagtgttaagggaggtttcaaatgagaaaaaatatcttggactcgaacaagttatcctcaatctacatgaaaaaatctcttgcaaatgaattgtatctaaagaagagattgaacacacttcggatggaagaaatcagagaattgaggaaacatttagatgacttaaacaagatcttaacaattttggagtaaagaatgatgatgaagaccaatcaattgtattgcttagctcccaactgccaaatatgtatgaacactttgcaaacatgattttgtatgggaaggataccttgaccatgacagaagtgaaggtatatacagtggtggaatgtaacgtctccgcttcaagcctccattgggcccttacacccacaga

SEQ ID NO: 130610 - DNA, 1337 bp, Cannabis sativa
atacggaaagtatgagttcttaagacattttaattactaattggtcgtattgtttaaaacaattattttggtgtattttatttttatcaatttcgtgtaaaatttattacttttggtgtaacaactctaatgattcaataccaaatatgatacctaataaaaaattacttaaaagggcatgttgtcaactgcgtgacctcatctgaaatctagcacaccttggaggaactctttggctcgacatcaagaataagaatgatccacttgatgaatcaactccagtcagcaaagaaaggctctcttatgatcgatgggtacatgctcaagatgaagaacattgtagatggcccgaaagttgctggaaatgctataattggagatcaagtcatcctctacattcttacgggggtaggacctgagtgcaaagttgttgtcgtcaatctcacttcaagcaatcgtccaccttgtctgaagttcaattcatgcttcaaaatcatgagactcacattgaggcaactcaaactcacactacaaggacaactagggcaacttttctttctttgaacgataggcatttgtacttgagtactaagtctatccttccgtgcaactttgcctagcggatcaccaagtagccttgctctagagctttgtccaccttttttcgcaaaggtcggttggtagtattcgtgttattttgtggagcagttgcagtagtcttttttgtaggttctcttataacacattttcccttgtcccttgtgggatcagaatttataggatcttttaggtttgttttctttgtagcattgttttcttgaggggtagggtcatcaggaatattttcgtctggaatcacattttttggtccaatcctagcctctagcttgtctaacatttctcgcatttgatgagaaaagtcctcttgctctgccaatttcctcttagtttcagcgatctcttcaaccatttaatagactggaagatctggctcattataatattcctcttctttgtcttctccatcatctttaggatcgtcgtcctcaagatcgccctctgaatcctctaggtcgtcttcattgatggaattttcatcaacatgttttcagtatgttgagtcttcttggtaggatgactggttactttttgttggagtttgactcaaattatttatttctttattttttatctatatttgtaaagttgtaattttttttggtaatcattaattgtgagaaaaggaaattcttggtgatcaagttttgatgagtcttcttaaggaagatttagaatgtcttggtccccaaattatcttgatgcccaagttttgtaac

SEQ ID NO: 130611 - DNA, 607 bp, Cannabis sativa
aagcactcttcaagaagatcgaagggagtttgagcacttgaaagttttagcatgattcagttaaaagatggaatacatcaagtttgcagcagacaataagagagagtctataatgtataagttaattactttgtatcttttagacatatccaatgaatcttatttttgggtgtagttttgtgggctaataacaatctgcaaagagtattgataccacgtacaaaaaccttgtgtatttttatttttctacactgtttatttttggtttattctgtagttatagagttgttccgtagctacagaataactgtgcttcagtatcaatattattattctgtaattaattaaatcaaataataaattggtaattataaaacacgaaatttcaattgatatcagagaaagtcactaaactcttagtgagatcttgagattattttattccatttaatttattttatgtaagatgtcgttctttgtagaatgaaattttatctctcgaccacctctatgttagggtttatgccctaaaaagcctgtaaaaatatttttgtttataaatataagatgaacatttttatacatgcttgaatgttaaattattaat

SEQ ID NO: 130612 - DNA, 768 bp, Cannabis sativa
aaccatcgtctgattgtgtaagtggtattttagtaattaaaattacataaaatgtataaatgttctctttacctgatggaggtatttttgtaaataaaatgttaatttatattttctatgtaataattccttaaatattatattagaatagggggtagagcttttttttttggaaataaatatatatattttttaaaaaataaattaaaataggaataaagtcataagctaataaaaagtgaaaaatcttttgttaatgaagaatgaatgatgtgttgttcttttcataagactttttataatgcaatgtaaaatgtgagaagaataattcttagaatagaatcatagtgctctattttcggctatgtcttccatttacattaatatatattctttttacatatactttattttattttataaattacaattaattttaaccgtaaaaaatgaaccacctattttcatttctttttttttttttaataaaacttatattttttcttttttactttcttactttttttcatgaaaacaccttgatgtggactcaatttttcaatttttaaaaaggaaaataaatgatttttttatgtaagtgacaattagttaaaatatttttataatttagcacaaaatactatatacatctaagaataatcaatcatcaatcatcaatatatataaaggaaagcattaaggagttgaggtggcaatctatatgattttttttcctaatcttagctctctcaatatttcatattattt

SEQ ID NO: 130613 - DNA, 681 bp, Cannabis sativa
atggagtatcgagacaacaaggccaagtcttaggacatacccaagtacattgctgattatgaagaattgttgcggatgagggccgaggaagacgctcgaactagccagctgactaactcgtttgaagggatgactacgaacaattttccgacgaatgactcacgtctatcttgagctaactatatgtcaaatgttttatgtttttaatattataatatgaacttttgtttggttggctgacttgtatgagtttggtaccccattttccccttagtctaaatgtaggtcaaccgacttggatttagacttagtatttggaatgatgtttggactatgtggttcgttgtatgcaagtcagacgagcccattaataatggatcaaataatattgggtccaataaggcagtcagacagactcacaaggcttgaaaataaactaacgagtgagcctatgggccataagccggatcaccctgcaaccaggtccgagcccaaccagtcagccaaacgggtggaaccaagtaaatattaaatcactcagaaagacagttactactccctaagaattaaggaagcaacttacttgaacgagtcaaatgggtgacgtggacggagggcaacggtactgaagacacacgataaaagaaaccatacagtagacacagggcatcgaacatttga

SEQ ID NO: 130614 - DNA, 978 bp, Cannabis sativa
  modified_base (215)..(218): a, c, t, g, unknown or other
  modified_base (255)..(262): a, c, t, g, unknown or other
  modified_base (333)..(335): a, c, t, g, unknown or other
atgtcttgggtcttggaaatgagaaatgacataagacataacacataacacataacactatccaaggtgtaagtataccttatcgtcgattatcatgttagtctgaatgtaataaacttataaattatgggaattaaacttttgaacatataatcatgattatataacagtgtgctaatgacactataatcatgaacaaatatatatatgttctnnnnttaatagaatttatacatcaaacataatcatgaaatnnnnnnnntgaaccatgcaacatagaatgattctgatctttattaattagtaaatctaattatattgaaatggattttnnntagggcacaaaacccaacatctaggaagggtcgtaggtatcttatcagtcagagggaactgtggcctccacaggaattactgcttcacacccataagccattttgtatggcgtgtctcttgttaaagttctctttgttggtcaataggcccaaagaacctgtggaatttcttctagtcagtgggctttacaagcttagagctttttcttcaatttggtgtttagaatctcgttaatggcctccacctgcccattggcctgcgatcgggctacagaagttggtgaagtgctccctgtcgaggtgtttcccattgtcagagacgatcttatatgggagcccgtaccgacacatgatattcataatgacaaagcttaagaccttcttggaggtgctttgttcatttgctcagcctcgacccacttggagaagtaatcaactgcgactattgcgtatttgactcatcctttgcccgtggggaggatcctactaggtctatcccccaaattgcaaagggcaatggactactcatgagtgtgatctcagtaggaggtccatgtagaaccttggcatatctctagcattgctcacacttccttacgtattctatgcagtctttcttcattgtgggccaaaagtaccccta

SEQ ID NO: 130615 - DNA, 794 bp, Cannabis sativa
ggtctaggtctaggtttgggtcctgagttcaggcctcgtgtcccgatctgagtctggtttggggtacaagcccggatccgggtctaagtccaggtccgaatctgaggtcggggtctagagatggggtttgggtccaactgtaatgatcgtcatacttagacatgaaattagtaagacacttagcactagttaattgtattacgtgattatatgtgtgttttgtgttttatgagcttaatttcatggaatatgtgttatatttattatttttttaattttagagaatttattgaattctaggtgtgatatgcatgctatgtatgaaatttatatttttatatttttctactcggtaatagtggaaataggtcggacgataatttaagtcacatggatacgagttatatcaagtaatttacgaggcaatattattggaaattttagcatatcatggtttatcaaggtaatataatggaccattgtacccttaaggttacgagcttactgtaataccctactaatttatgcatgctacagtatttttcttaattactatgcaacctttgctttaatgtaaacgtgatttaatttaaactttaattactaaacatgaagtgcattatatttataaattttgggatctcgtatctacattttttaactgtacataatcaaaagatgtcacacagcgactacaaaatcgtgagtcctagctgtcctgaagatccaatacttcaaattgaattgtctcgatatgtacaatcttcattcagctccaaactcattgtcgttca

SEQ ID NO: 130616 - DNA, 600 bp, Cannabis sativa
gagctttatgtaaaagggtacatattttttcttcaaatacttaacatcttggcctgttcactcttaacacggccttctatttccattatgacctccacttaatctcacaattaacaccaactcttgacgttcaaattttatattcgtaattttgcgatttgcgcattttgatcatttggttcgtcattatattttcttaattatgttactttaatatgggtttttggatcagctgtgtttgttaaaatttttatttgaaactatatatgtattatatatattataagagtttttacatcatatattcaatttttgactttttatatttttattgtggggtagaattttttttcaaaatattgaataagttttatactgtgtactgtgttaagtttttacggttgttccacgtttattttttaatcttttcattgttattttaattattctattttattattttacagttattttataaaataaaaacaatacttttataaaaaatttcttgtgacactaaaattttaatcttttacgtaaaatgtaatatttttttttttttttttttaaaaatccttatattaaagggtgtttgtggct

SEQ ID NO: 130617 - DNA, 929 bp, Cannabis sativa
ggaatatatcctttctaaacatcttgagaactgtagctacaattcactttattttctttagtgatttgcgcgacattatctcaatattaaaataactaaaatgggagtaggtcattactcatctataagggggtcgaacctctacaattcctggtaatctttttatttatttattatatattttcaactctttatggaacttatgaagcttttagaaggtcatatgagcacaagagtgaggtcctgttgtctagaataattgatccttgaattctttcttattagggagatcaacgataatcatgcgatcccccgtaaaagttatgaggtaaaagaaaccttttgaacaagtcttcctcaccgaacttgcttttgagggtatacatacaagtaatttcatatggctcaggaccttcccatcccagcatatggtataaagacctcaaagaggccaaaatcctataactatttgggtttaattggaatggagcaattcttacataatcacattaatatataaagtaaatcttcagaggaaggatagcccctacacgtatgtgttcgatactttaggccccaatttttattgagtcacttgtactgcactctaaattattggtgaggcaaccaggtggaaaataactcctctcatctttctcaatcgatcggcacacaaagccattgccttgtttaataccacaagagtgtaaaaaagggccaacatatgaggctattgaagttacttttgactcaaaaagttcaacctcaaattgcactgaggaattttaggacaatttgagtttatgagcttttggcatgggggcataatatggacatataaagcacctgacgaaaaagtaatgttaacaggaggtaaaaaaaaaaagtttggctaatgggtattttagtaagataaaaggtttcaagcc

SEQ ID NO: 130618 - DNA, 964 bp, Cannabis sativa
tactgaggagttgagtaagttggtgtatttacaagcaacaatatatgaaacatttcgactatatccatcaataccttttaaccatagaactccaactaaagaagatgtttttccaagtggtgatcgagtgaaggcgaagcaaatggtgttgacttgtgcttacacaacggggagaatggaagaggtttggggaaaagattgtttagagtttaagccagagagatggatttcggagaaaggtgagtttgtgtttgtgccatctcataagtttccagcctttcatgttggaccaaggacttgtttaggtaaagacatggctttagttcagatgaaagtcatggccctaactcttcttaaaaattatcgttttcatgttgtggaaggacatcatgtgtgccctaggatttcagccaccattagcatgaaatatggactcaaaattagggtttccaaaagatcttgatatatcttaaacaaatcaatcaattaaagagaatttattttattgttgtgtgtaattttggcttttgataagaatataatgttatgtttagcttagcttagctggtcactcatttatttttattcacaacaacaagtattaactaatcatatatttagtcacaaaaaaattataatttttataattagtacttaaagttatacgaattttttagtcatcacataataatgaatatttaaaattaatcacaacgtttttattttttgttacaaattttattatgattaaaactaaaattttttatagtaacattatgattttctgaattcatttaccatataattaaaagaatttattcatttgttttttttagcagaaaagaatttattcatgtaggattttaccaatttgccctacaccaacaagaatattaatatcagtatcaaaggtcaaagttgacctttcctagtctaatttaaccttagactaatacggcaccgt

SEQ ID NO: 130619 - DNA, 1422 bp, Cannabis sativa
  modified_base (399)..(402): a, c, t, g, unknown or other
  modified_base (1367)..(1370): a, c, t, g, unknown or other
ttaggatgttaatgaaacatagatggtagtaaatctagatcctggtaaaatatttccaacattatctacaccccaaaaattttaaagacaccccattttaataattttattttatataaaatttatatatttaattatactaattttttttaactttttttttatttcatattcttaaaaataatacctatgaaaataaaaaaaaaaattatattttaaatattatgacagaaaattatataaaattttcttagaaaaataaaaaatatatgtatacatgatttagaaaaaaaaaatatgaaaataaaataaaaataagtattgaaattaacataaaataatacaaggaaaagatttgaaaaatatattaagagtaatttttaaaattatataagtatnnnntaatagggtgtacttatcattttatagggtgcaaatagaactcataaaaatctataaatttagttttgactctataaaaaaaataatatgcaaacttaaaataaaataaaaaaagacaaaacacaacaaaaaaatgaagcaaccctagtacaggaaaacagagatgttcaaaaaaacacaaaaatcaaactaaggattgtaattataatattcaatctcatattatagaaaatcttattataaattgaaagaaatatatcaagacatcaatcttgttaaaatatacaaattatacatagattaattctaaataaactacaaaacttctagagaaaaatatattacttttattattcatgtaaaagatagaaaaataaaggagaagtgcttttaatttttttcgtaagagagaacaagagtgttaaaaaaatgagatataaaaatgtacacttattatatatatatttatatacactagttgagaaaaaacctttccataaattttaaaaaaagaagcaattagaggcatgaaattaacatagtaaaattaatttaattgttcaataaaaatgctcattaattaaaaatatttgacaactctaaaaaatgacctaatattaatgtatatatcaaaatgttgaactctttattaataatcataaatttttttacaagtttttcaaagcataaacccttacattacatattatgtattagaattaaatttcaaatagtaatatccaaaacaataaagaaagaggtctaaggtgctcatttgtgataattaagttctcatcaacaaaacacttaatttgctagaaaccctaaagggtaattaggagaaataaacttttggacaaagatagtataccttgttcaaatcatggtaatcccgactaatctacactccatattttatgagtgattgttgttatattatttataataatataatatatagattnnnnatgtgtaataaactaataatatgtaacatatgactatattagttgtcatctt

SEQ ID NO: 130620 - DNA, 668 bp, Cannabis sativa
aaaccgcaaccgcaccgcgaagaatttcaaactatattttttttgcggtgcggtgcggtatgcggtgcggtacaggcagtttgagcggtttgatgtacacccctaggagagagtagggtggatgaagaggtcaaagaggatggaatattaaagtaaagttgaaaggatggagaggtcagagaggatggaatattaagagtaataaagtttgaaggatggagattaaattagttgttaaaattaatataatattttttttttcagaataaataggatttattcctctgactatgactattgtagagttttgtctttgaattttttttcaattacgaagtttctcgaactataaaaattattgacggttagaactcgtcaaccaagtgagtggtcggaaaatgtaaaaattactcagggttgcgataaagatgagaggaaaaatgaaagtgaaatgatgaatactctcctctctattccattaactatatgacttacaacatggacttccaaccccctcacatctgagattgggttacttataggctctagtggccagaggtacaaaatggtcaaaaggtatcaacacatcggtttcaagctgtaggctgcagatgctggtggtggccttacgcctcgtactcttgtttggtgtcaggtggtcccaggtc

SEQ ID NO: 130621 - DNA, 2344 bp, Cannabis sativa
  modified_base (2266)..(2274): a, c, t, g, unknown or other
ttggattcttattttaattgaaattatcctttattattttcctcttagctttttcatttagaatttacttagatagtatatcattggatggatgaattataaatcatctgcttatgatgtcattctattttttttttctatgaaattgaatggcatagatgactatattctcgatattctatcctgaaatgatataaatcttcgaacataaaaatctcctacttgcatatgcttactaaaggcaacctaaacttaaggctccacccaatgagctcatgatgatgcagtctccttggcccttcgcagtgtgggggatatacctaattggtcaactcccaaagggaaaaggaggggaacagtttgctatcgtcgtagtagactacttcaccaaatggacagaagctgaaccccgggcaacaatcaccttcaagagggtccttgactttgttatcaagaacatcatatgccggtttggccttacccagaagattgtgtcagacaacggcaaacagttcgacattgacatgttaactgatctctacaacagacatggcatcatcaaaagcttctctgccgtggcccatccacaagcaaataggcaggtaaaagctatcaacaaaaccctcaaggacaccttgaagaagtgccttgaggaagcaaaaggcagctggcctgaactgctcctatatgtcatatgggttgcataggacaaccgagaagaccaccactgggcaaactccattcgctttagcttatggctacaaggcaatgttgcccgtagagctagtgccaccgtctcacagaagaataacctatcaccaacaaacaaacaacaacctgctagcagagtcccttaacgaagtagaagaaagaagaaaacaagctagcctaaagctgcaggcctatcagcaaaaggtagcaaggcacttcaacaaacacgtcaagagcagaaaattcttcataggagagatggtgctccgaagagtgtttctaaacactaaagactcagcagtaggagtgtttggacataattgggaaggcccttatcaagttacagaaataactagtaagggattctacaagctgggaaggtacaacgagaacatggagctcgttctcttaccaagatattggaatggagagcacctctgcaaatactactaataaccagcttacagaattctactcaaatgtagcaattctatctactcagcattagagtacaacaagcgctagcacccacaacccttcttgggcgtggtctcccactattcttcaatagtggcctttgtttctgcaggtgagtaggggtaggcacttgatatctaaacgctaaatttgtgtattataggcttgtagattcaatttatgtaagttgtacagcaacaaagaccaattaatgaataattgcatatttatatattttgtttattgtgtctatgaaccacttgctcactgattaacttttcaaagtcattctattagttccacatgcgtactatggtaccctcataaagcagtacacatgcaaagtctgtgaaacttggtgaatagcaagtgactaagagacttgtctgcatggtcacttggggggcacccatactgtataatgtatcaaactagcataaagaacttatgtagagaaattttaacgcttagtataagttactaaatctgcctctaagtcatgcaggcatactttagcttggcaaagtaaatctagacctttacttgtcaaggccctaagaagatagccaggattaaagaccacctggtcggtcacataatccatgataaaaaagcaacatgatcaaatacaagtagtgttcaaaaacagttggctcatggctaaagatatgaacatgaaaatccttgggctgaaaataaagtaatgatctaaaaaggcctcaggccacataggacatgaatataatgttctgaaaaggctacaggtcacataggacatacaatttcaaaaaggcagtaggccacatggaatgcaaagtgagaaattatcctgagctaagatgccacatgccctaaaaaagccacaagctatggagaacatgaagaaagagtctatacaatacaaacataatgctgaatgctaataaaaattccatctacctgtgtgcagaggtagcaagagctaaatctggagtcaccaagtcaagacctacagagtctaggccaacctcatcgtcactgtgctagccagcctggtgggaaatatcctggccggcctcctgttggaaattattttacnnnnnnnnnagatctactcacaattatgttgattaacatcctaaatatgaacttctaaaacgattataagtaaacacat

SEQ ID NO: 130622 - DNA, 724 bp, Cannabis sativa
gtataaaagaaataaaaatgggcttggacagtaaaaatgtaaagtttgccgtgtctcagtatttttgaaaacatttggtaaaaaagtaatatttttgtaagtttatatattgttattggttactagtggtgtctaacatatttaatacgtagagtcctatgattagcgatattctctaaaaactattttttcaagttacatgagaactaatacttaataatactaataatagtatgacaccgagaagagtaatgatgaacaccaattatacttcttagcaattatgatgaaagtgactagttcatgtctattatccataaatcgatagaaagaattggaaaagagaggaggattgttcttgtgtgtgactaatgtgtatgactatgataattaatgcatatcaactaattatttataacataaatattatttataaagtttgtgttgttaattcaaacttgcattattttctagaacatgtactgtaatttaaacttgtgatagaaatttgaccaacaggaacgaataccggcactacaaaaaattattatttttagtgacaacttttagtcacgatataaattttttctgaccaaatgtgacttttagtcacaacaaaaagttacttatgactaaaacataatatttagttacaagtgttgccactaatttagatttagtcacaacaaatatggtgacggaaaacacatttagtcacaacaaa

SEQ ID NO: 130623 - DNA, 1168 bp, Cannabis sativa
gatggttttgattttcaggacacaactaatggtggagggggcaaaccgaaacctgttacctctaatataagcaagataaaggagctgaatcttcctatacagaatgctctcatctaggttggcataaaactccctgaccaggttctcatttgggggttggagatgagtaacaaacagagaccacccacgattttcaattaactccttaatcctaggaaaatgcttgagcttaacacgatattcaggccacagtgggcgacgacatacattatcctgaaatctaagcaatttatcattagagtaaaacggtgcattggttttggttggctcagacacacttggtttagacagttttattttcttagcagccaacgaaggagctgcgtcagatgacaccagttttcttttcggggaaggcttagacatgggaggctgagacgagtgagacacagtgggagaatggaccttaggcgaggcaaaaagtattgacatagaccttgtaaaccgtctaggtaaaatagatgatgaagaaggtatacctgagagtggtgtacatggagttgtttcagacctggttgatgacccactaggtttctccaacggcatgattgacggggaatcgtcaccagtcaatgcagacgttttaacttgacgacccgccctttttcccataatcgcacagaccagcaagaccacacaaggattgtgaacacacgaggaaaatgaactgagcaaggaggaagtgaacagttcgactgacagagtacgtgaactcaaatgatggtaaaaggatatttattaccaattaatgaaaaagacacaaatgcccttcggacccaacttggaaagcccaagcccattaacaatagtaaaaccacagcatcccaaactcttctgagacaatacgtgcacaaatatgataaatgaaaatttgaaaaataccacatggaatacacacactcaacttgagttcaaaaattagcccaacagaaacaaacaccaatgctaaaaaaaattcatagaaagacacctacaaattaaattttggaaacttactaagacgtgtcgaactaatacattattgatctgtagcgttaatgtaacgtcctaatggtaaggcacgctacagtgctttttcaattaaagtgcaatctttgctaatcaaaga

SEQ ID NO: 130624 - DNA, 1853 bp, Cannabis sativa
gcggcttccatggagcaggagcagggacggcttgaggaggaggtggctgtggttggccgtgagacgctacttgtttgtacttagtggttgcagcaagaaaattctggcagtaattgttagcatatgagactaaattttctgctggtcgtggcctttgcccatgtaacaccttgttcctttcactccatattaaccacaacgtacaaaatatttgttccctttcaaatttggaatgaattgagtggagatgcagcatgtaatcacctttattcattgaagaacaagcattccaatcaaaagattgccttgaacacgtccatacctttttagcatatttacaagtaaatagagcattgccaatggtttcccaagcttgacgacatagtgaacatgtcgaatcagtgataatcttcctcttgacaagagaagtagccaccagtaaagcatcatttataactctccaagcgaaaattttaactttcagaggaagctatagtaaccagaaaaaaattccaccaagaagatgctgaagtggagctggaagtgttttctgtttcatcaagagatctggccaagtaatatcccgattggactgtgtatattttagtgtgatggtgatgccatatcagcctatctacggagttgaaataacttagtggaaccttgagtattctctccacatcaagaggtgaaaaaaactgctccagcagtggtaaatcccattggcgttccgatgtgatgagattggcaacagttccatgtgcaggccccatgtatcgaaaaggaaagaacgaactatgtcctaggagccaaggatcggtaccactaaggatagatcttccttcacccaccttccagcgtaaaccagccttgagaaggtccataccccagtgaatagcttgccaagttaatgatggggagtgacctaagtgagcttccaagactgaattatttgggaagtatctacttttgagaagctggccaagtaaagagtcaggcttttcaacaagacaccacgctgttttgcaagtagagcttggttaaagtgtacaaaatatcaaaaacccatgcaaccgtcacacttctttttgcaaagcaaattccaattctgccaatgtatcttagtaccattctcattcataccccaccaaaaattagccatcatagattcaagttgtttacaaaagtacaccggtaacctgaagcaactcatagcataggttggacttgattcaacaaccgttttgagaagcacttctcgaccacccgctgaaaaaatcgtttcattccaattgtgcataagcttccaaatcttttccttaatgtggctgaaaagttccttcttgtccttcccggagtaagatggcaaaccaagatatttttcatgacatgcgctgatgggcatgttgagatgcctgtgaaaaaatatttgggcagccaaagtagtgttaagggtattggagggtagtgaaatagcaggcctattaaaagaggaagtggtgtaatccgtagcagagcttcttggattaagagcagcattagaagattcaccttgataaaggatggatggttggggccgagactatgaacccaatttaggaatagttgagactatggccttgcgtgcaagacgagtgacaaacggccaggcattattctttgaaaaatcggttcgatatttatcatatcctgtcgttggcagtctagcacccttcatccatggcccatactccatatcatcatcatttccattatccattcgttccatgaatgctacacatttctcaaaaggatgcccaattaccccacattcaaaataaaactccggtaaacgctcatatctaaagtcaatc

SEQ ID NO: 130625 - DNA, 1201 bp, Cannabis sativa
ctcgcccaggcctcctgggaagtcactcggccaggcctcttgagaagtcactcggctaaacctcttgtaaagtcactcggccaggccttctgcaaggtcactcggccaggcctcctgggaagtcactcggccaggcttcctgggaagtcactcgaccaggcctcctgggaagtcactcagccaagcctcttaaaaagtcactcggccaagcctcctagaaagtcactcggtcaagcctcctagaaagtcactcaatcagccctcctgcaaggtcacttggccaagtctcctgaaaagtcactcggtcaggcctcctagaaattcattcggtcaggcctcctgggtagtcactcggctaggcctcctaggaagtcactcggccaggcctcttggaaagtcactcagccaggcctcctataaagtcactaggcaaggcctcctgcaaggtcactcgaccaagcctcctggaaagtcactcggccaggcctcctacaaaatcactcaaccaagcctcttgcaaagtaattcggtcatgacatttcagaacttggtagaaccttcccaagaaagaagagagtgaagcgacaagtaacacaaggacggagtaagcactcaaggagagtatggccatgcctttttcactttttgaagaaaataaggtacaaggagtggagacaccgcacctggaaggtctgaagacttgaccaagggtacgttgtagtcaatacccttgcagcccgggaccacctaacaccagacaagagtacaaggtgcaagaccacatcctgcacctgcaacttgcagcttgaaaatgacacattgtccccccgggaccaccatgtatcttaggccattagagcctataaatacccctctctcagatgtgaaagggtgttggaaactcattcttgtatcactacatggagagcattaaaaaattttcattttttctctttacttggagatagccacttgaagttatattaaatctttctcttcattttagctctaatttataagttgagtgattttctagctaatattttagttgacgagttctcaccgccaacaacgaacttaacatcaatatatatatactagtatattgttacgtgcgatgcacgtatgctatgttttatattaagtattatattatgagttcggaaggaaataaatgaataaaaaataaataatatttaat

SEQ ID NO: 130626 - DNA, 565 bp, Cannabis sativa
acataaatatataatatattttagtatataaagtaaagtttaacatagtattatataaatatatgacatataattcaattcaatatattacaatacaatatgacttaatacaacgtaccaaatgagccttaaggagttaatcctattcaatgtgctgtttagtatatatatgctcctatactttactactaattggtgttatattatgatttgatactaattggtatctaaaataaattgaatatgcaatttgttattgtgtatttaatagtattttatgcaattttatactaaaaaatactaattagtatttaaatatttgatttaactactaattattcaaataattaaaaaataataattaatatctacaaatttaggttaactactctagtaaacaaaatattacttgaaatattaattgtcaagaattagtattacaataaggggcattgctattaggcaccagtggtacctagcaccttcttgatatgtcgcgttgcgattggctagcgatactccctaaaagctattatattatattatatgagacccgatacttaat

SEQ ID NO: 130627 - DNA, 919 bp, Cannabis sativa
  modified_base (356)..(359): a, c, t, g, unknown or other
  modified_base (864)..(872): a, c, t, g, unknown or other
atggactctcattttccataccatgaaaggttggtaaaagttgaatcatgctaggtttgaaatcgaagttgggcatattcatgggatacattatgcaagaagctgtggtcgtacgcataggatgtacataatcttgtagctttcttggttggacttcctattattgagccatcagtggcggtgcaggaagtatgggtgatggtggtgaatgagaacgagtggaagaagacgatttaggagagttttctaaaatttcaacttgttgttttacaaatctccctaatttgtctctatttcgtgacattcactttttttgtatttttttttttttttgtgtattttcacttgttaaatannnnaaattacaactatgtaataatgcaagggtattcacacgagatattcgcaggccgattggaaaggttgccaaggtaccgctttgtcccacacttttattagaactcctcggggttgcaagaaagtgtagagggtactctaccacaaacctttaaagccaatttttcttagacagaataatttcagtttgtaccacttataccattacacaattgggtttacactaaaaaatttatgaaaacattttatgcacaaccattgttttgcctaaaggataaaagtctacaactaacttaaaataaaataaaaagtgttaatcctagaaacaaaagtgtacaaagaaaatactaaatgaaactagcaagtagcaacctaatagttaaaataagactatgataaatcaaaaaaacaaaaattaaaaaagaaagaaactaaggtggcgtttggtaatacttttttaatcagttttttatttttaaaagtagaaaagtgaaaatatttttcaannnnnnnnnctataaaactgtttttacttttcacttttataattagaaatcaaaat

SEQ ID NO: 130628 - DNA, 825 bp, Cannabis sativa
  modified_base (726)..(730): a, c, t, g, unknown or other
  modified_base (756)..(761): a, c, t, g, unknown or other
gtaaccactattcatttttgtactaaacttaaagtgtaaaatgagagagttggaggggtgttaaagagtgcattgtatatttgatcaatgcctctcatgtgacctgaattgtaatggcgctatactaattgaggtatcaacccaagtcccacattagaagaatatacaagagttattttagatataagtgttctaccttctctattagtatgagacctttgagaaggtgcttaaaaataaaaccgtgagggcttaggcccaaaatagacaatatcatacaaatgtcagagtcaaggtgaggtaaggtggaagaacgagtcctaacaagtggtatcagagttgaaggtttgttgggatagtgggttgtatttgcgataatgattacgactatacaagatggaattggtattaggacttgtgtcaaaagtcttcctgacaaaggtgatggttaggcggttcgttcccttggtgatagcggcccgacatggaggaagagcgaggcccgacaagtggtattagagccaaaagtttaggagcactgggatagtgggctgcatttgcgatgtgtgggagaagccctcaatgcgtgatgacctcgcgattgaagatctatatggtgccttgtatcgaaagcctatctgatattgaggtagttaagtggtgtgttccgttgatgattacgactgtacaagatggacacttaaattttttttacttttagtcacnnnnnaacttgtgactaaaagtgaaaaaatnnnnnntaattataaatcatgattcctatggtgtgattaaaaggtccgtggataaaagtattagtcacaa

SEQ ID NO: 130629 - DNA, 1048 bp, Cannabis sativa
  modified_base (221)..(221): a, c, t, g, unknown or other
aaaataaaaaaaaaagagagccaccataatagttgaatcactcttcttcttcatctattatttttgaagcctatagtaaattgaagagttgtccacacaattcaagtcaatactcaggcctttgtgaaagattatattgaacaccatcggaggaagagaagaatccaagttgagatcttgatcatactctgagacctaaaggatcaagggttagagatctnaacggaaggagacattatattctactgctactaatataacgttttatataactttatatgtgttatttcattattttaggtaattcatatttaggatgttagattataaattataatcaaacatacatgatattaaatctagatcctggtaaaataagttccaacataaagaacattagggtttggtccttaagactaatttcaaccactcttctcatttattcccatcaattgagttagaacccatagagagaagattagtttgtggaagactatatacccacaatctcatctcgtatctaatatcatagaatcaggtatgtcttctatcttattgattcatagattaatcttgataatctgacatgatttaagatccatatgtattttagatctaatttttaacaatttgttggatgggagaaattccacatcttgttttctctgttgttgtaaatgacttatgatttataataactagtgaacttttctcaaaaggaaaaaataatacatgctattttttttctacttcttaattgcagcatctagttatgatatcattcctttaaattattttaaaatagtttaatgtacttacaacaaaactctctctctatatatatatatatgtatatatcttctaaaaaacaacaaaagtttcttatattttagtttaccatgcttattggtaaactatttcgtcatacaaaatagacattataactattgttgtaacgccctaaaataattaggcacgctacccaaaaatacttatgaaaccctaatcccctaatcgagattactaaccaaaatagcgcagaatttaa

SEQ ID NO: 130630 - DNA, 712 bp, Cannabis sativa
cataattattttatgactcgtgagatatttgcattttttttaagggagacttattgttcttttttgctctaaaattcttagcatatgtacaattgtagattatctttttgttaaacaatgaaaaaattatacagtggtcaacataaaacattattggtcaaatattttacataaaataattacaaagattggccaaatgttgctagtgagaattttcagtcaatattctaaaggattagtcattgggattatggaaataaatagaaacattaaaaaattgcaagtactaataagagcattattgttgatcattagtgatacttagctcttgtaattagttagtaatactaactaaattaaattatataagatctcatattcttgaaatattatgactagactgattatatttttttgcatttgttcatgctgactttaggtctgttatattaaaaaataatagaaattgagctcagggtattattgcgtactattttgaaaaatacaagatctgaattatcatttaactaaatagagagtctgatcggtaacttctacaaacacaaggtccaaaatgatacttgtatttttctcattctttttagttataataggtgaaatattttaggtattgttgtgatatttcgcacacgcaagtgcacatatcgtttacaagtaatagactcactaagagtgaggtcgatcccacgag

SEQ ID NO: 130631 - DNA, 854 bp, Cannabis sativa
agagaattttgaatcgttatcacactctctttcatttccaagaattaccacgggctgatttagcaattccctactgggtatcggcccaacaccaatagggccctgcccaaccatgttcatttttttggtatttaatccactcccgctgtccttttcacaaatcccagaaaaaaactgggccttagaaattaagttgttgttgtttcccagcccactacttgatccaagaggcccatcacgtgctaacactggaggcccacaagtaatattcaaattacttaaagaattcggcccacctttctcaccttccacgtgttccacaataggagtgaaccgtttgaccctatttttcctacacatcaacccaggctcaaaacctacctcgtgattcacatcacaatttaaaagagtctctgaaaaaagcaaaggctcaggatgctttccaatggtcagcttgggtgaaagggaatcaacgcccaaagaaggaacgacctgaaactcttcaccagcagccttcgaacgccacgccgttcgtactaaggctcctcctcgtcccctcgaagaccggccacgcatagatctcgaggcctcaactcgggttaacagacccgcacccctagacagaggagtcgctcctttctccagtaccggggacagcgatatctcctggaaaacaaccatcgcaccacccccgttttcttgtcccaccaccatctcgccaccaattatttcaccatccacgactatctccctgtttcctttctcattcatattctcaatagccacaccagcaggatattggaaatattttaccaggatctatttactaacatgtatgttggattaacaaccta

SEQ ID NO: 130632 - DNA, 528 bp, Cannabis sativa
ataataataataattttaaatgaaaaaaaaatgacagattagatgccaaagagtggatggttcttttctacgtgtacaatgattgaaaggactagcaagtgaggctgtaagtgaaagattgagatttgggagtttatggcgacggtgtggtttgaacctcaacacggctccgattgctgtgaagctttgagagagaactagaaagtatagatctgaagaagaagatgactacaaagtctagatttgttttttgttgaaagtatcagaaagggaaaaggtaatgcaaatttagaaaagtttgaaaatggaggggtatatttggaagaaataatgaaaaagaaggtataaattaaagaaatttagatcggaggtaaaaatgagagaaaccaaattagaaaaggtataccatctaattttctctacagaattagtaacagactttgctagtgcgtaggccacaccattcgcaacacgcgaaatggcacaacaagaaccaccaccaacagcagctaagagagaaataatctc

SEQ ID NO: 130633 - DNA, 937 bp, Cannabis sativa
tttattttaaaaaataatgagttatcatctagtaagctactattttagtaaactgtatcttaaaaaaaaatatatatatcataacgaataattagtaattttacccttgaattttagacaatactgattattccccttaaaatatatagcttgttaagaatctcccttgaacttttatatgtagagaaatttagtcattctgttaggtttcgtctcattattctatttaaatgctaatatatttttgtaaattaataactttgccccttaaagtttgataactattaaatcatgctccctcaaaataaaaatgtgaaaaatttaacatttttttagtaaatcttaaaaaaattaatttagatcttataaaaagtcattttgaatgattaaaaaaattaaaaattaaattaaaattttaaactaattaagcaatttaaagaattatttagcacccacaaatgatataaatactatcgttgatttagctttactcacgtcagtagcatatttctatgtgggccttagcaaaaaagaattggggtattttggtaaatacatttaaccaactctaatccctttacccattaacatcttagaagatttcacaaaacccttatcgtttagttttcgactctgcggaaatatattagttgatgaattagtgattgtttatgtttggcatttgttcatatagtttcactaaagaatgagccatattcattgttcctatacacactgttaaaattaggtctgcatgtctagggctcgatcttggtaccagtccataacgatcaaagttaaaattccgtattttaatatttctagtttaattatttacttaagtgattaattaaatgcggaataatgaaactggtaatgaaaacaatttttccgtagttaaagaatacaactatgtaactccagagaaacccagaaa

SEQ ID NO: 130634 - DNA, 839 bp, Cannabis sativa
attatatgccaggtaaaaactacaaactagttatgaaattcttttttttttttgtatatgttcttaactttctcaatctataaactaataatatgttttgttttgggatttttcataggatgagtataagaatcttgagaagattggaatcctcaattgtggacatgagtaccatgcagagtgtttgaagagatggttacttataaagaatgtgtgccctgtgtgcaaatctgaagctttgagcacttgaaggagagtttgtgatgatgatgatgatgatgatgatgatgattatgtgtatagggggggttgactaaatgggggtgagctaaaaattgaaaagacttgtccttttttgtgtcctctttcataattttagttaatttgttaaatatataacagtgttgatacttttgtaatgcaacacttttgcatatacatataatgagtctattctatgaccaacaggaacatgtccagctcatttattttgttggttgccaaaaacatttgtacttgtatctatccaagttgtacagattttttttttctcattctttatttgtctttttatgctatttgttgatctatttgtgttttgttggaaaggaatgatattttttgtttgtgatattctagcttaagttgttctttcacaagaaaagcacatggtaggaaaagaagaaactttagtctattggggtgagacaaagtaactttagtcatatggggggccatgtgagatgttcaaggagagtacattgtgtttctctttgaaagggaaaataaatcaaatatgagtctttgttaggtgttttagagtgaacaattctattcca

SEQ ID NO: 130635 - DNA, 1056 bp, Cannabis sativa
cttctctacttttaaaaacaaaaagttgattaaaaaagtgttaccaaacgacacccttgttagtcacaatattaattttttgtagctaaatgtgacttttagtcacaacgaaacgttagttgtgagtaaaacatagtattaatttagattaatgttgttaataatttagttttagtcacaacaagtactgtgactaaaaacgcatttagtcacaacaaattgtaattattgtgactaatactcttagccccggatattttagtgacaccatagcaaatatgatgtataattactcacatatttttttattttaaatcacaagttttgttgtgactaaatgtaagattttttttagtgaaaatagatcctgtatgtaatgaccgcataaataaattatgtgaattaacaaagaattaagggattttaattatattttatgagtacgtgttttgtagtagaaagttatggccggcttattattagaaacaggcctttgaaaaatatttttttcaattacaaagatatatttgaattctagagctaatatacatactatatatgaaatttcatgttttccatgttttatgcccggtaataatagaatgtgatgatttggccattagtgtcacttggatacggtaaagtatcttaaaattagcggggtaagatgagtagacagttagtatgttgtgaattactggagttatgattttagaccaaattacccctaggattataagcttaccacatgagaaggaaaagggtaaaattgtcaatttgttataagttgaaatggttatctttagtgggatgtttagcttattcctaaggctttaatgctaaatattatattaaattaaagataatttggtattatctcaaaggttagaaaattagaaacgaacccttatctttctctctccctaagttcgacccttaggaaactcaaaagaaataaaattttctctctttattcaaaccaaattttacagtgattgcagcaaggatactgttgggttttatgccctaaataaaactctttacaatctgattagt

SEQ ID NO: 130636 - DNA, 853 bp, Cannabis sativa
tatctctaaaacacatgatttaaaaattaaagcattaccttcgttattagtgttgaaaagtctaggacatttagatttgaaatgtcccttctatccacaatgagaacgttggataatttttttgcttaactgttccttaattgttcttattgctagttcaatctgttgtgtaagataatctgaggaagtagaagcactttctctaatcttttcaactgagcttgaagttttaggattttcagaggaatctatctcaatattctcagcttttctgttgtcgtggcctatagtactggagaaggatctccttgcattcgacattgtcctttcataaacatacagttcagcgtccagcatgtctatgtcattcgagttccaattattgatcataaaagatacaaaaaattggttaaactcaggtgataagttgttgagagcaaattgaacactttgctcttttgataagataattccgagtattgttgctttttagaatttcaagttcatcatgagcaagtgtgaagtgatactctgaccaggagtcatcttcgcactttggggtttatttgcaaaggcgttgagtagatgcgtattggggtgaggactgttaaatagcattttaacaatacaaatattaataaacaaaaattaattacttggttcaaataaattcatacacatattcaaaaaataacaagtaaagaagatatgtttgcaaaaataccagaaatcaaaaacatatttaaattattttccaagtttccaactaaatgatatacagtgtcccgataggcgagagtcaaagataacatcaatgaatagagtagtcagctcatctaaaatggacactatt

SEQ ID NO: 130637 - DNA, 772 bp, Cannabis sativa
tatatatatatcaaagaacgacaagctatgccattaaagtacaaaatgcacaatcatttcaataaaaagaattgaaattatatgtgtcaaacaaaaattccaatatttgacaaaatacaaaaaatgactaaaaaaaacatagtcataattcttgtcaaaatatcattctaaaatattatgagatttaattccataatagaagattaaaattacttttgtaaagacacaaagtcccaaataaatttgaattttatttcataattctcttcaaaattgaattgtaattcaagtaatctctaaatttatttattagactaaaaatgagtttcaatttaaaataaactcaatgtctctaaagaatactagatcaaaaataatctaacagtatgaactacgtttgatttgattccatttaaaaggatacgtaggcaacctaattgccaagattgagtacaatttcaatttctaaaattctcaaagaggtcattcacctcgacaaaattcaaatgaggtcatacacctcaaaaatcccaagtgaggtcatttatctcaaaatatcaaagtgagtaaattctccacaaagttattgaagatacaaaatcttttaacattctcggaactacatttggcttgattcctataaaaagatatgtaggcaacttagttactaacactaagtacagtcaccgataccgcaaaatgatataaaacacaaatcttaaaattccataaaaggtcatccacttaggaatttttctaaatttttaaatag

SEQ ID NO: 130638 - DNA, 771 bp, Cannabis sativa
tttatataaaataaaaattattaatatggggtgtgtttagaaatttttttggtttaaataaaatttccattgaataaaatctacaaaaaaacattttcttttaattttttgattaattgaaacgatattttttaaatatgaaatatataccaattatgttttgcataaaatttagtatcttataaataattagttaattgtctacaaaaatattgatttatattttttttctacctaggtatatgttattataagaaacaaaattaagacaaaaaaataactaataattaagaattactcattataatagaattaattaggaattaattaatagaaaatatgagtgaataatttagatttatttgggctattaacaattttatatatttaatcagtaaactaagccttagattatgattttcataatagttaaaaacaaattgttacctataatttcttttttccaatcactattaaaggaggattttatagacatgcacattatattttaaaaatacatacagaatcaaattatggcagctttcattaaaaaaaaaatcatactatagtcttaattgtcatataaattggataataaaacggtagcaatatcaatgaatatgtacagtttcatattctcgcattttgaatatttattaatgttcttctcaaaaaaaaaataataaatacaattattaatgcataaattggattttttttttcttttgtatttaaagttaaaccttttttattactactaatatttaataa

SEQ ID NO: 130639 - DNA, 530 bp, Cannabis sativa
  modified_base (495)..(498): a, c, t, g, unknown or other
tttgattttttagagcaatagtgaatgataaaaataatgatgttgatcgagtaattagttaacttttttattaggaaatcattttatatactatttattaacttttttttttcaaatttaggttgcttcggtggtttttccgttaatttctatgtgggttgctatgtgaattttggttgtgatttagattgttccgttagttgctatgatagtttctatgtagaattctgtaaaaaatatatatatatatattttcaagtgtaaaaatgaaaaaaattcttttttattattaatattttttttttaatttttttgcaggagtcttacgtagttgattttgataattagaatatatattgtttttatttttattatatgaatgaggacatggatgagaacaaaatataagtagaggacaaaatgtagtgtttagtgtttgagtttacggttagtagttattattgttgcatctaatattattaggaacaaaagtcnnnnctcaaactttcctctattatgcataattgaat

SEQ ID NO: 130640 - DNA, 630 bp, Cannabis sativa
  modified_base (581)..(586): a, c, t, g, unknown or other
gttagccaaaactttcgacataataaatctcattgcataaagaaattggtctaagatcccccaggctttttcttctttggaattaatactatattagtattatttaacttaggaggaaaatgaccacagcttaaaaaatctctaacctgtcgtaacacatcgaatttcacaatcgaccaacttttttgataaaatcccggagtcataccatcatgcccaagagatttgtctggatgcatttgaaaaagtgccaaacaaacaccttcttcaaaaatcggctttaacaactccaaattttggtcagcataaccacacggttgaatacagttagtaaccgcttcaaaacccacctctgtagcggtaaacaaagcagaaaaataatcgagcataactctgtccaagccaccatcccaataaacccaattacctcttgtatcttgcaaccttcttattatgtttacgagctgtagcaaaggcatgaaagaacttactattacgactcccaacttggagccaaagttgtttagacctttgcttccaaaaaattccttgttgtgtacagggccggccctaggcatagnnnnnntaggcccgtgcctagggcccacactttccgggggcccaaaataa

SEQ ID NO: 130641 - DNA, 648 bp, Cannabis sativa
ccccttactagttacactctctttttcccattcttttttatatttcgcgtgtgcactcgactaatcaataagcattcatgatacagattctacattcacaacaaaagtctctaatatatttatttagataactaatttataaactacaaaaatataagttaattatttatatgataacatcaaaatcatatttgctgagatataatttatattatataaatatatatatatatatatatctcacgaaatgtaagataaccattaattgttttatttttaattatcagagatggaaatggaaactgtataattttataactctccatgaaacccattaaatttatataattgtagtttacaactgtttatgtttatcacaacacaagtaattatgagattaagctcggtatattatatatatatatataaatatacatcaagattcaagaagatttgtttatatatcattatattgactcgtgtttcagtttgaaaacatataatttccaatgtatatcatatcaaaagaccgatcgacttaatttgatcttatttattcttccaaatcaaatcaaatctagcaaagcgagttgggatcagatcaatgcatcacatatatatatgtattgttaagacaactaatagtgt

SEQ ID NO: 130642 - DNA, 508 bp, Cannabis sativa
aggcgaaaatcttgacctttggggggatttgaggtgaccagaatagtttccaccaagataattcttatgtggagctggaactgagttcttcttcttctagaaatgttgcaagatgataggcactttggaacgtgaaaatccctgaaggtttatgtatcaaacaaaataatgatgtgatattttgacaaaataacgatgtgatattttgagagctaatgtggcaatactattcaaaataattattattttgtctccctcattaattatgattactatccattagaactcttctttattgcaaaatcaaaaaataaaaataaacaaattacaaaaaaaaattaagaaaagaatcaatatattttttttgacataagaatcaatattgataatgtagaaacgattaaataagttttcggatattaaaaaggataatttttatttatatacaagtaaatgtatattattacaaaaaatgtgtaaaaaaatataattatataattctatacaa

SEQ ID NO: 130643 - DNA, 2565 bp, Cannabis sativa
tatgtttgtgatgatatatttttttgacaaagtgtgtgatgatatgttgatatgatgtgttcattaaaatttaaatataaatttataaataaaacatgtatgtttattatttattttttaccatatatatagtttgtacataaaaattaaaaatatatttttcataattaataaaaatgtatgataaattgtaaataattttttatgcacatataatataactaagtactgtaatgtacataaaattataaattcccctttaattaattagtctccctacaaaaataatttaactccacctaaaactaaaagaataacaagcttgacttactttagttttccaaacacgagtgtagtcttaaattcataggaaaagaatctaatagctcattccttttaccttaaatcgttttcaatatcaatttatgtaattttcttcatgttttaagtttatataaaaatttagtgtgtaattcgatatccaattataaaactgatataatccaattagtaattgaattggattggattttaatgtctaagtggattaggttagatgatttttcaaataaattactaattagattagattggatgagaaaaaaaaagattaaattggatcggatgtcagccctagtaccaaattatattccaaactcttgtccagttttactaacataaacctaacgtagctaaaagttcagaggacatgattcagtagatatttgaggacacaatttagtatatagacaatcgtcgcattagtaaaattgaacaaaatttgacaaaaattcagggtataatttagtacatgtgaaagttaaggagcgaaaattctaattaatcgtatctttttattacttggacaaatctatatatatctaaagctaagacataagacgatgacatgacgctctaaaattgcttaatagtcattttttctccttaattctctcatatcttttctctttaaaaaattattaaaaaaatatgataactaatattattttaacatgtatttgaaatttcataaattaaactaaccactacaagaaaaagtacttttgtcagcgagttttctcactggtaaaagaatttatatgtcaccggcataattttgccagcgagcttttgcaccgataaaggatgccagcaataattcgtcaacataacgtgttttgccagcgaattaccttaagtcacccaaaaaactatttataccgacgaattaagtggccggcataagttcctcgccgacaatgtgttgtcggctgagggatccctgatgacgttttgttagtgaggtattattcgcgcctaatttttatttacccgcggcgcaatatgtcaccgacaaaactttgctaataaaatattatttagttttcccggcgatatataatcgccgataattttttttaaaaaaaagttgtatttataataaaattaaaattaaaatcaaatgttttttaagataataataaataaatacaatccaaaatatattataaaattcaatcccgcaggctgcttgtccagttcttgttcaatatttttctctatgtactttcccctaactccctttttcttacttttgattgcacctgcatcagccattctacccatacaagctagaaataattaattaatcaacctattaacaaaagaaatatgtatttgatttaattaacaatgagtttaaatattacaatactttaaagtctacaagtcatcataattattaacacaaatttttgttaactaaaatattagtctttttgtaataaatgtagaatttatatagtaattaattaataaataaataataattattaaggagattttaacgtagttttgaagctaaatcttcatagtccatgagtctatcttattaaggataaatatgtttgaaaacaaaatataatgatatgatttagcaatagtatcttttttttttctctcccatcgctctccccttctaccctgggttctgtccctatttatagatgttcggagtgacagttattctcttgggatctattcattcataaccgtatatgaaacgtgaacattctccatgtttaatctttgtgcacatgggataatattaaataactgttcaactgctctttatctttatccatagacggttatgctgattgtgttagatagttctcgctgattgcatgttatctttcttaaccgtctttgtaggaagaaatgtttaagtgttaggttacaatgcatctcatggttctcctttgctgttttaaaaggtatttgcgaggtggttacttccatatgttaaaagcaaggtgaataaacgttgaagttgtttccattccttaagcatactcacaagtatgtgaatcaatgagctgcaagctcttactcacgattatgtaaatcaatgagctgcaagctttttgtttactcgttctgaacaactgttattgtgtattctatttttcccgagagtataatctaaaaaaatacatcaatactatagtaaaatatttatcctggtgtatttttgttgttttccgaatttctaatggtgaattt

SEQ ID NO: 130644 - DNA, 1181 bp, Cannabis sativa
atcgatgtttacttgttgaatttgtggtgattttgtgttagaaatcgagttttgaactttttaaagcttagtccgaatgttaatggcgttttttatttaatggctccaatttaaattctgttacgtacggcaggtaatatttatggtatatatgtgccttctgaagtttggagtaatttggataagttttcgtagtgtttcaacgagtgcaaaaattaaaattctcgtgtttgtcataactcttgactcgggtgtctgttttggacgttcttgttatagtgagactttctcacctagaaactcgagaccgaactcctattaaaatgaccagtgtattcactctcctcgatgaaagttgatacgtcgatgagagacccctcaaatacgaaccacgtttgaattagattcagtgagatgatgcgaatacgaccgagtcaaatcgaatacgtatggctggcatttggtagaacaaaggaacggttttaagcttgcatgtaccaggctatatttgagcatccctgatattgtcttggttctggcagcttgttatatgatgtccatataagtgactttaaaaggacgtagacttcttagactcaattagtctcgaatgcatcttgaagcctgcgagcttatgcaggattgtgaacagccaactcgcattatagaagtcgcacacgttgctgtatttagtgaattaagctagaaactgttcttcatttattatgtatacgttttttagtttgattactgtaattcaatgtatgaacagattgataataaatttaatccatgtgtaaatcataagacacttgcttcgtatatataggagtgatccaccgtgaaatgggaacaagacagaaatccttgcaatagtggactaagcagaccgtgatttgactgaactactatattctcttgtgttctttgtatttccagttttttttaagtattttgtgttcctgatttgagtgcctgccattcttggttgaatacttgcacatattctctatacttattattattatgggaacgcaatactttgttgatttagaagggaaatcactatggctggaaatcagacgaatggagatatgaataatggatcaatcaatgttgggacaatgaatgtcctcttggattttatgccctaaataaaaatcatttcaatataatcagat

SEQ ID NO: 130645 - DNA, 1864 bp, Cannabis sativa
  modified_base (27)..(43): a, c, t, g, unknown or other
taggatgttaatcaaacatacttggtnnnnnnnnnnnnnnnnngtaaaataatttccaacagagactccaacttaatgacttaatcccttgcactcaggttgtatatggtttctccggctagagtgttgcagccctttgacaaattcacctactgcttaccattggacaagctctgaggagcataactgtaatggcacaattcctgataattgatgccccttcagctttcaatgtcaagccaaccggccctatatgacttaaaagctatcacattaatttttcatttgtgcatcaagttcccaacaaaaagttgagtaggatatctcaaagaaaatcaaagaattgcatgggaatactataaccttgctctaactaaggtcaagaaggaaaatacctccgacgaaagttcagacaaggggaaaggaattgttcaataggaagttgcccaaggcagggatgaagacatggatccccgacttggggaaacaaatacaaattctaggccaatagaagaactgaaagaagtggaaatcgatccagatatcccagccaagaaactcaaatcagtaaaggcttgctactcaaaataaaattttctttaataaaatttctaagagcaaacctagatgtttttgcctggtcacatgaggatatggtcggtattgaccccactgttatgtctcatgccctgaacattgacccagactttcgtcccgtctagcaaaaaagaagactactggacaaagaacgggcacaagcactaaaagaagaggtagagagactacacatgaacaacttcatcattaaagctttgtaccaagcttgggtggctaacctcgtactagtgcccaagctgaacaaaaatatggccagtatatattgattttactgacctcaacaaggcatgtcccaaggactgttttctgcttccaagaattgatcaactcgtggaggtaacagccggacatgaaatcttgagctttatggacgcctatttgtgtagtacaaaatcagaatgcatgcacccaaccaagaacatacaagtttctaaatagatatgggtctatattgttataaagtaatgtcgtttggtctaaagaatgctggagctacttattagaggctagtaaacaaaatgtttaaaaattagattggacagaatatggaagtatatatggatgacatgttcgtcaaatccaggatggctaggggcatatagaggatatggatgaatgcttcaaaatcctcaaaaaatacaacatgaaactcaatcccttaaagttttcttttggggtaagctcgggtaagtttcttgggttcattgttaatgctcgaggaatagaagccaatccagaaaaaatacaaatcgtcccagagatgaagttgctagcaaaaataaaggaagttcagagcctaactggtcagatagctacacttagcagattcgtttcaaaatcaacgaacaagtttgttcccttcttcaacatcctctgaggtattaataaaaagttataatggatagaggaatgcgagaatgctttccaagaattaaaaagacaactcgtaaagcctcttatactcttaaaactgctagaaagagaagaattaggaatatatttggctaacactgaatatgctataagagccatgctaataagagaagtaaataccgtccaacatccagtttattacatcaacaagtgactttttaaagttgaaggtcggtacccccgaatcaaaaaactcatttactacccaatcttagccacaaggaagttaaggccctatttcaaagctcatcctattcgggtatatactgaccaacctttacgccaagtgttgcaaaagccagatgcctctgga

SEQ ID NO: 130646 - DNA, 608 bp, Cannabis sativa
ggcattgatacgatcaggggaggtgagaaacatttggggaacccctttcttttttctagaagccgaaggaaggattttgagtttctgaaatcaaaacttctaacgaggttagaaggttggcgtatgaaaacactctcttgctggtaggatggtgtccatcaactctgttgccatggccctcccggcctatgccatgacgactaacaaacttccttcttcctcttgtgtggagatggatgctattgtgaggaagttctggtggaaaggtaatcttgatgattcaaggttccttgccactaaatcttgggattctctttgtcaacccaaatgttgtggtggattggggtttaggagatttgaagacttcaacttagccttgttgtccaaactggcttggatgttggctagtggcagtgatagaccttggattcatattctctcaaagctaaatatttcccctttgaatctttctggcaagttattcctaaggcttcggatagtcccggttggaagggtatcttggaggcaagacaagtcattttagaaggagcgagtactatcattgataatggcgaagatattgatatctagtggcagccatggatccc

SEQ ID NO: 130647 - DNA, 527 bp, Cannabis sativa
atggtatatatatagttgatatgaaatcttagattagatatatatgttatttggagagacaaatggtcatgacatgtctcaaagattgtaaactcttgtattgaatattgttatatatgttgtgagataagatctctatctctctattttgacctagctagatatgttatagctagctatcttatacatagttttgttttctcatgtccgaccatatataaataaattagttgatttatgataaaaatgggattcattcatttcatttaattacaaatatttttcatgggaacatattttttaatatttgaggtgggaaattgttgttaattaaatataggattccaccttcaaagatttttaagagatctaacattgatcataactaaattatatgtagtattaatatattaaaaccagggccgaccagagggtggggtagccggggcctcggccccaggccccataattttggaggccccgaaaaaattaaaattgatataattacacatataaaaaatatataa

SEQ ID NO: 130648 - DNA, 1313 bp, Cannabis sativa
cggagttcctctcaccaacatgttcagttggaatcttgtgttcttgttggtggtttttgtgcagattatgtgaggcttgggtttcacctttgtgtatgccgctcaacaccttttgcatgcaagccaccatagtttctagcctttggttctttcagtggagatcgtttatcttatcttcatagtggcgagtttgggattttaagctcatagagtatgtttgcttcttttttctaagacaatgtcacgaggtattgggatctcgcgatctcgcgatattcgtggagtgcgccttattggcaatgcttttttacctttgcagactattctcctcaacaagtgtgatggatgcacttactccatcttggtgcgtgtttgtcggatcctcttcatgatggtcgccctctcctcttgtctgaggtacttggttgttttggcgaactttttcaaccatgagtgttggtggctctcttctggagatggtcagttgagtattatctagatgaatcgcgacaccctaaaaatggccagagcatctaggcatcttgcagcaatgataagtaagaaaatgacgtgacttgagcttgtcgttcccacagacgatgctaaactattaacggtaaaactcgtcaactaacacaaggccagaaaaatcgaaactcaaacataagacatagaataaagattaaaatacaaaaactttaagaaatgtttacattttttagagtaagtgttacaatgattttcaaccccctactcacatttgaggatggggtatatatagactctaatgaactaaggcacaattgcgatcccaaggaacaagatgacatccatgagctatagattgcaggttgcaggtggtggtcttgtgctttgtatatttgtctggtgtcaagtggtctcgagttgtagaggtagtgttgtgtgtaaccttggtctggatgtcaggacttacaggtgtggtgcctccgctactcataccctctagttaatagattacaggaggtgtggttgtactccctttgcatgcacgcctcgtcctttgtatgcatgtcccgtctttgtaatcgtaccttcgttgcattctttcccaatacttcgaaaaaattcactaagtatagttgtgtcatcgagaagagtattgtcgaaagacatgcatgtaagtattggccaagtgactttcatgctatcttagttgaatgacttgcatggtgcattggcgagtgacatgcaagcttaatgtgtgagaccctaacttgggttcgctcggcggaccttgacatcactcgatgcttagcttgtgggatggcggc

SEQ ID NO: 130649 - DNA, 2186 bp, Cannabis sativa
  modified_base (1639)..(1646): a, c, t, g, unknown or other
ttgtacgtgtgtgttttaaatacaaaaaatatttcttgtactgcaccccaccaaatagtgtgtggacttgatatatgacccaataattattaagagtttaagagggtttattgatatatctgattttggggtgtccattgtagaattaccctatattaagagtcaattagaaaccacataaatccacacacactaaccccacctaccccatagacccatcccccaatagattctaaagattattctccatctaactatgtgcaatttaaccctactaacaaattttttttttaccaaaaataatctcaacttctttctatgaagcttaaaattattctacaccaatacccatatataagaccacctttaatattcagttgaaatgtacaaaaaaaaaaaaaaaaccaaacttactataaaatggaggttcggttctctgcttagtggggaatcccttcttctttgacttggctaagcttttctttcccatgagtatttcagtcaccaaatttctttttcaccaccaccgaccgccactaaacgaactaggcctgcaaccaccgtcagtcacagacctccacctgcaaccacctcactattttcgaccaacccaaacctttcaacaaaaccagagcctcacgatttttatttgaactgcctgaaaaccttcgaccaggacccccacaaatcgatcagccaccttcgatcaaccttaaactcttttcttctcaattcacggtgtaaaagtggcacattttcatttttttttttttttgaaataggagttggaatttttgatttatatttcagaaaatgccaaatcattttgttttaatattttagatattttttttggtataatttttaagataatttgttatttgttatttaaattgtaataccatgtcattacatggtttatctacatgtaatatgccaaatcattaattttaaaccaaaataaaagggagtgtaacaaaaaaataaaattagtttaaataatttaaagagtattcttaataagtagaatattataggataaaatttagtagggaaaaaatttatttatttatttattttaaatatatattataggaaaattctttaatagacacccataaaatagactcattaatagttccaagtttcactatcctgtagtataattggtccacatacaaaaattttagaaaattattgtagattgtagtgtattgaattaaaattggatttgaattaatcaaagtgggatatactgatagacacttaattattattattatttaattgatttggtcaatatagaagcattcatatatacccttaattattattttattggttcacctggctaaacataaagtattaaaaatgataattataaatgattataatggaaaattagttcagggaaaacgaaaaagtcattctcttcaccgcccagaccgtcttctccggtgaaagtgaagattagtgcttttttttttttttctgtaatttcattttgattcattcttatttcaatttattcaaagttttaatatcattgcagaacccattaatctcttaaaaaatatttcaagaaaacaaaaagaaatttaattttgatcttgatctgtcagagagagagagagagagnnnnnnnnagagagagagagagatatgtatatgggtttagcagcagaaatatctatctcccttgttttatatgagattcaacttttttttattttgtaaagaagattggtcgactctttttttaatagggaggggtgggtgagtggacttaatataacagaatgtgtttaaaaatataacaaacacataattttagggtttgtacctgtgtgttttaaatacaaaaaatatttcctgtactgcaccgcaccaaatagtgtgtggacttgatataagactcaataattattaagagtttaaggggtgtattgatatatctgattttggggtgtattgatatatctgattttggggtgtccattgtagaattaccctatattataatatagggtgattctacaatgcacccctttaaaaggggtgtactgatacacccttagcttgtttcggcatctataaaaattttttagtctaatttttttttttcatattcatatacattatagctatttaagataacctacaaattttgagaaattccgaataat

SEQ ID NO: 130650 - DNA, 893 bp, Cannabis sativa
  modified_base (175)..(188): a, c, t, g, unknown or other
acttaacacagtatactgcagtgtatgaaacttataaaaaaacacagtaaaaaagtaaaaaatagtaaaagttagtatatcatgtaaatttccctaataattttaattttgatttttaataataataataatgattaaattatattctttaaaatgagtaatttgtggcataaannnnnnnnnnnnnnttttggcgataataatacctaaaattagttaaagtcattaaattttttatttaaaaaaaaaaattagtttagatataccaataaaaaaagtacacgtggataatgacttaacatttaatggttaggtaacattaaagtcagtgttaaacttagatatttatgtcgcaaattactcttttaaaatttattagtttaagtcatttaaaattataaaaatatatatttaaaaatacaaataaaaaatgacaaataatgatttagctcactacttagagaaaaaaataattataagttagttagtgttaatatcaaaaattaaaattaaatatttatacgagaattaaacttaatatttacctcgtgagtaatttactctttaaaatattattatatgaaatttaataatttttctttctaattattattatttaatataatttgtgttaattattatttttatttaaaaaaataaatttttcttttaatttttatttatttatttttcgcaaaatttgcatgtttaattattattaatgttttttttatagaaaaatataggttgattctacaatgcatttccttaaaaggggtgtagtgatgcactctctacttgtttcggcatctaaaaagattttttagtctaatttttttcatattcatgtacgttataactatttaaggtatcctacagaattttaagaaatt

SEQ ID NO: 130651 - DNA, 792 bp, Cannabis sativa
  modified_base (762)..(766): a, c, t, g, unknown or other
ttctttggattgagtttcatgccataccttcggatgactgggaaggactcctaagggtcatcactatgcgttgcatttttttagattttacgagcatgtcacctacatatacatccatatttttcccaagtttctccttgaacatcttgtttaccagccgctgataagtggctttaacattcttcaatccaaatgacatcaccttgtaacaatacacccctttatccgtttagaagctggcatgttcttgaaatgcgatatgcatcttgattttattgtagctggagtaggcatccatgaaacttaacaactcgtatccagaaatggcatccaccatttgatctattcgcaaaaggggaaaataatccttggggcaagccttgttaaggttcgtgaagtctatgcacattctccacgtgccattaggttttgggaccaaaatcgggtttcccaaccatagtgggtacaatgactctagagggaagtccttggaggttaatttataaacttctgccttcactgcctttccccttacggcgtccaatggcctcctcttgtataagacaggtgttgcatctttcatgatgttgaaagcatggcaaatagggttaggattgattcccatcatatcagaatggctccatgctagcacatcttgattttccttgactgtagtcacaatcttttctttttctatcggatgtatatttttacccactttaatagtcctagtggggtattctgttaggttttatgccctannnnnaactccatttcaatgtaatctatttt

SEQ ID NO: 130652 - DNA, 690 bp, Cannabis sativa
ccatttggcctagtattcaagattacaagccccactgagaggtacttcaaactattcaataactatttgatgatacatttgtaggcataataaaagtaattctattctttatattttaatttgctttagaattgaatcagtagtcctaaggcattgactccaatagaaattctctagatgtgaaacatcatagcagcattggctttccaaaacctgctcatacgcttagcaacttcagtaaatatctagacctcatatatgctgctttggagccttcgtcattatgttcacaaattttcttacatcaaaaaatatggaatgtgacattatttcttaaacctccaacaaaaattcgactaattaattagttagttatttattaactaactgtcaaatattacagcatatatattgggttcgttggcctagctaggggggactgctcatcttaattattttagaagatgtagactcaaccagaaaaagagagagacaaagtaatgtagagaaataagttagagtgagaaagtaatacagatatctgagagagagagagttgggattgaaaaattatatggagtaacattgataattatgttgagtaacattgatatctgagagagagagagagagttagtaagttaataagtgttgagggattacaccatgaaagattcattgtgattattt

SEQ ID NO: 130653 - DNA, 825 bp, Cannabis sativa
ttttcttgcactagaggatcaacattcacttgcgttttcttggaaaattcctgtcctcccaaaccttgcccgcccgggctggccagtgggtgggcaagaggtagtctatcagagtttgccagatttgggctgttctgccctgttggtggagtgttcaggggtgggacgtacatatcctgagcattccttcttcagttcaagccagctcaaatatctactcttacatgagggcccaagccagctcaaatatctactcttacatgagggcccattctagcaaacatagaatctatgggtctcaggttagaacgtgtctgactgttctgaagcagaacatcattattgcacatagtattctgagttctacgattagtgcactcaccacttgggtgactagtggcactgtcatcattatgactggggtaagaatctctattatgagacctgctctggccttgcattggcaggacttctcccctccccccttcatctctgggtcagccttgaaattgttcaatcaaaccatatgatctttccaataaagatctaaccatcattgggctaataggatggccttatttaggatgcagttggtccccctggccttgaggtttgcccatggtcccttgggcatggagttccctctaggacataaggaccttttcctcgacagggatcccttataaggggtggctctttgacctgagatccaaccctttcgttgaacaatctgatcaggtcattagcctctctattctagtagtccaactttgcctgttgggcttagaggatcatgacttgctgatccatccactcttggaattc

SEQ ID NO: 130654 - DNA, 1121 bp, Cannabis sativa
  modified_base (1058)..(1082): a, c, t, g, unknown or other
ttttagagatattcatatttaagatcttaacccttatgtgtataaggcgacttgcaacatggttcactactagaagcttctgaggatgcctccaggagggcacactactaatgagtgtgactacttgaaggatgaaattgatacttagaagcttctagtagtgaaccatgttgcaagtcgccttatacacattttccctagtgtcaactaggctagtgtacttagataattttggttcatattctttgcttagttattttttgaagtttcaatccgatttcagttcttctcaccccttttgtttctggaatgattcatgttctattcttgaacttctacttgttgcttcaactatttgggagcgatgctatatccaatttctgccactccatacccagaaaaatgagtttatgttggtgcagtcccagaagaagaaggtccatagacagccagagttactgggttcgaggaagcgtaatttctagaacatgtacttgtggggtgatacttggtgttgctgcaaatggagttggagccggagggactcaaaaatcttgctgataagcatcttctagattgatgatcccttgtgccttggacatgaactcagacagagtttcatccctcttcctttacattttccccataacaaggagccaactatgagtcaagactgaagggctacaagtttcatgtcatcactaaccttcatttttgccactgcttccatcattctctggatgaagttcttctggctttcaccgtgttgttgcttgatgttgttgagtgacctaacttccaaggatgggtgttgtttcgatcaccaactcaaaatcatcacttgtcgagcaagcatccaatgtacctaaatttttagttaaaaccacttcatttggctcttgctcttcaattataggttcaatctcttttatgtattcaactaatggtgattctacgtacattattcaaacaactctcataacgtttgttatttgagtaattgtccttaaaccatctaaattatgcacccttaaatttgttgggctttatgccctaannnnnnnnnnnnnnnnnnnnnnnnnatttacttattaatatagatcataaataacatttaatgt

SEQ ID NO: 130655 - DNA, 521 bp, Cannabis sativa
ttcataatatatcaacatatacataaatgtataatacccaacataattattaatttatgtaattgtggagatggctctgataccatttgttaatttttagggttcatatcaaagtcatagcggaagaggaaaataagattcatttttttaaaaaaagttgttgaatctgatatgaaccataaaccttgaatctaaacacaatatgacataaattaaacctaactacttgaaatacggattttaccttttgatgcctatcgcgggatccatgaatctttttgtatatttgtttgatcatccaatccacaactttatggatttgatgaagattccacatcagatctttcacattagcctcaatactcatgataagagtgggcttatagatttgataggacgaataaacttttctaattatagtgtattctcaactcatgagacactgtaatagagattggaaaaacaccaattctctttgtagagagagaggcgtgaggtaggaaagagagagagagagagag

SEQ ID NO: 130656 - DNA, 1023 bp, Cannabis sativa
  modified_base (924)..(944): a, c, t, g, unknown or other
aaaatattttattattctaattccctaattataatactctatataaacattcctaagacctcaaaagttttcatctaaaattttcataaagaaaaaaaaagagtgagtgaggttgaggttttctcatggctaggttttcaatctttttattttctcttatggtggcgttgagcttctgtaatgcgcaacctcttagcagtgtcaacaaaactcacataatttgtgaagaattacaacaattacaaccatgctcggctaacatattctccttttttattcgaaagcaacctatcaactctacatgttgtgagtctattctcagcatcgccaataaatgctcgggtgatctaatgcctatttggtttctcaaaagccaaaaatattgttctattgcaaatactattgaatcgacaccaccagtttcttcattggccccgaagcaaaagtcaacaccatttaacgctacatctcctattgttgatggtttcaaaaataactgtgtacgtgaattacatcgtctaacaccttgtatcggtgatataaaggcacacatgaggacaaatagtccaatcaattctacatgttgcgtctcaattctcgacgtgggcaaccaatgtcattgggattcatggccaaaatagtttgcacgaagcaaaaacttctgcaaaacccactaggaataagacatctctatcaatttgagctggtttagtttagtttttttttcttaattctttttctttaaagtttccttaattttattttagtgattttatttattttaatgttaggtgttttgtgtttttctctatttagagcttaatctatgaattgttctagttattgaatataattgataattgatttttattttagagttgcatgtgttttgctaattcaatgattaagggctcgtttggaacnnnnnnnnnnnnnnnnnnnnnttgtattatattgaattgtattatatatcatatttttatataatactatgttaaactttaatttatactaaaatattat

SEQ ID NO: 130657 - DNA, 594 bp, Cannabis sativa
  modified_base (42)..(48): a, c, t, g, unknown or other
tggattggatcggatgatgatttttcaaatccaattactaannnnnnnggatcggatgaggaaaaaaaggttggattggatcggatgcccacccctatatattactatgatatctatatatgaaattcatgtagtagattccttagaaaggtacgtttttgtaggtcttttatttgtttcgttttttaaaagaattttttgtctaatttttttttataattgtataagttgtagctatttaagattattattataaattttttaaaaaaaaataaataattacttgcaacacgtataataaaaataaacgtgtgcacaataaaatatgtaaattttaattaatttttggcattggaaactaattagaattttttaaaaatttacaagttatcctaaatagttacaacatatgacatcatgaaaaaaaaattaaactaaaaggctcctctagataccgaaacaacatataaggatctaccaaactactcctttaaaaagtgtattataaacttacccatctatatatatatatatatataattatgtatctatatatataattatgggtaatactatggtaggacctagcaaaag

SEQ ID NO: 130658 - DNA, 2677 bp, Cannabis sativa
  modified_base (1096)..(1096): a, c, t, g, unknown or other
  modified_base (1536)..(1539): a, c, t, g, unknown or other
  modified_base (1991)..(2000): a, c, t, g, unknown or other
aataagctttttgaaggcgaaccaggatcaattcacctggagtcatggggatatgatagggattgaccctaagattatctgccatcatttaaatgttgatccacactacccgacgaagagataaaaaaggaggcccctagattccgagaggccagggccactaaatcaggaagttgacaagttgttagtcaacgattttagactcgaggtgttttatgcctcatggatagctactcctgttctcgtcccgaaacctaacggaacttggagaacttgtattggcttctccgatttgagtaaggcgtgcccaaaagactgttttccacttcccaggatcgaccagttagttgatgcaactgctgggcacgagcttatgtcatttatggatgcatattctagatataacaagataaaaatgtacgtcccatatcaagaacatacaagcttcctaaccaacataggactctattgttataaagtcatgccgttcgaactaaagaatgttggggcaacatatcagtgagtaataaacaaaatgttcgcaagccaaatagggcaaaacatggaggtttgcgtcgatgataagttggtgaaatcgataaagagtaaggatcatacctcagaccttgcggaatgctttaaaatattaaaaaagtataacatgaagctaaacccaaaaaaatgtccctttgaagtctcctcgggaatatttttggattcatagttaacgcgaggggtattgaggaaaatccttaaaaaattaaggcattaatagacatgcaatccccgacaaagcctaaggaagtattggccctgacaggaagattggcggcatttaacagattcatttcgaagtcaactgataagtgtgtgccgttcttcaacatattgtgaggcaacaaaaagtttgagtggacaaaagagtgcgaagaggcgttttagagcataaaatggcatctcgcaacgcctccaattttggtgaaaccaataactagagagacgttatttctttatttagccatctcagaagatgcaattagtacagctattgtgcgagaagagggcaagcaccaacaacctatttactacgtaagtnaaaggttactaggggtagaatcaagatatccccttttagaaaaactcgcgttattattaaaaagctctttttactaaaaaagaactttttaaaggacaattattatacccgaaatttggctggaggacacgtgtcaagataaagggaatgtgaatcagtgtaaaatatttttatggaataattcattaattacgtaagtattagagtatatttgtaacttgctgactgtaaagtcttaagcgaggaatcaatgtacaaatcgacacttattgtattcacgagaaaccatatgtcgctaaatgtgaatagcgaggcattggagaatactgacacataccttacattgcaataagcatactaaatgtaaaagtcggatcggctcaaagaacaagtatgcgagatgatcatctcgctatgagaagacttcctatagcttcatnnnnctaacaggagcgaggctcataaccctagcaagtcagaagatttctttatacccacaatcgacgtaagacatacattatcgacctcggaaagaagaatggtcccaggtcgctattggaatcactataatcaagtttctgtcgagacatctccaaatttagcaattaaagacgtgtttaatacacgatatttctgacccagtaaaagttggaaaatcacagctctacgattttcaaaattatacaccgcatttacattacgtgatatgtaatcagatcccacgattttagggataatggctgtaaacatattctggtcaactttgtaattaactgcctactatgtaattataaatagtggcaaataatctttaaaaatggacgaaaaaactcatatgaaagaggccctaagaaaaatactcagaaatcgaaataagattgactcgtggactatnnnnnnnnnnaactgcaaaaccacgtaaaaaatcatgtattcatattttatttttctatagcttttactttttctgtgtgaaattattactgtgagcctcaaatttgattatcgaaaatctatgtaaacagttggttatttgaaaataaatgacgccatatgctaataaacaaacacgtaactagatatgatatgacgtcggttattttcaaataatcgatgccatagaggggtttttatactctttaattttgatcctcaaactgcctttaaatggtatcaataaatgctatagttatgatttttattaaaaaactgcttctaaatgtcaattttgaaccaaaccagtatttttacagcctttaactacctcttttatataaaaaaaaagtataaaagaatagcctctaaatatttttttcgtaatagtgcttacttccaaaataccatgagattatgtcaatgatgttatgcccattgccaatgatttaatcatcaccttttaaagatatacattagtatttgtataaaaacatatatttttgtttttaatatataatattctatgatttaattttctgcatgcattcgatttaacattcagttgttggcaatgataaaaaagaaagggaaaaaaaatagaaaaatacaaaaaaggaaaaaaaattacaaaaatactttgggccg

SEQ ID NO: 130659 - DNA, 1037 bp, Cannabis sativa
  modified_base (716)..(718): a, c, t, g, unknown or other
tccattccccagtatctacatacagcaagtaaagacgacattaaaatccaatcctatagtgggaaccggagatacgacagaggctggtggataagaagtggtccgacggagagagtgagagatagagagggtgtgggtgtggcggctggagtgggtctccctctatcttctttggaccttggcttcagtatttgcgatggagagtttttggggaatgtgcgactcaagtgagagaagtttttcttttttgaagggtgtgacaaaatggagttagagttttaaaaggttaatttatattatattcaaagttaacgtattataaaattaataaaagtttgatttgaaatattttaaaagtgttaaaaaaaatctcccaataatttcttataaactaagaattctgctatataggcacacttcatatagaatagatatatatgagtaattgcctcgccgaccagtaattttccaatggtggctttgtggcgtatgaaggtggtggtaatagaagtaattgccttgttttatctcattaatgatgagaatttctcgaacatttattacataatatttaatggtaatagcttcgtgttataatgggtatatggtgataagagtataataaaaaataagtatatgcatattttgttattttttttcttttgagaaatgcatatattgtttgttatttataaaataattattattattattannntttttttaaaaaaaaaaataacatctttaatcacaaagccaaaaagcttacaaagaattagagaggtcagttttacaaatattagccaaccacttaggtaaagaatgagaaaagacttcagcaatcttactctcaagacttttcttagctaaactatgagctatttcattattctttcgttttacaaaattaagctttgtacaatggggaaaaaattggtatcttttaatcttgttaataacaaggctaacatcacttaaaggactgcctgtatccttgaagctctccaccagcaccttgcagtcggatcttatttcaa

SEQ ID NO: 130660 - DNA, 926 bp, Cannabis sativa
  modified_base (890)..(890): a, c, t, g, unknown or other
agtataataatagcattatatttgcatttctcactgttcttttgaggtttgtaatggggttgaactgactttctaaattcaggtggagcctgctgttggtgcagcattgttggctttcaatttcttgatgaaagaatcagaagtaaataaacatagctaacatttgactatacagctgataagtaacacaagaagtttacaagaaagaagcccaagattataacttgaaatcgaatttttacacaagtgttttcatcactttatctctcttgttgctaagaaagcggctttaggtgttcctatggccatcagcaactatttgttggagtttcacacattaccaatgtacaaatcaactttctacagaaccaaaatgatatctttgtataacccaaatgatttttttgtttgattctttgtataaccagtgaaagttgagaagaagattttatcaaactccactcactctgttacatttgtttcctttgattctgatggacctttttttctcttctgtttaaggtgataatcagaagatagaaacggaattcaactcaattttttaagagaaaaaaaatgaatttgatttttttgttctttaacatggaaaagggaggcaagtgttaagagattcaattttatatgggtaaatatcggtataaatacttaaagttttaattttgtaagtgatataaactcaatgtttattattagcggtataaaaatataatgtttgtaaaattataatttttttctaattttattaatacaaattttgttgttgttttaaacatgacacatgtaaggttcaatttctagatggctaattaggatttttatcccctgaactttgacatgtaccaaatcatgccccctgaactattgagatngttggatttaaggatttttttctaattttagtaaaa

SEQ ID NO: 130661 - DNA, 1513 bp, Cannabis sativa
aatatatatatgttatctcaatttttgttctcatgacgtggcatgcttacgtagacagaacttgtgccacgtggcagtacaactcactaaaaggaaggccaagtcagaatttgagcaagcgaagacctcggcactcaaacggggatcaagtgacagaccagctcactctcaggagctggccagcccctcctggccggccccatagccggccaggccaaggacagcatcatgggcggccagccttgctagcacaaagccctggccaaccaaggattgcactgcaagtcccacaggacactcctacacgtggacatcaaaggtgggctacaaattgggctccaaaagctcaacaaaatagctgaataatatctagaatcaagggtattttggtcttttgtaaatatctaactaactatgctattttcaagggatttgaattgtaaacctagggtttaaggcttcctatataaaggccttaatctttagctgaaaacgtaagttccctaagccacctctaagccaaaaatcttaaactctctaagtgttagactctctctctttctttcttcttcattctttcacacgcttagcttaggctgtacaacaccttaggttgttcaacaccagacatcaattcatacattgtaatcataagggtactatagcagatcccacctatagagatctgaataataattctctcggtataatacagctaaaaggagagtaggtcgttacctattatcacaaggggtcgaatctctataacaagtcccgttatctattgctttgaattcttgtttgtgcacacacttggcaagcttcaaatctgtacaaccccgttattggttgatcacttttaaaaaggtcaacaatatatattaattaaattaagttatataatttttttagtatagcatattaatatattataacaaaagtgaataaatatattacattattaaatatatacaatagtatttgatatatcatattactaaaaattaatatatcgtaattatataccacaaaaaaattataacaatactaaattaatattcaaaaaatatatataatgctaacaaaattataaatatcactattaaaatatgcatacttactaaaaaatttatatataataaaataaaaactaaataccatcttaaataaatgatatactatatacaacaaaaatcatataccatacaaaaataatatatatatacttacaataaaaaataaaatcaaataatatttattaaaaaaattgtatatatcattgttatttgcatttttgcaagaatgacacgtggacactaattaaagaaggccaatgagtcattaagacacctaattgcttcgcttcgcactctgagatgataaaggcactgacacttgggatttgtgccctgaattgatttatctataaagaaacaaatttattttcattacttatttaatgtgttatttgattcatgtgatcatttagttatttaattaatttataaattca

SEQ ID NO: 130662 - DNA, 626 bp, Cannabis sativa
  modified_base (343)..(352): a, c, t, g, unknown or other
gaccacttcgatgtctggattgaattttcgaggaacgttcacgttgcaccttaataataatatacaatgtccttaatgagttttaaattttaattattatattaatgagagcaattttgttaagttaattaaatttaaatttacggtataaatatttgcaattagttgttgatttggatttctttcataaattttgacatatacgaaattgtgcttcttaactaaaaatttaagggttgtcaaaaatttctattaaattattgagattgttggattcaaaaattttcgtttaattttcactacaaaaaataactacttctagtgacaattttttagtcacaannnnnnnnnnttgtgactaaatgtgacttttggtgacaaaaaaaaaaaaactacttgcgactaaaacatagtatctagatacaagttatcactaatttatagggctgaacatttctagcgggttcgacccgaacccgagcaacccgcccgaacccgaaccgatgaacctggattttttttttttgaaaaaatgttcgggcgggttgggttcaacccagtaccctttcgggcaggttcgcgggttgagtttttaggaatagcgggtttcgggttgaacccgccaa

SEQ ID NO: 130663 - DNA, 685 bp, Cannabis sativa
ctccagaaccactgaaaaaaaaaaagcaaaatcaaatgaacctctgattatcttcttgaaggaagatacaaaacatgtgcagtacccgcatgttgatcctctcgttgtaacattttagctcgccaacaagagagtgaagagagtattagtggacaatgggagctcagtcaacatcctgtacaaggatacattgaagaaatgacgttagagaatgcgaagttgaagccttgcatggtaagcttgtgtggattcacaggtgatagtgtcgacagccaagggatcatcaaacttccattgattgtaggagagccaccattatcagcgacactgatgcaagaagtcttagttgttgatctttcatctatttacaatgtattgatgggtcgtcctgcattaattggacaaggggcagtaagctctatcaaacacttgtgcctaaagtttccaatgcaagcgggagtaggagtagtctgaggcgaccaattattgactcgggagtgttatcgcatagaacttcaaaataggagagcttatcatcaattgatggtaatcataacggaagaaggcgagaaggaagatgatgatctagatcccaaaatccaagacaaaaataaccagctcaaaccttttgaagagctggaagaggttattttagatccatataatcccgcaaaatgtgtataca

SEQ ID NO: 130664 - DNA, 531 bp, Cannabis sativa
  modified_base (477)..(477): a, c, t, g, unknown or other
gttttcttttagtaaattttgaacgaaatcgtagtaacattaacaataaaattttgatattatggcgaaacaaatgagcatactcgagtaatactttgaatgaaattatagtacttacaaattataatcttgaacaaaaattcatggggtttttaaaggaaaaacaaaaaaactaaacttcaccctaagaataagaatatatggggaagacgagaggtgtgtgtaaatcgatcaaatctaattataatcgattcacattaaatatttaattataatcggatcaaattagatgttatttttttaatattccaaatcaaatgttggattaagtgtctaaaaattaaatacatctaacatctaatcgaattaattagtatttttatttagtttggataagcaattaattttttttgatattatagttaaaatataaatgtatatatgaaaattaatattgaaattgtttttttttttttntttgtttttaaaattttgatttctgattaaaaaattgaaaagtaaaaatagttt

SEQ ID NO: 130665 - DNA, 1853 bp, Cannabis sativa
ttagtagatatcaaagttcggggatggtttagtacataaacaatcactgcaatagtaaaattgaatgaaattagacaaaactctttaaatccaacaatctcaattgtttatgggataattttaacgatcttaaaagtttaggggcatgatttgatgcatgtcaaaatataagggtaaaaatcttaattagtctttatttatatatatatatatatatatatatgaaaaggaacatcagaaacagagccaaatgtaatctaagctctattcaagtccagttttgtttgtagtactgtactaatgtgtctaaatcaaaccaaccatttaatcgggatgtctgtacattttgagatggtgagattcttgcaattgttctctattttatccacccatacatgggtgtacatatacatgggtgtacatagagtcatctaatctaattacaatcgaccgatccaataaaattagacattcaaattcaatcataattggattgaatcatatgtaaattttgaaaatccaatcagattggatgggacatccgatccaaaactgatccaattattatcaatggcctccatttatatttatatatttttaaaatacatttataattttatatatttatttaaaaatatatattaattgacttaatatacatttaatacattggattaaaaaaatatcttagatctaatatattaattctcatcttcctaagtgctaataaaattatcaatgtgtattcaataaatttttttaatagttttattatgagataataagaattaggttggactaaactaatgtttattgtttatgtaagattattatgttttaaattatatgttttatataaatttttaatgaaatcaacttaaatggtaactaaaatggatttgatggattcaatccaatccaatgaaaaaccaatcaatgcattcaatggttggaatcgatccaatccaatacatccattggatcagatcggattggatgagtcaattcgattggattggatcggatgacaaaatttaatatccaataaataattgaattggatcagtttggtccaaatccattgaatgtgatctaataaacaccctgcacacatacacaatagtatgtccatacatattgtttctcattattgtgatatatgttccaaaattattattttttcttgtaaaatggaacacaaccacacctaaactgatttaagacctgctttccatatccgacggttaaattttttgaactttaaagtttggcacggttaaaccattacactggaaacattatggctaaattccctaatcttcacaattattttgctctccagtcctttcgttcattttgatcaagtacaaaagtggactgttacggtatacacaagtctacatatgacaaatttttattggtccacttattattaataatataaatattaaaaaaataatttaaaatattttaaaatttataaaaaaaaaagaattaaaaaatatatttttttccttttttttttctttcctttttttcttcatctttctttttcttagaaccaaatgccatcagccctctcttctcttatctttccacaatgcctcctcttggcttggcaccgcgctgaaattggcttcgatttggcttcaagtccagctgtggtcgacgaggatgggatgggaatgtttacgacatttgacggtgatgagatccaaaacctgtagcccagatttggggtctcgtcgaagcatgttaggccatcaactcttgccatggaccaccatgatttgggaggctcttcttgatttgtctcagccacaccattgtgttagatatttatttgtatagac

SEQ ID NO: 130666 - DNA, 2021 bp, Cannabis sativa
aaataatttccaacacctatatcccacgctacaacgcctaagagaaaaatcctaaacccgtgctgaaattatcttctttttttttttgtaaacaaatcattttttttcagctgggcgctatagcgcagaggcacaatactaattttttctgcttcgaccttgctcagtaaatcatgcataacttttgcgtccggattccaaatgagatgatttaacatgttttggaaagatgggaacgagctctatcattttgggtttcataagctcttcgagaaaatgatgaaatcattgtcaaaaatgggctcaaagatcttagtccatcacaaaatatctttttagcacaaacctacacacttaaacacatcaaatctatacaaaaataaatactaatccatctaataattgactaagagtgagtgtacaaatatgcactcatcaacttcggtcaagactgaggctcagataaacctcgtgatcgaggtttctcaaacaatccttgtccgaagcaagcatgcgccgaggtttttctgtcaaacaaggctacatgcagctatttttctcgcccagcatctctctcgtatgagtatgaaatgcatacttccctttgttgcaccaatatgtgatttttcaagatttaaaaatcaattttcaatagattaaaatttaaatttttgcagaattttgcgtagaatcttaattttcaaataaaattataataatcagaaaaaaaaaataattttattaatttaaattatttttagatattagtgggttttgaatttgaaaaattaattttttcacaagcttgcgtttatggttattttgaaatttaattatttttatttggatttattaattttaattataagatcgtatatttacatattttattaataaaatttgaaatgatcttattttgacattaaaatattaataaaacttaaagataactaattgaatttcaaaattgctaaccatatcaaattttttaaaatttgttaatttttaaaatatatttttattaatttaaattataagattagaaaaatgttagtttttgatattttatcttattagatatttagcttaattgaaatctatatttttgtcaaaataacaagaaattttgaaaagttggttaattttgtttgaatagatattttaaagttttctaactataaaattttcaaatttagaatatttttgttttatttactttttaaataaaattgataatatcctaactataaaaatatcaaattttttaaattatttatttcgttaaattttatttattaaattataagatttgaaatataatattagaaatatctgaatttcaaattaagatactatgctacattatcttattagttatttaattaatttaaattatttaaataaactaaatatttgaaaattagttggacattttaatttttaaatttgaatttatgatatttaggagtttgtaaattttaatattttttaaatattttctaataacctaatttgaatttaagttaagatattttttaaaatattttattttagaatagaaatatcttaacctactttccagatattattacattatttgatggtttgtttaattatttattcaaaactttttaacaaacttattctttatataatctaaatttctatgattaatttattaatagatccaataatctaattttaatcatagtccaattgccaataaatcataaaaataatttagaatatgtaaattttgtaattttttttcatatgtgataaacctagtaacatgataggattcatccaaatcatttatcttgtatgagtctatatgtttattattgggcttagatgcatataggaagcctatttaattataaatattaaaatggactaggttgctaaaaaaatatgaacttgatattttttatttaggccccattagtattgggcttattcaattaataacaattatttaattaaaagttaaattcttctcttttggaccttgtgtgaga

SEQ ID NO: 130667 - DNA, 635 bp, Cannabis sativa
agggatctaattgaggtataaatgcaaatatatttatgaaaaatatcattgaagatcttgttcagccttgttatcctgctcagaggatttggcttcactggatggtgaggacctgctcgaacagttgcatacaggcgagcatccggataatacatactgaatgtttacacttaatcagattcacataaaactctctagatagatcgttgaaggaaaaatactcgtctagactttggaaatgctctccatgtgtcattcctattaaataccacatcatcctgtgtggaaattgaaataacaaaaagctaaattcattttttcaatgaacaaaataagaacatttactaagaaaatatatatagatatataaatatatattgctcttagatctggacagaaattctttgttttgtgtagcattgtctcctgcacaattgccttccctctcatcgatgcatcatcaattgaggctttcatcaatggatgttgaccttgcaaaagctccaatgtagcccctcgatctcgcttcaccctaagctgagcacaatctttctgatcccgctggaatccctttgatctaccttgacctagagccctttcttgctgatctcaccactagatcttgtctaagatga

SEQ ID NO: 130668 - DNA, 2047 bp, Cannabis sativa
  modified_base (1972)..(1982): a, c, t, g, unknown or other
atcatctcgctgattctagctcaggcgaggtttaaactcgaggagtctctcatgggcatctcagattttcttggaaaactgaatacacgtgtcccccaaacaagagtctggtctcgagtttctaggtgagagaaatctcactataacaggctatataaagaaagtgatgagaagagaaaatctgatcctaattctatgtcacacaactctcttctttcctagtctatctcaaatcactactacaaatatggtgtttttcgtcagtttgtagatgacatatattcttttagcgtcagtttttaaaactgatgtatatacgttagatgcaaaaactacattattttgcatcagttttaaacagtcggtaccgaaaattagcgacaattgaaaatagtcgctgatagtgtaaaaatcaaactttataaattcccgttggttttatacccacacaaccaaaaaaccaaaaaaaaaaaaaaaatagatcacgatattcatctcgaggtcacacccaaatcttaaacaaataccgagattttaatgttcattttaattttatagatctaaaatagaaatatataaatactgagatctacacaagtaaacatacaaagaaaatctaaaacagatccaagttcaaaacacaacagccaccgtcatgaaatcaaaaccaaaaaatagacaatggttgtcctcttcgtcttcgtctcctactcaaaaatctgtacaaaaaaaaatgtttcacccacgagatcaaaagagagtagagaaagagagcagagaacttacatggtggcatcgacatggtgtcgagatgagagagaagggaagaggccattcatggctcgtttggctcatcggcgtgtgggtggcagagctgttgtcgaggcgagataaagaaagggagaagaagggtcgcaagactggacgatccgaggaggtagtgcattgtgggattatcgattgtcaagagagagagagagagaaatgggtgcgactaattgtgttttaggtttaggtttacatttagtttttatatgtagggttttatgtgtcaattgggcctttattcaatcgagcatttttttcttttatttaatgtgtctgtttctaattgacgctaggttgcgtctattataaaccgacgcaaatgtcgaatatgtcattttcaaactgtcacaaaatgctttcggttccaaactgacaaaaaatcttattgtggtctttttgtgtcagtttttggcattgaccgacgtgttgaccgacgcaaaaatacacttttgtactagtgaattcactatgaaaactctctctcaaaattgttccaaaggtgttttgagtatcatcccacactattcaagttgatacccaggcctttgtggaacactgtggtgaacacatatgaaggaggagaagatctaggttcaattcttgacaatacactgcgacagaaaggaacaagggttagagaactgaacagaaggagataatatattcctctacaacaactgtaaggatttttgaatcccttatgtgtttattttaattgttttaggaattcatgttaagatgttagattagtcttaatttaacatacatgaagagtaaataagatcatggtaaaagattttccaacaactggtattagagcaatgataattatttactattcatgaaatgtagatttaaaacaattttgtatgtttcttgtgagatttgaatttttcatgttagtgtttgttatccaaaattttgtccacccaacgtggcatgtccacgtaatgcaagacagagtacatgtggaatacagccttgccattagcaagtctccatacaaggtatggcaaaaccgtcaagcaacaaccaaaaggagtgaagcgaactatcaaggggctgtaccaacatgtttggctatctaagagaagcgtataggccagccaggttgagcttgtatgtgttgggaatattttaccannnnnnnnnnntactaacaagtatgttgaattaacgtcctaaatatgaattctctaaaaaaatgaaaataaacaca

SEQ ID NO: 130669 - DNA, 846 bp, Cannabis sativa
gtgaccatggaactcctttctgcagagtattattggtgactgtgtgtgtttgagactgctcagtaacagcaggtggaactttggttaacttggcacgaatgaaatcctgatggaagttggttacataaaccacaatagatgaccgtggccttggttgtccaccatgaaaaattttattacggtcagaccaaattccccacataatacagatgagcaattcaaattcctcctgattgtacattgaagatagatgcagcaagtaatctctattgaacattgactgagctttgtgataatccagagaaaattttgaatctgtccaaatccctttagcatgcttacaaccaaaaagagcatgtcctatagattccaaattagaagtgcaaagtaaacatgctgctgaatctataatttttttcttgaaaagggcagctgctaccaggaggatgttgtggaaaactttccaagcaaagatgcgaacttttggtggcaaattcaggttccaaaaatacctccaccaatctcggtgaggatctgaagtggaagagatatgctgctcctccaaggatgtggctaaatgaaaaccggatttgacattataaattccagaggaagaatgatgccaaattaatctgtcttgagcagcaaaaaaaacttagagggatagataatatcttatcaacatcaataggctgaaagaagtcatttaacatatctaagttccattccctttgatcggttatgaaagtggaaacaggtaaggtaagtggacctgtgtagcgaactggtttgaaattagtataactaggaatccaaggatcgattccagtagctatattaactcca

SEQ ID NO: 130670 - DNA, 1385 bp, Cannabis sativa
acatttttacagctatacaaaactttcctaaaataagtcctaatttatagcgacagaatcgcactctacagtgacgaatcaggaaactttccaaataagttcaagatcacgatttggactttaattcctaccatataaagattatatgatctgctatcttcatagaaaaaccaaaacgagcaactagcaaaagggaggtcaatttttccaaatttaggaaactttccataaaaagaattcattctcttatatgacaagtttcctaaaataaaaacattagctgtaaacaaaagtttccttaaaaaaaaaaaaaacaaccataagcacaaaattaacacaaaaaatactatttaattcacacataaattaaataatattttgacaatcaaattgtcaaaaaaaataacctaacacctctatttaatctatacattatgatgagaagagcaagtgaacctttttatttccaaaaatatgattttcgaaagagatcaagtttatttaaattactcaaaagtgtctgagttgctaaataatatagagataataggtctgtattttttttcttgtagaaagttaggttagcataattagatagaataattagtatttttttctccttgaactttcgacactacttgattttgcccccttaaatatacggcttgttcaaaattctccttaaaatataaaagttacataattatgccccttctgttaagttctattttaccgttaaaaattagtatttttaccccttgaacttcgatcaatacaaaattttgcctctttttattaaaaaaaataattttaaaaattatattctattaattctaaaaaaaataataaaaattattaaaaaaacatggtaaaaatattaaattaattaaaaatatgaaatttactttaaaaaaatctaaattattcctaaaaaatatttcaaactttattttatttataaacacgtatcttaaaatatcaaactaaaataattgaatatccaataaataatttaaacaaactaagagtttttgaagaaaaaattaaacttatttatatttataaactcatatcttaacaaataaaaaataataattaaaacttcaataaaaatataaaattattattaaaaagagttagaaaataaacttaaaaaatgttatgtttacttaaataaatctacgttttttgataaacacaaaatagactcaagtttgtccctgtaaaatttaatttttacaaaaattaaatttttaatatatttttattaataaatgattttttaataaaaaataattaattttttaaaccactcaattagttttaaacttttaattttcttaatcattcaaaatcttttttaagatctaaattaattttgtaag

SEQ ID NO: 130671 - DNA, 725 bp, Cannabis sativa
ttttataattatttttttattaagaaaattttattttaatttttttttgccatattatttaaaatttaatttatttttctttgatagatatattttttaagaatataaattggaagaaaaaggttaagaaaaacttagtataattaaagatataaattttacataaaataaaaattattaaaatagattgtctttaaaagttttcgggatctcatttaaaaaaaaaaaaaaaaagtttttgggatgtaaatgaaattttcctaatataaaatagaataatttttatcatgttgttcaaattgtccttaactcttttaaaaatggtttttgtttttatcaaataccattattgtacaaattaaacaaataaataataataaaattgtattttatttgatctaattattaaaacataaatagcttattatctattttctattaaatatttaaatatactataaatattattcatataatttagtcctctcatatattttgtaatattaaatgtatgtatgcttcaaaataaaaaaaaaattacacattattataactttaataaatatatatatttccataaaaaaaaatcaatatataaatatatatatatatggaaaaaaaatagcaaataaggcacaatattttttaggaaattaatacatagaaaatataaattgacactttatttataaagggctatttacaaaaatatgggaaaataaaga

SEQ ID NO: 130672 - DNA, 771 bp, Cannabis sativa
gacgattaaaagtaaatacttaatccaatatattagtatttaataaaacttgataatttaactgtaatatgttcttaagataatttaaaaataaactaaaaattattgcttaaatactaacgaaaacacaacttaaatgtgtataaagtataaaataaaaaagaaaattaaaaatcaatccctaaattgttgataattagataagaaaaataaagatatttggtaccaagccacgcattattagttttattcgtgcaagttatgagcttttggtgggttgcaaagcacatatattttgttttattttaggtgttatataatttaattttttaacgatacaataaatatttatatataatttaatttaattttttttgtttaattaaaagttttttaatataaagtgattaattgaaaaaaaaaattggaattatttttatttattcaatgtcagaaaataatagtgatacaactcaaaagtaaattttgaatgcaatatattagtgtaatgatttaaaagtaatagaaacaataaaatgaatgttataactataaagcaaagcttaaaattgtgaagtttattatttttttaaaaaaagaaaaatttctaaattgttgataattaaataaaaccaataaaatcattgaataaaatttgaagatcagagaaaattaaaagtacacataattaaaagttcctattcttttgctttgtacattttttattttctctagctaggtctgtcttttttttcgttaataatttgtcct

SEQ ID NO: 130673 - DNA, 530 bp, Cannabis sativa
tactcgcacttgttcttcatatagatttctttctgttattaataatatcatataaaattggtgttgcgaaattcactcgacaacactagccatcaaggataagcttcatcttctcgtcactcctcttgagttcagtccctagaccggagacatgagcagtaagtgaagtgttctccttattcgtagtgttgagcatgagctccaaactagaaatcccatccggattctattggacaagagcctccaagttggtcacaacctcacccatcgctaggagctcaacctccagggtctttacctactcccagagagcactcgacgaccccctggagtcaccatgcaaaaagctaagcttcatgaaggcctgaaaacaaagcaaggtcaagattagtactagaaaacaacactaactggccagcccctctatggtgctactgattaatggtgaaaaatatacatttagtaagcttaaagtataagataaattaaaaataaattaatattttcatgaaattaataagatatatttt

SEQ ID NO: 130674 - DNA, 1606 bp, Cannabis sativa
  modified_base (1550)..(1555): a, c, t, g, unknown or other
aatattttcctgaaattatgggatttgattacgtcccacgtaaaatatatgtggttattatttgaaaatcacacagctgtgatttatccgcttttactgggttagcatgacgtgaatttggatatgctgcaaagtgtatctcgctgggtcatctcgctgggatagtaacaataaccctgacagcgagctggagctttttccatgtcttttcgaggttgataatttgaatcccatcgtttctgctattgaagacataatgctccatctgacaatcgcagttcttggtgacaaggtgaacttcgacagttaacatcatttgaatgtcagcttctatctgagagagctgactcgacggagtagtggatctcattgaaagatgtctggagctgattagtgaaggtaccatgagtatgccttcctaaagcgagatggatgcctcgctattcgttgttcagattcgtccaacgggtatattatacgttgtgttgtaacagtcaacatgtctcatcactacctttatatacgtagcgaggttggtgccttgctttgtattactgatgtcatccttacaattgcgtcttctgatgtgaaatggtttcttgtcaatgcatgaatcaatagtttgtacatccttgtctcgctcaagactgtgtgttcagcgagttatagatatatatgctctatcaatctccacatttaatgagttattccattttaatatcctttaatataattgtcattatattcgttgattcatattctctaaggttgacacgtgtcctcctctgaagtgtcagccgaattttggatataataattgctgaattttaggttctcccagaacacatcaagaatatgaaggttgggggtacctatggataagaaaccaataggtcatccaaggaaaagtaaggtcggaagaagaggggagaatcgtttcttgtctagtcataaaagagtcacgatgcataaaaattgtgggaactatggcagttcgggccacaacagagtaacatgcaaagaatgtatttgaggcgtactctactattggttgtaataacatgttttgtgaattggatttcttatttaaaactgcttatttggtttggaattctgctttaaaataatgtcattagtaggtactcgacttaattgatgaaaaaaaaggattatttctatttttattaatattatcaataaaatgtcgacattatgttgacatactatcaacaaacacattaattttttaaaaaaaattctttagcgatatcatcgacaaaaggttgacattagagatgagcataaaatctagaaaattaaaaaaattgttcaaattgacctaccaaacatcgttggaaccgaaatcgacagaactgaaaacttaaaagattgctaatggttaaaaccgccattgaacagttatttttttttttttgtaataaactgaccaaaaaaactgaaactgaccattatacattaattcattaagtttttttgctttgtgtattgtagttacgagtaatatataataatatattattattttattnnnnnnaaagttaaaagaataagataattagtttttgaacaattaatttgtatgttt

SEQ ID NO: 130675 - DNA, 2038 bp, Cannabis sativa
attttttaaaaaataaactaaaataagttatatcaaatgttctacactcattttctattttaaagccttttcaaaatttgttgttcatgttctatatttatagaactagtaaagaggctgcgcttcgcgtgcggcagttaaattattatataaatattaattgaacaataaaattggtatcaaacaattttaaatttatttttatgcatttttttaaaaagaaaaatatatatttattaaaaaataatatatctatattgaaaactctaaataattcaaaaaaaaaatatcataaaatttcttatataaatataaaatcacacaatttttttaaatgtacataatagtgaagaaaattaaaaactgaacaatccttacacaaaatggagatataaactaatagaaagaatgcaataaatctatagaaaactcatcatataatttcaaaacaactatcatcaccatatctcatttgtagtcactattgtatctaaaattgatcttacatttaatcattattaatactatttctaataaatttcctctatacataaaataattcaaacaatgatcgatatagtatttacttttattatgtaaggggagagggggtgataaacataatcaagtttagaattttcatttttttgtatattagttaataatttattttatgggaaaaaaaattctatgtacattaatttttttaatgcatatatatttatttattagttattatagagaaatgtatagtcgttttttttttactttttaattaattagtgatctctaattaaataaagtataataaaaaattaaaaaaaaaaagagagaattaaagtaaaggagaaaaattagaaaaatgaaagaattaaggagataatagatatttaataactttattttttttaatttttaattaattataataaatttagaaattataaatagatagtttgactttgctttgttagttattatgtatattttttaattattaattatgaatagaaagttttttctcttaaattatttattactaaggtattatatatatatatatatatatttaaaaaaaaaagtaaaacttgaaagatatatatcaatataaatttgaaagagaaaatatattgtgtcatattatatcctttagttagatattattattattattataagaggttttttttttaaaagagttataaaaaagtaaaaaataagagaattaagaagagaatagataaaggtattgaagctatatttagttaaaaaaatttaaatttaaaattctaaaaaatcatgtaaatgaaatataaaaatctctattgtcatttgttgcaacaatttatattatgagatatataacaatgttaaaaactttaaagaaaattaaaataaataataatctatatttatatatagatttataacattgatattttgtttataatttttgaaaagaaataaataaaaaatcaaacgatgaattaaaaaagaatgtgattaatattgtaaaataaaacaatattattaaaatatatttcaaaacaataagttaaaatagcattgtacttgtatagttttcaatacatttagattacacttaacatatgtatattgttcaagaaaaaaaataaaaaatataattatatattctctcgtcttaatcacatcactttgtctgttttaatgtactattcccttaaggggcgtttggcacagggggttcaaaataatctgattaaggagaatattatgaaggagaatatgattatatgtaaacttattatagtgtttggtttatacatgggaatatttaattggattattgttaattagattatattgtttggttgagtacaaaaatcttatatattattttaaaaaagtgaaataaaatgaaataataattgttacatatctttaagctataattatacataaaataaaataattttttgttaattatatttattaattaataaatttatgtcattgtattaactaaaataaaaatctttcacttatatttttatat

SEQ ID NO: 130676 - DNA, 670 bp, Cannabis sativa
actcaattcaattggattggatcggatggcaaaatccaatatccaataaataattggattggatcagatgggtccaaatccattggatgtgatccaatgaacacccctactggccagctgtggtgttttagattcgtggtacctaccgaggcggcaggactggccacgtttgtcaagttcgtggagattctagttgtgactagaacacgaacatcaagatctgcagtcatagggtcttaaggaagacccattctcaatgaaagtaccaaactgttgaccttaaatttatctaaccgacagtggtgtcaaatttaatgctgatgcatttcatgttttacacaattataacagtaaagtaaataaacacataattttataaaggttcgacccccttagttagcaagtaatgccatactctccttttagttgtatagataccaaagataatagaacttagatcactatagtaatggggtatgaaggagctctcttaaggttacaatgtgagaaccaaagtcgacaaatctcaagtgaaagtaaagtagtgggtgtgtgagagagagataagttatcagacttagagtataaggcttagggtttggacttcaaacttagggtttagggcttaactaatgctttttatataagagagcttacatccctaaaatct

SEQ ID NO: 130677 - DNA, 795 bp, Cannabis sativa
ttgtaagaaaatgactggcccgatgctagtcagatgtgagtctgatgctggtccgatgcttttctgggttatgatgaaaatcaataaaagcaacaaaccagcatcatccccaacatcgggacaatcattaggtttttaaaaaagcaaaatgtaacataattgtcatcatcggacgacatattgaaccacatatcgaacccattaaaaacctttgaattatgtatttgcaatctagcaaaaacagttctagtctgacttatggaccgatgcatgggccgataggttttgatgtatatgacaatcagaccctattggtccatacatcaaactagaatcggcccatttggaaaaaaattagaaagcaaggatctataaattaccatcggaccctatcggtccagtatcgtgctagtaaaaacttattaatgatttattcttttggttgtgttttttgtctgatacttcttaaaaaaataatcaagataaaacataatcaaattaataaaaaagccaagttacattgtcatcccattaaaaacgtttacatatattaaaaaaatgcatgctaagttttggtagaataaatctacacaccaccgctctctaaattgcttcatattgtcatcgtgttcattatcaaacggaagttgtagcatgttatgctcgatgtgctttattgtatacatcccgcaatcacactctatgagacaaaaataattaaggaaaatattgaaaattaaattaagttacttaataaaaattcacttgtaattaagttaccttgatttcgtctgt

SEQ ID NO: 130678 - DNA, 508 bp, Cannabis sativa
agaaatgtcgctaaccaatcgcaagacaccacctttacaaagtgaccactcattactaaaaaaaatggccattagaggcagaatatttttctaccctttataggtaattttgaaaaaattcacaaccgttggtattgcaggagtcgctaaagggataaaaagaaaccgtagacaaaaaagatcctatagcaacgattattagccaaataaaggttgcatatgcagattgtcgattaattttatggcttcaaatattagccaaaaataatcccgccatagctattttttatatatattttttcatttattttcactgtatttttagttcgatgttgaatgattgctaaagagaattggagtcctttaacataaaacccataataatattaacacaaacaatttttttcttaagaaaaataagaaaaccacttgcaaagtaaaaaagtagtgagatcacgaaaaaatcaagagaaaaagtgagacatccatgagagagagagagagagag

SEQ ID NO: 130679 - DNA, 811 bp, Cannabis sativa
cacaatttttttacttttagtcaccagttttattgtgactaaaagtaaaaaattttgtaatgtagtcatcatttcagacgctcccaattttgtttcaagctcttgaaattgttgttgatttgttgtgaatctcaaagtgtgttgggtttaactttaatcacaactttttttatattgatcagtgtaatagatttttttgtgactaaaaattatcactaaaagtagcaattttttgtactattaaccagagcaccactggagcccttccattcatagcggctgtcaacattataataacaaaataagaaatggatctcaaaatcatgaagctcacatagactagggtaaggatctagaggtcatttaccatgagagatcctagatatggtcaaactgacattgtgaaatctcggatctgatgatctcctaaggagacgagacaatgacagaggttgcccattgtggccacgctgagagagacgagagaggttcgatagcaagagagaaagggggaggggtcagaattggggttttttggttctatgaattttcgagggcagaggtgaagaaggagagtgtggttgagagaatgggaggaagaaggagagggtggctgagagaggaggaatgagagggaattagggttagattttagggtttctaaaattatggtttttctttttaagtttttgattttaattcttttagttattaattaaaatttaattttcaacaaatttaatatatttttttcatttaaattttattttattttaaaatatttatttatatggatcaattaaattgtacc

SEQ ID NO: 130680 - DNA, 628 bp, Cannabis sativa
ataattaaatgacacatgagatggttgaagctacaagaaccaaaagtagtttgtagagacattaaatagtttctggagaaatgaagttgaacagggaaaattaaatgctttgtcatgattaatgagaagtaaaagggtaatggaaaggaatttgggattgaattaaggtgaagattaaccctagtatggtcactagagagaaaaatacaaaccacttatttaacttaatacaaatcacttatttaacttaatttattaacaaaaaatatacttaattaaaaatcaactagacatcatgaactaaaaaatattaatattagtatttttttaaatggaaaactaaataaaaactgataaataattaaattgtaacccaattttaatataaaaattaattatgcatcaaattcttgcgccaatcaaaaataaacttaaaaataacaccaaaaatccaaaaataaaagaaacttgaaaaagcaactacaaattacctatatatcaactcataatatttacaaaaaaaatacttaaatgtatgtaatcactttaatatggttccaaactacaagaaaagtaattagtgttataaaatattatttatatagatgtctaaataacctaaatttat

SEQ ID NO: 130681 - DNA, 1427 bp, Cannabis sativa
aattcaaatcatcttagtctcattgctatgaaaatttcaattcctaaacatttatttagtggctttccagacactacaaatgccaaagagtttttcaatgctgttaaaaaactatatgatactaggaaaacgttgaagctagacatcttatggatgcaatgacaaccactaagtatatgatgaatcaaatggagtaagagattttattctaaaagttgtgaatgttcaagccaagttgaaagatcataatattcctcttcctgactcttacattattcatcgtgctcttcatgcaatatctgcctctttacccttatcaagacaaggtacaacacttataattaaacatggagcgtcaataacctaatttctcagtttgtagctgaggtaagcaatttgtaaaaagagaagaaagaatattatcactatgtttcttaactcaagcccaacaaaggataggaaaaattagaaaagaagcaagcacaaccagagtttaaagatctcaagtaaccaagtaagagggagtcaaagactaaagtaggcacttatgttggcgttgatgttatctaagttggcacatttattcttgaattacaattagagtaaagattgtcttgaacaatgccttttatgttcctacttttaagaagaatttagtttttcttctacttttagttaaacaaagatattcttttattttttccaataataatgttgacattatgtttgactcccaaattattgacaacttttattcggatggtctttacatattgtcattggctccattagcttccccttttatattaaggaaacatccttattgtcacaaaagattcggtcatacttgcaaaagaaagagttgattgttcaattaaatctaaaattcttcctcctcttgatgcttttacttgggatacttgtgttaattttactcgtggaaaattgactaaacaaaaaagaagactgtcaattgtagtcaatctttattaaaaattatccacactaacattcactactacaaaatgggcctttagcttcccttttttcaacccattttataaaaaggaagttaaatggtgtaaaaatacctgcctattaaaaattgacctttagaggcggttttttctataaaaatcgtaggtatagaattgaattataccatttagagtcggttgggaattaaacgacattgggttattttatataaccctatgccgtcggttcttatataactgacgccatagggttatataaaataatcctatgtcgcgtcttcctccttctttctcacgaagcaaaaccagagcccagccactagagaaaatgaaaacccttcgccaaccaccacctctgccatcccttttctccaccatttctcaaccatttgagcctatttttttaaaatcttctatttttgatactta

SEQ ID NO: 130682 - DNA, 1000 bp, Cannabis sativa
gagtttagagtctattttttactatttagaaaaatataaaatttaaattatcatttaacaaaataaaagattcattctataaattttaaatacaaaatttaaaatagtataattaccctaataatattggaagacttgactctctaaactctaatgcatgcaaaaagttatattgtaaaattaataattgagataattaattagggcacatcaagttgaacaagttgcaattagttggactatttattgggataaatatatagataaggtttccccacagataaaatatattatatatgatataccatataattatttaaaagttattaatatatttaataaattcataataattaaataaataaaaattaaatttaaaattatcttgctgggacaatgacatatgtcatgttaattttttttggttggatttcgttatgtcataaatagacaagtattgtgtgtagattgttaggttggtgaaaagtttgagaaaatgaaaggagtgtttcggtaaatttcttatttattttagcatctaaaagaattttttagtatattttttttttcatgatcgtatatgttataattatttaggatcacttgtaaatttttaaaaattttgaaataatttacaataccgaaaatataatttacatattttattgtatgcgtaactatttttttttttttatacacagagtaaataactgtttaaatcttattaaaaatttctggatgctaaataagataaaagatttacgagttactacaaaaatttcttaaacttttaatatagatttgtttttatcagctatttttgatagtttgtaattttaaatttaatttaaatggggtttttttgtttattgattttctattttttttttaatttttaaaaaggaaaattttatagtaataataagagcaaaaaccattttagatcttgtgttttgtaaaagttatcaattagaccctccgttttgttaaatgacaaaat

SEQ ID NO: 130683 - DNA, 711 bp, Cannabis sativa
cctcatattcctcctaggtgatagttggttgccatgaggaacctaccctaggaattttcctctttgcccctatcctaagtctcgataactggcccatccctctcaagttgcttgatcgctcactcatcacatgtgtcataacaggcatgtttgcaggaaattgagtggggtcgacattatattgatgggggacattggtcgacgctggttgagtttcatgaatctcaactattttggcctaccaaaatttgaacgattgtcatatgggaactcaaacttgctatgaaaaaaattaaacattaaagtcatatatatatatttggtattatagtttttttaatttattagaataaaaatttaaatgttaccgctactttgtcccagatagtttgagtgaccatttcctcaatatcctcaaagttgaacttgttcaaaggaatggtattgcaaataagatacttaatataactattaaacttgttgccatagtcatctatcggggccccaattcccttatgaaatataaattttaatttctttcccacagagtgcttggccagttcttgttcaatagttatccccttgtactttcccttaactctcttattcttacttttacttgcacctgcatcagctattctacaaatacaagctagaaattattaattaatcaacctattaacaaaaggaacatgtatttgatttaattaa

SEQ ID NO: 130684 - DNA, 629 bp, Cannabis sativa
ttaaatatttggaaatacagatggacttacaagcggtgagagctgatgtacagtgcataatcttcccagctactttagcagaagtcgcccagttgtggtacttcaagttagctctggagaagttcaattcgaagaattctttcacatcagagtttcatacacagttttcctcttctcaacaactccgatctcacttagaagacctagtagaagtgaagcaaataccaagagaacccttgagagcttacatatggctgcagctacaaaggagaaaggaatgacctagcaggggaggctagccataatcttaggaggtattgaacccctaggggaattgtggaaagacataaaaagattgattgtagggcaatggtagaattcttggacctaatatattgatttataaagctcgaagaagtagttcaacgtgtagacacagttggactaaaaaaactaataacacaccaccgcagccaatacatctgtcgagcacgaccaaaattcaaaaaatgacaacaactcaaacaatggtggaaaaagatcaaataatggcaacaagtagggtaatggaaataaaagtagctttagtggaaactacgacaacattctcaagagaatgcctaaaattt

SEQ ID NO: 130685 - DNA, 539 bp, Cannabis sativa
gatcataatcctacttcatttcccaagtaattacatatttaataaaatatgtccatttaaatattatttattttctgggatattacacactcaatctccaatggtaatcgattgggagatatgattggaaacggtgttaaagtggactgggatgaggataaaccagtatattggggtggctttcttagagttctaattgatattaacattcataccccactggtatctggtcggttctttgatatctatctggggtcaaacggtggatcaaattaaatatggaaagatgggcattgtttgttatatatgtggctgcttgggccaccagaggaggggttgtacattgtcttctccggttattgtggagaattttgaaggaacctctgttcctttgattggtccttggatgtctacagcttctaggtaccatgatgagttttctggtgtgagttcgaagcctctcttggtcttgccctctgttaatacggctggcggtgtctctcggggtggtctgtcgtccgtcaaggtcgtgggtggtg

SEQ ID NO: 130686 - DNA, 506 bp, Cannabis sativa
aactaatagggaatggaatttggagcttttgaaatctgatttttcaccatctgatgtggaacatattctctcaattccattgtctttctttccaactaatgatagatggatctggcactatgaagcttcaggggattatttgtacacaggagacatggtggaagtctttttggggattaaatctgccttctaaggttaagatttttggttggaaagtcatccaatcttccatcccagtagccaaatctttgtgtcataaaaaaatcatcacatccgcaacttgctcactatgtacaatggcatgggaatccatagggcatgttctattttcttcctgtcatgctaaggaggttttgaaaatttttggttttaccatagattttacaagtgcacttcgaatgagagatggagattatctaatgcatttatccacaatttacaacaaaccagaccttgagagtattctttgcctcatgtggttcatatggtctgatcgaaatagctat

SEQ ID NO: 130687 - DNA, 572 bp, Cannabis sativa
atactgatattattattttttatttcttaaataatagtaattgataaataaataagataaaattatataaaagtcaatatatcttaataattagtggcactatagtaaataaaaaatataatttattgtaggtcaaatttgacacaatgctatatcttgtgttaaatttgccataacatttagtatgtatcaaatttggtacactttttaaaataccattgaagtagtatattattttaagtgtggtaaaatataacaataaatcactgttttagaataccattgaagtagtatattattttaagtgtgctaaaatataacaataaatcacttttttagcactccattaaagatgcatcactataaaaatgacacctaacattttaattttattttaatattttggcctattgtataaaacctctaatcaaatttttttatattttaatatttttagcatgttttataaatgtttaaaaagttttgtaatctgggtatgtatatttagctaattataattcatgaggtaaacttttgaattattttaactcatgtatttttttttttttttt

SEQ ID NO: 130688 - DNA, 788 bp, Cannabis sativa
  modified_base (723)..(730): a, c, t, g, unknown or other
gtggagcaaaagatgtcattgacattattcatgaagtatggccttagggttaatgtgctaccaagggacttgaagcctattttagcaacactattatgcaacaataataataatattaatagtgactcatcgtcaatgttttgtggtaaagaggccttcaccaatggtaactatgggactggtgttgaagtattggctggttttgcttaatagggtaaaaagttaattattttggttaaaagttttattactttttatatagacttatatataatgcatatatatatgtataattataataatatactttagtaattaccgaagtgtaaacatgtaagtgtgcggttattggtatttatatgacaagtcatgatgatcgtagctacatgatgttgtttttcttttctctcgttctatttatacaataataagggggaccacgatcagagtgaagagagttagctagatttattagcttgaagtgagagagtcttttgaggtctcattcaataggacaatttattcaccatataattttagcatatatttacagaccctatatttatatacgtgtccattaatagaaaatataacttgttgtgttgttaccatacatatattaccttgttattaattcctttgcaccttttgggtataagaatatttagtttgtaaatatatatagagaaatttataaaaatactgaaatttgggttaattttnnnnnnnntactgtcacacggaaatcttttcaaaaatactgtgtttttataaaacaccagtaaaac

SEQ ID NO: 130689 - DNA, 570 bp, Cannabis sativa
gagagagagagagagagaaaggtgttcttagggaaagagaaaaagaaagagaattcttttaagttaatgtatggagtgggtcccaccacatataatataattattattctttttctttctttgttgacggagtcttcacaatctttcgtcaaagaaatttcgtttcaaaatttcaaagtacaaccttaggttgtaaattaagcaagtaaggacacttcatatatatctcggactctaattcccaagcatcctcatcttctctattattctaccatacgatcttcactaccagcatctctctgttccttaacacttttaactctgtcgccaagattctgatagatttttcttcatagcttacatcttctcgaataggaatattctcatactcaatcacatgcgataaatatggagcatactttcttagcattgacactttgaacacattatgaacatgtcccaactgcactggtaagttgaatcgataagttatctccccaaccctttctataacctcaaaaactctaacatacctcagggctagcttacccttcactccaaatctcgtta

SEQ ID NO: 130690 - DNA, 838 bp, Cannabis sativa
agcaaagaactatccaatcaacccaagttttaataaaaccaataaaatttaatgtaagcccaaataaaaagtctaacagttattactatttaatttaagatagatcctcaagattctcaacacatttggaaattgatcataaaattgcgactcaaactagcaaattaaccagttccaaaatttcagcaaagggatagagtttttatattttatttttcctttcatattaaattttagcattgatgatacatatataatgtataatcttagcaccatatttagtattaacttcaaatgtggcaaagtattatcactttatgattgaatataaatgataagtcatctattgagtaactctttccatgtatatcatttaaattatattacttctaaaattagattataattatataagatctgtttcggaaatgtccaaataaagatggtctaggccccagtgggtttggcctgcgaagttgaacggaaccaaacttccccaactattccaaaaataatatactaagaaaaaaataatactgtgtggttggaaatttgaaattgagataccacaacattcaattcaaacgcattattttgtctacaagtgtaaaacagtaagacatgagttagagtggattataccgtatgcatagtttgttacagtagaaactgtaaacctattattttgtctataagcacttattattaaagagctaataggcaccataaacataagaaatttttacattaaaaatacaaaatattaattttattaccaaaaaaccactacacggttacccaaacatttatacccttttcttttaattttttacatttg

SEQ ID NO: 130691 - DNA, 843 bp, Cannabis sativa
aacatacttgtgagtagatctagatcctgataaaatatttctaacatctctatgaatattacaatagtgagaataaagtatgacaaatctcgaacaagtgagatgagaaacagacttagtgtgtaatgaactgaaggtggcgtgtgagagagagaaaacaagagtgcttaagggctttcgagacttagaatttaggtcccttttcatttagcctgatgttgtttatatagtttagagcttacaaaagatctagattcaaataggttaatatcccttaaaaataagagatattagtcttttttattatatatttaaactataaaattaaataattaatatccctaaaagataggtatatattttagggttaaaaccttattttcatggattgttggagtggtttcgcagctaagaacaagttatgatccatccaagatgaaggttgtagaaatctcaatcgactaggcatcttttggacatcctttacatgtactgcctaatacaccttttgcttggggctggccagcacatggtattccttggccggccagtggtggtctggccagaccctcttggtcggccattttcttataactttatcctgactgagtatttggatccctcgttaataaatatgttgtgcatggtgatttggcttgcctagtgacatgttatattccacgtggcattaatcttgcctatatagacatgccacgtcacctaggcaaaaattggaatacacacaatttcccaaatttgatcttagggcatgattgcctacttttcatgatgtatttgggctagctatatgttgggttttgtgccctaaataaaacccattac

SEQ ID NO: 130692 - DNA, 1580 bp, Cannabis sativa
gtcatgttcttttcttctgcaaaagagctaaaaaagtgtggtctgcctttaactttggtattcaagaatttctcacagacaatataaatctaaaagaatttttacttcatacgtcctcttcatggtctttagtcaggcttgaacagtttgcaactatcctatagtatttggacagagaggaataaagagcgccatggtaccaaactaaaaccacatgatgttattctctactatgctctttcgtacttggaagaattcagagctgctcgatcaaaagctcctgcagttaatcctgttgttgaaaccatctgctcttctactgctactaaagatgccccttggctaaatcctccttcaggccgactgaaattgaatactgatgcagccgttgatgctattttgaaaacctctgggtttggagctgttcttcggaatagttatggtgatgttatggctactatggctgctccttactgtggttgtttctctcctcaagtgatggaagtgttggctcttatgcatagtctccaatgactaagagaacttcaactacctgtgcatttcattgagacagactcactcctagtagttaaaggattactctcttcacaagagcttacttctgattttcattgcttgttaaataatattaatcgtttagtttctaatttccctggagctcaagtctctcatgtttataaatttgctaatattactactcatttactggtaaagtttgctctctcggtggatactaaatgtacatggttggaggaaatacctctgcctttaatgccctttgtattttgactacttgttttaatataaaggtatttatttttatctcaaaaaaaaaatatagaatatcttatgaaaaataaaataaagcatatcttatgaaaaataaaataaagcataatgaaacattttatgctaatttttcacatactcagcaatttaatctgcatataagcgataattctgtaaaattaatttatcttttcttcaataaaatacacgtatataaatacatattcactttttatattttttatttctatttgcatataaaaaaaatgtctgatataataaaaagtaaattctttcggagaagagaacttttctggaaagattcccaactattaataggaatgtaaggactataaaatgtaagatgtactaatcttttatataactaattttgttttaaaaaaaatatacccaactatagttctaacttttttttaaaattttcaacaatagatattatatataattcatgtgcatgtccaatatatctttatttatatatactaatgttatttaatttgagaatattcaaggaaaaaaaattaaagatagctaattaaatgaacctcaaattttatggtttgggccaccaattgatacattcacgtatcatttaacaaacaaactaccaaaattttaaatactacaacggtaaattttctgactaattttcatacactcaattttccggggggaaattatactctatacttttttatattgtactcttttatttttaccctgttttttaaaatctatcatttttacct

SEQ ID NO: 130693 - DNA, 684 bp, Cannabis sativa
gatactggaaacttaaaattgtacgtgattatatttggtgatggaatagttgtaaacattgtaaaactgtgatgtaagctgtgatgtaagtttggttatgagcaattaaatttcttattcataaaaaaacatcattaaagcagaacaatggatgagcactattacttgtattctggacaacatgggagtaacgggaactgaacgagttaattgtgctacatttatgttccaagaacatgcacgcgtttggtgggatattgtgggacagactaaagatgttagtaatatgtcttgggatgaattcaagagtctatttgaggaaaaaatttataatattgccatcagaacttctcacatggaagattttgtagaattgacttaaggaaagaagacagtggtcgagtatacactggaacttcatcgtttatctaagttcactggcaatctagtaccaatggacttcactcggaaacataagtatgtaaggggactgaatgtcactatcagttaggacttgaaaatcaccatcaatcacgacactattacaagaaagtggttgagttagcattgatttctgaagaggcgaaacaacacgtgatcaaagaataggctgctaaggatgccgtcacgacatcgaaccctaatgttggtggtagtgtaagtaaggggaccgacagtgacaac

SEQ ID NO: 130694 - DNA, 962 bp, Cannabis sativa
aaatttgtatttggttttagtttttatttattttttaggaaaagtaattgatcttcaattttagtaattttgatgttttgcaaattttttttttagcaaaaaagaaaaaaatataataaaaaaataaaatttttagcttggattgatttcctattgtctaaaatgagttaagaaatagtatttttagctccaaaattcgtggtctagagtaaagaggaatcacttcaaaaataaattaaaaaaatttaaattttggatgttcaacatgctctgtttgtgactgaaaataaaatctaaagcttcaaactaatttttgattataattccttcatttttaggaaaagctttttgaattaaagttctagatctctcttttatctttccaaaacatattgaatcatccaattatgagttatatctaaagaattatggccaaaataatggcaaaactttaacaccattggaaaattgataggaagtctaagtgtaaattgagagcaagcagtagaaagcaccagtgaagtactccaatagtattctatctgttcaactctatcttttatgtctttagttaaatttctttttattttagagtgtcttttagtagctaagttcttataaagataattatgtgaatcacttgagttaaatttatgaattaatgtgattatacaaatttcttcttcttctcattattcaattcaatacaacctagttaattttatagctattgatcgatcaactttacattgatgtataattataaatattatatgtttttacaagtttacttactaatttcttgaaatatctctattccatgacatcttatagattagttgtgcatagattcagggtggataagaaacttaattcaatttgatggattttattctatcatttttgtactctccaattattattttaatgatatttaaattcattattcaaaaaaaaaaaaa

SEQ ID NO: 130695 - DNA, 685 bp, Cannabis sativa
acataatatagaaaaaaaaaaaatacaaagaaagggagtataaatataaaaatatttacaaaattaaagtagaaatataaaaaaatataaaaaaagactaaattgtaaataaaaaaataaatattaaaattctagggtaggcatataccactcctagtctcgggttcgccacatagatatggaatacttcttaatgagtattacacattgattgttactaaataaatttaactttaattttaaaaatattaaaccatcaaataaatatgaatttatatacttaatttaattaattaattaaaaagaaatatctctttctacactatatcaaaattatattcatataaatatttcaaagacacactcaagttaataatattaaggatcatgataagctttgcaaaggctataggaaatctagcaaataaatcatactgagtattaatattaacttcagatagaaggaaaaataaaagaaatcctttaaaataataataaatataagccaaatatatatatttatataccagatatttaagttttttagtgtgttacatttaataatattggtgtttcaattatatttactcaataataattgatgtctattattattgtcgtttatatttgagaacattgtacgtaaaaaaatatgattaaaaatatttataatattttaagtatt

SEQ ID NO: 130696 - DNA, 1112 bp, Cannabis sativa
gacatctgaccaacactcctgcataacccctctatcacactgaccctcatggtacaatcaaaactttgtccccctacttttgggacaacttgtattttagagttattagagcttaagtataaagtctcatttggatacttgtaaaatagcttgaaaatgaccatttgtgagagagctctaatattcaatacaacagtattttactccattgatgactaaatgttcttaatttttcttaagcttttcatcctcaactcttcgcaattaattttctaactaaagtttagttgacgagttctcaccgtcaataaacttttactagttagtttaggaataataattatattgttttgttgaagtggaaataaaatggaataaatgaccaaaatatctatattttaatatattttttaaagtttataatatatttaatcattaaacatatattatgtatgtaattttttttaacttaaccactaataagggtaataacaataaatagctttttaacgaataataagattatcaaatttatttaggatgttttttattaatttatagactgagttccaattaattttgagatttatttaattataattttatttgattacttacggttttattttggttttttggtaatttaattttagatataaaacccactttaagaatgtattatactcatatttcgagcatcaatatggtcgcgatacgtgtaagaagactgaaaaacaaaccagctcgaacagtgaagaaataaatatgttaaataattcacctcggagaatacaaatgatatatgtatctaaatctctccttaagccattaaggacgagccatgaataacaactatcatttagtaagaccaacgagatgaacaaccaacagaaaaagtccatattggaatacacagagtaaacaaaaaacaaaacaagtagaatatgtaggaacacgccgctcgaaatggtagataatgagttcttaaagagcttgtaattcattgacccatgataactctaagatttagagttatttttatatctttaagcttgaattttaatgtgaattgtggagcaattaatgtctatattatgtaattgtgtttagtt

SEQ ID NO: 130697 - DNA, 1721 bp, Cannabis sativa
atggaaaatgtgttattcaggacattatgaagaacaaggtgattgggatgggtagaaagtatggagatctttattatctgaatcacaatccacctaaaaatgttcattctttttctactactgcttgtatttcagatttaaaagtttgtaatgaaacagtttggcactatagattgggccatccttcttgtgtaaaaactcatcctttgaataaagttttgcaatttcattcaaattctcaatcattgtttcattgttcagtttgtcattatgccaaacaaaagaaatggcctttcatctcacatcacaacatagctgaaaatatttttgactttgttcatgttgatatttggggaccttttaacaccatgacaaatgaagggcatagattttttatcaccattgttgatgattgttcaagatatacttggatcaagctcattaaacaaaaatctgatgcccaaattttcattcccaaattcataaaattgattcaaaatcaatttcataaaaccataaaagggatgagatccaataatgccaaggagctgcaattcaatactttgtttgctgatcttggaatcatgcattatcactcttgtgtccaaaggcctcaacaaaattccattgttaagagaaagcaccaacacttatttaatgtggctagagctcttttgtttcaatcctatgttcctttagaatattggggtgagtgtgtttctaatactgcatatctcattaatagaacaccgacaccaaatctaaagaacaaaagcccttatgatgttttgcattctaagccacctgcttatgacaatttaaaagcctttggatgtcttgcatatgcctctactcttaatcattataggtctaaatttagtcctagatctatcccttgtgtttttcttggaaatcctattggtatgaaagcctataagcttcttgacttgaataccaataagattttcaattctagggatgtgtatttctatgagcaaatatttccttttgttaattctggtttacttcctgctgcacaccagagtatacctgaacacaggaacctatcttcgtctactgatgagattccacatgtacctattggtactttttataattcctcgaatgctaaatgtactcagcattttcacactctagctagctcctttcgagtgcctcaaaatgttgtgcatgatcatgtttttactgatgttgctgatcccatttctctttctcccactcataataattccacggtaaattctatacctgaagttcatgttaataggttgcgcagagagattaaaacgccctcataccttaatgattatcattgctatttggctactaatcccagtgcttttacttctcaaagtgctactgttactgcctttcctctttcacaagttattaattacagcagactatcaccaaccttcaaagctgttgctttggccataccaattcattttgaacccgaatttttcaatcaagcacatgggattccagtttgggatgatgccatggataatgagattgaggcacttgaaaagaatcatacttggattgttgtttccttacttgaaggacaacatgttattggatgtaaatgggtttacaaaatcaagctgaatgctgatgggactgttgagagatttaaagctcggttggttgccaagggggacaaccaacaggaggggattgattaaactgacactttt

SEQ ID NO: 130698 - DNA, 1420 bp, Cannabis sativa
  modified_base (621)..(638): a, c, t, g, unknown or other
tgcgttcacgcgagggaggactatgggagaacgacggagctggttggatctggttgtgtgtgaaatagatggaaaggtcacaaagggttcacaagatttggccgtgttgtgatttgagtgtgcgagtcggctgggtggtggttcgacaataatagaggcagaaggattaaagagagagggaatttaaaagttagaataattggtaatagaaaaattttgggctgtaatttgaagcataaaaatttaaattttctaatgaaaacattttattggatatcaatgcaatggttgaataaatattaattttcttcaatattttgatatttaaagttgtcaaccttttgtattttgagtgttagaatttttaaacattaattttataaataattaatttgatacacactagaacatacatgattaaagaaatgtaagcaaataaatatttttttcactctaaaagtaaagtaacttgtaaaacaaaaatgataatggaatgaaatatatttttttaaaatataaatggatttataaatatttattatcagagaaaagattctattcaactttttttagaaagaaaaataaaacaataatacaataatataaataataataataatnnnnnnnnnnnnnnnnnnaataataataataataataacaaggaaaataataataataaaagggataattgtgacaaaaattgccaaaaacttaaagttgatgcagattaattcttaacttcaaaaattgatagtaatatagtccccaagatcactattttcattagtgtgttagtctctaacttaactgactggttaatttattttttttttttaaaaaaaaccatgtgttgaaatattattggtccaaatcataattttaattaaaaataatttcaaaataaaaaatcattattaaaaattaaaaacattattttttttattttcatttttttatcctgtttcttgtatcgtcttcctcacccagccacccaccctctccgaccttcatcccacccaatcctcatacccccaccccttacacaatggttaaaacatacaggagatgacataaagctcgagagtacaaaaatctcaacccgtaaaactctaaccttaactgtttctttctctctctttttttttcttcttcgtcttcttaaatgaagcccctgtacaatgccactcaacgatagaccatgatctctacaattcaaacccacatttccaaaagccacatcataatcgttcgacttctcctactgaagcatcatccgcatcgcctcaacgtaatctccaatgaaaccccaaaccattgaagcctgaagattccccaagaacagcttgttctgtaaattgatcttgatcctatctaattaatgattgctgaataaacgaattaaagagagagagagagagag

SEQ ID NO: 130699 - DNA, 924 bp, Cannabis sativa
aattatgattggatatccgattctattggatcggttgggattggatcggtcggttggaattggattggatgactttttgcacacccctaactcaccatgtttgtcatgatatttctctctttactgatctctattctaattcaaccatgaaatttgtgaattcacctacaaattcttgtgctaaagtctcttgtcttggtacagttcaagtttatcctaatttctccatttctaatgtgttgtatgtccctaaatttcattgcaatttgtaatcagtgacagcactaattgaatctcttaatttgtaacgccttgaaccgtaagggtgccacatgtgtgcttttaaatttagtttataataataaactaatggtttaagaaaattgtggtttaattaaaacttttactaaaattttaaatcataacctagcttttcattaaaaatatcactatattcggggatccccttaattataaactttttacaaaatatcataaaatagcttattacaaaatactgttacattttcaaaacacaacaaattaaaagaagatcctatccactaaggaccaaaatatgacagttgatatgtacattgttgagagacctttgactcatggctggtccagtttccccttccctttaccttcaccatagagcatacgtgagtcacaaagactcaataagaaaagaagataaaatgcatcatcacataaagcataacgttataataatacaaagcatatattaccacctatagcttaagcaactgttcacctatagcttaatctttaagattctttcctcttggaaggatgtgacctattctcatgagacacttgagcctcctcttactagcaccatcttccaacccttagagtactttgatggagcctttcccaagcgttctaatgttgttgttg

SEQ ID NO: 130700 - DNA, 821 bp, Cannabis sativa
tacatgaggttggtttatcaaaacaagcggtacaaaattatgaagataatagaaaaaacaacttgttacatcttgttgcctgtaaaccaccagagaatatgcttcgcagtattgtaggatcggcgctacaaatgcgagaagaaatcttgtggtttcgggtaattaatttattattattattattaattactaccaataattgtagtataagtacctaaattgataaattaatcagttgtctattacaaactcgaatttttaggtgtttatgttattatttttaagaaagttacttcatatatatatatatattattttttaatttttttatatttataatttgggttgctccaatatttttttctgttagtttcaatatataaatatatatatacactaaagcctagataaacttatgggcaaattataattttaaggagtgggaaatttttttttttcgtattagagctagggctttaaaagatgatttcaataatttaatattagttttattacatataacactatttttgtaaagtgttataatttataaatatatgtagaaagtgataaaaacgtgagtaatatatagtacacatttcactcatatgaatggtcatttcttcttttttagattctttttccatgaaaaaagcatagtaccatttggcattgttatatatttaactttttttcatttgaaattctcacacctatttatttatttatttatttttatgtacaggaggttagaaagattgtgatcccttcattcaggaacaaaatgaattcaaagaatcaaacaccacaagacttgttca

SEQ ID NO: 130701 - DNA, 856 bp, Cannabis sativa
  modified_base (411)..(411): a, c, t, g, unknown or other
gggatgaaagccacctactctccgacatagctctctccctgctcaagagactcacttacgtggtaatattggcaaaaaaaagaagcatgtatcgggacacaaatttatcctactagcattcattcgtgatcgcgctaaccttccatggtttcggggaaaaagagaacaaaattaaaaataaaagagtgttttgcagctaaactctctcaactactactttacttgtatttaacccctaagttcaaattttaatagttgaattctcaaactactaaactggtagtaaatttaaaggaacatctattttccccaattatttgccaatatagactgtttagtgtttatgtgtacatttttgtacatatgtcgtatttatattggtacacttaatattttattttttatttttanaattttatttaattttaaatgaattttgaaaataatttttaaataataatattcgatatactaatataaaagtgtcacgtggacaggagtatgtaaataagcaatccatggtagtagttaattggatgacactttaaatttgctaatagttcattagtttggagggttctaccgtcaaaatttaaacttgaaaggttaaatgtaagtgaaatgatagttgaaagagtttagccgctaaaaactcttaatgagatgacaccttaaatttaatttgaacttgaaaagttaaatacaactaaaacaatagttgatagagtttagtcaccaaaaactctaattttaattattggatgtataatttaatacagaatattttgtctcgttattgtactttcacgaattgtaatccgtgatgtacggcagccgtcagatgagagagttattt

SEQ ID NO: 130702 - DNA, 784 bp, Cannabis sativa
  modified_base (45)..(62): a, c, t, g, unknown or other
  modified_base (480)..(496): a, c, t, g, unknown or other
acaatctcaatagttcaaggggcattttcaatgaccttaaaagtnnnnnnnnnnnnnnnnnntacatgtcaaagttcagggagtaaaaatcctaattagccttattaatatgagaggggtaaaaaaagaaaaataagttaaaataagcattatttgatataaattagttaaaagtctaaaatttaatgataagtttatttttaagattatataataaaatttttcattcattcaaatgtgtaactcaaaataatatttatttttaaaacttttaaataaaaaaataaatacatgctacaatattaagtagcacacattaaaaatcgtaatatattaatgagcattaaatctatatatagtttctaatctagaacagcctactaaaagtatctatataagagaaagtgtgaaacttctacaatatcgtctaacaccacaaattttccatttaaaagtactacatattattattattattannnnnnnnnnnnnnnnnattattattattattattcttacaattactacatgttatttttaataaaaggccaatattattttttcttatttctaagtttcacccattttttgcaataggagacaaatattgttcacaagtttatacatgacagctcaatacatatatgatttttttgcccctttcttaattttttttttttttgaaagaaagtatgtcattaaatcaaagcaaatcagctgttacaagaggaccaataaatctaggacaagcatctgcccacaaatgaacccctgaaggactagt

SEQ ID NO: 130703 - DNA, 1684 bp, Cannabis sativa
ataactaattaatttattaatttgtttctctacttccactttttcttttacgtatagtaggttcacttttatataaaatatatataaaattatttgtggcagattatttttttattagattcatttgagttggttggaggtaatgaaatggaatgaaatgtataagaaataatttttattcttgtttggttgcatattaaagtattagaatgttattttatagaatgagtctttctatcatttgggtagaaggactattccattttgaaatagaaggaaaaatcatttaaatgcagacaaaatatttttcgactcactcgttactacaaatttgtcaagtgtcattagaccctctccaatggtagtattttttaaagatgctaaaagtttacacatcatctaaaaatataatattttattttttttttcttttccacatcatttttgaccctcttacttctaaaaacactttattttatatatatcactctttaaaaatattataattatgatctaacacattattatttaatatatatcttaatttttagctataataactttttagcttcaattttttattaaaaaataatgaatagtatcaatgctacaatatagcatccatgcaaatttttagaatgacatcctcttctctccaatgatatagcatctcaaatgttttgccacataatatctcactaatcatcctctaaaattttatcattggagatgcttttaaaacttattagtacttaatcttattatattattggtccaaatcaattaatattaattttaataataacaaatgttcaaacaataatcatttcacaaatttttaaaaacaagtttttaattttttaagaaacacatatgtaataaataagtaataattaaataaataaaaaataagaagaagaaattggcgttcttcaccattaccaccacaaccaccactttcttcattgtcgaaggccatagatccagacgagctctcttctttctcgattatttttaagacaaaagcatctcgtaaggcctcttaggaagacgggggagatagccatcatctttgacaaatttgggtgttaatgacaaacagatttggaagaggtgctgagggatcgagtgcttgatggagctgacggagactagaaagaacagcgagtagtccaaatctaacgaaatgggtttgggtcttgttcgtgagtctgctctctcgcacccttcttactctttctaactgacgttaatggcggatagacctagaagaggatgaaactttttttttttcttatttacgtgcttgtgatttgtttttatttcaattgttagaatcatgttatagcttttcatgtgctatatggtaaaaaattatggatttgcccttaaagttttattaatagaaaaaaaaaggattatttcacaaatatacaaaaacaacaaaaaaaattacaaaatacagttttatagaattctaaatatttttacgattttttttattttatttatagaaaagatagtctttttatgttgtatttttgttaatgtaccattgattttttattatttgtatgttattttttgttgttgttttaatattaattatttaattagatgttattttcatgttacttttatgtaatttttttgttatttctataaaaaaaaaccgtaaaaatat

SEQ ID NO: 130704 - DNA, 806 bp, Cannabis sativa
  modified_base (369)..(396): a, c, t, g, unknown or other
aaaaaatggactgctcatcctgtgtggtcttgaagatttgaagggagtattaaagattgggaattatattgttagtcttggagatttgagcgacttattaaatattatattggttcgattgttatttttcgcaatattggtttggaagagaaaaaaaatcgcaacagcaatatgagttttgaaaaaaaaaaaatcgaaggatcaagaatatcgcttaaaatggttttgattttgagtttgagggagaagaaagaggaatcaactgtgcgttttggattgaacggcacgagttaacggaggggttagattctgttaaaattaacagaataaaaataacaaaacattaaactaagaattgccgttagatannnnnnnnnnnnnnnnnnnnnnnnnnnnatatatatatatataactaattaaaatcctatcaccgatttagatttggaagtgtgatatatataaatattgaaaatatgaatagagaggatgattattaataaatataaatatcaattataaactattgagtgaattagagaagcaaacatatatgtaaaacttattaattacttattaaatactacgtacgtacgtacatataagtatatgcatataataattaatatacgttatacataaattttttaagaaagaattttattcatatcaatctgtaatttaatccggatatttctttattgaaaacacaactagaatcaaaattaaaaaaacaagccaactaattggtttccatgattctcggattcacttaaagtgttgcaattaataataaatttgttcatatt

SEQ ID NO: 130705 - DNA, 652 bp, Cannabis sativa
cctggactaggtgggccctaggcacaggcctagcccgcctatgcccagggccggccctgatatcatgtatgcttcttttttttctttgttatttataaacaccatcatacaacatattgtaaatgtttctattttttgatttcttaccgttaaattttattgttgttgatctctagtctaatatataataacaagacaaaaggaccataaaacattctttttagtaaagcaatcatgtcgtttttgaatatgaaaaacgacatatatgtatggctttggttagtggtgaataatgattacatacatgtacacacattcaacgccaatatatggccacatattttaaacatgcactttatttatataagatttcaatcgagaggtgacaatgtgcatgacatagcaaaatagcaaaactcctataattttatcaaataaggtaatcgatatggattctagtcatcaacatgtcaaaggtgcaagttttatcatcagttagcttgttagagtttagtgtagaaatattatggggagcttctacgggtgcaatttctttttgtgcgttgatgcacctctaactttttgacatttataaaaaaaaagttagtttaatttttttatggtcgtgtatatattataattatttaacata

SEQ ID NO: 130706 - DNA, 597 bp, Cannabis sativa
acccaattcttctactagattagatcatctagaaaaactcaaaagacatcttattataaaatttagataacaccaataatatgtaagtactcacttagagtagtgaatattcatagatattgtataaatattgtataatatacatgcaagtactgtaaataatagacaaaaaaaataaatagaaaatatagtaattcagtgggagctttgagctcgacttgcctagtccactgttaaaagaaatctttcgctctgtatttttttttgttcagatcaactcaaccccttcgaatagagaaggttcacctatttatagagagtaggtgaaagttacaatagttcggtcataatgactacatcggttataaaataactataacacttgccttaatgacacttgaatatgcttgactgttatctttgttgattggtgtgtgttcgcacattttcttttctgataataccacaattttactaaataagtggagtgtcttcattgatatagcgagattcttttacttaatattgcgagatctcttttaatgccgcgagttttctttagtgttgttctcgcgagagtaacagggaactaatatg

SEQ ID NO: 130707 - DNA, 543 bp, Cannabis sativa
catcactatcgggtatcaattgtcgttgcaagtccatttccataatgattgggggtgttttaggaaggcacgtgcgatctgttatttatctctaatcatcgcggtgtgactactagtagatttagtacagtagacttgaaccgatcttggtcaaagttgctcattggttgcaaatcatcactattgggtatcaattgtcgttgaaagtccgtttccataagactaggggaattttaggaaggcatgtgcgatctgttattcatcccaaatcatcccgtcgagactactaggggattcattatagttgactagaattgatcttagtcaaagttacttgttggttgcaaatcatcactaagggatcaatcatcgtttgaatagggtcattttacgaaggcacgtgggatccgttattcatccctgatcatccccgcgagactactagtggattcactatagttgacgagaaccgatcttggtcaaagttactcgttggttacaaatcatcactatcaggtatcaatcgtcgttgcaagtccattt

SEQ ID NO: 130708 - DNA, 555 bp, Cannabis sativa
aggtaaaaatgatagattttaaaaaagaaggtaaaaataaaaaaggacaatataaaaatggtatagagtattttcctctaaatttgagccggttcctacccatttccatgactcgattgacgtatctgatcaagtgcatattggtgcccccagaacgaaacttaatacaagagcttttacacaaagagattcctcctaatttatctccgttttctcctgatccctctaattcagcttttaagctgggattgggataggtaggctcctcagatagctgaagcccataaaaagatgttgatcgagttggatcaagacaattttataccaattaccaacactatactgtatagtgcaacaaaattacatcagaccccaaattctattaactaaataactaaaactcacaaaatctcactgctatataagtcctttaacttagaatctcaaaccatatatactttgtcctttctcttttttttttgaatgaaatagcaacttcattgattaaaaacattcagaaaacaagatatccctcaaatcgggccagatatcttg

SEQ ID NO: 130709 - DNA, 1235 bp, Cannabis sativa
  modified_base (30)..(34): a, c, t, g, unknown or other
ttaaagaggagtctggtctcgagtttctannnnngagaaatctcactataacatattcaaattgatatgtttatacattgattataaacaattttttgtcttaacagtgtgtatgaagatgtttttttcttcaaatgtataaagataatttggcggtcggcaagggctactataatttttgaagcggtgtgaaatgttcttaaaccaatttcatgcatatttacgaaaggttcatttctttcttttatattcattaggattgtttatttttatatagctttttttatattattttaatattatatgagtatcatttattgaattattagtgtttgaagtaatattttatctattttattcaatcatacaaatattattgtatttttgttgtgtcataatattttattttttattggacggaatttccatgtttctaaacttccttttcatctatcatgcatacataatatttttttttaatattttttgaagaaaaaaataatacttttaatgtgatcaattttatagttaagttttcatttttaatttactctaatatcaaattcataatatttctgtctctaattattatttgaccattactgaaaatctctacaaattattattctattctatttatttttcttatttttttattctattttaatatttatactttttagttaattaagtttaaaattttcactatatttttttaaagttttgaaattgagttttctatagatttatcgattatgtttcttaatttttatatttttattttgtgtgacaattctttaatttctaacttttttcttagtgtaagttttaattagatgattataaaaaatttaataatttaattaaaagatctaaaaatatatctgaatataaatttgattaaatacaattgtatttgttttctcattattaactaataaattttattttgtatttcttttaaaatcatattcatatgatgaattttctataaatttatcaattgttatattatatttttaatcctaatttagtttattcatacatacaaaatagatatttgaaaactaactctttaataatataggaaaattctacaatgcactttttttaaatgaatgtattgatgaatccctatttgttatataagacatcctgcaaaattttaagaaatttacaaaaatttaacacgccgaaaatagggttcaaaaagtgtgttgcatgtgtgactattt

SEQ ID NO: 130710 - DNA, 1396 bp, Cannabis sativa
  modified_base (1328)..(1332): a, c, t, g, unknown or other
ttatattttattttaataaaattcgaaaatatattttattattaaatatattgaatttcgaattatgattataaatatttataaaaaaattaaatttgagttgaaaattaatttttacttaatttttaaccaacataaaataagtaatttttataatatttattgaaaattaatactaaggatggaaaataaattttatttatttttagatctacctaagtatataattttataaatattaattaaaatttatatttagtttatctaaattaataattttaattaaataaatatattagtattaaaataaatatattaaaatagatatcaaaataaaaatacaatatctttcaaactaatcagatttagttttaagatattcgatttccattgttggttctacatggttctcgtttgaatgagattcagcccttataaatgttcattcattagcaatttaatatcgtataatttcgaaaaataagtattattataaattttttattctcagtaacgatcacctcaatagtaacagcttagaataggacttataaaatatgaaacaatggtagaagttcataaaataagaattacattgactctcacctaaacgagataacatcggattcttattttgatcgaataaaaggttgcaaaaatagtgtccattttagataagctgacaactctattcaattgatgatgtatttgactgtcgactaaatgggacacttatatgatctagttgaaaaccttggaaaatttgagatgtgtttgctttgtattttctcatgtcttcattacttgctaaatgtttataaatttctaaaaattgtgtatgaatttatattgaacctgtattgttttttgttattgattatgtagtatcaattttgaaacttcattgttagtcttacttggcttgttgtttttaataggaaaatccccaatagattgtcatttgttagacatcataacagtgttagatctcctaagataagtattttgtaaatgcgacatctagttgactcatccccaatagatgacaacttagattagtgtgtacaatactgaaagaataaagaagtttataaaataagaataactttgactctcacctaagcgggatatcattggatttttattttaattgaaattgttctttagttttcctcttagctttttcattaagaaattgcttaagatagtatatcattggacaagaaggtttataaatcatctgcttatgatgtcactctatttttttctataaaaatgagtggcgcaaatgaccatattgttgggatttattttactaggatctagannnnntaacatgtatgtttcattaacatcctaaatatgaatcctgtaatacgatgaaattaaacacata

SEQ ID NO: 130711 - DNA, 599 bp, Cannabis sativa
cccccccctggatggaccatctgtagtactgacgtggctatcaccgataacatatcggctggcgcggttatcttctacaatgaggcaggcagtattagtagtatctccacagtaaaacttaactactgcgaccctctagcagaagaaattgcagcactttgctttggggctgaagaggcaaatagactgcacttccgaaatgtaattttccaaaacgactcaaagaatgcaattgctgcaatttccagtatggacatcaaggccttacaccataatgtccaagcaattgtccaaaagttaaagctttcagctagttctcttttgggaggcttcgtggatccctcggaggctcaatggtgttgcccaccgtgtggctcgctgggcagttaactctcagttgtttgggaatgttaacctgtctaattttgacggttccctgctcactgggtgagtggatggccgtgctgatccgtaggcgttagtttctttgcttgttcttagctttagttagtttatttaataataaaattaagttatataattttttttagtatttattattatattgtaataaaaatgaataaatatattagatcatt

SEQ ID NO: 130712 - DNA, 732 bp, Cannabis sativa
attaccttcatcatgtcgcccgccatgaaaataaaatgagaaggtttagggttaatgtcaatccaggttccatccttagcttgaacttggagaccgccaacttgattctggtgaagtattgttgtgaagtctaaatcagtatgaggaacaaatcttacagtggtatcagagtttcgatcaggttcagtatattttaaaaatcgaagaacataattacgaacagcctcgacagtcttccaatgcttctgcactccatagctttcaaacaccaatattgtagccatctcctctaataaggctaattgctttgcatatgaatgaacaatatcactgcaccaacatatatatatttatacatttatttattaaattaatatcgttatttctctcacatattacaagtgtgaaaagggaaatttacaaacaaatgatgatgagtttcataagaatagatttgtaggaaataggaagtaattgaattcaattttctcacaagaaatgaatatatattggaaacttctgtgttatgagataaattatgcaagctcaatttactatataaaggatcagtttggcataggcgcacagctgtgatgtagaaaaaaacagttgtagctgtgctgtgagaaaaaccagtcgtagcaaaactgtagaaaaaagttgagctgagtgtttggtaaattataaatttcaaagtactttgagtttttaagatctattataatgataata

SEQ ID NO: 130713 - DNA, 612 bp, Cannabis sativa
cattaatatatctattataatttaattaagattttgtatgaatttttgtaaatatgttttcaaatgtgtacatttttaaaattgtattttgtttgcatatttttcataattatttaagaaaatgtatacatttatctaaaatgccctaaaaaaatattatatattaaaaattaagcggtaatatacaagtggttactaattcaaaggataatgtgggagacatccaattttgagtaaatcttttgaataatggttttgataatttaataatgtgggacactatctaattagtgtggttccattaacattaactcacacatttatgatatgaagtctattgatttgctctgcaatttgacttgattatatttaccccttttattttcatagattttctttttttgtcttgtattttctatttgtttttcaaataatgtattccacactgtttaaacaaaaaagtaataataatgtatcccaaaatatttttattaggccttagtactaaaattttttgaagttaaagaattcgacaaattatctcttatggcatgtttactaatcaggattgggagtgataggtatggtaatcactccttttcatttgtttac

SEQ ID NO: 130714 - DNA, 1550 bp, Cannabis sativa
  modified_base (998)..(1000): a, c, t, g, unknown or other
gtatttttaaaatagcgggacaacgaaatatttgaggtattatttttgactaaattactcataggtgataaggatccctttttggcttaggaaaggggaaaatggtctattgccatttgggtttttatcttgtattgacttttaaatatgttaaataaataacaattttagttagcttatatcttagataatcacttagtattgtcctttaactaaaattagaaaaaaaatttaaagaaaaacaacattttctcgctcttcaacctctctctcttgaacccttgggaaggcagaagcaagtagaagatttttcagttcaatcctagataatttagtaaaatctttgtgtatccaattcaaggttagctctcaagttcatctcgttatgatttcttcagtttcaagttaggtttttgcaagattttctatcgtttagttgctgtgtgattgattgtgtttggattatgtttttctgaagttgtttaaggttattagagctggtttgggtctgatttgaggcttgttgtaaagtttgagaaaattttaaactttaaactcaaacttttctctcacatggtgaattttgtttcagtggatgttaataggttttgttgcatgaattctacttgttgtggactatttaggaggcatgtaaggtttggttaaatttggggttgttttgaaatatttaggaggatttttggtccacaggaaaccccacagaactggcccttccggttctagaaccaatttacaggttggggcattttaggacaccctagattttccatttttatgatatttaggtattgccatgttatccatcgattgagaaacttttagttttgatttgaagtccctaaaaagtgatttagcatgtcactcatctgttttacaaatattatgatttaggggcctgtaaactgtcgagcagcagttccacttaggattaccggcacacctgaattcggaaacgatgtaagattagtataatgatnnncatatgtgtttacatgtttagcgtacatgttcgttaagcctaatagattacatcaatagaggtatcaattcatgtaaagttgtgttggatactgatatatgtatgttaggctcatatactaatcgacgctatcacatcggtacggctagagtatgactagagtaccgtgtataggttgatagtattggcgtacgaacgtttgaggcttagtaccgcctagggtgcagggattagggttacactttggtgtatgggcgcctaattgtaattgaggttatttttaagaatatgattatgcttttcttactgaatttttcgactcacaaatattgtttgcatatgtaggtaaaggccaaactaaggctgagcagccatgagagcgagaggatgaagattgtacatgttggggcggttagacctggagagtacgatctttaggacaactagattttgtatagtcgttaggcaacaactcttgtattaagtattttgaatcagttgtaaatattttaaactcaagatccctgatatataaaagttagtttatttt

SEQ ID NO: 130715 - DNA, 2233 bp, Cannabis sativa
  modified_base (123)..(132): a, c, t, g, unknown or other
tctaaataggagtctggtctcgagtttctaggtgagagaaatgtcactataacaagtgttgattgcttcggcccaaagacgcattataagcttcttgctattcaacattactctaggcatttnnnnnnnnnnacgattctttctttcaaccactccattttgttaaggagttttaggagcagaaaattcatgagaaataccattagatttacaaaactcatcatacagagcattttcaaattcttttccatgatcactcctaatgcaaacaatcttaccaatgttacaatctttttcaactcttaatttaaaacacaaggatttagaagcttcaaaagtatcaattttttctctcaaaaaatccacccatgaaaatcgagaaaaatcatcaacatacacaaaaatatacctcttactattcaagcttccaacctggattggacccttcaagtccatgtggaggagttcgagaactctggaagtattcacatcaggaacactcttgtaaaaaatttttagttgcttaccaagctgacaaggtccacattttcacaaagattccttacacaatttaggtaatcctcaaaccattcctgcattagataatcttcttagattatgaaaatgaatatgaccaagtttttcatgccataaatcagtagtatcatcaatggcagaatgacaagtaacataagtagtgagagtataacaattgtcactagatctgagcccttgtaagacaatttcattaagaatgacaagtaacataagtagtgagagtataacattgtaaccctgatcacaaatttgactaatgctaagaagattatcttttagtccattaacaaacatgaattttttcagtctaagaagtccttcaaattaagagttcctatccctatgacttttccaagacgaccgttaccgaaagtaacttctccacactatagtgatctaatgttgtaaaaataatctctttcccctatcatgtgtctagaataaccactctcaaagtaccacatgttagaagaaatagttttaaaacatgaagagcctacatagcatttatttttgacaacccaatttttgtttttgaaaaacatgtttatttccaaggtaattagatttaaacatgttttgcatagtgacacaatttggtcgaaagtgaccttttatcccacccaaatggcacataggaatgaatcgtctcctattccctttgaaattgtcaaacttaccgtttcacttcttttctgtatcaacagagtgttttgctaaaataatagaaccctgcaaagtagagacagtacctccagaacaaaaaatatcagatttaactaatttggtattggaatcagattgagtagaaacataacctagaccagcatgactagtttggccagaattttgaatcttttcaaaaatgttggaacctagatttgacattttaacattcctttaaggtttgcaagtttcttagttaaagaaataatttcagactctcttaagatcgattcagattcacaattatttttttcttccagatcattcatgttgttacacaaatctttattaactttaaccaaggaatgatttttagcacaaatttccaaccacttaccaaacattaccttgtaagattcagccatagagttctcatcaatttctaactcattttagttagatccaacttcttccttgttgtcatcagccaaggtattattcaagcaaatgaattttcctttttcgtgtaaatttcttgacaaaacacttgttagagcaaccttttcttttttatcttcactactttcaaagtcattactccaagtaacattaaaatcctttttattttctttaaggtactggcacattcagattgaatatggccatacccttcacactctctatattgaataccttttttattgttagtgataaatggtttagaggaactgttaccagaattgttaccttttggagtatttgaaaattctttttatttccaacagatataatgtatttttggaaattcttcgtcaacaaggccatttcatcatccttttcatcattagaaataacattttcaaaaacattaaaagcaatacctttgcttttctcactcaaggaactttgctatccctttttcttgatttgttgatttaactcaaaagttcttaaagaacccatgagttcgtcaaccttcattttgccaaagtcttttgcctcttccatt

SEQ ID NO: 130716 - DNA, 587 bp, Cannabis sativa
  modified_base (54)..(67): a, c, t, g, unknown or other
aaatctgaccataatttaaaatataaaataattaatttttaaatttaaacctcnnnnnnnnnnnnnnaataataatctattaaaaatgaaacactattaattttaaaaaattgatacttaatttcaaatgtaaaaaataatattttatttagatatttagggttttgaaattgaaaaatctaaaattaggtgaaaaatccccaaaaaattagattttgggttgaaagcacttaggttgccgtgcaacaggctgcacgtagccctatacgcgaacgaaccaagggacgtgcaaggtccctgattgagaaacctcggtcacatgcagcctcctgggcaggcgagttgcggcctattgtgtctgagcaaggctgacgtgcgcttcagatagaaattgtccctgtcatgcgtgagcggatgcttggcttgtctgagtgcttggtgctttcgatgcactatctggacacctttggacccgaatttttcaaaccttcataactttttcaatttttatcagaattgagttccgtaaaaaccaaaattgcttaatttttcacaatgaatcgaaataaaatatttttagaatgaaa

SEQ ID NO: 130717 - DNA, 1167 bp, Cannabis sativa
aaaaaaaaaaaatcaacaaaaagtaagaaaataactaaaaatcaactcatgacaactataaatataaataaactataaaataactaaaaaaaactcaagacaactataaataaactataaaacagctaaaaaaataatttattactttgaagaatgtaattttgtaaataaaaaatttcaaggtgtaaaaataaaaatatgtttgtgttgatgtaattttgtatttttttttttaatttttagtctatgttaaaaaaaatattaagatgtaaacaaaatagaattaaaacgtaccaaaaatataaaaaataatcattaaaagtaattattttcatttatatattatggggttccacctcaaaaccaattgtcaatgggagaagtagtctattcctcttatatattctattatccacacattgacaatgtgggactctctaacatcccctcaagatggtagatattttacttgctcaccatcttggacaacttgatcataggcggcttttttttagctcactatccctgatcacaagtgactctttttgctctacttttcgggtcggtatttttggatttttggtggctcttttttatttttggctcactatcaccgaatcacaagtggctttttttgactttggctcttggatcaattttttttggatttttggtggctcttttttttcagctttacttcgatcggttcattttttggggttggatagtcgctagagattttttttttttgtttgtttttgctttgataccatgttaagaatcatggggttccatctcaaaaccaattggcgatgggaggagtagttcattcctcttatatattctattatctttccacacattggcaatgtgggactctctagagcatgagagaagagaaaaactctttattactgaacacattgttttactcggctgtagtgcccaaaagaataaaatgaagaatactatttatagtaaaaggggtgcagtagccctagaggaaaaaaggccgaaaaataaggcccattgggccattaattctaataccccttcaagatgaactatatatgttttttaagttcatcttggttacaatagattgaaaatagcttggtaaaagaggcttggtaaggatgtcagcaatgttatttttggtggtgacat

SEQ ID NO: 130718 - DNA, 859 bp, Cannabis sativa
  modified_base (43)..(68): a, c, t, g, unknown or other
aaaagaggtaaaaatgatagattttaaaaaagaaggtaaaaannnnnnnnnnnnnnnnnnnnnnnnnntagagtgtaatttcctctttttgggatttggcaaaaataccgagttataaggccaattattcttaatgggcctttttctggtgagcttcgttactagaattcatgcatggatatagtgcaaaaataccacttttgattaaactatacatttttaaacataattaactaattaaatttaaaactgatatgattaaggttaattttactatattattaaatatgattcatcaaatttgagtgtaaaatattaaaggaaaaaaatatcatttggcaccatttttcaggaaaaaaaaaattgtattttactgtaaaaagtaattaattacaaatatacaatgtctaacatcttataaaagatgtttacaaactgtatttttgtaaacaaaatttataatttttgcaaataccatatttttagtattttattttaatttattttgagtatttttaaaacttccccatatttatgtgttatctgtgttttcggacgaataacacgtggcataaaaaggaaaaaataatctcatgatctcactaatcaaaatcccttaattaaaccaagtcacggataaattttattgattcgggaataggtgaaggctaagaggtatgtagagatgtaccttgccttactctagcttttctgacacaaaagatttattaccactccaagatttggagtggtccaagctcaaaaactacccaagtgatacttagggatgcacacggggcggggaattagcggggagtgctctccccgtccccatccccgttaaggattttaatcccca

SEQ ID NO: 130719 - DNA, 1326 bp, Cannabis sativa
aattaaatagaaattggggtgtggggaagaatcaagaaagagacctgagaagaatgaaggtgttacaacaatataatatacacgtgtaatttgtaattaattattgaaataaaataaaattcatatgcattgtgtactgataatacgatgacgacaaccatagcaaaagaaaagaaagcatttccgtgaccattcacatttatcttgaacacttattcacttaaacaaagaaaagttagagcatccaatagtagtatttcatttataactcgtgttgtatcaaatctaacatgatttggagttccaaataagttatttattttattttttaattgcatattaattattttaaaaaaataaatggaattttcattaattaataagtaaatacaaaattaaatattgttcatccagcagaattagcaaattaaaataggttaactaaactctttacaagaaggataaaagctctaataacattttcaacttaatgactcataagccgtcgactgtgaagcatcaaaataatgcgaagaatactaaatttttattctaaatgaaaatgtgacaaattatttctatgtaaatatttaattagaaagaacaaatataattagctggcaatttgttttacctaagtagttaactgcaacaaaatttgctaaagtattttttgtcactaatttgtttccgtagtttttttttttttttttttgcaagtaatgaccaatatcattgataaataaataatgtcgtacaggctaaaagactatacattccaaataacaaaatatgagtcgtctctagccaaacaagttgtttacccattcaaagagcatgcacaactaatccatatgcagccacattggtcgatcgatgaatatggatgagggacactctgggaaatttgaataacaaacttgctaaatcctctaacaatgatcttagatcactgaaaagagaatgtcttctagctaagacaaacacaattgctaaaagaccagaatctacaaattcaacgaactttgaagaaaaactatccatcgtcactaatatatcaaacaatatgctcgaattactgataatctccatcttttactcctaagttaacaaccgcttgttctacttcttccagatgaaccaaacagtaatgaacaactctcagcaggaaagaaatcttagcagcataaatgtgagaatcttgtgaggatttacttccttgaagtgagaaaaagtttaactgcaaaaaaaataaaattacattaattagtcaaaaaaaaataaataaataaacatcataataaataaataaatattattacaaat

SEQ ID NO: 130720 - DNA, 847 bp, Cannabis sativa
tatatatatatatatatatcacaagacatattgaattcaatttaactattgctatatatattaataagatatatatgaaataatatagttaattgttttttttattaatgatatttaaactagatcttcatatatagtgtcattgctctattcatatatggtgaatcaagtaattaatgaattcaattgcaaagaagttcaatggagacacaataagctctacttctaacttgtccattataaaattatgtcataatatatatttttcatatgaaaattatcatatatttattaaatatatataatactaatgatccactttttttttcattatctttttgtttattttggaatgggaccgaagatggtttatatttttttatattaaaatttttattatctaaatttttggtatctctttcttatttatgttgcaattttaatgttgtgattcatataacttaatttaacatatctttagaataaataatgattttttttaaatgaaaaaactcctccacacctattgtacaacgtaattatgatcattgttattttaacattagttaccctttaataagagaattactaaaaggtttcatctaccacaccttctttcatgttatactgctatttgtgtaattaagtattgaatcttataaaaatagcttttaaggatggtatcgctaaccaatcatagtgcgccacctataaaaagtactaagtacgtgcctaataatatgctccttaaataataataataataataataataataataatgagtttgtaacatttgggcaaaattgatcccaaaaacatattatttcaatggaacactctagtc

SEQ ID NO: 130721 - DNA, 2049 bp, Cannabis sativa
  modified_base (461)..(466): a, c, t, g, unknown or other
tcttcttcttcttctccttttgttaaaattacaagaataaaagtttagatttgatagtttttattagattttgttgtttatttgcttattagttattaatttttctattttgctcatcgattttataaattttattgttattctgaatgttgagtttatatatatatatatatatatatatataagtacatatactaggtgtttggtgaaattccaagagaattcagtcttcttcgctagttttaaggaattgggcatattcaaatgtgattttatttaaactttaagataagcatttttgtgatattattttgatattacttttgttgatctaagttttatcttttatgatttagagattttatctaaatattttaaatggctatgttgatttaatgttgtttataaattgttttatagttgttttatctttttaatttattttgttgttgttgtttcannnnnncatccattgaagaggttttttaggaaaaaatgtgagataatgatgatgagatgcacctttaaagattaatgtattagtttttgttgtctttgtctggtttcaaatgcttgttttgttatgtttatatttttttcaaatgtatttagttagaagaattgttcaaccttaaatggtttatgtctctaactttttttgtttctaattagttgttttttagttttaatttagttattatacgattcttattctaaggttcttaagttttatttttattttttaacaaaactagatcattaggttaggtcttacatttatcaattatatttgagttttaattggaattgttttagttgcatgtttattacgttttataattacgttattttttagttgttatattgttgttttaatgttgttcagtacatgatatacttgcaatattgtataactattaatcatatttttatcgatttattgttttattaattttgttatcctaatattttcaggtgcgtgataagacctctgacgttgttgacaagttgaagcttccaaagtaaaatattgtaaaggtttataatttactttttggagatgtcttgtttgaaatgttctctgattgtagtttattcatttgaaaaaaaaaatcatagcagaaagttgttttatagtttatttaatgttattttgatgttgttttaactgctgcaggacttgatttctagtgatgatgaactttaaagttgattagaatagacttgttgttcatttctattcttttggtagaatgaagtgagttgcataaattgaaagtgtacaagaaaatatttcgaagtcttttaagaaagttgacactattgtacatgaactaatgattgagaagtgtgtttagttttggttgtatgcactgaagagcaacattttttaagaaactttacttttatgattatttaaatatttttctatttaattgcacatgtatcttgcacagaatattgcacagaatattttttaaaatattctatttgtttatatcttttagtacaatgagaaacaactattattatatttttaatttctacatcaagtattggtataattatatttaaaaaaaaaaacaatagttgttagtagctttttaaaattgttaacaaccatttaacaacgttataaaagtataaaaacagttgtatatataatttaagtaatctacagattttaaccactgaaactcaacgtacaaacaacgtgaaagcaacatgctcaaaaagcaacaaaatcaaacaacgtatttacaactttaaaacaacggtaaaataacgaacaatgttattactaaatataagtaatttttctttatatttacaatatcttcctatcaatctctcactttattcaaaatcaatatataatgtgtgatctctttttattttacatgtcttaatgtaagagataagataaattttgttttgacatgaaaaattctattttttacttgttgaacaactagtgtagtgtgtactaattcataacaaactttacaacaacacgaaaacaacttgattttatgtaatattttcatg

SEQ ID NO: 130722 - DNA, 564 bp, Cannabis sativa
  modified_base (70)..(80): a, c, t, g, unknown or other
tcttgggaggcaacccaagtgttaatggcatttttagttgaacattcctaattgtttttttttttttttnnnnnnnnnnngtttttgttcattgaatttgtaaactgaatttttagttcattattttttattccttttaaaaaaaattatattttttgggcaggcccagtggctgcggcgagatagagctttcgtcgtggcagatttattaacggccgcggcgagacacttaacagagagggtcttaattttctcaccatctcgccgtagcgagaccaactttggccgtggcgggatggctcgggcgtaaataaaaggagggtttcgaccaagcaaccccaaaccaccccttcttcaaccctaaatccccttctccgaattcttcatccatattaccaaaaaccttcaatctcatctcacaaacaccacttcatccctaatcactccaaaaccctacttctctcatcaacccatctcttcttttgaaaacaacactcaaaatccctaattttcacccaatttcaaaaaaatccactattcatcaccttcaaacataaatcaaga

SEQ ID NO: 130723 - DNA, 1037 bp, Cannabis sativa
  modified_base (190)..(196): a, c, t, g, unknown or other
tgtggttaagtgttacaaatcgtaaaattcaggtggtttagccgccaatatccctttattatatatatagtaaaaattaaaaaatttaaaatatttctatttcatggtgaagaaaattaaattttaaattttttaacttaacaataaatcactaaatatgtattcttacataattatattattattaatnnnnnnntattttattttatttaaaaatcgtatcaaatgtgtcaaatttgtgtttaagcaggtatcatgtagtgtttgacctatttttatttcgtgtcaagtcgtgttgaaccattttctacccgcatttaattttctcaaccctaacctgtaaaatttgtatcgtacctattcgtatttgtgtgctatgtcaaaacccattttacaaccctacaaaaaggtgatgatggagagtacataataaccaagaaacattaaataaagaaagttaatatgctctaacgattgagcaaattctcaattaatttattttaatttaaaatttgaaagaaaaattcaaaaatcatttttaataatttttttaaatgtatgactattatatcttcaataataattatcaaactcagtcgaaaaataaattaaaaatcaccaaaaattcaaaaattatattataataatattagaaaaaaaaatcttcgaaaacggaatccagaaactattgcactctccttcagtctctgacagccacgaatgggcttcatcccaagaggttatcttcaacctccagcagctctaaacatttaaaatttcgaccagccagtcggagacttgtttttcgacgaaaaattaagcaattttgatacattttttaggggttttggtcggattttaatgtctaaactatctatgatatttaatttgatgtaaacaactaaatcgcaagcttgaatggttgacaagtattaggaacagtgaagtccgactagaacaaattctatctatactacaaattaacttagggaaaaaaacaaaaaaatacaaaaaaggaaaaaaaattacaaaaatac

SEQ ID NO: 130724 - DNA, 677 bp, Cannabis sativa
aaaagacatcattgttaaattaatcatatgtgaaaatactataataatttaaaaaatcaaattatgttggtgtaattttatatatatatttttttaaaaaaatatattgtgtaatgttaaattaatttatttatttattttatgaatcaaatcattatattgcttcaacttcatcctaacatcctaacagcaccaaaattggtctgagtaatctattgtacatattccttccttcagagcttgttaaaccactatatgtcagattgtttcatttaattttttaggcataatagttgaaattatacactttacatcttgttttatccagtatacccaagttgttgggagtttttgagaccaataaactgtaatgttcaattcatttaataaatattttattttattcaaaaaaacataaatataataggtgagatcttttaaagaaaaatatttatttggtagaatattttatgttatatttaatgtgaattattgaagttgttacactaaattagtaaaagctcctacacactaaattagtataaccatttaaagatagtcttattagacattgaagatagtcttattagacattgatctttatatttttgcaagttcgtcacaaacttttaattttgtagaaaccttaaaattttcacttttaaatagttttgttg

SEQ ID NO: 130725 - DNA, 1304 bp, Cannabis sativa
tgataacaaatcagattagattgtaatgggttttatttagggcataaaatcccaacactccataggcttgagcgtaagcttcttctaagtctatgaatccattagctctcatcaagaaatctgttaaagtatatgtttcttttgcattggagatatccccagagcaaggaccctgtggttaatcctaatgtaaaagccaccatcttcatatcatcagtaaccttaagtttagcagaaacatccatcatgcattggatgtatttcttcagactttccccttgtaacgccctatcccatagtgatgccacttgtgtgattttataaactagtttaatactaatatattaattaattattaaaactgtgaggataataaaaacttgactaaaataaaacactaaaaatggacattataacggcagcaaataggtgttctgaggatccatgttataaaaattttacccaaaagactatatacaatagcaattcaaaacacaattcaaaatattgtagatacaaccagtccaaaacaactcttggcaactcggcacacatgccggtatgttaaatatgtacattgctggagaagaccgtcatctcatggctgttctaacttttccttgcccttgcctgcaccacagagcatccgtgagtcacatatactcaacaacaaaagtaataaagaagtatacattaaatagctaaatatacatttcattatcataaatgataaaaatataacattcaacagtaggtaatataaccagtcatatgcatataaatagatatgctcacatatttgcattgcctaattaggcaagcccgtgtcataatgaaatatcatatatgatatcattgcaccacctactcaggtgagcttgtgccataacttggcactagtatatcacattgccttatttgaagagctcatacctacacccagtacatagttgcatcacctaatcaggtgagcccgtgccataacctagcaccaatatagtgcgtcatctaattagacgagcctgtacctatgccaagtattcatatatcattgttgcccgtacataacaaggtatgatgcccagtgtcaagatcgacggatgggaagggcaactggaccttgtagctgttcgcattgatgactttgatgtggtattgggaatggagtttctagctgagaagggggccattcaaattctagcaacatggaatctactgatcatgggatgttggaggagtatttgcggcactttgtcaatcccaaccagaagaattggccgcaactactagacgtagctcaattt

SEQ ID NO: 130726 - DNA, 662 bp, Cannabis sativa
gtttcaccatgtggaaacgagatggaagaaaatgtgaactctctaagaatgaagaagagactctgttcatactgtgaaaggtgctgagagagagaggaaggaaagcgaagagtctggaaggtgttcaaaggggaaccttactcaccattttaactcacactcataaaaaaatcaagagggatataattgtgaagttatgattttggtcatatgtgtttttcctaaatccaaatgtatagtttaggagacatcgtgtattcaaaaatttggattattttacctcaaaaaatagattattttgaagaaaattttacagaaggttcagacgtttatagttggtatgatcgtcctccacctagagaacccccagctgcccagtcccatttctttcatcccctgtcttctttccctgtgcggtggcactgttcagaccaaacataacgttgaccacttaaatccttctgagttgatcaagaacattactcgtatatttggaaagctcattaacatatatagagatgagcccaaattaaagaaattaagaaaactcagttttatgctatattctattcttttctcagattacaatgtcccttttaatgcatttttttttaaatttgttatcatttactcttagcttactaattatggatttctaaagc

SEQ ID NO: 130727 - DNA, 539 bp, Cannabis sativa
acaagtttcctaatagatgtaggtttgcattgctacaaggaaatgcccttcacgctaaaaaatgtaggaccaatctaccaacgtcttgtcaacaagatgtttaaggacctaaccagtcacaccatgaaattctacgtgaaagacatgttggtcaagtcaaaaaaggcggggagcacatagaggacatgagcaaatgtttcaaagtccttcgagaatacaacatgaaactcaaccccctaaagtgctcatttggggtcaactcaggtaagttccttggcttcacagtgaattcctgggaaatgaaagaaaatcttaagaagatccaagccctttcagacatgaaattgcccacaaaaatcaatgaggtacagagtttaactggccggatagcagaattatgcagatttgtgtcaaaatctacagataaatttatcccactcttcaacatcctttgggaaaacaaaaactttaaatggatagaggagcgtgaagttgtctttcaacaactagctcaacctcccatcctatcaaaacctcta

SEQ ID NO: 130728 - DNA, 1110 bp, Cannabis sativa
ctcagataggagagattgcagccacgtaatctctgttacaactgcagcaaggctgcggaattcagcttctgtggacgacctcgaaattgtttgctgtttcttagacttccaggcaactaaacttgagccaaactgcacacaatagccactggtggatctcctatcatcgggatcagatgcccagtcagcatcacaaaaggcggatatgtcaaagtgagatgatttctgcaagtgtattccatagtcaagagtgcctgcaagatatcttagaatccgttttacagcaatccaatgtgactctagtggggattgcataaactgagacactttattgacagaatatgcaatttcaggtcttgttattgtagcatattgtaatgctccaacaacagatcgataaagagttggatccaaaacagagtcactgccatattgagataacttgagaccacttgtcatcggtgtgctgctggactttgctccttgcatttgtgttttgcataagagttcttggacatattttatctgagacaaatgaagaccagtagcagtgtgcttgatttgaattcccaagaagtagtttaagtcacctaggtctttaagaggaaagtgagagctgagttgggaaatcaggttggaaacttcattatcattgctcccaattactataatgtcatctacatatacaagaatatatgtagtgtgttgaggaagaattcgaagaaacaatgatgtatctgatttagcatggcaaaatccaaacttaagaagagttactgacaatttctcaaaccaagcccgaggggcttgtttaagaccgtacaatgccttttgaagtttacaaaccaagtcaggattttgaggatctacaaaacctggaggttgacacatgtagacttcttcttccaaatctccattaagaaaagcattattgaagtctaactgtcttagtttccaacctttagaaacagcaattgtgagtaagactctaattgtttcgggtttgactactggactgaatgtttcattgaagtcaaatccactttgttgatgaaagcctttagctacaagtctggctttgtattgtgtggtactcccatcttcattttc

SEQ ID NO: 130729 - DNA, 964 bp, Cannabis sativa
  modified_base (604)..(608): a, c, t, g, unknown or other
tgtcaaagttcaaggggcaaaagttctaattagccaactaaaaatgtacttcgtaagttttatttttattttggataatttgcgtttaaactctttaaactttaaaatttggcacgattaacttcttagaatgaaataattagggctactccttccgtccactttggtcttttaagtgtgaaagtggactgatacggtgtacaaaagtgtactccacctaatataaatatttaaaaaataatttaaaatattttaaaattttaaaataaaaaaagtttttaaaaataattatttttttgagtaaatattattttggattctgtgttttgtaaaagttacgattggaccctctattttgttaaaagacaaaatggaccttgtatttttcaaaatggtaaaaataggaccctgaactgatttttttgtcaaaataaaatttaataataatctgatctaaatgtgttatgacaaaactttttacatttcttatatctattcgtgttagaaattgttttgaagttggttatagtaagaaaaaaagttgtctaaaattaagctcaggatcctatttttaccatattgaaaaatacagggtctattttgnnnnntaacaaaacagaaggtccaatcggtaacttttacaaaatacagggtccaaaataatatttatcctatttttttattccttttctttcttttttttctttcttttgtttctttcttcttctacccaaaaattatagggaaaatttcacaattgccctaaaataggaaaaacttaacaaaaatacggttacaccccaaaatacaacttatatacggtaagtgtaatctaaattacataaaatacggtattagcttcttcaacaccattgatgctcgtccgattgaaaaaaaaacagagcagccattgatgctcgacaaagcttgctgaaacaaacattcaacaacatttcaatgaaaa

SEQ ID NO: 130730 - DNA, 1029 bp, Cannabis sativa
ctatttctttaggggcgactatgatttgtcgcctctaatagccttactattagaggcgactttttgtcgcctcaaaattgtcgcccctaaaatttaaatttgttgtagtgctatagaaatggggaatacttgtttcaaaaagcatttttcggcatggtgagtacacattttgtctgttttattaaaaaataaaataattaaaataatctatcatgtcgaatatagaatccaaattgtgagtagcgtgtctattttattttataaaaccgtattgaattattaagaactttatttttaacaatgtaaatatattattgaaattttttgaaaaactgataaaatatctactataattataatgtaaacattcacacttttaattgatattaccaataaatagataatattaagaaaatttgattttttatgtttaaaatttttaagaagaaaaattttgcacttttacattatatgctgaggttattccatcagttaaaaaaaaaaaaattcggcaaaaaaaatagataagaaaaaaggttgacgtagtttgtcttattttttatgtaaatatatttttgatatagtgggaaaaaaagagattttttttatatttttttaattaaatagttaatttaagcatagttaaatttctcttttattattcaccattggattaaaatctaatgggtttagtatttatagttaaatttatttagtaaccatcaataattaatacccattaaaagtgttatatatatatatatacatatatataatttctctaactagaatgaggaatttatacaaaatactaacctttttccaaactttacatttatactagaatagggaatttatactaacatttttcctttctcctctctcactttttttttatctttttttttccttttctatttctctcttttttttttcacggtagatgtgtttggaagtaactgtgtaattactaagtagggtaattactagggtggtaattacacagtgtagtaattacactatatttta

SEQ ID NO: 130731 - DNA, 542 bp, Cannabis sativa
atatttctttttgtaatttcataattaattaaaggttattttggtaattcaatagtaaaaagcccatgaacattctcatttttattaaggttatagataaagtgtgactattttaagcataatttgtggcttcaacatgagaagtaaagaggcattcagcaaaagaaaaaagaagaggcatgcttaccagtcaccagtcaacaatttttttttaaaaaaaaaactcatatcatattagaaaaaataataattatataaccactacaaatcacagtattgaattaaattaaattaacaagcataagtattgtattatcttgggccggaacaacaaaataataagtaaaatgaaccatttttattaaaaaaaaaaaagtaataaatcgtaaaggcaatctctaataattttttaatagatgaaataaaaagaatatatgccttatataaaaatatgcaattttatgaaagtcggatacattcactactacaaaaagtataattctcgtcggtttttaagagtcatttaaagaatttacgtcggt

SEQ ID NO: 130732 - DNA, 892 bp, Cannabis sativa
attgcactatcaagttcctaaaatttaagtataacgaacaactcaaagaactcgtccaataaaattaagctagaactcaatcatctcaggattgagatcaaatgatctatgatcaactacgtgatattaacttagaaatatatatatatgtatatactggtaatattatccaatccgatgtataactgaccatccaatccttatttactttcctaatgctttggaaaagatatttcactcagttaagtgtaagtaaaccttatcgctgattatcacatcagtgtaaatctagtgcattgataaatcgtgagactaaataatttgaaacatataatcacaactacattctattctgatgacatcaccgtaattgtgaataagaatatatttgaaatttaatagaacttatatattaaacctataatcatgtgtaaaatatgtgaacaaagcatatgactaggtcatgatatgatacttgatgtaaataaaattacaataaaataatatcttatttaagacataaaatccgaacaaaacctccatcaaatacgacacttaggactgaaaatactaatataatatcgtttaatactgacaataaaaaaataaacggaagaaaaatggtgaagaaatgatgaaatgggggcttagaaaatggtggtcagctgtgaaaagaaatgggctgaggagtataagagaaggtgatacgtatgattttaatgggaaatttgacattacatgcttaaaaatagcatgtgttgttttaatatgctagccaaaaaatagtaaaaaaaataccctccaattaactttaatcccaagaataccctccccatttcgaactaccattctccctctaactctctcttttctcactctctctctctctctc

SEQ ID NO: 130733 - DNA, 745 bp, Cannabis sativa
gaatctatatcgaaccactatcggacctcggaccttcctcaaaaacttaaattgtgaaacctcctattgaacctatatcgagcttatatgaaatactattggaccgactcaaaaaaatgaagaaaaacccaaaaaaattatagagaacgtcttcgttcgtggtttatgtatgtgatctgcgttagtggcggtagtctctccgttcgcagttgaggaagggattgggcgaggtatcgatcaaattgaaatgaaaccttctcgatcggtcgattgggtggtggtgatggtcgcagtcttggatcctttagtgggatttcggtgggtatttcagtgagaattagtgacaaagaaaaaataagaggggaataaagaaatgttataaaattttgaaataagagagtacattgaggtatacataaaaattagtccattctacgaatattagatagattaaattttggtaattaattttaaaatataatatgtaataaaattaaattttcttttatatagagaccgaaattttagatagacaacctacttgtagtacaccaataatactttaaagagacaccataaataaaattagggctgagcatcggtcggtttggtcggttttttttctatataaaaatcgaaaagttagttttcgatttggattggtgcaattcaaaaattgaccgaccaatccagaacatatcttaaaactgaccgttttgagcctcagtttggtcggtttaaactg

SEQ ID NO: 130734 - DNA, 586 bp, Cannabis sativa
tcatgaagccatcttccaagttctcaaccttcaaaggtttgtttcaatgttttagcatcatcttttttagttcattttagcaataattgccttacactcacacaagacatatatgtgttgttgaataactttgcagcatagctagacagcctgatttggaggaatggacttccagggctgaaattgctgatttgctgcatgacccagtatgtctcttctcatctcacttcaaatttcatcaaatcaaaataaacataatcttctttatttactactgcaggttcgtattgccatggttgggaagtatacaggtctatcagatgcctacctttctgtactgaaggtgcacaccaacccaaccccttttcaatatatatgtatatatatatatatgtatgttattttgagtttaaattcatgatgcaatttgctatgtttaggctcttctacatgcatctgttggcctagggaagaagctttctgtggattgggttgcagccactgatttagaggatgcaacagctaaagaggtgactaattaaaacatgttcacttgtatttttgtttacattattactaatgttat

SEQ ID NO: 130735 - DNA, 1722 bp, Cannabis sativa
ggcataaaacccaacatactattcatatcactacaggtatgatctgagatagctcttttaaggttacaatgtaggaatcaaagatggaaattctcaagttaggagagaagcaatggtgggcgtgtgaaaaagagagagttcagactttgaatttagcttatgacttcagacttagggttttaaagttaagttaaggccctttatataggagagcttaaactccttttatcaggtaaaataaataagtatttacgtattaaattagtaaaatacaaatcattaaaatgcctcttaaatatagatattttccctctattttcgtgggctgttgaggcccaattcataatctagcctggtgaccatgcatgaagttgtacaccagagtcctgccacgccaagttctagctggccatgcatctacaggatgcaggctggccaaccttgtgttgtccaaaagctggctggcccatgctggccatagggccggccgaccagcctccttaaggtggttggtccattattcttcatcccatttgagtgtcgggactccccattggttgaagtgctgagtatatgacttggcattcttgttggtgagttgtactgccacgtggtgctgatatccgcgacgtagacatgccatgtcatgtgggcgaaaattgggataacatttaccgccaagtccctatgtggacgtctatgcagatagggactttccagctgagttggggctgatgtagccttaattgagtatatattaatgtatttttagtctttgaaataactgcttttgactgtttgatctcatttgttacattaagttaactgcattgtacttctacatgctttttagttgaacactacgtggcaagtgaagaagtggtaaaatagaagctatataatccttatggagggaaacttctcttcacttttcacttttcattctctcactagaaaaagtaactttgaaacgctcctccttctctagaggtcgaagcccacattgctccatctcgagatttttgtgccatttcgacggtctaagcttcccattctcttcgtcaaaggtttcttgtagtgggtaagctttctattcccgctatttacttgatttagttgatttttccatgattgcataaatcttttctttgctttgaacttttttgattcccacgttagattgtaatcttttttggttttttgatctgcatggtagtcttaggatgtgtaatgtatgatttttaaacaaaaaatatttgatctgaccttcgttgtgattcttatctctttgaatcacaaagaacacgaagaacgtgtttgagttcttgaaaaacacacgttcgaatccttcgtataccctggccggcaatgaaggtcttgttcaagacctagctggccatggatgttcaccatgggatctggttggccatagggggataccctaagagttggtcggcctatgcctagaagtaaaattcttggccggccctaggttggatcatgggacctggtcaggcctctaaggcttgggaaccctggccagccaaggccaaagttctaagtggacaaccaatattttatcctctattaacctcaactaaggtcttatgacgaccttgtatgcatatacaattgtaatcttatgtgttgttcccttgggaactctgtataagacttggtagtgagtccattatagtgaagtgcacaacttaagactcacta

SEQ ID NO: 130736 - DNA, 515 bp, Cannabis sativa
ctactgcagctgtagcagcagcgactgcaatggcgtgcttttcgccgtcgcggtctccgtcacgcacggttgatcttgttgcggtgtcgcttgggttagtagtagtggtggtggagaagttgtggtctttgtctcttacagacttgacaaagctccatcttcgtttctctttggagggtctggaagaagaggaggaggcagagtagtcggattttttgaggccaaagagacctcgaaaccattttgaagctttgcccattgtttggaaattgggaagaagaaaggtttttcagaagttgagaacatgaataggttgaaaaagtggaggagggttcgtgtgtaagtgtacggtctggttatggagtaacatttctagtagtagaagaagaaggaggaggaggttgtagttgggttggttataatgttgagaaagaaagtttagagaaagaaatagggaatgtatagagtccattttgtgctttaactatttatttttattttttataatttttttt

SEQ ID NO: 130737 - DNA, 681 bp, Cannabis sativa
taaacaaatattgttagagttacaactgaattaatcaaaaaacccaaacaaataaaacatgactaccaataatacaaaacttatatttttcttttatgaaaaatgacttaaacaacaacaagaactatatttttggtgatattggaaaatgacttcttaaccttgatgacgtaatatgaagcaacccatatagacaacaaattaaatcaagacagtggtaaatttcaaaacaggacataaaatggtattttctcagaacttatatattttttttgtgtgtgataacttttgcatcataacaagaataagaaacaatacaacttttattcttaatctctctctttatgttactattaacccttaattatgtgtctagatttgtcacgtgtcatgtttttttttgttcttagctttgcttgtatttattcattgtatttcctttatatttaaaatataactctataaattcttaattagagtaagattagtttaaatgaaatattgtcttcaaaacataaaaataaaatactatgaaattaaatattaatttataactagttattagttatataatttataactaattagtaactaatcttactctaaattattaactagtaagcgtttggttggaggtaatgaaatggaatggaatggaaaggaaacaattttcattccatt

SEQ ID NO: 130738 - DNA, 1105 bp, Cannabis sativa
gcaactaatcttgctttgcacctttcaacggatccatcactattgaacttaatcttgtagacccaacggcatcctatagcccttttgtttggtgggagtttgacataagtccatgttttgttcttcaaaagagcatataactcagtttgcatagcttgattccacactttgatttggctggcttgcttgtaattgcgtggttcaaagagagctgtgacagccaagataaaagatttatgagtatttgaaagtttatcataggaaataaacttactaagaggatgaggtgtagaaggttgattatgcaagatggaattgcagtcataatctcttaagtatgtggggagtttggtctgcctagttgttcttctcagtgatggttcatttgcttcaggatgggtatcattgctgtctgctgtgtgttgttcagtactatgcaatctagtagttctgttcaatggtgattgacttgctgtaggataggaattgttgctgtcagttgtgtgttgttcagcagtatgcgatgtttccatttgttcctgtggtatgttagtggtgctgctatttgagttaatatctgtaggaaaatcacttacaggtgtgttagatatcatagtagaaggaaaaaccatgttaaaaaaaggatcaacaccattatgctcagtattaagagttttaaaggggtaaatgtgttcatggaaataaacatttctagaaataaaaatttgtttgctatttaaatcatagagtttatatccttttacaccttgaggatagcctaagaaaacacaaggcttggctcttggagcaaatttagttctatgagcagtgagggtggagcaaacacaagacaaccaaaattctttaaatgagagtaatctggtttatttccaaatagcagctcatatggagtcttgttcgtaagcaagggagtgggagtgcgatttatcaagaaagtagcagtcattatgcattcggaccaaaattttatgggcatgttggcttgaaaaaataacgcacgagcaacattcaatagatgctgatgttttctctcagctattgcgttttgttcgggggtttcaatgcaagtgaagtcatgcaatat

SEQ ID NO: 130739 - DNA, 1449 bp, Cannabis sativa
ttttcaaaaagagaaaaaatacattttagggggcaattattatgcccattttttgagcactgaatgtagacatggcatatgttatataagtctaaaagaaataaagaaataatgaatgcgaggaataaataaatattctacctcgaaaataagctatgaaataaaagaggagataaccttacggagtactatcaatataatgatttacgaggatgagaagaacacaagttaagtcgtcgagacatggctgaaacgaaggaggcaatagaatatcaagaaacaatgagttgagtagaaaagttagataacaagttcttccaaagcttacaactcatggacccacatacttgtaagtatgttgaaagactaagagaaataagcattatacaacttatttcgagagaccaagtctaaaaagctaccttagaaggctatagcgaggacaaatacttaaactaacaccttgcaagatacagctagctatctttaagcagcaccaactaatgtgagccataactataatgcacatcatttcaataaaagcaaaactgctttcgaataagagtaaaaagcggttaccaataattatttcatgaggagtgctatggagactctctattctactctcttttgcactctctctatgatgtaatgacaaatgtcaaattttaagtaaagtttgtttttgcttaatatttagttatgatattctaatattattacaattatgccattctaactaaattattatataatgactagttatctatgtataatctaattactttattaattttttatttttacttttttattttgttgaaatgtttatttttgcttaattacaagcaaaaatatatatatttggaagaaaaaataaccacattaaaaaaaattaaaaaagtacaatacatacatttcaattatacataaattaattgtaattttttatttttcataaagtaaaaattataataagtttaatgtatacaaaagttaatacaatttaaaaaaaaaatgaatgacttcaatctattattattaatctttttgtattttttttttattttaatagttcttttattatacagtactagttttttgttcagattcaacgctctatttgtaagttgttttttattcttcttatacaagtgaaaatttactccacttctaatatagtatttttcaaatattttttttaattattttctttatttaatatagcataaaatgaggttcaataaattaatatactgttgttcaaaagaaattaatatactaggtcatagatgtattttttttaagaaaaaaaaaggtcaatgatagaaaaaaaaaaaattattgtagtagctcaattttttttaatttgctatactttttacagtagaatacatatagataaatgtttgaactattatttagcttatatatacttatttttactat

SEQ ID NO: 130740 - DNA, 1375 bp, Cannabis sativa
atttatagaaagttataatctctattataagaattagatatttgttgatagaaatgaagtgaaataatacaaagtatgcaggaaaatgagccgtagcattttgagccattttataatgaataagagaaataaaagagaaagaagatcaacatgtaaaatataatgaacaataatatcaaatttagtctgatattttcaatttatctatatatataggagaagtatgaggcggtgatgtggcggtctaaaatttctccaaagctatttttatcttctccccttaattttttctttttttaacattttattaaagtataaatttacaaattaatattttactattattttaaaaaaagtttccattaaaatatctaacataaattaattattattttttagaaaaaaaaaactataattgattaattaattagaaaaaaaaaattaatgtaattgtgatttttttctaatgaattcaaatttttttttcatatgagtaatctatataaaatctatcattaataactatttttactcactctcacatcctaattcctaaaggtatgcctattcttattgatcaatatacaactaatttaatattcttttaacgacttcttaatatataatttttctttctatttgctacatcattcccaactaccttttattgattgtaatttttttgagaggttcattgcattgttatacttatttttcgtaagcttttttcttgtatttgaatttctcttaaaattttcattaatgctcaatgttacactaagcaatatactaagttaatttatttataattttaccatacattaaaattatatttttaagtaaccatttattataatacttaaaaaattaaattagccgtgcgaagagcagttatattgcctaattaccaatatactaattgtttttatttttaatattataaaaaatgtcaattaatatttaaaaacataatttttttaaaaaattaatcttgacattttttttattgatttctaaatatattattaaattttgtagtgtttctaattatattaaaggggtgttaattacaatcttactcttgaaattatatatcgtaatattttttatcattttttataagaggatttgttataattataatatgtaaattttaaaaaaaatttaaataattaaacttattttcaacacttaacattataattataattataataaatactactataaaaaaatatatcatttttgagtaggaaaatgaagcgaaagatataataaaacttctttatgctatgctacattgtacctacctactactccctccctccccaatcccatatataatattatcataaaaaaaaaaaaattgaaaaat

SEQ ID NO: 130741 - DNA, 940 bp, Cannabis sativa
gttgttacaaactatattaatacttatttatatgagagaaatgagtgttgtgtattttgaattctaagtgatcacctatacattataaaatgagatttttggtgctcatttgagagtgggagatcaagttttctattaagaaaacactttgctataaaaccctaaaagacttgataattcttaaagctatttccatgagagttccttagggtccgtttgctacgcatgattgcattgaattggattagaaaggattagattggatttgactggttaggattatgctgaatccagtaatgtgttcgtttatgagttggattgaatttttttattataaaaacaattttaaaaaacttaatttaatgaaatttatattttattggtaaaaatatatattttttaaaaaataacaaaattaaaaaattaaaaaatatgaattataatttttttaactaattaaattttacaattaacattataaaatatacatatattttttaaaataaatttattattttattaatttttattgtattatctatacgttaaaatatttgttttgaaatgaaaaaaatattaaaatattttttatatgcagaaaaaaaataattattatcatttaataaatttatttacataatttacttgtatatattaataagattatatatatttaagaactcatcccttacaagaaaaaaagtacaaaaagaataaacctatccaaataatgacgttgatgttgggttttgggagaaaagtggtcggtgaggtttatcccacttaatcccatatatattattgggactatttattccacagaagatggattattttttagtctaaagattatttatctagtcaactatcaccaccaatgtaacgtccctgcttcaagctttttcattgggcccttgcacccacggaataattggctctt

SEQ ID NO: 130742 - DNA, 859 bp, Cannabis sativa
ataaagacaattttataggttaaaaaaaaaatacaatatcaaatgtactcattgagtcattgccaaactccaataggaatactcctaattttctctcatttctgttttgactctctatttgtgaaatgactttccatatttatactaattagtccctatacctttcatgtaacaccgactcttattaatttgttaagtctttgcctgtatgtacagatcactttaaggagttagaagagtcatttgatcagttgtagttatctattttttttcttcgatagccatgttgctagtttgggtgcttttttaatagttagattccagagtatgtgagtagacacttagaaataaagccactaaggctggcttagtggtgagggagggatgggaaaaatggagaggtcatgggttcgaacctaggaccttgaagctattaagctattaaatgattgtaaaatactattacgctgcactcaaaaaaaaaaaaagtactttgcataacaccttttttttttgaaagaaacataacaccttttttttaattatagaaatatgttattatacagccattgataacttaatttttatgttattttaattgtaatcccgagtcaaaaagtgaaaatatatatatatacataataataaataaatatatgtatataaaaaaaatatcaaaaaatcaaagagatgccgtttttcatatcgtctctctttttctcttttgaacacaaaaaggacacccacaaactaccattaccaccatactccagcaatccatctctggccaccgaccagccccacgcaccagactatttgaacccccttggtgccgacgacctcacccccaagcagtgcc

SEQ ID NO: 130743 - DNA, 1157 bp, Cannabis sativa
tttatcaatacgatcaatctctcaacagttatatgaattttgaattcaaatctaattattgaagagtttttggtggttaaactctcttaactattgtttcacttacacttaacctttcaagctcaaattttggcagtaaaaccctccaaactatcaaactgttagtaaatttaaggtatcatccggtcaactaccactatggactagttatgtgtacacttttgtacacgtgacacgtttatattggtatatctaatattattatttgaaaattatttcgaaatttattttaaattaaataaaatttgaaaaaataaaaaataaataaaatatttaaaaatataaaaaatattataatttttaaataataatattaggtgtattaatataaatgtgtcatgtatagaagagtgtacacataagcaattcaagttggcagctaactatgaaaaataattaacattttaaatttgctaatggttttgtagtttggagggttttactaataaaatttgagattagagaattaagtgcaagtaatgctagttaagagaatttagttgtaaaaaaaaaatcattatttaattatatataactaaaatctatttggtcaaattaagaagttgtattaggtaaattatactttagggtattaaatatatacaattttaaaatataaaatactaaatgaatattattaaaagtacaataattaaatatatttttttaagaaaacgcaaataataacgagtatatttctcataataattcaatggattttgaataaaataattctatttttattaagtttttatttctgtcatttcgtttattttgattgaatagctaatcaatcttaaaattattaactttataatcatagtctcaatccaaaatttactttacaaaaaggacatttgaaaatgaaaattttggttactatacttaaatgtaagagaaaattacgatgtgggacactttttgtaattaaatactgtatataccgaatatatttttatttggtaaaaagtaatgattttttttgacacgtgtacacagttattattttttagagtgggttgagtgttaaacacgattccacgttgtaattttctctgtcaagccatcactctctcaatcacttccatttctctttt

SEQ ID NO: 130744 - DNA, 672 bp, Cannabis sativa
aaggtagtggcttacctccggttcctcgagattccaattgcaagcggtactccctactcttatattttagaatttaacttagttgtttcttgtggaagaggtaaaatcattaatgataatatcatatatgctccccctaagtaattaatagttgaggcttttaatcacttgttacatgaagaacttttaaagaccaaatatgaaatgaacacttattcttttattcaaataattcccgtcttgaggcgtacatggaaattagtactaaaataaaaagtaaagaaaaacaaaaaagaacctgaccacccctagtttattgatggtatcgttgcaggtgatcagcattctatgctcttggggacttttgttccatctagtctcttcaaatgataagttccatcactaattttttctataacttcatacagtccttcccaatttggtcctaagacccccactgcgggctcttgagaggcagggaacactcctctcaaaacaatatcaccaatttcaaattttctgctattgacttttgagttgaaattcttggcgattttgttttggtacatctggagggttgggttcagtatgtcgtacccactactataggcccctaactctcacacaaggcccaaatgagataaatttaaccattaaataaataattgttat

SEQ ID NO: 130745 - DNA, 1265 bp, Cannabis sativa
aagaattaaatgataccataaacagatgtcaaacaatctccatcaataccctaataattgtttagctactcctattcattgtagcaattcgacacaaatcaattaagaacataagaacaaaatggagaagaagaaatcgttgaaaaactctgttaaaaagccttctcagttactttgtttctccgattttcgtactctctaattgctttgccaaaaagtgtgaaaatatactcctttaaatagtcgaaaaaggataaaaaaaaagataaaaaaatatcaaatttttgaaattcacgtagacgggccacgacattgggcatgtagtgtcgcgacccgtgtcttaggtcctaatatttttttgctcttttcagcacacgggcctcaacactcaaagggagtgtcgcggccctcaatggcaaattttaggcaaacgcatctctgcctcaacactaaaccccaatattgaggcgcgcgcatgtcttggtcaaaaacgattttttctatcaaattttggcattttaatgccttgacatagaattgtagtgttgaggcgctactctattattttcaatttcttcaccttaaaagctccaaacacacgagaatttttggatttttccttggatgaatttcttggtgctctagcatcgagagtttatttctttgaccttctttttcatattttttttcacaatttccccccttttttttcaaaactaaacctacaaaataataactaccaaaagcgtaaaattacacaaaataagagtaaattatttaaaaacaatctaaaaattatactaattaaaacttaacaaattctccaaaactaaacatttacttattctcgagtaaagagctaacaacgaacacgacacaacctaaatgaaacaagacaatcaaccaaaacatgagtcacaatctttcaagtaagccaaataacatggttttgtacaaaatttttacttatgtatttgaatctagaattttagctcaatcacacccttaactcacctcaattatttcattcagttcatgacaccataattaacacttaactaacatttaaaacaattcatgcatgctaaataccaccttcaatccactaaccaaatgtattccacatgattgcaaaactcactattctctactaatataaatagatccataatcaagaatcaaaaggtctttctaggtaataaaaaagctatatttcgaccaattaaagataaaatttggtcaaaactaaattcatggcatacaaa

SEQ ID NO: 130746 - DNA, 559 bp, Cannabis sativa
ccaaacccgaaggagagaaagagattctggtttagatctttataatgctatgctacagaaaggaatcaagggctagagatcttgaacgggaggagtcattatattccgctgcaatcaatgtaaagttttcttaaactcttatgtgcttattttcattgttttagagatattcatattttggatgttgatcaacatacttgttagtaaatctagatcttggtaaaatattcccaacactctcttccgtttgtcttctctctgcccacgactgacggacgattccaaggccataccgactatagatttgagattccaacctcgaaaacccaaggttgacgtctcttgagctctttttttttcctccatttctccctgtctcacatgttttcttttttgtgcagtcagatgacattgagctcatcatggatcgtcgggctttgacatggtgttgatagtttttaggtttattttgttatattgattcataaactaattagtaattttccccctgaactttgacatgtattaaatcgtgtcccctgaacttttttggccgtta

SEQ ID NO: 130747 - DNA, 872 bp, Cannabis sativa
  modified_base (842)..(845): a, c, t, g, unknown or other
aaatatacatatttatatatgttatggacttaatagaatttatacattaaacataatcatgaaataaatcatgtgaacgatgcaacataaaagtaattacgacaatgccaattacgacgacttttttggagtttgctgttggtgccagaaaagtcgtcggagtagctgccggtgtcgaaaaagtcattggggttgctaacggtgccagaaaagtcgtcgaaattggtattgtcctcaaaaaaattaccagaaaaaatttctggtaattacttcttggtgatttttcttgtaattttttcgatgataatgccaatttcgacaacttttctcgcattgtcagcaaccccaatgactttttcgacactgatgacagctactccgacgacttttttagtgccggttacaaactccggccacttttccaactccgataacaaataaaacttcctaaaaataaataaaaacattaaatatgggctttaaaaacctaatttacatatatataacatctcaaataccataaaattacttaaaaaaaaatactacataaattagtgaaacttaaaagtaacatatttaaataaaaattttttaaaatcccatgtaatttcctcctttttttctactaaattgtcatcccaagcccaaaaagcaaacaccatcttcttctccaacaaatacaggagtcgcactttttgcaatttctttatttatttattgaagcagctgtcattttgttgagagtagtgaccatgtattataattttcattgaaatttcaaaccctcatcctcaacgtagttaatatttgagccacattataatatatgtatatatatatannnnagcaaaaaactacgtgcgaggcacgta

SEQ ID NO: 130748 - DNA, 1148 bp, Cannabis sativa
  modified_base (114)..(114): a, c, t, g, unknown or other
actgtagcgtgccttagcattagggcattacactggtgtctcgtcaatacagttattaatagttttggatccttgtctcgcttaaaactatacagtcagcgagttatgaatatnctctattaattctatatttaatgagttattcctctttgtattaaattatataactttttagaccaagtggttcttattccactaaatgacacgtgtcatcctctgaagtgtagttgaatttcgtgtataacatatatgtatttgtatctttgagttttgagttgtaacactttttctttatttgtattttgtactttgggattgtaactccttatttaatatattgttcttataatatttttcttagagttgtaattgtcttggtcttttattcatcttattttattctttcactgtaatctctcatttatttctaacaatttcttgactctctaccaaacatgggatacaaaacacatactactctaaaccaatttatttctcacttcttaaactcttttcagcaacttcatattttatttttatttgtgatttcttaaactcttttcatatgtttgtaacacatcatacacacttgaatgagtatgaaaacaatatcccacagctatgtacacattgttcaaattaaaatgtacaattcgatgtttttaagacctgcttcgccttgccttagtgttatagttaggttcattctttttctattttaactaatcttgcgtaaaagttgttatgtcaacttatttggttagttgttcctaactaactcttgtatgtactgtttgtaaaactcattttataaatactagttactcatctcagttgagattgagcttgattcaatttctttctctttctctaaaattcttttcttgcaaacatcaacatggtatcatcgacgataaatgactctagaaatcttgcccaaaatcacactctaactcatcgtcgctccaccaacagacaagaaaccaccacaattcgagatactgaacaatctgcttccactcaacattcatctcgatcatcatagctatgcctactagagatctctcattctcccctccattggtgcccatggccttgaaggtattcttcttggtaccacacctcgaccacctgctaccaaccctact

SEQ ID NO: 130749 - DNA, 1900 bp, Cannabis sativa
  modified_base (1435)..(1441): a, c, t, g, unknown or other
  modified_base (1511)..(1516): a, c, t, g, unknown or other
  modified_base (1853)..(1854): a, c, t, g, unknown or other
gaaaagtaaaaacagttttatagtacatgtttttgaaaaatattttcactttttcaattttaaaaacagaaaagtaattaaaaagtattaccaaacggcacctatattatttctgtgtggaattcttatcttgttgtgcaatggtgactggtcgaatcaaagttttaaccgtaaatgttttctttgctcttgataaagccatatataactgaccatgtcaaatactggttgaaataaataaattccaagataatttaatatttagcctagacttatttatagtcattgcaaaacttaaatcttatagaaaactaaatcccaacataatcttatttataatctttttcaatatggtagcattctacatgctcttcaagcattattaattaagaaattgattctcaacatggcagcctacagtagaaaaatgaacgaaaaaacagcaacaatacaatgcatgacttgtacctttagaaaatatatcacaggctaaaggaatgacattcttagggtgaggaccaaaacaagatttcttcatgttgggaatgtattcgattgcatagattgcacgagtgttctctgcgtcaaataattaacacactaattttaaaaaaattaactaaattgcaattaaaaatcttccatctgtaatgaaatataactaactatacatggctttggcacgtaagcaaacaatcttccatctgcagtgaaaacttttccgatattaattgcagcaagatgcaacaatgtccacattactaagataatcagagtgattactcaccatcatttcagcaaatggtggaccatttgccttaacatccctcatgtaatctctttctgattcatttcttcgtttattagaaatgtaaatatgagacataataacatagaaaaaaaaaaaactcatataattacaaattcaagatgatcatataacagttaattttctacctccacttattatctttaatcaatataccaaaacactcctgaaagaaaatatatccctgagaaaaattatccctcaaaagagaccaattagtatttaccttgtgatcagggaaatcctttacgttgaggagctccatgccaaaggccaaaattaaaaaaaataaataaataaaagtcaaaaaaattacacattttattttcaaaaattaagaaagaaaaataccaggcataccttcttataaaagtttatagcacgatcttatagaagttcatagcacggacaatgaaatttgcagatatgaatttgaatattaaaagtctaaactaaaattggggtttatttttaattaccaagcataccgtatactctgagtaatccactataaaatgatactccggattacactatgaatttgaatatcagttcaaatatttgttttatttttattttattaatttattatatataaataatatnnnnnnnttttattaaatataaataaaaaatcacccataaaattctcataaaacaagaattcagttatataggcacnnnnnntatagaatagatatatatataatcatatataaaaagatattaaggcataatttttcatgaaaaattaaaaaattagtatttagttatttaaatataattttattattaagaaaataaatacatttttattttatatattaatgtagtaaattattatattactattttattaaacttaattaatttgtttgaatttaaaaatatatttagtaaattatttaataaatagtagtaaaattaactaattatattattcttaaaattaatatgagtatttttttgttaagaaattacatatcattattaattttggtaatattaaattaaactccgtcannttttagcgtaacactcgtattttatttttaatttaatgatttgatt

SEQ ID NO: 130750 - DNA, 1331 bp, Cannabis sativa
cctggtaaaataatttccaaaacaaataacatatgctaaaccaagggatgcttaaggagagggtacaaagtagttaatacctgtgaacgatatccataagaacaagcaggcctagctcatgggctttatcaattagcgacttcaattcatctgggatttcacagcgactgctaggtgcaaaaaaatttgtaacatggtacctgcataacaattaaaaataaatggatacatcttaaacaacagaagattaagaattatatatataaacactacacattagagacaagtgtcatgcatataataactactaatttgttcaaacatacacacgacacgaaaagcaggacttaatgaaaattttagatggccattttttaattaatactaaattaatcatcaaaaactactaaatagttaatgataatacataagaagaagaagaaagaaatggagtaagaactttgaaatgatggccattccttgtgcctcttctccaattgacagcaagtactctctaactttaacaacaaattcctccccaacatatgagattattcaaagtgctgaattccactaagaataaattaagtaaatctggcaaacatgttcggcgacccaatccttgtcaatggcgaggaaagaagaatcaacagatgactgtgatttggatttaggatataaatttagtgttcaaaatctaaatacttgtttgagaaaaattaataatataaaccctaacatttatatagtaattaccagactctccaaactccttaacatttatttatatagtaattaccagaaaaataaaataaaattaaaccttttatgagtgtcaatttttgtgtgttatagagcaatcatcagagttgatagagcaatcgtcaaatctctagtacaatcgatatatcttcgaagtcaatcacctgagcacttcacctcacgttcatagatctccgaccgttcagccgcacccattgttgtagcggtaatcgattgcacgtcgttcagtcgcacccaaatcgatcgcattttttgatcgggcttctgggcacaatcaagatcgttactttttggattggaatttcatggattgggcatgcgagagtgagaatcatttatgggactggaaactcagatgaggaaacctaaccaccactggaggatatagtgtttgctatgagatacgtgtttaaaatttggaaaaaaaattataaatgaaaataaattgaaaatttaaaagttaaatttgttatttttgaatagaatttatttttttttaaaaaaaagtcacccatgaaattctcataaaccaagaatttcagttatat

SEQ ID NO: 130751 - DNA, 608 bp, Cannabis sativa
  modified_base (136)..(159): a, c, t, g, unknown or other
  modified_base (562)..(562): a, c, t, g, unknown or other
aattagactatgtcttatttataaatttttactaagttaaaacttaattgtaaaaaagagcttttaggatctatttgttaattaagagactttattaagtctaattaatatatgtattaaatgaaaattttatttnnnnnnnnnnnnnnnnnnnnnnnnaaatagttttgacatttaaaagattgaaattagaaaatatggcatttgtgagagaaaaggataaattgttgtataaaatggtaaaattccaatttattggggcccactatgtagtcgaccacttaaggtgctttttgcccaattattattattttcttaatgccatataatttaaatttaacccgatgtgaaatagtataaaaagaatacgatggtctcattatccaactaatgcttataacctagtttacaaattgtcaaacaactagagagtttttgagacctccttttgctttcttctgcttctgtttcaaaatctcttgagtgtttttcagaaaattccgtccctcttagtgattgagtacatgcccacacatagcaagttagtactcaatcatagtgngtaagactgtgaagaatccaatacctgaaggagaattgggctcaga

SEQ ID NO: 130752 - DNA, 1467 bp, Cannabis sativa
  modified_base (1435)..(1441): a, c, t, g, unknown or other
tttatccaactcaaagcctccttaactcctaccaattcggccatagccgaatccacacacccctcacgcaaaaccgtgaagccttcaatgaaagaaatccatagttatgtgtccttgatctaggataatttcaaaatgggtgacttcctgaaaagttttcctaagaagcctgcgtaaggacaaagcacactagaatcactcgtgttggtttataggatcagtagtcattccaggaagaagccagagtgacgtactcgtgtataagagctatcattccgtgggtgtaaggacctaatggagacttaaagcggggacgcgacagtccaataggggtgtacatcggtcgatttggtcgggttataaagtatttttaccaacccaatataaatgccgggttgcaaatatctaattgtaacccgtccaatgattttcgtcagtttgatcgagttaacctctttaaaccgatctttatttttttattttttttcattgttgttagtttttggtgttcaaataattgatttgaaaaaataaatgtatagtatatgccttttaagattaaaatagttatagtttaaactaatgttaaaaaatgtttctatgaatgaagtatttaatttaaaaaaaaaaaactaatgttaaaaaataaatataaattgaataaattcaaaaataaaataaaaaaaatcatactcatatgtaaattttaaattttaatttcaatattcaaatacaataaaaaatatcaactataaattctaaatttcaaattaaacactataaaatacaaactttaaatgtaaaatagttcaaatattgaacgtaatttatatattatgttataaataattttagtaaaaagtatgtaaatcggtttatttggtttaatcaggttatttgggcgggttagaaaaatattcaactcacccaatatattcattggtcagtttgaattttttgtaaaattattcgggttgtattttttatcgctttattcagtttaatttgagcgatttattcacgttaagcaatatgtattaaaagtactaccatatcattaattaatttattaccacacctatctttttttcactttaattttcacagtgaaccgtaccttatatcgtttataattttattatattttttaacacaattttattttgtgtaagacctagttcatttatgaatgcatggcttctggctgaggccttaattaataacaaacaattgtgtttgtctcgtgtcttaattaataagtacccttaacttattaacttattacgagactcgatacttaattatatagcgatatgatactaataacaattgatgctaatcagtatcagcattgctattgggtaccatttactacaaaagattttacttttagtcacaacaaaacttgttactaaaagtgaaaaaattgtgactnnnnnnnaattattattcttatgttgtgattaa

SEQ ID NO: 130753 - DNA, 612 bp, Cannabis sativa
tcataagctccaacttgattcaaacattaaaatacccacttttcttagcttaaaataataacaacaatctctaattaacaccagcaaactatcccaaacaatcttaaagcaaacagctaccaattcccaaaattcacatatgaacatcaaactagaattgagaaaacttagagaaaatcaaaatcaaaaccccataccttggtttcagcttcaaccctactaagaatccatttattttagttgagaataacaaaatcttggctggttgtagagtgattcgaaagaggaagaaaaaggaataaggaaggtgttttcttatctctaggtttttctaccactctctctttctttctctaatatctattaaaatcaataatattaataaaataaacccccatattcagcaaataatccccacaaaagacaaatgaaaggtagagggtttttaacaaaagacccatttacccctaaataactaaattatttaaaactttctaagggcaatttagtcacatactaaaccccaaaaattctaacacctctaactataataccccgataatattctaaacgaataaaataagactctctaaaggcccaacgtcgttttcc

SEQ ID NO: 130754 - DNA, 512 bp, Cannabis sativa
  modified_base (365)..(378): a, c, t, g, unknown or other
  modified_base (460)..(474): a, c, t, g, unknown or other
ctcagcacccaacaacttcttgctaatgtaatggtgttgtttctttaatttttttcgtgactagtgcaacaatgctcaaagattttgttttgcaacagtgcatatgcattttaagtcatagctaatttaatatatgagatttttatattttagattatattttcctaaagagatatttttaccaaaggactcttttatagatataattttgtagtggcataataatatttcagtgtcgatagccacatgttttttacttaagctatttaatgagtatgagatagtgtagctagccatacttttgtagactttattgggagtccaccacagatgagcttaaagtccaataataataataataatannnnnnnnnnnnnnaataataataataataatacagtagaacccttatctaagaatagacttaggaccaagaaaataatattctaattgagaggtnnnnnnnnnnnnnnnttacacttaaaaaaaatcaaaatatcaaaaaatatcaa

SEQ ID NO: 130755 - DNA, 557 bp, Cannabis sativa
tgggagaatacctgtattcttagaccaggatgatggggaagttacctccgctaggactattctggagaaggatgggaaatcagtaggttgctgacactccatgttgtgatcttaacttgttgacttgtttctcttagctgtgctaacctctggtctttacttctttgcaaaaagtatgagcttcttggctgctataacatcttgttcaaaggtcaggaagagggaatatgttatgtatagatccatgcatatcgatgaatatagttattaaaatatcaaaaagaagaatgaatctaaagtctaaaatcaattataggtaatattaaaatattgattaattgatgagtaattaattattattcgaaattgaaatgggaaagagatgagagagagagtaccttgcgagcaagagaaatgttaaaagaagtggtaaaatcggtaaaatagttgtgagaatgggcccatgaaggagcattcacagacacgggcaagcatttgcaacatggcattcttctagtccacggagccacgcccagaaaataaaatcaattagtaaa

SEQ ID NO: 130756 - DNA, 784 bp, Cannabis sativa
aacatagaaagaccgtattttatgtaaataaaataaaaaaaatcataaaaatgtttaatattccgtgaaaccgtagttttgttgtttttctgcatttgtgaaatctttttttttgttaaaaaaaaaattacacatgttttttattaattttgaaaaaatactattttttattttatataagagtccaaattttttttttctatagctcattaaatttcaagacggatccccaaagttgagtttttgtacaatgttacatttttttttttaatctttctccctacattataatttatatgtactatcacactacacgtactttcgagaaaattacattgtatagccacattacttaatttattttaatttttacctttattttcatactctaaaaaatactcacttttatagatgatgtttctattatacctcttagattaatataaattatgtgctagaaataactagaatgtgaagatatattgggcaactcattcatataagtgagtatattttaataaaatttaatatgagggtatttttgattaatgaatacaaaaaaagagagatattcttcaacttctacccgtactttcagcactttcattttgtcgatttagagactacgtcgtaggctgacccctaagcataggcgggctaggttcgtgtgtagggcccacttattttaggagcttaataaaaaaaaatacattttaaaaaatatacatatatttttaataatttttaaaaataccatttataaggctcaatttttttttttttt

SEQ ID NO: 130757 - DNA, 1018 bp, Cannabis sativa
  modified_base (27)..(30): a, c, t, g, unknown or other
aatcttattatattgaaatgggttttnnnnagggcacaaaacccaacaaacactaatcatagaaaaggagcacgccctaggcgaggtttacaaaaagatgcacgaagaaactaaaaagatcaaagagttgcaaaagtagataattgatatgccctgaattgacaagctagaggccaatctggaggcagagttcaagcgatctaactgactgctcaaagagatggacactctttggaggcttctttagaacatgggcaaacaagtcaaaaatctaactgaagaactggccagagagaaaaacaccataacttccttggaagaagccttgaacaaagaggttgaggcatgtgctgaagattttgagacttattttaagattagtacatagatctttttatgagttctggaaggccaaccccaaaggtaattatgggtatatgacagtagaggctcgtgattccttattcaaaaggtgtgaggaaatgaagattaaggagagagccaaggcaaatgaaatggtgaagcaagctggttcatctaccaatgaagctgctggtggaaacaccgagaaaattgaagcaattcatcccaattgtttgtatagtggagacagatgttggtgcagggcacgtgttgagcaaaggcttgcacttggaggaaataattctcagaggagccttcatacaaagaagagtgtgcagaaagtgcgcactaccatggtctgatgcagcggacaagatttgattatgtgtcaaaaaaagataactttcataaagtcatctgactcttgcctctcaagtggctttcggttttccgtgcgcagaggatatccattttagactcttcacaaggctctctgaaatctacttgcacttgtaggtaagttggccttctctaggtccctgagcaatgacaaagatccgggtcccagatggtcatttgttccgatgtatactccatacattcaacccaagcttattttaaccaatgcccaagaaaggacatagcacttatccaa

SEQ ID NO: 130758 - DNA, 520 bp, Cannabis sativa
ataattttatataatttatttttaattcaaaaatatagataatcaagtttataagttataataaatattgtaaattattttttcttcacttttttttttttattgaggagataaaaaatttatgtgagacctatctaattataataatatcaacttatataaatatactattattaaatattagtgtaaattttataagaaatgaaatgtaattaattgaaaaaaaatatatgataaggggatacttggagtgtgggtggtaaactggtaggaaagtcaaaactatagtgtacaaactaagtgctactgatggatcggcccaagatcaagtaagcgaggtgcccgtcttgttatgggaagactccatcccattagcatcagcgaggctagcaatcctggcgagccaaaagataacattcaaatgagcctcgaagattaagaactatggtcgttacaagacatgcatcgacgaccctagaagaaaaatggccccagctcgctattgagatcactagaacta

SEQ ID NO: 130759 - DNA, 1069 bp, Cannabis sativa
ccctttctctcttctctctacatttgtgcggcggccactagaatgatggtaccactgtcctccgatcacacgccccgacaggaccacacatcatcatccttaggcccaaaaaaccccaggggcacacggctcgggatcacgggttaaggtcgagcttgatgcaagagagggatcacaacattgggtcgagcttaacgttacgagagagaaagggtctgagagcaagagtgggatcggggaacacgagttcttgggatttcgtggctcgtggaggtcagccatggccttcgtcgaacgaggatggctccaccgagaaaactgagagagacagagagaaagagagttccagcgagggtgaaaccagcaagagagagagagagagatcagagtttttagttttttccaaggctgcaagaatggaagtgtggtctgtttagaccaccggcactgtcagaggcttgtctggtttggctgtcataggtagaagagatggataaagagatgagttagggttttcctgtattcttctacttctccctataaaatttacataaatttgagattattagaattattttagaaaaatacaaaattaaaaaaatacaattatacgaaattttaaatatttttacgatttttatgattttattcacataaaatacattattcttgatatatttttatattgtaaccttgataatttgttgtcaatattttgttatttgtatgttattttttattgttgatttgatactgtttggatattattttcatgttacttttatgtagttttttttttttttgttattttttgtattgattttataaaataccgtaaaaatataatataaattttttttacaaaagacaataattatatcattatttaaataagtaaaaataaaaattaataatttatttttgaaatcaaaataagtgatctcttgcttgagaatttattttgggattcggagcctagtttataactactataaaaaagagaatgatttaggctttttaaagttaaattacaatattgaccttttctttagagaatgatttaggcttt

SEQ ID NO: 130760 - DNA, 820 bp, Cannabis sativa
attatgttaaaaatctgtttctattctattacaggccattgtcgaagacagtgaggtttaatgtgttaaaggttgttccagctgggtcttcgggtggtggcaagaaggctttcacaggaatttaattcaattgttttctactttttgtttacattttatatttgagttgagtgaactaaattaggtatggctggctactctactctttgagaaacaacttaaaatttattttcttctatgtatgatgaattggtttccgattaaaccgcttgagtattgcaaattttgaactatgctgaataccctaaggctgataagctctgttttgttttgttgagtgaataccattgttttatgtctactcttagatggttgccgatcattcggattaggaaactagggttaaattttagagatgtatgactttttgtgaaagaaagtttgattaagctaaatcagaatgggctaaattatatgtttcggtgcaagacagcacgggcgggcaagttttaggtaatgcacgagcgttttactgttgagcgaagttgattcgttcaatcctttcgtacttgttggagtgaggtttgagagtggaaggattgaatgaactaaaactcgtggaatttcgccccttatttgaccgctctaaggttctgtctacaatcgcctttgtggctggtttgctgccgtgtaaaatccacagcatgttcactgaatatcaaagagtaaaatgaacatgttatggaccccaaaatttattattattttaacatttaaaagcttaaacacgtttgaaaagcatactttaataaataagaaa

SEQ ID NO: 130761 - DNA, 1434 bp, Cannabis sativa
  modified_base (1388)..(1397): a, c, t, g, unknown or other
atttttatttgatagaaactaaatgataaagctaaatggttctctatatggataagaacaaatagttgtacgcatgaaaagaaaatagtagctggcctaaattagtattggtagcaaaatagataacgataagttcacaaatgtgattaatgtcaattaagttggcaaactctagccactaatatataacttcttttgagataaaactaatatataactttaaaccaactaatagaacatagttattaattaaataaaagaatagcacccaaaaataattaataaacttgacatcattttctttcaacaatatgcatataatgtcaaattaaaaatatataaatgcatatatactagttgtcattaaagattgtaataaagtggcaaagttttagtccacaccttatttattttgtcgtttgcttttagtattgatctaaggtaaatatactcaacaagagaaacgttaaaggtgactagtagtacttattaccttcctacgtgttaatattgttattgattcaattaagtatcagtctcatataatttaatataattatgaacattactattaggcactagtggtgcctaacaccttctcgacatgtcgtgttacgattggctggcgatactttctaaaaattatattaaattatgtggaacccgatatttaattgaaccaatatatattaacacataaaagagtgctaaacaccactagtgccatttaacatttctctttaaatacacatatacattaatcatatgtatacaacacttgatttttagggggtgctcatgaaaatgtattatattttttttctcttttaaatttttacatacatatataacattttgaatatagtattgctttatcttggagcaccaccaacatataacatttttttaatccaacttaaaacttgttatcaaatttaataaactcaacaaacaatttcggcctatatagcgtgtttatgaaaggaaaaaaaaaacaaaaaacaaggtcccaaaaattaatatatattggaagataatttaaaaattagtatataatatttatttacatgacttttacgcatatagagttccaattatatatggcgatctaattttttaattgtatacaaagaattaattattatatttttattgacataaaattaattattatatttaaaaccaacgaaatgacaatattattacgaattatattaaattttagcatatgtctttattaaaaaccatatttatattatatttaaatcctaatatatacgtatatatatttttcattattcatcccatggagtctaattaattttcttggctaattagtaatttttcccccgaagtttgacaatatgtactaaatcatgctccctgannnnnnnnnnccgttaaaaatttcccccgaactattgaaatcgttaa

SEQ ID NO: 130762 - DNA, 1278 bp, Cannabis sativa
aaattggatcgatccaatttaacaataagagacgagtgaagagagttttgaaacggattccatggaggattggccggagcaggggctgaggtggtgggtgcttgagctgaagaaggaggtggatttttagggttatgaggatccatgggagacggtagtcaaagacaatctgataccatgtaagagcttatctatgctaaaagaatctatgagattgcaattcaagactagcaaaagctacctagccttggaaaaggattttatttaaatagagaaagagatagtaggaagaagaaggaaaacagagtaacagaaaaaacaagaaagttgttacaaagtattgttacaataatattaactaactattgatagttcatactagatttgtattagaatagactttgaatatatactaatacaataaaaaaaaaataaagatgatattaaattgattgggatttgtaatttattttttattaatgaaagcaaattaatttattaaaataataattaaagatataaattattctttaattaaaatttatattaaacactaatataaaaattaattaattaaaataagtacattatgtcttgagaaaaatcaaaagcaaacaagttttcaaaataataaataaaaacacgctccatctacggcagctactctgatgacttttctgacatcggcaattactttggtgactttttcggtatcgacaacaaactctgagaaattcatcaaaattagcattgtcgctggaaaaattactggaaatcacaaagaaaaagaaactagtttcttgttgattttttttgtattttttcgacgataatgccaatttcgatgactttttcaatgccgacagcaacttctgtgactttcctggtgtcaccagcaacttcagcgactatgccaattctgatgacttgtttcaatttactttattatttagcatttatatttcgttatgatttttcatagtgtcgaatctggtttcacagggttcattagttcaaaactggttttacaagttttaagggttctataatgaagttgctctattttatgatgttattgtatatttttttattttaagtttctttttattattttgtttctaggtttgaaactggttttcacacttatattttattttagattattgttgagcattgtgtgttgttttgtttatatttatgagtattgtttttgtgtttttttctccattcagttgattgatgaaactggtttcaattattttcattgtatatcatttt

SEQ ID NO: 130763 - DNA, 871 bp, Cannabis sativa
tttattgcttactggtttttgctctatcttaattacatttcttatcgcttattaatcgactcactgttgttggctaaaagtgaggtcaatattttggtgccttcattgagagaaacaattcaagtctgctctattccttaagttttattagacacacaaaatggtggtacaaaggcgtggttgaccaaagtgacccactgttaacatatcctgtattgcagactcctaggaatacaagggtcccacgaggaaccaatctgaacaaccaagcacacaaccacctactctgggccaggatgtgacatcccctctagctgggatcacacccggtgtgcaagaaattgggaacaccagtttggcagccgatcaaagcactcccagcattggaatcccattcacaactaatgctcaaacgacaataggagatgctactaagatttagaacctccgcaatgctctcaaactcatgtaaagtcacactactaccttgaatcatgatcaggaggagctccgtgctgcattgaaccttgcgttcaaagagcagaggcatcaattcaccgaatggagggatagggagatggaaacattgaaggctcaacaggcacccatcgatgaccgaacaagataggccactgtactgatatgaaaagcctattaagttgctaattagaaaccagctgctacgtacagtatcccactgagcgggacaaaagaaattcctgctaagcatactgcctaaactcataatgctcagccgttcaatccccagtttgtttggaatattttaccgggatctaaatttactaccaagtatgttttattaacatcctaatatgaattctaaaaaaatgaaaataaacacataagagtt

SEQ ID NO: 130764 - DNA, 613 bp, Cannabis sativa
gttcattctcaccacaccattttgttgtggcgtccgaggtacttaaaaatgtatacttatcccttcatcttgacaaacttgtaagaaaggatcttatttgtactcactgccattgtcagatctgagcctcttgatcttcttgtatgtctgagtctcgatcattttctttcgtttaagaaagacatctagaacttcatctttgtgtcgcatggtgtatacccaaacatatttagagaaatcatcaataaaagtaacaaaccattgtttacctccaagtgaagcattcttggaaggtccccaaacatctatgtagatataatctagagttcccttagtgcaatgaacaatagtgccaaacttgactcttgtcttctctcccaacacaccatgctcacaaaaatcaaactttccggtcttagcacctttcagtagacattgcttcactaagccttgaaaagccttctcttcgtcatgccctaagcgcatgtgccaaaggcgggaagaatcagttgtcttttcttcagaattgttagagacatctactcttttaaaacagtgttcccatctaggaagtataaatttgcctttcgagtacctttcatcgctacaaatg

SEQ ID NO: 130765 - DNA, 1133 bp, Cannabis sativa
  modified_base (1057)..(1059): a, c, t, g, unknown or other
aattttcaaatgtctgaaggttgttgattaactcgtgaaagtcaagctccaacttgttcatgacatattttgaagtgaagggcagaaaagttggagtcagactgtttaagatcaaactcacttgagttgtgtgatctataacagctccatgattctcagcttcctggaaataactagtcatctgaagaaggtgatcacgcacgccctgatgaggtctcatccgtgcgttgatgaaattcttagtcacctcaaaacgagcttgaattgatgccatcccgaatagctcagataactggttcatgaattaataattaaaaagtaacgtgtgctagttttctttttgacaagttatacttaattttaataaaaatattttgaaacataatatgtttttttttttttataaaagttactatgcgagatgttattaactaaatctgaaaattttaggatgattgaaattctcaaaaataattttcttttcaacaatgatatatttatattttaaatcatttagttgacaattttataagtatttatattatcttttattcattaaatactaaaagctcatagaatgagatatgagaatgacactgatttttaatagcaaagataataaaagtaaaattgtctacttttaattttcttttagacacaaagtctaatatataagttttaaaatatagatcaaaattatcattccatgaatgaatgaaatagatccatatttatctactctccctctttcgaatcttctcaacaacttcgataccattgccactgccatcttctttgtgagtgttatatatataaatatatatatatatgcatgcatacattcatcttacatatttatgattgattctgtcacttatataaatttttataagtttttttcataagctattttgtcttagttttggtattagtctttgttatattgtttagtttttatttattactggtctctttcagataacgacctaattattgtatagatttcattatagctcatataagtatttcttgttagaaataatagagagattacaannnaagaataaaataagatgaataaaagactaagacaattacaactctaaacaaaatattacaaggacaatatatta

SEQ ID NO: 130766 - DNA, 509 bp, Cannabis sativa
  modified_base (28)..(30): a, c, t, g, unknown or other
  modified_base (441)..(472): a, c, t, g, unknown or other
tttagaaaacttacaaacaatctaaaannnatactcctgcaacaaggttagatcaagcaataataggttctaagataactaaatttccaacttcaattattatcaaacaaaatttaattaaataacaaattaagttactaaccacctaatttgaaaaatattccattttaagttgatccaaaattaacaactgactttcccttaggcctttataatgcctgaggtaatccactgaaggggcttgctgagccttcagagctaggactggaccatgtcctagagcagtctccttagctagagatattagatggaaaaccacctagagtgagttgggttttgccttccagtatgatccttattagtggtttaataggagatgtccattgcgagtttccctatagaaactatcgggtgcacaggctgttgggttttgtgccctannnnnnnnnnnnnnnnnnnnnnnnnnnnnnnntaattaataaagatcagaattcattttatgttgcatg

SEQ ID NO: 130767 - DNA, 2007 bp, Cannabis sativa
gaaactaaaagaaagataattttccaaataaaacaaagatagaataaaggaaacaaaattaaaaatgaaaggtctcaaataccttgaaaaacatgatcagctcaatttgggtctaaattaagtctactgtggtctattcttattttaaaactctgttgactaagttgttgagttcttctttgaatcttttggctcgcgacctcatcaccgtgccaactggaacttgacttgtttctttggccttagtgttctcatcacctatcatcgctcgagagaggttaataaattacattaggattcatgaaactacatattatagaataaattaggataattggtaaattgagttttatagtttaaattagggaaataaatgctctaggtctttactttctaattgaaaattattgcttgtctatttgtttttccatttattttattacatggttcttaattataatttacctttgggttatctaattaaagtataaaattaaagagtataataattagtaaaatttaataatcaatcccaatgggtttgacaacctttgtagtattaaaattttgctataacaagattgtatgcttgtagtaaaaaaatagtgtgtcaaatactatttgtaacgccatcgcttcaagtttccattgggcccttacacctatggacttgagaccgttatacacaggtacgtcttttcagttgcttcctggaatgatgactagccctacaaaccaatatgagtttttctattgtgctttgtcctcactcgctcgcaccctgagaaagtcacccatcacaagattactccaagttaagaattcttacttttggagtgcttaagtgatgggctactagaaaaaaagatgtaccttgttaatataggtagtacccatcaatccatttaagtcatcttcaattgtgtaattccatacctacacaatgtcatcatcatcacacttgaccttgcccacgcgatgtgggattgcacagctctcggtctttctccttgtgaatcataagactaactttcacaatctgtcttggaagagaaaaaaaggaacatacaatctttatgccttcaattgaggttgaatacatggctatgtaaaaacactacttaaaagttggcatggttattgtctctgttgaaagaactaaacattgaacataaaggacctattgttttgcactgtgacaacaaagaagctcaaaaaattattccacatcctatttttcatagaaagtttaagagggcatcatctataacagctcacacttctagtaaagaacaaatactgacatttttaccaaagctttactacgtagtaagttttagattctcaaagatcaaatgagagtctgtaacatttactctatccaccttaagagggagtatcaagattagttaattaaggtgtagtgttagtttgttgtaagttgatctatcagtttagatagttagacagtgtaacaccctattagtttaggtgttttaatgtgattttaacttaattgtgcagctcattgtcaattaacaagtttattgaaaatcgtgaataattaaaagtactttgtttaattacttataaatactaaaataataacatatatataaccaagatcctatttacaaaatatttacaaatgtttcatagtgcataatactaaagttgtcgcctagcaactagacaaaatacaaccagttgccccaaagactgtatgctcaaggcctaactaccccaacatgtacaatctttatccgctcgctctcacgactgctcaaccttagccttgcccttacctacacatgcaaataattcagtaagaaaagcataataaaaacataactatagctcgaatgataatcaggtgcccatacacccaactataaccctatccccgtgtctaatacggtactgagtcaagaacgttcaaacaacaatactattgaccataatatcagcctatacacggtacgctagtcatactctagtcgtactgat

SEQ ID NO: 130768 - DNA, 1041 bp, Cannabis sativa
taaattgtaacaaaaaatcatacagaaactcctattacaactagctctgcaactacttcaaaaacgcaaaccgtaaatttgaaaaaaaaagtgtatggtgtaatttcctctttttttttttttttatttttatttatgagaaaaaagagaatcatgtggtatagattctttttccattctttcagttacttctagtaattatagggaccacgtatcaactacaggagcgttgtaccttagcctactttaattgagtcattggtagtcacctcaaggattcctattacacaaatgataccaccaccagcaaagatcaaaccttgcttgaatctcttttaatccctttcaaaaggagttgaggtaggatttgaactcttaacccaaataagggagaatgtcagtataagctattcctaccagtacacccacaacacgtggttgagctgtcaaaagcattgatgatgcaaattgatactatatgacttggtgatcatcagtttaaccgatcgaagctcgatgaagattcgttctttttgttttggataagaactaatcattgctgacaaaggtgttatttatgtatcaatatcaatagtactagatgaggcaaaactgattactaaaatgccattgttgtcttaattgtttatttttttctccatatcatcctcataacaacaacaatatttttttatttatttaagcttttgtatagcatattggttaatatattttaaacgtttttttacatatatatttgtaaaatatgaaagtgtgtctaatggtagagtcagtttggcttcataatttaaaatctattttcaattttcaaaaataaaaaattaattttaaaaatttttcctaaactatttagattgttggattcaaaaatttttatccaattttagtaagaaaagtataacatggataaaagtttggaggagcatgatttgacacatgtcaaagtacgagagggcatgatttggtagatatgaaggtctggagagcatgatttagtacataaataatcactaaattagt

SEQ ID NO: 130769 - DNA, 1400 bp, Cannabis sativa
  modified_base (1130)..(1132): a, c, t, g, unknown or other
ttttttttttttttttatagaactgaattttgattttatttgaattagatatgattttttgaaaatttgaaagaaaaaatcaggatggagtcacctacttatgcgcgcggacacaaggtgacacttgggtgtcacgcgtgtttcggacaaggcatgtccgagaaaacacacacacgggctatttgaatagccccatccgtgcgcagaaaccctaccagcagggtccttgtgcggcaatcctcgcccatgcactccctcctacagacacgaatggtgtgcaatgcataccatcttcaccaaatctaatttttttatgctttttcatggcattaattttaaattttttgtttaattttgtatttagattttttattttttaaatgtcaaatctaattatcagtttgaaattaattatttttttttaattaattttagatattagtagactttgaacctgaaaatggataatatctacattttttttggttaattgattatcttattttttaaaatttgattattttatcttaatttaaaatttaaggtaatataatttatatttttgattatttaaataattttataaaatgaccttatttgaaatttaaaataagatatattttaataaaataatccatacaattttggaaaacataactagatattttgtcaactttcaaaaatttgttattttatttaaattaaattataaagttagataaatgatatttatttatcattttattttattagacatttaattttatttgcttttaaaataacataaattttgaaaagttagttgataatttgaaaagatatttaggttgttataaacctaattttttcaaatttataggattaattttaaattaattatttaattttcaaaaataatatttaattatttagattttttgaaaattaatttaattaattatttaatttaaattaaataaatcctataaccaactatctaatgttttgcatgtgtgttttatttattgtttaatattcaaacttgttttataaaacctattattgtttgatctaaatttctatggttaactagttgacagatccaatgatatgattttaaccatagtcaattgtcaataggtcaaataaannntttgtaacaagtaaattttgtaatcttctttcatccgtgtataaacctaataacatgataggatccatccaaatcagtgtatgcctgtgcctatatgtttgctttgggcctagatgcatatagggaacccattttattttgatatttaaaatagactaagttgctaaaataaaaatatcactttgatagtttttatttaggtccaattagtattttgcttatttaatgaataacaattatttaattgggatttttacacttggtatct

SEQ ID NO: 130770 - DNA, 818 bp, Cannabis sativa
aatgagttttatttatggcataaaacccaacaaaaataatgtaaatatacttacaaatctgaagatagacattgccggagaaggagggaagtcggggtcggagaaggaaggattcacgatgtcggagccggagaaaggaggatgtcagggctagagaaggaaggtgacacgttttctgaaatagagagtgaaagtgaactatataatttgatgacaatattttgccagcgctagcttttttttgaaaaatacttttaccaccaatattggtgaaaagcgctggtataaattacaagaaagttgataaaaaaattatttgccagcacattataatattgataaaaattttaataataaaaaaatatattttttgataaatttattttaaaagtttcccattaaaatataagttataatatttagtttaataaatattctaaaattattttattttgttaatattatgtgataaattagaacgttatttatttttataatactaataattataaaatattataaaattgaaaaaaatttatttgtataaaactatgatattttaccagcatagtttgtggatgtgttggtaaaagtaatttttgccagcgcataacactattacgctggcaaaagtaacttttaccaatgcaattttgtgctggtaataaaaagtattaaagggaagagttttacacagcttgttatgccagcgcaaatataagttgcgctagtaaaaatatgttatgccagcgcaaatatgtgttggtaaaactgtgatctttttgccagcacagttcacgagatgcgctggtaaaagt

SEQ ID NO: 130771 - DNA, 1208 bp, Cannabis sativa
  modified_base (664)..(669): a, c, t, g, unknown or other
  modified_base (1175)..(1179): a, c, t, g, unknown or other
atctaaattgcaacaaaaaatcgtatggaaacccctattgcaactaccactttagaaactcaaacgtaattttttttaaaaaaaagttaaaaaaatagtatatggggtaatttcccaaaaaagtgtacccactcatctctctctctctctctctctctctctctctacttcacatcgttagtcagttgagctcaagagtgatgtcatttggtctcaaaattatatcattgcaatctgtcttttaatgtgatcattttgatatgtggaaagtatatatatttttgccattacctaaaaaatggccaaaataaaaaaagtaaactaataaataatagaaaacccccttaactctcaattcacttgcaattaaccctccaacctcaaattttggtgggaaaacccaccaacctctacttctgttagcaaattaaaggtgttgtctataagagtggttatgtgctagtatggattatcctacatataaacagatatataggcgttgcattcatattggtccatataattatatatatatatatatttaaatatcattaaaaattataaaaattatttcaaatttattttaaaattaaatatagataacaaaaaattaataagagtacaataaaaaaattgtatattttgtaaataaaatcataaaaannnnnnaaatatttaaaatttcgtacaaccttatttttataatttttgttatagataatcccttaaaaatttgagaaaagttgaagaatacctcttttttgtatctattaatcaaaaatactttcttattatatttcattcaaatgtacccacttttgtgagtaatttgccgaatatattctcaccatctacttaagcctagcacataatatatataaacttaaagggtataataggaatatcatccataaaagtgggtatatcttaaatgatataaaaataaaggtaaaaattgaaacaaataaagtaaagtgggtatacaatcaaatttcctctaaaaatttccttactgggtttaatattgggccacaggtacatgactagaagattgggcttaatgtctaagcccattgtgtaaattagaatgattaatggactacacattacacatatatacttaggggtaagttgaaaaatgcctcttttattcatcaattaatcaaatttacctnnnnntttatatttatttgaaacatacctctttt

SEQ ID NO: 130772 - DNA, 715 bp, Cannabis sativa
  modified_base (675)..(689): a, c, t, g, unknown or other
ttaaaaaacatcataagatttgaataaaaaaatacaaaataagtatataaaataagtgttaatattattttagatcttgtattttgtaaaaattatcgattgaactatttattttattaaataacaaaatagaccttatattttttaaaatagtataaataaaatcatgaactcaatttttatcaatatttttagcataactaacttaaaataatttctaatataaacaaatatatatacaaaatgtaactcgttttatcataacacattaaaattaatttttacattcacgtagaagagtgtaggtgtgtttcacatgaattgtctcatatgatcttattaattattaggtccaccttatttcacttatgcttcttgtcgttttggtaacattttcactcacaaagtcacaacacataaataatattaacactatattttataactaactacactataattcacacttttgttttagactcgtgttttttgttagaaaaattaggaattagctagatcggttaattagtatcttaattctatatccaattatgattcacatgaaaaatgataaacctaattaatctattaattgtgcaataattcttttatttattttgaataatttttcgcaaaaagtatctttattcatcattgtgacagtcagtagtcccnnnnnnnnnnnnnnnaaataccgggtaagctgtgcaatccc

SEQ ID NO: 130773 - DNA, 712 bp, Cannabis sativa
ggtaaaataaatattccaacaaagacaagggtcgaaatggtgtggctgctttaaaatttgacatgagtaaagcttttgatcatgtggaataagattttatagaagtagttacgaggaaaatgggtttcaccgaagcttgaatctctttgataatggttttcttaacaacaaatagcttctccttcctcctaaatggagaggtatccatctctttaattctcactagaggtcttcgtcaagggtgcccactctctccttatttgtttttaatttgctctgaaggcttctcacaactactccaacatgaagaatgacttggaaaccttaatggcttcagcaccaatttcacacttgttttttttgcagatgacagcttgctattcctgtccagcaatcaaaagagttctggatatctatcatcgggctttgggccaagtcattaatcctgacaaatcagttatgtctttctctccaaacgcaactttggctgcgcaaatcttttttcattggtagcttgacatgtcaatttgtgagtgtcatgagacttaccttggattgccttcatactctggaaaagataaaaagatgctctttagtggaatcaaagagaagatttggcgccttatgcacaattggaattagaagcccttcttagcagggggtaaggaagtgctcttaaaagcagtggtacaatttattcccacctatgcca

SEQ ID NO: 130774 - DNA, 622 bp, Cannabis sativa
tttcataattttaatggtaaatttatttttattagaaatatttaatttactttaattttaaattttatgttatttttcatatttaaaaagaaaattgtatatatgaaattagagtctaatgacacaagcccattaaaagcaaatgaagcatcaagattagaatcctttggactcacatgatatatgtcttcaatcaaagctggatacatatggaatggatcctttatttcaagcaagagaaagttggtccatgattaaattggttccatttccagcgttttcctcccttccatcacacaccgacgcacgcataaagccagcaatagaagcgcaccacatgtccgcatgttcccactctctctaccattatctcatttttatcagctttttatgccactaaattaactggtacacgaaaatactaattttatgagcaatatttatcaataaatagaacccaaaattattgtaaaagaattatattttaactagtggttattataccaacattttatctttttcttccttcttttttattttggtgtaaagataatatttttttaggttaatttctttggcaagactcaagtgtaagttcatgcaatttttatttttctaatat

SEQ ID NO: 130775 - DNA, 1058 bp, Cannabis sativa
  modified_base (39)..(46): a, c, t, g, unknown or other
aaataatttcataattaatcatgattaactgctaatttnnnnnnnnaactaagcgggctttacagaaacagtggaaagattggtttatggtggacatcaacaaacccccaaacttaaccttccttgagattattgtcactgctctttgtgtggtggaaacagtttggcatgaaagaaactctatagtgcatagtcagtcaagaagcccgatttcgaaggtggtgtttactgtcaatagcaaaattcgagatcacatcaaggttgcatccaatgatgtggttgatttctgtgagtggcgtccccctccttagtagtggctatgctgcaattgcgacatatcttatgatgaagatggagtggtgttagcgactgtggttcgagatgataaaggtcatattgttaccattaaaatagagagaagctcaactattgatccgctgattggggaagggcttgcagtgtgtatggcagccgaattgatgatagagatgagggccaagtatgtcatctttcagagtgataatatggaggtagccagagatttatccactgagacgggaatagacatccatttcaaattgattcatctcagaaggcgcttccatcagctatgtactcaactttctagttggggaatcaggcatgtgaatagaagatgtaactacatggcgcataatgttgcaaaatgggcaaaggagacaaaggtaataggatttactaagcgtggtgacatggatccaaatgtgttgaatgattacattgagtggatgaagcatgctggttaaggagttgcaagaaagccatgtgctagtttttttttttacattgtctttggtttaatgtctgtagtcttcgtttctttactgtttgttgaagtttttctaaggttgtactctgtttgtagactttctatttggtttaatgaattattctggggtgtttaacaccccctcccttataaaaaaaaataggaaaaagaacataattatttcaagagaatgtgacaatactcgaaaacactactaaaacaacacaaaaaaaaaataaaaaacataaaa

SEQ ID NO: 130776 - DNA, 875 bp, Cannabis sativa
caaaaattccgagtttcataagtaatcaaaaaccaattaaagaaggcagtgataaatcccaaggttagtttttgaagttttttctgtaaattttctttctgtttttcgaaaaataatctacattttgagttttagggaatggaagatgtatgtcattgtagggaatgcatatagaactctatttctctactaaaaattgggtaatatttaggagaaaataggcctgaaatttgcataatcgtgaaccttatgaggaacattttgagtattcgcaccttttttacttgttgtcttgaatattcgcgagtattgagatgaacatcttgaatactcgcatatatatatatatatctttaggaatttcggggatttggtcatcccaacccattgtttaaaacttaggattttccttgtcttctctgtatgtttttattgtgaatattggttaggtctttcaaattgtgggtctatcaccgtaacttaatgttcatgcgtgcgatcgcatgttccttcggttactatgatacacccagccatttgcgacgtgcggccagttttctcttttcttgcataatcgcatgtttcaactagttggttttctcaaaccagtaaggagttcccattgacccaatggttatgcgaaagggcatgccccttgggatactgaagactcctcagctgtttcttgaggtacggtactagttggatatgcgtgatgtttttgcatgttgcaattggttagatttctcgaaatggtgggtgtttcctagtaactcgatggtcatgcttaagaacggatgccccttgggtcactgggaaacccccagccattttttgagacactctactagttgcacatgtgcgatttatacctt

SEQ ID NO: 130777 - DNA, 823 bp, Cannabis sativa
atccgactccacaaactgccccataactttggctatatttcgaagaacactatccgacatacatcccggttgcaaatcgaaaacttgaacccagatatctaacttattcagagttatcttctgtggatcctcaccctctttcaatctggccaatatcaattgcatcctgttaaatgtccaaggactccctgtaatcaccctctggatgtccacctcatgataaaattgaaacaaatacctgtatggtggaagttccttaacaaacatgcccatgcccggtttccacagtgaagcaagcacgttttgcattgtttcaaaattgaaatccctgtctgataagaatctgccctctaaacaccatctcgcatcgatcccatcatcttcatcccttccatcaatcgctacctcatcctcttcttcttctgcaacctgcactctcatcacttcctcctccacagctttcatattccagcttccggacgccataatactggagtcaaaacacaaaccaaaaacacgaatactaattcccagaaaaacaattaacacaccatgtcaaaatgacaagaccagttaatatgtgaagttacttgatgattagtgggttgaaactattttttttttctatattagagacacacttacaatttgtatatttccaatttactattcttgattagcataaaaagtactcttttctcaactaaagtgaaatttaaaatgaacaaaatgcaaaggtcctaccttacctacctccattaatgggcactaataatgtgagattaccaacataaaaagtaaaaataaaatcctaattttcatt

SEQ ID NO: 130778 - DNA, 768 bp, Cannabis sativa
  modified_base (615)..(624): a, c, t, g, unknown or other
  modified_base (725)..(734): a, c, t, g, unknown or other
ttttttttttttaatttagtttacataattttcttaattatttattaatttttaatttaatgatttgtaaaaaatgcataatttttatttttatttaatttaaaattatacacatgatactgatatagcaactgactaagcagtcatatcatcattttatttgctacacatgataaaacttaacaaaatgactagtttacaatactgaataattcagagactatatgtaacgaaataaaaagttcaagaggcacactaagataagtaaagtcataattcatgggacaaaaattttaaataacaatatatttatcatgttatatatataatactaatattaatgaaattattactattaatttattttattattataaatgcaggattatgaagtttcagtattgagattaaattctcattacttagtagacattgaagaaggaaagaatggaagtgttttgaaactaaattccttgaaaatgggaaatttatggaatgaaatggatgttctcatcttcaactcttggctttggtggactagaattggaacacctagtcaaccgtaagtatttattctatataaaatgtgactatataacagaattcttggtttannnnnnnnnnttgggtgacttttttttttaaaaataaaaaacaataacaaatgattagattttgtcacgtaaaaagttaggataaataatattttttttaattactattannnnnnnnnntaataatttttgtttttatttaaatcactattat

SEQ ID NO: 130779 - DNA, 740 bp, Cannabis sativa
atcccacttgaccttctccaggcggtgtgggattgtacagcttcccggtatttccccttacggatcacaggactactaactgtcacagaagataactagataagttgattaatctggacaatcaaacacaatgacgaaaaaaatgtttgactgaaatcagaccaaaatttattgagggcaacgcatgtaaaaatataaaaataaaataatttatttttattttctttaataaatgtaaaaaaaaaaattggggccatggcacctggggctcttccctagctccgtcattgatcaaaacataaacattaacactaaaaaaaatgtagaaatgtggtttaaaaaatagattaggtttatatattattaattaatttcaatgataaataagtagagtaattcatttgagaaatattaatggatgcataaattcctcagcatatattttgtcatgtaatcaaatacaaaattggaatctagttttagtatagagatagattctgactgatttatcaaagattcttcttcattttattattattattattattaaaagattcttttctaaatatatgtttgatgctattatcaaacgacaacaacaagaaatcaatacggcacatggtgaataaataaaggtaaataaacacatggctaattagaatttttgctcctgaactttgacatgtaccaaatcatgtcccttgaacttttaaggccattgaaaatgcccctgaactatt

SEQ ID NO: 130780 - DNA, 4036 bp, Cannabis sativa
ccttgtgggttcgcaggctaagtcctaaataatgggtgcccagcgaaacgtaaggtgtcagtgtgaaatggttgagactggaggttgtcggggttttaaaaatccccaaaacccatgtggacgcggtagaggtcgcgatcgtgcttaaagaggtggccaagagaatccgccttaggctgctattgattgggaacagaggtttgctgagatgcaagcccgaatcactcaccaagaagaagagattcgaaggcttgagcctcccccgcaaccacatgttatggttcttgcagtgccagcagaacaacctattgctagtaaccgtatggagcctttgtacaagcggtttagaaagctagcacctccagttttcttgggaggtcctaatgttcttaaagcagagcagtggttaactgtgatcgaaaggatactgaattacatgggagttaccaaagaagggtggcatgtgccacgtttcagctccaagaagatgccctggtgtgtgggagatggtgtccctcacaaaatatgtcactagaatgacctgggaagaatttcgggacttgcttaatgcttaatattacaatgaggcggtccacaatgcaaaacggaaagagtttggtgagctggtacaaggtgagaatatgcatgtggctgagtatacgaccaagtttgatcgcttggccaagctggcctccgaaattgtgcccacagatttcagcaaaagggaaaagtacttggcggggttgaatgccaagatcaagcatgatctagttattaccaccaatgataccacaacctatgttgaaatggttaacaaggctcttcgagctgaaggagcagtaaagtttctgcaagaaacccgagaggctcctggtgttggtgggaccgccactctccctatctctggtcctggcagggagagtggtgattccactatttaacaaaagaagagaactttcccacctacagggagttcagtgcaaagcaagaagtttcgcaaaagtcagggtaaagggggacgtcagacctactcctatcctgtgtgtccacgctgcaagaaacatcaccctggaacatgtaacacgagagcttgttttaagtgtggatcagttgggcacctcaagaaagattgtccccagctgaagaaagaggaacccaagctggaagctaaacctgcaccagtgtgagtatttgctatcactcaggcggatgctgccgccagtccttcagtatttgtaggtcagcttcttattaacgactttacttatactatgttatctgatttgggagctacacgctcatatgtagcaacaagagtgcttagtcagtttgataggcctagtgatatttttgaaatgggatttggaaccccgttgcctaatggggagttaattatttcaagaaagtggattagatcagttctaatcagaattgagggcagagaactaagtgccgatcttgtggagttacctttgtccaagttattatacttggaatggacttcctgtccaaatactctgctagtatcgataataaacgaaaaatggtaacttttcaactagaaaattaagaactatttgtttttgtgcgattggttcaaggttctcgtgtctcaagaatttcagcatagaaggctatggattttctacgcagtggatgtgtagggtttctagtgattgtaattgattccatgaaacctgtgttactcagacctggggaggtcaaagtggttaagaaattcctggatgtgtttcccaaggaattaccgggaatacctccacagcgggagatagattttattattgacctgatactggcagaacctatttcaaaggcaccctaccgcatggctcccacaaaattgaaagagctaaagatacaactttagcggatgctagatcttgggttcactcgacctagtgtgttgccctagggagctccggttttatttgtaaagaaaaaggatgggactgttcgaatatgtattgactaccgggaattgaataagttaacaattaaaaacaagtaccctttgcctagaattgatgatctgtttgatcaacttcagggtaagacgatattctgtaagattgatttgagatctagttatcatcaactaagaatgtgagaagaagacataccgaagatagctttccgaactatgtatggtcattatgagttcctagttatgtcattcaggttaacgaatgctccaacagcctttatggatctcatgaatagggtgtccaaggatttcctcgataactttataattatgtttatcgatgatattcttgtatactctcgatcggaagcagaacatgagcaacatcttcgtatggttctgcaacaactcacagatcataaacgttatgtaaggtttaaaaagtgtgagttctagctgccacgtgtgtctttttcaggacatattgtcaggaaagacaggattatggtagacccagggaagattgaagcagtgaagaattggcctaggctgaaaaacagttactgaggtgcggagttttcttggtttagagggttattatcggcattttgtggaaggtttctccaggattgcaatgccattatatgagctaaccaaaaagaatcagcgatttgtgtggtcaaacaagtgtaaaaacagtttccaagagtttaaacaacgattaatcacagctctagtgttagccctgccaactaaccaagaaaagtttgtggtatattgtgatacattcagacagggcttaggttgtgtattaatgcaagcgaataaagtcatagcttgtgcttcacgaaaattgaaagattacgagcagcgttatccaacacatgatctggaacttgcaacagtggtgtttgccttgaagatttggcgacactacttatatggtgaatggtgtgaaatctatactgaccacaaaaatcacaagtactttttcactcataaggatctaaacatgaggcaaaggcgatggttagaattggttaaagactatgactgtgaaattttgtatcacctcgggaaagcaaatatcgtagcagatgccttgagtcggaaggggcccaacccgactttcaatgtagtaatgatttctcctcagttagcctcggatatgtctagggaaaatattgaatttgtaattggagaattgcataacctgacactttagtcagacttgttggaaaggatcagagtagcacaactagaagaccctgagttggttaaaactcgagaagatgtcttagcaggcaaataaagacttctcaatttcgaacaatggaatgctattgtttaagactcgggtgtgtgtcccaagtgatcataagcttaagaaagaaattctgaatgaagcacacactaccccttactcattgcatctgggtaccaccaagatgtatcaagattaaaagccctactattggtggtacagaatgaaaagagatgtagtggattatgtaactagatgcttaacctggcagcaaatcaaagcagaacatcggcgaccagtaggactacttcagccattaacacttccaaaatggattgggaagacattgcaatggattttattgttggatttcccatgaccatagggatgtacgactcagtttaggtcatagtggatcgctttacaaagtcagcacatttcttacctgtgaaagtaacatatacggtggatccaagtatgttgacttgtatgtgaaagaaattgtttgccttcatggggtaccctaaattcacatcaaagttctcggtgagtttgcaggaggccagtactagtttgaagtttagtaccctttcatcctcaaatggatgggcactctgaacggactattcagatacttgaggatttattgcgagcttgtgtcatggactttggaggttcatggagtaagtatttgcctctgattgaattctcctataataacagttatcaaagtaccatatgaatggctctctacgacctgctctatggcagaaaatgtcgctccctaattcattgggacgaaactggagaacgaaaatatttggacc

SEQ ID NO: 130781 - DNA, 544 bp, Cannabis sativa
  modified_base (486)..(494): a, c, t, g, unknown or other
ttatattttaaagtttttttttttgaaaaaatgccatatttagtataattaaatttacataccatatataaactttaattttttcttgtaaataaccctaaaaaatatgacataaaaaagtaaagtccttaattttccccatattttgtgtaattttgtacttacaacattgcttttttgcattctatttctctttttctttttcttttttcgcattctatttgacataaatgccttcacaaattttaactgcaataaaaatgtagttcatgtttgtatcaaatataataatttactaaattgtttattgaaatacacatcaactcattacatgtaagaatagatttaaaagttactaaatatttttttaaatgataagatactataatgtaatctaaaaaataaattaattggataataaattaatgggtaaataccatttggaccatgtattttacgaaagttatcgattggaccctctgtttnnnnnnnnnacaaaatggaccctgtattttccaaaatggtaaaaatagaaccctgagct

SEQ ID NO: 130782 - DNA, 591 bp, Cannabis sativa
taaatatattttcaaatgtgtacatttttaaaattgtgtttttttgcacattttttgtaattattttaaaaaatgtatacatttatgtaaaataccctttatttaattattttatttggtctagaacatttattttagtaagtttgtacttttatttaccttttattttttagttattttgttagaaaatatggatattaaaaaaatctatttaattaatagtatatatttattaagaattattttacaaatacacaaaaacaacaaaaaaattacaaaaatattgtagtatgaaattttaaatatttttacgtttttatgattttatttacagaaaatacggtcttttgatgtattttatgttgtactattattaatttgttgttagttttttgttatatgttattttttattgttattttgatgttgcttagatgttattttcatattatttttatgtgggggtgttcatcaaatcgtccacaccgtataatccccacacaccacaccatacttcacaaaaagtaggggtgttcatccaatccaatccgtacttttttggtcaaacaacatccaatccgcactaagtgc

SEQ ID NO: 130783 - DNA, 535 bp, Cannabis sativa
aagaataatcccaatttttggaagaaattaattcaatctagaccagaaacctatgaatctaataaacctaaaaattttcctgaaccctagaattatcgaacaaaacaaaaattacctaaaccaaacaaagtaaatgatgatgcaatgaattacaaaaataaaattactaacttaggaaaagggaataacggagataaggaagtaaacaactcactattttgatgaaagtttctgggtaatgaacaacttgtaaattgagaatttgatggctaaggcgatgagttctgaaaattcttaaggttgcagataaaatccgaagaaacgcgcaaaaagtaagtcaatgatggtgagggcatacgaggtgatgtgaagtcggggatgatttttatagaaaggctggaaggtttgaaagataaaaatggtgaaatgagtgtttactctcaaattttataccctggaagtaatcaacgttagatcaaaagaaataagtgttgtgttttatgccctaaataaaactctttacaatctgattagt

SEQ ID NO: 130784 - DNA, 1136 bp, Cannabis sativa
  modified_base (771)..(771): a, c, t, g, unknown or other
gcttggagatctcgacttgaatgggtatcggttcaccttggagaaaggacgagggacccctgcacacattaaaatcagattagacaaggaatttgctaatcattattggttttctctatttcttgatgctcaattgtcaaactttgattactcatcgtctgatcatattctgttgtttattgagcttgaacctgtgaccattactagtcttgtgcgattatttagatacgaaatgctttgtctcgtgaacccttgtgtacccagcttgtggaaaactgttgggctgttaatagtcatctttcccttgctgaaaagttaaaatgttgcagtattattttatctgaatggggttttgaaattactggaaattttaaaaaaagattgaagtagagtaagaagaaaatggcatagcagaaagtggatagtagtagttctcatgatcatgatttctgtgctgaatagtgtaattactttgagattttagctcaataggaaatctattggaagcaatggtccaaacaattttggcttcatacgagtgataagaacagtaagtattttcatgcaactgctagtactcgtagacgtagcaaccaaattgttcaactaaaaaactctgatgatgcttaggtcaactggtcttcgggtcttgatcaggttattactgattattttcttgctctctatgctactgatggtattgattgtaactctgtagtaaatggcatatatagttctatcgctgatgatcataatgaagctctcttacanccggttactcctgaagaaataaaacaagctatctttcaaatgcatcctgataaagctcttggtcctgatgctatggggcctggtttttatcaacaccattgggatgttgttggccctgatattgtgcagcttgttacaaatttctttgaatctgaaggcttgcctcctgatatcaatgataccaatcttgtgttgattctgaagaagaaaaacttctccacaatgggtgatctgcgtcctattgctctttgtaatgtatcttataagattgtcgctaaagtccttgcaaacagaatgagaagcatgattgatcagattatttctccaactcaaagcgcttttattgctggtaggcttatctctga

SEQ ID NO: 130785 - DNA, 743 bp, Cannabis sativa
aaaaaaaaaaaaaaaaaaaaaaaaaaaaaaaaagaaatcgccccccccccccccccaagaagactttccaactaacaaagacagaaaaaaaaaataggaaatgaaattaaaaagaaagttgccgaaaatccaagctatgataaaaaaaaatgaaatcactcttaaatcactcttaaattgagtttaaattgagtctactttgatgagaagcacaaatttttgttctcctcctgtgttgatcacggtctcctcttgttttagaatttgtatgactaagttgttgagtttctctttgaatctcttggctcgcgccctcgtcaccggaccaactggaacttgacttgtatctttagccttagtgtcctcatcaaacatattttgacaattaattatggcagagacctttaaaaaatgtctcacctatataaatataggatctcggtctccgagctcactagtcattctttgaattacaataaatttatctaaagagagtaagcttggaaatctgattacccacactaatcaattttattttttctacaaattcaaagcttatatagaattgaagttcaaataattaatgactagagctattttaatccttatttatataatatacatgtgaattcatgatcatatatatatatatatatatatatatgtgtgtgactattcaatgattacatttttattgtaactatcatagttacatttttctttgacctgtaatagcaggttac

SEQ ID NO: 130786 - DNA, 1305 bp, Cannabis sativa
agaaattaattaattaatttaaagaaaaattatattttcttatatctcttaattttatcccttaaacataaactatcaactttctaaaataaacatagattattatcgaatcgttttctatttctcatataacttttgtgaattatcaataataatcagacaaagatatgtgtgtatatctgatattttttgtatttccttgatgataattagaaagagctattacatattcctccatatgtacatattgatgcctctcctaaagtataattcaagatccatacaacttaatcaattatgtatgccgttagacatgcagtttagggtaagtcattagataaatattttagtatattagatataaaaattattgttatgccatttagggttagaaattcaatagatgttttttgtttttatttatttattaatttttcttttaaaataaagttattatataatttataaaattttagttaggtagatactttttttatttaattattagttatatgatttagaaatttttgattaaaggattagaaaaaatattatttataaaatttaaattagataggtagttttttttttttatataaatataaataatttttcatgaaatgaataaattaatgatgatattaataaatgattagacatatatttaattaatataaatagttcatatagatagataattgatagtttgtaaatatatagtatggttttaggatattttttattaatttttcttaactttaattagatttagttagctagtgataattttagttagtacatagtgacattttttatttagtagataaatgataaatattaaccgctaatgcaacgtggtgtagttagggattataactaactagtaaacatttcgcgcttcgcgacgagaatatatattaaatatattttattatatataaaatataaattgtttattttaattaataataattacttagtaaaattatattaaaattttaattttactattaaaaaatttgtgacataaatacttaaaatattaaatttgttgctaataaatatgtgaattcgaaaaatagtagcataaatttttatttatggtttaatttttattctgatgtgtgtgttaagttatgggttcgaatttattgcgtgtgtttttaatatttgagctttagtgttttactggggttgtaatgtttgagtttgtgtttaagagatctgttttttttttattatttatttttatagattttgagaacttgaaatttgatgttgtttctttctctcaaaaaaaaaaaa

SEQ ID NO: 130787 - DNA, 696 bp, Cannabis sativa
  modified_base (658)..(659): a, c, t, g, unknown or other
tcagcaacctgcaacagaaaatagtattagaaaacttgtgccatagccaccaaagatactcaacaacatgtcagcaagaaacaaaacaagctgggagtttaagaagtgatacagaattgaacaagaagaggaaggacatggtgtaggagaattagtatgtatgactaggaggacaatgaatattcagaatttaactaagtcaatagtaatcgaaatttggaaacaaatcaatttctttgagaacatgtacatttagtgaaccgcttaatgagagtcgaccattcattattctgaacctgactagccaaatgcgaaacttagtggagttatcaattaaacaaacttttgattttcaatttagtataccagagaaattatccaacactaaatacatgcaaccaactaactgtatttactctacaagtcatcaaagaagaaaacactacttacaggtgctataactgatacttgttgaatatcttctaatttgaatctaagtacagtttcatcaaagattttacaaaggctaattagaatttttgctccctgaactttgacatgtaccaaatcataccctctgaacttttaaagccattaaaaatctcacatgaactattgagattgttggatttaaagacttttgtccaattttagtaannaaagtctaacatggataaaagttcaaaagacatgatt

SEQ ID NO: 130788 - DNA, 1526 bp, Cannabis sativa
  modified_base (275)..(278): a, c, t, g, unknown or other
  modified_base (1439)..(1446): a, c, t, g, unknown or other
atccaaaatgactcatctagagttttacaacttgtcagacaactagagagttctggagacttcttcttcttcttccttctaatttcagaatctcttagtgttcttcaacaaatttcaagccttatattgagtgagtgcatgcccacacataggaattctagtactcaatcatagtgtgtaagattgtgaagaatttaacacatgaaggagaatcaggctcagatcttgataatactctgcgacagaaaggaacgagggttagagatctgagtggnnnnagtcatttaattccgctgcaatcaatgtaagatttcttaaatttatatgtttttaaatttcattattttaaaaattcatatttatgatgctaaacaacaaacatggtagtaaatttaaatcctgctaaaataatacccaacaatcgtatactcttaattctcttgtacatccttacaagattatactttctctatatgaataaaaaattttcagatatataataattatacttctatagttaatatcatttatcttatattttatttcatatattttgtaatatattatccattaattacctgcttttagggtataaatccaaacaatctcccactttcactaaaataagtgttgcttattctataactcttatagatgtcgtatctcattcaactattcaggctaagtcttgtgaacgagaccctccatatagtgtagttctaggagaccaccacatcatcattggataaatatatagaatttgattctactatatttagtttattcattcttttatttccttcaggttcatgttgtttaattaatcattaatattcttaatattaaatatttttttgttcaaaactgttgttttggaattgattaatctagaaccctccattagtcacatctaattgattctatcaattaagataactaatgaactcaatagatcccatgactaatcaaattagatgtttggaatgaataatttcattgcacatcctttctcgttttaaatcactgtcacatttcagtgattcttttatataagattacataattaataagaatattgattactcgttttacaaacgatactataatatgtatattcttaaattaattatttccttaatcttaaattctaataactcgttacaaatggattcatctcttgaatggttttttaaatacactcccagcatacttcatactccactcaattagacagttccttatttgtctattgtctttaatcatttaattaagacttctcttaatttatgatttgatatctattatttttttaatctcattatatgtaagtatctctaaatttcaacagttaaataattattatattcaatacatgtatctcataaattgaatatttttttaaaattgtttgccaataatgtaaagaccgcttagcttannnnnnnnaattagcagataattagggtttgattatgaaatgtatttattaattctaaattattaatttatgatgatttatttaaatt

SEQ ID NO: 130789 - DNA, 1031 bp, Cannabis sativa
attaaagccacgtattcacatgaaattctaataagttgatcaagaaacctacagccagtcaaccacgtattgttatagggtttttaatttgggggtgcaaatgaatcaaattgttattgttagaatttgaggaataagataaatgaggtttcatcctaaaattaattggtaatgggaggagtagctcattcatcttatatattataatttatttttacacaataacaaacaacgtgggactaactctaatagttacttatgtttggaattgtttttttttttacaagtgatgtttatgttttgaggagtgataatcacacactattttactctcttttacattttctttatattctaatggcaagtgcattttttatttaggtaatgcttattatatctaattacttaattagtcttaacattataacttaattacatgtgtgccattttaattaaattgttctattagtctactaatttagcaattttttctttataggagaataaatatatttttaattgtttagttttttcatcagttaaacaaaaactataattaattatgtattatttcaattaattgataatctcattctttcttagttctgaatttaataatttattattttcgatttattaataaattagaactattttacaaatgagaaataatttaatatttttttatttttttattttttattcataattatatattgtgtttattgagcttattaaaaaaaaataattaaattattttcattatattgttctaccaataaattaatatttattgagctaattaaatttttagtcattatttacaaacgaaaataaggtttaatatatttatatattgaattaaaattgattttacttttattgtatgtatcatatcagtaatttattgatgttggacaaagatatatagtgataattaattgttcaatttaggatgggagaactaaaataaactaaagaactttatgagttcgtttggtacaccatattataccgtattgtattatata

SEQ ID NO: 130790 - DNA, 708 bp, Cannabis sativa
ttattgtatagaaagtaaataaagcaagacaatgaattaaaattttacaaaaataacaataatacagacaaggattattatgattcccaacaatcctttattttaccttctaatgcaattacgtaatttctcttcttcccattcaatttctttaatggtagcatcaatggttgcatcaagacttgatcctctgccgttagcatgcaatgttaattgctcctttgttgatggcagtgtcattgacattgttgctgttaacattgaaacgttagttctggcacaaaatagaaaaatagataacaccaaaaattgcaactattcgagggaaacaagaaactaacttacagaactgtgagtattcacctagaatgacgaatactcaagacaaaatagcaaataatagaatgaaaataatgtaaatataaaaagcgacagagaattatagtggttcagttagggtttggtctacttaatccactttcgtgattaatcttgttcatattggatcactcatattagtagctacctgagttaagaataacccacaaacaataaaaagtgaaatacaattgtaacgtcgatacacagtatgtctttctgtaaattttgttcagcaattttcttcatgtggtttgtttggaccaccatcgctcggggaaatggccatcacggccttgcaagaccattgcgagagagagagagagagag

SEQ ID NO: 130791 - DNA, 683 bp, Cannabis sativa
attctaatactttaaaatgcaactaaacaaaggaatgaaataaaaattatttcctttccattccatttcattactttcaaccatcacccaaaagctgttattattattgtaggaatacatacaagtttaatattgtcaataattacgacccttaaaaacaaaagagaacacgtttttcctgttactaattaattaaatatattgaaaaactgttttaattaattaaaaataataatttaatagataaattttatcgcatcacaccagcttagcaccatcggacggcgtgcgcttgtaatgggtcaagtgtgtgtcttcatgaactcatatctcatgtcggattcattctactacacacttatatattttgtcaaatttcattaactttaagaaaaaattccaacagccattgattattgtcatttttttcctttcaaaaattgaatttgctgtacaacaaaattgaatttccttgtcacctttggttgtgaaggtgataaaggtcgagtcttagatggtcagccttggcactttgcccagagcattaccatatttgctgctactgatagtagttttcctctcactcctgataaccttcactatgttcccttctgggtacaagtttatggtatcccctttatgtgtaagtcccatgatctggctaggtttatagctatggaagt

SEQ ID NO: 130792 - DNA, 868 bp, Cannabis sativa
cgttagttggaatcgtgtcgttttattagttctctacaatagtgatgctgtgagagatccattcgctttttaggaattgtcattttgtttttcttaagtttgtcgttttgacatgtttgtaataaggggttgttatggaatacaaaactaatatatttactcttccaaataatcttttgttaagaaagtttttcttggctattctcttccattatctattttattattgttgatataatactttacttttcttttaatatttcttttctcctcattgttctgaaagcctcttaagaaaaaaaatccaattttcttcttttcactataactttctgtttgaaatttttaaactagaattttaatttacattgggatcttaatttatgttaattatccctaatctaatatccaaaatacaaaatttctaaagcaataatgtgaacacataaagggatataaagatctttacattagttctagcagaatattaagactttttttcttcagatctctatgccttgatttatgtctgtagtgcagtataatcaatatctaaactttcattctccttctgaccacaaatagactatgtagtcttccttactattctgagtattgccttaaattgtatggacaatctctcaacactaaggaacacaaatttttatgcagaaaaccaagagaattttcgaaaaataaatagaataagaattgtctttcttttgattaagtttgtcagacaagagagagtcataagttgtagaatcgaaggccattatattttatttgtaaggagatactagggttaggttttaaaataaatgggctgattaaaaaagatataatgacactaaaataaagcccatgg

SEQ ID NO: 130793 - DNA, 868 bp, Cannabis sativa
gcccgacagtttctatggagaatctcgcaatggacatctcctattaaaccactagtaaggatcttactaaaggcctcatcagatagagtagaagcaggcgtgacccaactcattctaggtggtctcacatccagtatctccggctcaggagattgcttaggacatggtccagtcctagcttagaaggctcactgagcctgttcagtggattaccttgggcgtcatagtggcccaagggacagtcagggaagatagaacaagtcttacacctcctccttaatggagcaacctcctccagctcagattatgcattagaactcttagctcccgagtcaatctctagctcagcatccacagggggctgagcggtctcctcctccattctaactcaaccccttatggccaccctggccaagtgaggatcatatagaggcgccctacgtagagtttgtttcgttctagccataagtacaaggtaaataagagacttacacagctatcacctcccctattcaacacttggcactagttgcatggaagaaataaggagaggtgagaaacctgaaaaagctacaaacatattcaagtcaacggtacccaagggtaccttctaggtaaaacaaagtgtacaagagcaatcaacgaccaagtaccatcttaagtacacttactaagatatgtagtatgtcctaaattgtataattgactataatggactcactacatagccttatacgaagttccaagagaaactacgcataatgtcacagttttatatgcctccgaggccgtcacaggaccctagccgaggtcaaaagagagagaaaaactagctgcccacttggagccttggccttggccagccagg

SEQ ID NO: 130794 - DNA, 636 bp, Cannabis sativa
ttcagaataacttaaatctgaatcttatttcttgaagttttgtttggaaaatccacgatgattttgtgctcgccagagtgagtgacgagatagtaaaagcctcctgcggcattcttcctatctggaacagctttaataaagtagagatactctatttccaagagagcggggcactcccaattcagaattttgtacagaaccctcaaacttgcaaggattctgtaagagacaggattcagttggaatggggcaagcccgaggtggtttacaaagtccttgaaataatcacgaagggggagtattgcccctaacctaatgtgctcaaggctcgtagcgcctattccagtcgatccacttatactggtctcgccactggccccctcagaggtctcgcgtgtaagacgcacaggtgggtaactactaaattcaccggcttgcactgatctaacccgacagtctcgcctatactcgattctacaggtccttagtgtatagcctacgtagcttgagatagttcacaaccttaagtctattaactctgcctcgaaagtgacgatagggtcctggggagtctttgatttacgtggcttgagagacattattttaaaatctatgtaaagaccgcctagtcttaat

SEQ ID NO: 130795 - DNA, 1058 bp, Cannabis sativa
  modified_base (1014)..(1020): a, c, t, g, unknown or other
ttttttttttttttttttgcaactgcccacacatacttaaccatttgcagccttattccattcttttactctcttgaatccaatcccccagctgcttttgtctagaaaatcatgtcccaggctatggcccatgcacgctggcatagatgctggcctttccaaaagaaggccctgcatattgcctctatctccttgattactttcttgggcagcaacataacttgactccagtaggcatgaatacttagcaaaacagaattgatccagacaactctcccagcaaaagataaatgcctagtgctccaagttctgatccttgtagtcatcttttctactaaaattgaacaatcattgctcgaaattctcttagcacagattggtacccctaagtaagtaaaaggtggctcttgttgagagaagccaaaagctgcaagtattctagatacatcatgctctgccatggtagtgcagtatattgcagatttggctgcatttgggaacagcccggaagtgtgggaaaaaagtttcagaccctgcaataaatagatcacacttttgtaatcaccattacaaaataacaacacatcatcagcaaagttgaaatgattaagttgtagttgttcagatctatcatgaaaccagaagtcagattttctccccactcttttcatgattcttgtcaagtactccattcccaaaacaaatagtagaggggacatggggtacccttgtctcaatcctctctttgaagcaaaaaaaccatgcattgacccattaaacattagggagaatttggaggttctaacacaattcatcacaaggtgaataaattgaggaggaaatttaaattcagctaaaatttcctcaataaaaccccattctactatatcataagccttctgaagatctaacttgatcatgcaaccaagcttattagatttcttcccataatgcctaattaagtcttgacatatcattatgttgtggcctatgtattgttggaaattattttannnnnnncttagatctactcacaagtatttttattaacatcctaa

SEQ ID NO: 130796 - DNA, 546 bp, Cannabis sativa
tttttttttttttttttttttttcatatatccatgtttcttttatttactaaaaatatttatagtggcagtaataagtaagatacagtgatgatagtgacttcgaatgtagtagcgattataagtgagaaacgttaatacaaataattttgaatgtagtgtcgacaataagtgataaactgtaaatataataattttagtttgtttgatgtatttttgtttgtaaattaacataaagaatattacttatacttatttgagttaactaaatttaaaatataataattaaaaatatctatgttaatgatattatttaaataatgtatacatacacataatatagatttaaatttaaataattgattcgtattatttttataatatttatctattaacgaatttgtacttaattttaaatattctcattaaattagacattttaaaaattcaagtttaaattttgttaattttatttttggtatatttaattgacaaaaatattttattatttattgtatatttcggctggtatgtattaatatggttt

SEQ ID NO: 130797 - DNA, 923 bp, Cannabis sativa
tcccaacactgctaatgcttagccaaacaatcacggttcgtcctctctgctgttttatctttttgggtgattaattttaatctattgccattcgattctcgaaacattcatttgtattcgatgggttttgcaatttgggtttctttggtgtgacctaggattcgattctgattcttgtcagtatatttttttttctaaatggggtggggtatcttttgttcaggttttgagtaaattagagtttaattcgatggatatcgtagttatgttcgtttgggaattttgttgggtaaaagggatttttctgaccatttttagtttatgaactacgttagactgcaattggtttaataggtattggcattgtgaatgagaatcaataattcattggaggattcagaaaattggctgctttttataaatctcgatttatttatttactttaaatacattacattgcatcatattcttacaaattacacgaggataagtttactcaaatactttaatttatttaatctttcactggagttgcattgggaatgatatattcttgtcctatatctattatgtatataaatataaatacttgtcctatatatattattatatatattatgtatataaatatttttagatacatttaatcaaatattgttataaatacttgaaatttggaaaatatatttataaaattatatttataattggttttagccaggctaagaacaattgatgcggttataattactcattctcattctcatgctcatgctgatgtaatccgaggtctctagattgcgtatcttctaatattcttgagataactaataaattagtgataatatgataaaaaattcatttcaatactataattgtaacaccctaactaccataggcttattacgtgatttttaaacgta

SEQ ID NO: 130798 - DNA, 553 bp, Cannabis sativa
taattgattgtagtataactcaaagttatctttgttatttagtttatggtataacatgctacgtaggagtggacactatttaacttaaataaattaaatccaattaatttataattagattagattgaatgttaaaagttgaattttaattagattagattagttattggatgtcaatctcaaaatttaattaaaaactgatccaatccaattacatatgatacatattaaaaagattagttatatttatttatatataataaaaaatatttcgattatatttacactagatttttttaaaatttgttatattttattattctgtgtatttattttcaagatgttttgcattatttaattagctggtagtgttgttgttttagttaaagtaactagttaaccacccgcgctttgcggcggatgtttaaaaaatagcgtattattattagacaccagtggtgcccagaactttttataggtggcgctttataattggttagcgatattccctaaaagctattatcttaagttatataagatccgatacttaatt

SEQ ID NO: 130799 - DNA, 1226 bp, Cannabis sativa
taaggggtattttgggtagaatttaaaaatagtggaattgttttgtacaaattagtaaggggtataaaatttgatatgtgttgtattattaaggtcaaaaaaaatgaaatttcccttttccaattatttatatacaaatttttttcgatttacaatcatttttctgtattaatcaagattcaagtctccctatccttatatatatttttagtaatttcattctactctgcacacttatcaattgtcgtttttatttctttattggttaatttggtttccttcctgtgaagcaatcatattaatgttaataatttcatgagagggaaaaaattaacaaaaaaaaaaacatttttattatattgcagtttgcatttacagcctctgacagtattaaatcgttcagtgtaattaatattgtcataccacagattcagttcgacaagaattgcagactcacaggcacacagccagattattaaaatataaatcagattctcccttttttattttccccttaattataatcaaaaagctaatcataaaaagtaaccgtatacaaaaagtaatgaccagctcttttgttttaattaaaataataataaaataaaaattagatggcatagcaataaataattttttcacgaataaaaagtacagttcattttctatagcaaaaaaaaaaaatatagttcattatttttttttaagaaaaaaaacgtaaatacataccaaatacgaaatatattttgattttccaaacaagccaaaatttaaaataaaaacatattatatattaacattgaatataaaaaataaaaaatatgttgaatatgttttttaagatttgaacttactaagtcaaatttattaagttaagtatcttaagatttattgagaaaagcaatagtcaaagaaaagaaattatgaatattttgtcaaattcaaccgtccccttgttcgagtctactcaaaattttggtaataatcgctttggaggtagtaagaggcaaaattcatgaagcatatatgtatttttaaaattatctataattaaggatattatattataaataggatcaaaataaaaaatatgtaaataataaatttttatatgttacttttattaataataataatatacagtgtgttgagaatcatggggttccatttcaaaaccaattggcaatgagtggagtagctcatgttcttatatatggctcaattct

SEQ ID NO: 130800 - DNA, 663 bp, Cannabis sativa
ttagaaaataaataatttttgattttactgattaaattatgagaatcaatataaacataaatatttttatatacacttaagtaaattttgaaaccttaataattctcctaaatatcatttaaaatatgtgttgttgtcatttttaccgttaaacgttttattttattttattttttttactaaaaatctcaatattttcgaaagtaggtaagagttttaataatttagattaaagaagtattttcttcaatctcacgcaagtcccataagttcgacctcgatcttcacgatttctacatcacaataaaaatttgtgtgcttgcgagttgatacatgttatacttactattttggtatgaagaaattcttggtgccgttactggagaactgcaagaagaaaaattactttaatttaagttggtacaattcttatactagttattatattatacatattatattacgtttcttagtagtgaagtaaatcttacctatatataaactaatattataattattattgttatcccaaattttatctatttgacgtgtcatgtccacataagtcaagattgagaacacgtagaatatgaccttgtcaatagcaggacaaagtctccttacaaggcatggaaaatgtaacgtccccgcttcaagcctcca

SEQ ID NO: 130801 - DNA, 656 bp, Cannabis sativa
  modified_base (32)..(38): a, c, t, g, unknown or other
agtatacgtgcctcgcacgtagtttttgctannnnnnntatatatatatgtaatatttatatctatgatgaaccttgtttggttggaggcgaatcgatatttggtaagtaataaatgtagtactagatttatggtgccgacttttagatcgtattaattatcttgctgtgaaaaatggctgtgtatactatcaaaatattcgtcttgctgttttgaagtgtgtgataagaagtttgtaattctaatgagaaatgttaacaatccatatatttaggggcgccattccatagtgtaataagttcaaatgataaaaaatactaattattctatcaaaaatagatcttaaatagaaattgtattctttattattttcaatttagactttcatattcaaatattttagatcctctacataaattaaaaggtacttttatagtacacccctaaaaaataagtaaatatatctatatatacactcttttcttgtttataatatctaaataattaaatctcatttttgtatgatgatgtatacagggccggcccaaccaatttgggagccttgggcgaaaaattaaaattgggcattttattaaaaataaaatcattaatcaatacttcataaatttaacttaaaaaaaccaatacctcataaa

SEQ ID NO: 130802 - DNA, 1369 bp, Cannabis sativa
tggcaattttcatatcacagatgcccatatctgcaagtcgcctggaggaaaccctaacacggtttaattctatgccataacctggaaattttcatatcactgatgctcgtatctacacgtcgccaggaggatcgcatcacctaattaggtgagtccttacctatgcttagtactcatatgtcactaacgcctgtatttactcgttgctaagagtatcacatcacctaatcaggtgagcccgtatatcacgttcataatatcatcacatcatcattgcttaaccaatcaatcttttcattatataataatattaatcatattttgatcttaatattaatcaattcataacaatattaattatattacaatacagcgtactatgcagtacaatatactttttcacctcatgttccagttcagatatgttggctgacctacttggagtacgattgatgatcccaggccctatgtcataacaataacaaaccattcagtgtttatcccaaaatactgcttaatagctgcaaacgacaatctaaggtttcttaccaaacaccgtaattaaattacactaaaataaaacttatattttggctctaaaatatacattatatggtagatcacgttgcaagcttcaaaatagtatattgatacacgagtgaaaagttatggcaaaaatacaattctcgagttcttgacactgctcacaactagttaaccgcttctaccagaaccgattaactggttcccaaccggttgactcgttggtcaagggcaaaaaatatgattttccaagtttatgcactcaccaaaacgttgtaggaacctgtccaaaccaccccaatcttcatagggcacatatataccatacatactgccatacttacgtaatataaactaaaatcaagcccttaattggcaaagaccactaattttataataagttctaaacttagtttctaatccaaaattacctcaaatccagcaagaaaacatcggaactagttccatgactacccgagaacactcctaaaggtcaaaaccttcataactattctaattcacaaaacccgtatacaaaactaattgttttgaatttaaaatataagtaaaccttactgttaatgtagattttcatcaaccagatttgagcctcaagattatgattcaacatagaaataataaaaattatagaaaagtaaaatatgaacaccgggttttttacgtgattttgtagttaaaattctgcatagtccatgagtcaatcttattcaaatttctgagtatagttttttagggcctcttgcataagagttttttttgtccccgcttttgatcttatctgtcactatttataattgcatagtgg

SEQ ID NO: 130803 - DNA, 1068 bp, Cannabis sativa
ataaagtttgataaacataatagtctcctgaagagtgtacatattttggagaataatataattattttattcgtgtatataaaatataaaactcgtaatgattacttatatatatgttgtagtgattttacattaccttatgaaagtttcattaaaatatatcacccattctttttttgctgtatgggtgattgattaattcaatcttacctcattaagtatacctttttatgatgtcaaaacatctttgatatttggttaaatgaatgaaaaaacaattaaattgtttctaatattttgaatatttttattctcctttcattatttgtatttttatatttctatataatatggatattcattatagagtttttatttttattttttgaaaaaagtctcgcatagtttaaaaatgtgattaatgttaagacttgtaacttataaatatattactcattcttctttccattgaatcactgagtgattaactcaatcttacccaattaaattggtaaaatgaacaattaaaacaaaacaatcaaaatttaaattaaaaatatcattataatttagtcattctttggagtcttttaaaaaaaaaaaacaaaattaaaatccatgtagaacaaaaaataagagaatggtcacaacttagtaatcttaatagttttagagaatatttaatatcgataatagttcaaagacatgattttttattaatagtttaagaaaatgaacctatttattcttataataattttagttgtacaactatgaatttaaacataatattaaaattctatattgatatcgattgttttattttattaactaacaatcagaaaaatagataaaaaaatattaattaaaattcacataccacataaatcatttaaagttcatatttttatttttaatttataatgtaaactacaaaaagaattttttaagtaatgttgcccctgattttgcccaatatacatggaccaaccagacagggacacgtggatcaaacagcttagcattcaaattatttgctaagtctttaagtaataaggcagcatccgg

SEQ ID NO: 130804 - DNA, 793 bp, Cannabis sativa
acatgaatttaagacttgactcaagactttgggtgatggatggcctaatctcctatgccatacatcacttttggaaattaaagactcatcagtgtgaaaccgatttacaccagatctggttttgacagcaacaccagagaatacttgacctttgtttttatttgactcgatagacttagcagacttgatggttgattgggattgtggtgattggagttgatagagtccatccttaagcatcccttgaagaagaaccttctttgttaatttgtccttcacaacacaacaatcagaatgaaattcaatgagcacattattgtcatgagtaagttttgacacacttaacaaatttttagcaatttcagggacaagaagcatttctttgagcaacaaagtttgaccagtattggttaataacacaccactaccaagatgagaaatagcaagttgtgtaccattaccaactatgactttctccttaccaccatagtcctgtttctgtgtcattgaggcagcatccgaggtaatgtggttgcttgctccactatcggcaaaccacgcttcactctccagaatttcaggggttgctacaaaggcagaaggattgttgtttttggcttgagttccactgttaggatcactccccatgtagtgctcatcaaatcgattgtagcatatggctgctgaatgtccatacttcccacatacttgacaagtgggcttggagttgttggatctgccactgaacctgccccttcctcttgaacgatttcctcctctgttagagtgtcta

SEQ ID NO: 130805 - DNA, 746 bp, Cannabis sativa
  modified_base (658)..(672): a, c, t, g, unknown or other
ttgcatgaattgtctttggagtttataaatttctgaaacttgtttaaatttccaattcaccccccctcttgcaaacatatcttgggctaacaaccttatatattgtttgctcttatcctggaatgcatggtttcaatctgcaaactcatttgcaacctatcactttctacccttcaggttttatgattattatccaagttttgtttctcctcaaagataccatttcttcagacatggccttgttccattttctagcatctttcccagttatggcatcatgatagctatttggtacaggcaatgttgactcagtgacaacagctaaagcataggcagtgatatctgattcagcaaatctgatagggggtttgatttctcttctggttatatcccttgctagctggtaatcttccaaactttcatcttgggattcaatttctgcttctggctgcatctcctgctctatttgaggttgcacaggttccacctcaatttgcacaccatttttgacttgtgtttcatttcctgcaacatcaaaacaactacctttctcatttcctcaaaggggaaaatcaagctcattgaaaataacatctcgacttataatgactttattgtcttcagttgttaacaatctatatgttggaaatattttacnnnnnnnnnnnnnnnctaccaagtatgtttcattaacattctaatatgaattctaaaacaatggaaaaaacacataagagtttaagaaa

SEQ ID NO: 130806 - DNA, 791 bp, Cannabis sativa
attactattaataaaattacatgatttatttttaaaaaaaaaactaaaaaaataataataataaaatgccttgtatgcccgggtgtttgcggtgcgggtttaagctattttttcaaaccaaaacgcatatgcagtttttgcaatggtacagtgcagtttaggcggtttacactatcatcattatcaaatattaaaataaaaattaaaagactatcttatcaaacttttaacgtcataacaaatatactaatcaagttgttgtaatgaattgtctttaaaaaatgatataatatacaaatatattacatattatatatatatcaataataatatattagcaataagaagtaagaaaaaataaaaaataaaaataatttatatgaatgttccttaaatttatttgtaagtgattgtgtaagcaataaatattataatgtaaaaattaacatttttgtaatatataatgcaatacgattattaaatttaaaactgcaaatcctactattgctaggttatatttaacctatgttacgggtctaataagtaagcattttctcggttattggtgtcttttggagcggttttacgcttgattttccttgtttcaggttcccggggtattaaagttcaaattcagtcaattgacgaaaagacgggacaaactggtgaaaaatcgacaaaagctactcattgggtgtcagtcgcgactagcaagaagtgaggtcgcgaccacgacttgaagatttggcagaatctatgtttttcgagatttgcctgtagtcgcgaccaac

SEQ ID NO: 130807 - DNA, 1019 bp, Cannabis sativa
  modified_base (96)..(107): a, c, t, g, unknown or other
cacccactgtaaggtttcttaactttatatgtgttttatttattatcgttttagaagttcatatttaggtcgttaaatcaacatacttgtgagtannnnnnnnnnnntggtaaaataaattccaacatgtcgttcctctgtgatggattttcaagagattagcgggattctcataacaaaaaaactaatacaaaatgaaatatttcaacactattacaaatctgggcaaaaccattgccaatactgagcagtgtaggcatctgtttgaaatagtcgcctataccctttaaaaaagtacagatcttgaatcatatctcaccaccaaaactagatccacaccaccaaataaaatctcaccacatttcagttcaatatagtagatatatattcattacaaatatattaacttttgcactaatccaatgacattgaaggcctctctccctgcgcgctctgcaactcacctctgagttggtgccatgtcaaaaacgagggcaaggaatgtggggaaatcgaaaaatttcagctaagaaaatcaaaatgaagggaccatcgtcgactgcggatgctaagaaaatgaaagccatggaggagattcttagagttgagctcatggaactcacagacgaagatgaaggggaaggaaatcaggatccattacgtgatcttttccagcttcctttaacacctaagtcttccttgagatcgatcctatagcaagaggagatagttgctgattttggacactttcttactgcaaaaaaattctatctcgattgggaagaagactacccctccaatagttagatcagggaacgtcattagaaatctggaaggctcgttttctacccagaagacagagaagaaagtgcgaatcagataagaggatataaaagaggagattgcttattggaagtcatctattgtctgtgttggaatatggtttaccaggatctagatttcctaccacgtatgttatttaacatcctaaatatgaatctctaaaataatgtaaataa

SEQ ID NO: 130808 - DNA, 1175 bp, Cannabis sativa
tgcattgttgcataatgaacatgtggcagagttgacaactttccttcgacaaagtgcagtagcaacaggtaaagcattttacatcactctccaagcaaaaattttgatcttagatggcaaggtaagattccaaaattttttccaccattctgtatgagcagaagaaccacttaattcattcccttttgccaagttctctgctaaatggaaccccgaattgactgtgtacataccagtcgttgtgtgatgccaaatgtaacggtaattgctaggaaaataacataaaggaatggagactattctatccacatcaatcgactggaagtgttcacgaaggagaggtaaattccacactctttgctctgttatgaaataagaaacaggcagatttgtagggccagtatagcttactggtgtgaatacattattacttggaatccacttgtgattgaaaaattgtgttttctgaaaagtgatttggaaacaaaaatttgagttttgtaggtaaaaaattgttttaaaaaatatgattagttgtagtgtgatttattgtttatgagtttcaaaaataaaatttgtgattgattgggaattttaaaataaaaaagtacgagaaaatttggagagattttgggtttaatgatttgaaaataaaaaataatttcatttcttgtcttaaaactcaaaattatttttcagataaaatttttgaaccaattaagaattctgatatggacctccactttttaagttttggaaaacaaaaaaaaaattgtttttgagttctaaaccaatcaaacctgtaatagttaggtacatacaaaagttactgaaatataatttaagtattattattgctaaaaattaaacttatgtatttatctgtattcaaacattaaatttaaatatttacgccacaatttattcaaattattatatttaattgggtaattcgaggtgaaatttttttatattttaatttcatacacttaacttaacaatttgattttttttttttggggcaataccagtttaagtatacttttgcttacaaatttgagacaccagttaaatttcagttaaatttcactgttatctataactatataaaaaggagaatgtggttttgggcttcccaaaagtaaattaccaaattctccttttttttttttttt

SEQ ID NO: 130809 - DNA, 836 bp, Cannabis sativa
tcactttgatctatggggtgcatctagaataaaaacaattggtggagaaatctattttctaagtatagttgatgactatataagaaaggtttaggttttcttattcagtaacaaaaatgactcttttaacaactttgtcaattggaaaaccttgatagaaaaccaaacaaataagaaaattaaaatgttgagaactgacaatggtttggaattttgttctgatgagttcaacaggtattgccaagagactgggataagaaggcacaaaactgttatcaagacacctcaacaaaatggcataactgcgagaataaatagaactttgattgaaagagtttggtgtatgatgacagctgttggtttgggaaaacagttttgttatctcatcaataggtgcccctctgcagcactgaattttaaaacccctcaagaacagtggacaagccatgctccaggagttgatcacttaagggtttttgggtgtactgcctatgcacacattagacaggacaagctagagccaagggctctgaaacgttgttttattggatattctgatggggtaaaagggtacaagctatggtgcttagaagatggtttcagaaaatgcatcatatgcagggatgtgattttcaatgagagtgaaattcctatgaaagaatcaaacacaagaaacaagactcagacaaagatcacagagagtatgcaggtttaacttgaagagactcaagatgatgctagacatgatgaaacaaatcaggaacaagttgaagacaataaaatagatcaaggtggatcttagggatatcaacttgttagagagagagagagagaga

SEQ ID NO: 130810 - DNA, 666 bp, Cannabis sativa
tctttcttcccaacctttgattcgaggctgcctgctgttgttgtttctgacttcattaatgaggaacgacaatggaatgttcctttgcttaacagttgtttctcttcgctagatgtggaaaaaatattggtaatctctatcagttatttccccagcaataatactttgatttcacatcacaacaacatagggattacacaatacaatcagattaccaccttgttgttgctcttgatgatattgctcatttctcgacatcttcgtcaacaacaaattggtggaactatttttggtctttgaatcttccacaaaaaaaaagttaagatttttgcatggagagttctttataatgtagcacatgtggccacatcattagtgagaagaaagatcattacaaactcaaattgctccatctatcatcgggcttaagagaccataggacatactttatttggctgcaaatatgcgcgagcagtttggcgctcttcgaaactggttttgattggaataaattgtcaacaatgcacaagggtgattacttagcttatatgtcaactatttacactaaactagaaatggatcaaatcatttgcactctatggcgtatctggactgaacgaaatcgtgttgttcatggtcacattgtccaaccagtcaagatgttag

SEQ ID NO: 130811 - DNA, 890 bp, Cannabis sativa
acccagggactcctacgaacatcgttggaatagaccctttaatggtcatgtctctacctgaattcgaggaatatggcagcttcatggatcataggagcattttagcctttgattggggacaaacttattgtacctcacgaagtggttgcacccacgcataagctttctcactagatcttctctcttattgttgttattgcttattatgaccatacgtcttgttacaacttttacactttactcacattgttgctttgttgtgcagatacaccataattaaagatgttgaagtcgtggaacaaccaaatcctggttgctatggacgaggttacgaagtcccatgaaaagggaaagaagaagaccatgaccagggcttccaagactcgtaaaccacctcccccatcaacttcctcgtcatcagacgtccaagagtttctcctcccacccaaactgggcgcaccactactggccatacgacaacgggcagtgcaggaaagagatctgataactcctagaaatcctgtgaagttcttactaacctgagagaacaatattctcaagttgttccccttacatgagaatcaatcccggatatagtaccaagtgcagggggttttgaggacagtttggatggacccgtctttcctctgaagggggcttcgtcccagtcaaagagtaagggatcaggatcttcttttgaccttgttgcgtagaagatcaaaactttggtctcagagcttggggtaactgatgtaccattgaccaatccatcattgccacaaccaccacaaaagcaccagtcgcgacaacaacagaaaaaataacaacgacaatattaacaactgttggaattattttacctcagagccatggtaattgatttacttgca

SEQ ID NO: 130812 - DNA, 894 bp, Cannabis sativa
aaaatattatttatatattattaaaataaattttgagaatgcactattcattctcaaaatagttgtattagtttgagtgcatctctattatacacatgatttaaagagttgagagaggtccttttaccacatttagctaaaaaatttagaaaatttctattataaagagactgttgtgagtactcttactaataatagaaatttaacgacctaaaaaattcaggagtttgaataatgagaatttattatactatttttttaaaaaattaattagattaaattttgtgaaggattataccctaaaaattgataattttaattaattgattttctaatagaatattttattaaaacttaaccaaaaagaaaaacaataacattaaactaagaattttgttacataagtacattttatatagaatagatataaaactgaaatatgaggcaggtaggtgataacttaaaattattttaaatacctctatctattctctcttttttttcaatttttttagggattttttcactatatacataattagaaaattatttacaataataaccttacacaaacaattaataatctttaacgtgccacatcagcaaagaatacctatctttaattatcagtgtctgacaataaaaaaacctagaaacatgtgcattaaatgtttacgttttttatttatttaattgagaaaccattagatgtcttttttattttttcctttttgtgctatttttttttaaaaaaaaggattatacatttctctcactcaataacttttaaaaaaaaatgttcatgaaaaaaaattaagaattctgattacaccactaattattttggctcaaaaataatactatcataatttattttttaatatattattttaa

SEQ ID NO: 130813 - DNA, 831 bp, Cannabis sativa
ataataatattttattgatattttataatagataaatgttaaaagacaacaatggtacctatcactattctcagtgtcatattactattggtgcaattaagttaggttctatataacttaagataatattttttagagaatatcgctaactaattcaagggtgctacatcttgttaggcactattggtgtccaataataatattctttaataatatgatagtatatatattaaaaagtatattatttaaataatatggagatagaaaataaataagttaatgtatttttaaagaaaagaggagagaaggtgatgagattgctctaacatcaaattaatttggagggaaaaagatatttaaggtagaggagacatagtgcttgacaagaatgatagaaagactagcaggcatgaggagtgggacatctattgattacaaatttatatatttatataaaaagatataaagaaaatatgtagtacatcattttagtagatttatgtatttgtttcgacatataggagaattagttaattttttttttcataatagggtatgttgtaattatttagtgccacttataaattttaaaaaaattctaaatagtttacatttgctaaaaataagtttcaaacaattaacatgtgtacaaaaacaatagtccacgcgtgtaacaaagatcgaaaggtgtgtgttatcagagaaggaatgaaatgtgtacaagttgcttaaatccataataagactattaaagagtatggcttcaaacaaaatgaagaagaagtttgtgtatacaaatacattaagggtaatatagtggtattcctagtt

SEQ ID NO: 130814 - DNA, 858 bp, Cannabis sativa
aatatgagaaaaattattatatgacatgagaaaaaatataatgatttttttttatcaaattttgtatgtattttaaattttactattccattactattcctattttcatcctcattcctattcttaaatttttattctcaatcaaacgcaacctaagagtctatatatataatagattaaaaaaagtacaaagaatattgacaataattagtaatctacctggataaaatatagagagaaaagaaataccgatagaaaatcaagactaatgaataaattatgaataattcaaagttataacgatattaaagttgtcgacataaaaaaaaaggcggtatgtctgcatattatcgaaaaatattttgatatgtgagagattaaaaataaatagatcatattgacaataattaataatctaccaaaaaaaatatattaaaaatatagatagagtaaaaatactaatagaaaatcgagcctaatgaataaatcatgaatatataatctgaagttatgatgatggtaaagttgtcaatataaaaaaaagtcgatatgtctctaaattatcaagaaatattttgatgagtgagaaattaagaataaatagatcatattgaaaataattagtaatctatcaaaaaaaaacatattataaaatatagaaagaaaatatataccaatagaaaattaaaatcttaatgttgtctattgatgttattattactattgctcattatgaacaaagaaaagaaaaaatattgaaaaaatacatatagaattagagaatttagaaagatgaagaatgtatgctctaaaaaacaaaagaataaaaaaaatagaaaaaaaaacataaccagaaat

SEQ ID NO: 130815 - DNA, 650 bp, Cannabis sativa
tggaagtgttaatggctgaagtaaccccgccggtcgttgatgctcagctttgatttgctgacaggttaagcatttagtgacatagtccactacatttaagatagacccaaatatttttcatgacattcaccgatgggcatagagagttgttggtggaaaaacatttaagcaaccaatgtggtgttaggagagaaagacataaccgatttatcatggttcagaagttgactcgatttatagttttattttatttttaatgcatatatagtataataaatatttgtgatagtattggtttgatttaaattttaacaaaaaaatcaattattttaaataattacatgcttttttcatattaccttaatagatactcgatgggtttcctataattgatagttattttcttatctcgaatttattggttatcaaacgaggatggggcggtaataggagcataaataggtagtgcgaatgatgcagtaataggagcatgaatagatagcgaagatgaaggtgggattgtatttcccttatattaaccgccataattttatctctattccttataagaataggcaaaagtataattttaaaaattattttaggtaatatagtaagtttaggtggtgtttggttggaagtaatgaaat

SEQ ID NO: 130816 - DNA, 715 bp, Cannabis sativa
aacaacaaattaataagtgcctaatgtcgtctttgaaggatgctaattattttcttcttctttgaaaagggaatattaatcttagttctgactactttaattagactgcttttgtcttcatttataaacttttttttttcaataaatcataaacattaacaaagtggcaagtgaagaatattaatggttaccttccccacttaaacaagaaaaaaaggttaccagctagtggtcaaaattaaaattaaatcattccttcaaaaaaaaaaaaaatttaaatcgtgatcatggagctggacatatatgtatatatatattattacataagaaaaaaaatgtttacatatagtcattacagatatttattgaattttcaaataataatactattttcatagaataattaaatatatttgaacaatattattctattaatgataatttttttttataaattatcagtttggcacagctctattatgggcaaagcttactatttgataaataataaattttaaagtgttataatgttataatttagtttattataattacaaatatatataaaaaaatatgttatataaaatttttattttacataaattttaattattttttccattgtataaattcatttgataaaaataattataatatatgggaaatttgattttatatacttaaaaaattaaaaaaatttattattaaaccaaaa

SEQ ID NO: 130817 - DNA, 1732 bp, Cannabis sativa
aacgatattgacacataggagagttctagacaccactggtgccctttagaatttctctttttaaaatgtaactgactattgaccagccaaccatagtgaggtaaataataagtgattgaataatataattaaaaaagaacaaaagaacaataaagtaaaatgaacactagattttaaagaggttcgacctggtgggtgtggtaacagtctactctccttgaattttctattgacttaagagaaggaacaaagtgttctcccccttgaaagatcttataactgatctttgagtaattctcttatatcactatttgcatagtgaagttaagtcactatgcatgaggggtggtttctcttttgcttacaatacataaaatagaaaattacaatgattacataggaaactagaacaggttgccatatttctctgactcaatcccatgattgtagggactctattcatgtctggacataataagattattccgacgttgttatcccttgtaagttgctcggcataacaggcttctacctggtcagatgtcttctctacaactctgctcgggtaatcgacaattatagatacagacgaattatgtgcagcctgggatacttccctctgccaaggtattagagatatagcacatgtgtcactcggtcctatcaccatgtcaatgtgcaaaaaattagatagcatttgcctcccaagtctacgcgggacgttcctgattgcacgtggacttcactcgatctggagtcttgtccggatgggtgacacatgtcttaggcatcgaatgacgaaccgacgtgaccctgaccaagcgtctcttcaattttgggtcattaatgttgattgacagttttgtctcgaatcgcaacttgatgtccgcgcgtgaagatggttactctgccagcaatgagtacataacgtacacttttgggggaattcgagaaatttaaattttgaaatgattacttcctttttcgaactgcttataaataggattgaaaaccctaaataatccatttagtcattttttattctcgaaaagccagagcaaagaaattttcaagcaatttctctctcaaattcttcaaagaattcccagtaaactcttgccaacacaatccgagtattacaaaaagcttcaaaccagtaagtaagttctttatttctttcttttatacatttgcatgcttaattttttgggtttctatttgcgaatcttgactgttcttgaacttgttctaggataatcataaaaatcctaggtttaagatttagaaatttcgattatgcttaaccacgacatctaattctaactacgctttgattttaatctcacgacatccattttcacttatccattaggggtttggtgagaatcagactccaaatcaaagtttaaaacttttgggttgaaaattccgtttctaagtgaaatttttgtttttgattcctcaatcgaacctggtcagtacattcaacttatttttattcgttgctccgaccaattctcaacttcttgtctcctacaaaagtaataatattattttttttataaactacaaaagtaaattatattttaaaatttatttttaacttatgtttcgcagtaaacctatgaaaatttaacatcgttgatgcaaaatttaaataatcaataaatatatatataattaaaaaattattaaaattataataccacatattcataaatcaacaataaaa

SEQ ID NO: 130818 - DNA, 1316 bp, Cannabis sativa
ttttctatattaaagcactttaggaatatgtttagatctgtgatttatatatttctttaagtgttttataaccctaacagcataatcaatagacaaatcatgtcattaacaataattgaaaagaaaaccttaatagcacattcaactaaaaaaactaataagtcgctaacagtgaaacatcaatgaaatatgaaaaatactaaatcttgaatctgaatgaatatgtgacaaattataactattaatgacaatctaccgaaaatattcttccaataaaaattagataatgacaacccaattattcacattcgaataaaagaaaataataaagcaacaaaccctaacgataacaaccataataaataatcacactataagttacgaggctaataagaatatgagaatcctcaaatctaaacacaaacgagaataatcatgctacaaacacaaatatattttgagtcaattgagattaccccatactacaaacacaaatatgtttattttttttttcttaatagttataaaacgaaattttaaactctcatttaagaaaccatttattatcacatttaatttttatgaaaataattccatcaattcaagatggtggcatattatatccataagaaacattatatatatttatataaatatatatatataaatcaacctagataaataaactctcaagggttaataacagatgaaaaaattaaagtttttccttcctaaattgatagctatcgaaggttgtcttttttctctggtcaggcccgaccttccttgggcttaggtgtggcttggttaggattgtattttgctactacaattcaatttttactattgtgattagtcttatctctgtgatatgattttgagtattttagtcttgtctctatgacatagttttgagcatttttatcttgtttttgtgacataattttgagtgttttagtcttgtctgtatgacatgattttattttgttttgttttgtttcgttgttgattcctttttattcttcgatgacttgtcatcaaatcgttattagtggttgggaataacaagttctttgcaattaaagtggctgtttagtgtagttacataccttacacaatagttgagtgataaagcttcgagattgaatgaacttgctacaatacatgattttattttgtttcgttgttgattcttttttattctttgatggcttgccatcaaatttcttattagtggttagaaataacaagttctttgcaattgaaggggctattagtagtgtagttacataccttacacaatagttgagtgctca

SEQ ID NO: 130819 - DNA, 855 bp, Cannabis sativa
tctctattttaaatatcatctttttgtgagatatttttttttctcatctttttcttctcatattttctaatcttcttctattttaaatctgcacaaataaaagataacaagcgtaaaaatactccaaacacgattaaaactcattaaaaaatatactaaatttaatctaaaattaatactaaaaataacctaacattagctattttattttctctaaaaatatcactttgaaaaagaaaatactatatgtaatacacaaaatgatgtaatattagacctttctaagatttgtaaaccaattaaaatgatgttttaacttttattcaaaacatgagaaatattatgtggaaaaatatgaggggaaggattggtatgtctttgttgactttctagtattttcattttgggagcattagttgacttgctgttaataataaattatagttataattattttttttaagaagaataataataattattattataaatggtgttttgaaatatttttttattttttttattagaatattttttttatttttcaaaacacttttttaacttttttttttaagaaatgtcatcatcatccgaaggtttgatttttcttgaatttttatgaaatttaaggtaaaattcccttaacagtggaaacgcgtctttcttattgagaataccccacttaaaatcaattggtgggacaatattcacaacatttctacatcatggtcaaatgaattataaagtagcggacccagaatttaaagtgaggggggcataaataaatttaaaaagaaaatataaagtgtagttagtgggatttgaacctttaccctctaacctatttaccaacta

SEQ ID NO: 130820 - DNA, 712 bp, Cannabis sativa
ctctctctctctctctcttctcgagctccacagaaaccagtaagggtttggaaaatttcagcatgattctgagtaatttagcaggttttatgtgtatccaacttaagataaaatctctagcccttctcttttgttatttcttatgttttatgttaggctaaagcatgtttttctatggattaggtgttgtagagttgtttgtggttagtttctattttttgaggctatattagtgttatgcaagctgatctaggtggtttttgttgcttggtgtggtgtttgagaaaagcttatgtttaaaactcaaagctttactcttcaatggtatttttaaattctggtttgtatgttgtattttattgcttgatttctatctgttacggtgtaaataggtgttctagaagttattgtgaagtttggggttgaattgaggtgtgtagaaggtttgactgtttcttgcattgaaccggtcgaccggttcagtgggacctataggaactggaattcgggttggtccctaagaaccccatagaatcggttttcaggttagggagctggtttgctggttagggcagtttcgggaaccctaatttttcttgttttgtgatgtttagggtattgccatgttatccattaataggaaaacttttagtttgaattttaagtccccgaaaagttatttagcgtttcactcatcagttttacaaattat

SEQ ID NO: 130821 - DNA, 1505 bp, Cannabis sativa
  modified_base (136)..(136): a, c, t, g, unknown or other
  modified_base (611)..(616): a, c, t, g, unknown or other
tcctgcacagtagagcacccgtgagccaagcccaggaagacagtaaaaaaacaatatgaaatatattctcaatttaaataaatactgatgtcactgcatctactatctatttagcatagacctacgtgttgctctnacacgtctatttacaataagaccttagattggtttatctcgattttgatcacccagtctaacctaattacgatttacccgcataattatttatcttaacatgtatagcaatacattgcattcaaaatcatttaatcactagagtaataatcttagaccatataaccactcacttcagggtaataaccataatcttagtttctcacttaatcacaagcataatatcaaacatgagagccactgcacttaactctacgtgctaactactgtcttacatggtatcccaagtatgcggagattccaaatttctcgggtgttcctgagcaagcattggtagtcctagtcacacattcctaagatttcacaaatagggttaatcccaaaattcactttcaataatcacataattagcattccatttatagactaacatatagagttcaaaacaagctttcaaacgatataaagaacgtccnnnnnnagtcccgagtcaaaagttatggctaaaacaaaattggaaaaaataagtaaccactgccaaacctagtcgcggcgactgggtccagaacacccaaaaattgcatttttaacgcctaaaaatgcccaaacacaaacctaacttcacctaagtcatacacaagcaaaaaccatgctaaaccaatgtattttcaggcattagaatcgcagaatataagctcatacataaaagcatgatccaaatatcaatacaaattctcaattacacatgcttgaacacaagcttcaaaccaactaaaaatactcaaaaattagagcataatcccataaattcaatccataatttcaaccctaaaatcacttaaaaccatctagatgcaatctttatagtcccattagcttagatacacaaataattaccagtataccttaaaattacaacaacatgcatcatcaattcaataacatcacaaacaacaagtagtgaacttcaattaccagaatttaaacataatcaaagagggattagaagcttaccacaaacacaagcttcaagaaatgagatcacacaacaatccctcaccaaatccactccaatttaagcttgattttccaaaattgatttgaaaatgaaaaaggaaaatagagagaggggaaggttggctagggcaagaacaacccagaaataatttatcaatttgtaaaaatttcatttttattgaaaaaagtcatatatggtcaaatgaccaaaatacccttatagtcaaatataaccatatacacataagtaagggcaatgttgtcattcaaattacacatgtataattcaataaattcagatttctcatttaacatatcaatgccacaaataaatcccaaaaatatattttggg

SEQ ID NO: 130822 - DNA, 970 bp, Cannabis sativa
aagagaaaccacacataaggccacagttatatgcctccaagggcgtcacgagaccctagctgaggtcaaaagaggaagaaaaattggtttcccacattgagccttggccttggccagccagggttctaggtcttagtggtgggagacctagtctagtggccagccaggaaccctaattccaagcataggttagccagcctagggacacattccctatggtcgaccagaccccatgaaagccacttatggccggccagatctgaaatgaggcctccttggccggccaggatctgcatggattagaacacgtgttttttcaagaacacaaacatattatttttgtttttcatgacaaattctctcttcctcacttcctctctcacacgcttatactagcatcatctcaacacttgagttttatcattatttattcgtaccttgtattcctaagggtactatagcaaatcctacctatagtaatctggatagtattaacccttagtattaatacaactaaaagggaagtagattattacccgctatcacaagggggtcgtacctctataacgaacctgtgtctctattgtttttcattcttatttgtgcaaacacgtggcaagtattagatccatacgattctgttgtcggttgatcactttttgaggattactcttgagtttgtaaactttaaatataatgaggctacatttttttattctttcttatggttttgtggcatttgattaattttttgttatggtatttgttgattaaaaattatcaacactagtcatataagtgttactagaagtctaactagaaaaattaataaaaacacttaaaataaaaaggttatacatcagttttaaaaagttaagtatggtaacattcttaataaaagtgttgccaattataatacacataaaaaagtttagtaacactttaaaaaatatgtttacaatatatcatt

SEQ ID NO: 130823 - DNA, 650 bp, Cannabis sativa
  modified_base (291)..(295): a, c, t, g, unknown or other
gtttgggtcccggtctaggttcgggttcgaaagctagtatcggtttgggtttaggtctctttcaggttagagttcaagtcatggtctgggttttggtttgggtcaacttttcagtctaggtcattatcaggctccgggtgtgggttcgcgtcctgggtcttggtgtaggctgggttcgagtctgaagttccaatcccaatctgagtctaggttcagttttgggtctaagtccttggttctgatgccggtctaggttcgagtttggatctgggtccgggtctagctttgggnnnnnttctaggtgtgggtgattgagtttgggtcgtagtctgtgtccgggttcgtgtctaggtctggaccccaatctggaactaggtttgggtccaggatctcggtccagatttagtttcagcctttcgatctgagtctgggtcttgggccgagtccaggttcctatccatatccctatcaaggtccaagtatgtgttttggatcgggtcaaagatttaggtccaggtccggtttagttctcgtctgggtagacgaccgtgtcggggcccgagttccagtctcagtttgggtctgaggctaggtatgtgatcggttctaggtctgggtccgggtcatggtcacgatccttgtcttgttct

SEQ ID NO: 130824 - DNA, 720 bp, Cannabis sativa
ttttgtaaaaaaaaagcaaaagttagtataccatgtaaatttcccaaaaaaaaaaaaaaatagccaagcccaacttgaaacccaacctcacccccacccgaacccgtcccaacccacacttgaacccataaactcgtattctcgaatgggtgggttcagtttgcacttttcaatatcccaaaactcgatacccgaactcaaaaaaattgaacccggtcaaactcatccattgtgcacccctataaaacatctttcaaaattttcaaaaatataaaataatttacaacataaaaattaatatttaaaatttatttcatatccgtataaaataaaagagatatacattatttttagagggttaaattttttaaaattttgttggatgtatcaaacaattaaatatatataacccatagaaaagtagattataaatattttaagtactatattatttattatgaagattttttttcttgaaaacttaaacaaaaatactgaaagttcataaataagattggatttttatttaaaaaaattttcttaaaaaatagaataggaagatgagacatatatcgtaataattatgcaccacccccttaaaatagatacattgatacacccttgcctgttttagctcccgaaataattttttagtcaaatttttctcatggtcatgtacgttataattatttaagacatcttgtaaaattttaagaaatt

SEQ ID NO: 130825 - DNA, 871 bp, Cannabis sativa
  modified_base (27)..(30): a, c, t, g, unknown or other
  modified_base (820)..(823): a, c, t, g, unknown or other
atacataattatctagttagggttttnnnnatccatttcttaattccgggtattacaacaaccgtcccccaagggacgcgagaaggcttattttgcacgaacacctcaatcaaagacaacctgatttgagggaacatcagaacagaaggcaaaacccaattccaccagtggcaaataacaaccataatatcaatgggggacattagaataacatcccctaagctggccatggtgaggaaggacaagtgaataatcctaggctcaatgctttagaacaaattatacaacaattaatggtgaccaaaaccttactctccttgaatataggccttaccatatccgcaagggtttaagatgccaaccacaaccaagtacaatgggagtatagatccttgagtatacataagtgacttcaacacacttatgcgtgcgcaccaagtggttgatgacttgagatgtgtgttatttcctgtaacacttactggagcagccaagacttggttcaagaaatttaaaaggaactccattacctcatgggaccaactatcacctgacttcaagaaagaattttgtgccgccaaggccagaaaattagaatgttcctcccttgccaatgtgaagcaacaaccaggcgaaagcttaaagacctatatagaccgttttagtgtcgaggtcgctaaggccagagacgttgatggtagtggaagacttatggaactggggatcaaaaacactaagaaagggagcactaaccaccctctttataccatcttcatgttagaattgttttaccatgatcttagatttactaacaagtatnnnnttaacatcctaaatatgaacttccaaaacgatatgaaataaacacata

SEQ ID NO: 130826 - DNA, 1012 bp, Cannabis sativa
tataaatataacatgatactttcacacaagagtggtgaattttttacaaaccaaggcaaaaaactaggattcataaactagacaaaatacttgtgtaatacttaaagacttttttagtcaaataatattgactcgtcgactagagtttattaacatccaaaccacataaaaatcttcgtcatctttatattttatctatttctttatttttaattttacttaaatcagttttcaaatatatcagtaacattgttgttttaaatttaatttcgtctaaataaaaaaatatgttaggtaaaataaaaagttaagtaatttaatgataatgacataattaatatgtcatgactatttatttgataaaattagggattctccaatatgacatttgtcgtcaatttaagagagagtgtaaaagagagtgggatagagagtccccattagggctggacgtctttaccgggtttgacctgaacacagcaacccacttggacccgacccgtccaacttgaaaaatttaaagaaactcgttcaatttgagcgggtcggattcaatctagtacaccttttggacgggttttagatttgatttttcaagtgatcgagtttcgggtcagatccgaacccgctcatgaacccatttttcttttttttacactcttacataaactttaataataataatttatactttacatacattgaatctcaaatacaatattatttactattcctaaaaaaagttacataatacaatatatacacttttttttatgtattgaaagtttatatgcatgtatatattttttattaaatttaatgattttattatatatttatatataattaggtagtggttagattttgttatatgtttatatctattctatataaaatgtgttaattcttggtttaacgataatttttgaatttctaggttaactttaagaaaatatcttatttacttaatagaatatttttttattaattttataatataattatatatatt

SEQ ID NO: 130827 - DNA, 1072 bp, Cannabis sativa
agataaatatttaagtttatttttgtacggtaataatatacaagttatatttttagaactttcatataagtgttaaagtcaatgactacgtgacagtccctgattgatctaggtcactaaatttattttttatttaaaaattaatttaaatatactaataagaaagtaacacgtgaatgatgacttaatacttaaaaaatcaagtatctacagaagttacagaaatataacttaagtattattaccgtaaaaaattaaactttagtatttatctacaatagaaaaatattaaacttaagtatttatgcctcaaattactctttataatttatatactgcaatttattattttttaaatatgtatatatatttatatatttctcaattattttgttgagattcagtccctgagtgacatccatttaaaaaagttgggatgttttattatttttttagtcaccataacaaaaaataattaaataaaattaaacatatgattattgattgtaataatttatttgtattaattacatgcatgcatataccacaattagagattaataaagaagaaataaagacacattatataatattttcttttgttacagaaagaacccatatgaggagctagctatagagaattgagatcattttatatgaatatttatatttaattctagttgtaaataaatacttaataatatttaaattatatttttagaatttttgtaggtaccgttaagtatcaaatcaatagccacatgtcaataaatttatattaatttatgtcaataatttttaattggttcatgtcaataaatttatattaatttaaatattattattattaaaaattaaatttaaatatttatctgcaatcaaaaattaaattataaattagtgtatatatgaaatatatttaaagagtttgttgttgcatgtgatctgaactgtgttgtatgggagataaaaacgctgatgggtctttgattatatattcatttctcttattattattttctcatttttttttttgataacaattattattttctcattttattaattatta

SEQ ID NO: 130828 - DNA, 816 bp, Cannabis sativa
aacctggacaaaactataagtaggcgtactccatcaaggtccaatgtacgactcgtgtcacctagcccagtgccacatcacattgtgcaaaatttgggataacatttaccttccaagtcagtgtggaaacttatgctcggatggggacttctacgagttacactttgctcggagtggtggcacacgtctacaccaacgtgccatcctagacatgacataaattctgcctaaggtatgcatatcccctcttgtattttcagtatcacaacattaaatgcagtaccatgaaatttgggcatgggagagtgtgtagacggttatggggagttgtgcaccgacagttttacaattataatgatggacctttattattttttggggggaaataaaaatttgaatccaatttaccaacttacctttcgagatttctataaaagaatcaagaaatctcattttcatcttttttagccatttgtaacctcaagaacgagaagcagaatatcttcaaaatttccaaattctccatctttgcttggaccatttcttcaagaagcttcattaggacatcgaacttagtgagtgagtctcttaccctcatttttttttaattttcatctataactgctctgtgacattattggatttatttgcttattcttcgtgattagattttagggtttctgtgtttttttgttcaaatgtgtgtaccccaaatgttgttcacaccaaaagtatatctaatgacgtggacatcaatatttgacatgtggtaagaaagaaaacatcccagagttgagtagtctcgagtcataatag

SEQ ID NO: 130829 - DNA, 1322 bp, Cannabis sativa
  modified_base (213)..(222): a, c, t, g, unknown or other
  modified_base (1050)..(1057): a, c, t, g, unknown or other
ttttttcattattttaatgctatttaaatctaacctaaccctaagtggtttcctataaatagacagtgatggctaaaggaaaaagatgatgcatctcattccttctaaaaaaatttaagcctccttcacttagcctattcgaaaccctatctctctcttcctctcttcaaaaccgaaaccacatagtgtaaagagtgagtgcccacacacatnnnnnnnnnntcaatcatagtgtgtaaggttgtgaagaatccaattttaagagaaggagattcagactcagatcttggtgataccctgctacagaaaggatacaaggattagagttctgagtggaaggagatattatattccgctgcaaccaatgtaaggttcctgatactttatatgtgtttatttcatatcgtttttagaagttcatgtttaggatgttaataacatacttgttagtaaatctaaatcctgataaaataattccaatatctttccaactagtgatgttcatcttttgatatggtgcatcacagatgtcgaagaaaggggtgaaataacattccttattgcaaaatgaaacatatacaaagaaactacactatcaccaagaccacaggtatgatcttttttttcttctttcccgatactctaatcacataaactttttatttgttgttgtcccttcgcataactaaacaagtacatttttttggaagaactttactataatgggcgatgcattgtttttctggagcatgaagcctgatgtgctctagcgtttgaaaaataatcaagctttttgaaattgcagtaatgctttcgtcattgaaagaaataaaaatttagagtttgcattgtatgaaaaacaaaattctgtatcttttgaaaaaagatgacttatttgaatttgttggaattattataatggactaatataatcataggtttaattccataatacacaatcattaactatgtgcctaatattgctaataaccataatgggatggttaacaacttaattatgtgttagaagcacatgagagcacccttaannnnnnnnttggcccattaaattatagtacaccataaaagacgccctaagccctattggttaagaatcccttagggttataagggtaataacatgtatatatatgtgtggaaaaagggatatatgggtttgtgtggtaaatgaaaaaagggttagctctataaagtgctctctagacttcttctcaaggatcttggtggtgattctctttgaagacattatgtgtggaaaaagggatatatggaactttgtgtggaaacttatataagcttga

SEQ ID NO: 130830 - DNA, 784 bp, Cannabis sativa
cgcccagctagtggatagaagtagactagagtgtggctcaaggaatcgattagggtttgcgtaacggtttggaatggggttgaggttggggcgtagaaatagataacatttgtgtaagttgtgtatccgatatgatcccattccgacaaggattgattccctttccaagttggttttgcaggactcaccattagcttttgctttattttcaactccattggatttggaataatgatagttaatatttgtgagaaaagcttattagggtatacgtatatttatattaatgatagttaatactacgtattcataaaatttgaaatagtcaactatatcagatgaaaaaaaaaatagagaagcgggtggtttgaatcataattttatatgtttaaactatcaaactttctttttgaaaaaaatatgtgaattgtattttattaattaagattaactaatgtatttacttaaaattttgtatcgtattaattatacggccataatttctaatacaatattaattgtattatttaaaacataaaaaattatttgtattagcttgtagtcttgtactataatatttagaaattgttcgagttgggtcgggcctaaggctggatttggagcacggtcgagattcaggatctggaaccaggattgatgagtttggtgtttggcttggggtcgaggtgagagcccaagtccgaatcaggtactattttatataattttaaaaaataaaggatctaattttattatttaacaaaacagatcaataatatctaat

SEQ ID NO: 130831 - DNA, 1176 bp, Cannabis sativa
  modified_base (102)..(104): a, c, t, g, unknown or other
ttttttttttttttgataacagaagtgaacattgaatgttaagtcatcatctacatgttatttttttacttagtgtgtttttaaactattttttttaaaaannnaaaaatttaataatttaaaccaattaaaatatgctacctaataatttatttaagaattaacacttaaatttaaatatttgtttgtaactaaaaattaaatttaactaattatgccacaaattattcttataattagaacgccaaatacggctgtcaccagtcaccacccctacattgtcctcaatctgtgtgttttggactgaatgctctcttttccataacaacattatattttatttatattttttctatccttatcatcaatccacgtgtgaaacatagctagtgagtgagtgagtgagtgagtgggtttttggtctataatttgacattcatatattcaattaaaaagagcactatggatacgaagattttaagcttggattggagccgactgctttgactttgaccataataaacaaataattatacatttactgtacatcaaattatgaaatatgcacttttttctttcattctgaatggatgaatatacagtaaaagagagggagaaaaggggtcaaaattgttgtctatattttcgtacagagaagttcaaatattgttgtattaataatatggcatgacatgagatatacaaagttacgttaagtttggatatatgaaataaatgaaagtgtaattcaattatagatatgaatttcctttcaaaaaaaattatagatatgaattatgatattttaataaatatatattaaaatattttaatatatatgtatggttgtatgtccttctcaaaacatactcaaattgtgtctatcattcaccctcttcactcaagagagtagtgacttttaacttttccaattaggtaagtttatagtgtacctctaaaatagttattttagtagattttttttctcttttgatatttatgataattttaattttttttttttttttttttttgttatcacgtacattgcaattatgtaagagtatttgtaataggaaatttgaatttctatgcttgcattaggagataattttttccctaaactaaaaaataggggatattggtaaaataggataacattttcttaattcccac

SEQ ID NO: 130832 - DNA, 825 bp, Cannabis sativa
aatcagtaggccatgtgatcaaagacatcaaataattgatgtgtggttagttaggatcaaatcaaactaatatctctaaattaatacgtataaatatagttcaatttattctcttcattcaggtaataggctgctacagtgaaaaaatttctcttatattaaaagtcaccgtacaaagaataaattttgtttattttcaatatcgtaattcaaattttaatctaataaatctgtaaaaatatcttttggtatattattggtattttttaaaaaaagaaaaataaataaatctctgcaattcaaatttaaattaattacagtgaaaaaaaaaatatatctttttattattattttttgacgcgtattattttattttttaattaaactatcattctatattatttttctttaaaaaaaacaataaatttattgttgtatatattctgcacataaaacagtacatagcattaagaaaaatgagatttggaaaatataaatttagctcagattgttgcaatttatatacaatttatatatacaatataaaaagataactttttagtcacgacataaattttttgtgactaaatttaacttttaatcacaaaaaatgtgttgtgactaaaatatagtatttagatacaagttgtcattaatttaattactgtgactaaaaacacatttagtcataatacaaattgtattttttgtaactaatacattttgtcacagatcttttaatcacaacataaaaataataatttataattagtcacaactttttcatttgggaaatttgaattttcatgcttaataaactcataa

SEQ ID NO: 130833 - DNA, 532 bp, Cannabis sativa
cagcaccgcacgtcgtcccttccctgcagtcacagtcgcacttctagccctattcatcgtcgccttcctctctctttggcgtgcaaacccagcagcgaacccaacagctcttcttcgtcccctttctctcttattctcagctggtatgttgtttccctactactttttcttcaaattgttaaagctgttgcaattgccgtggttaaagcttccacaagactcgtgctgtgttccaaaaccttaaaagttgactgaagaaatgctacataagttattttagtgagctaattagatgtgatagatctaataatattaaccattgtacaattcaagtctctcatgttatagctatactatatttttccataacacagatgttaagaaaattattcttgacaaatatcgaacacataacctttgacttctgatttctgatgcaaaatcaacattacagagattggttcacactttgactttcaaatgagactacaagagtttattttgtatttattcaattactagtcacatccca

SEQ ID NO: 130834 - DNA, 536 bp, Cannabis sativa
cttgtaaaataatttccaacaatcattccatgtggtacattatacttttcttaccttaagtttcagtacatgtatgttggccaacctacttggagaacgatcaacgatcccgagccctatttcataacaacaaaacaccgattaaccaagcaatctaaccttattctaggtccaaaagtttattcccaagggtcccccataggtcaataaggtatccctactttcaatttcgggaaagtacacaaatcaggcttcaaaaacaccaacaaaagcaacctgccattttctctaggtttcttgatagaaaacgggtagtcgttttctcccaaatggcagaaaattttctgcaggaacgaaagttttaagttttgcattctctgaaacaccaccgaagcttatccgaatcattccaacttcacatggcacataaataccataaatacaataatccttacataacagaaattaaaatcgagcccttaaacagaaaacaccattaaagctcagactttatattttaaaagttcaaactcaaa

SEQ ID NO: 130835 - DNA, 675 bp, Cannabis sativa
ctctgcagcccattataatttttttgttacttattaggttgttcaatactgatttgaattatgattggtatttgcacatgatttttgtaaattgtgtaaactttgttcaaaaattttcatattaagttttatgttttgctataagactctactttttgatttttgattctttatcatttgtattttatgttctgtatgtaatattgttagcaaaaataaaaattaagtaaataatatttatcgtccattcatttaatttattttaatttttattaataaatatattattgaatattttagcctaaaaaattaaatatagctaaaataattaaataatattgagaatataaaaaaaattaaaaaatatatacagtgacgctccataagggtagttgttactgacaaagtttgactataaaagcttatcgtgacacacaataagagactctaacagggctaagtgacccacctgaagtgtcactaaatactgcttttccagtcacccgcattagtgacgcacagtgaagggtcactaaaatattttagagtcactcaatgtgggtcactgaatcccctttttgtagtagtgaccgaggcaggtgaaggaataagagactcatcaaaacatgtagcaggcgcagaggatgtgacagaatataccaacaaatcatcatc

SEQ ID NO: 130836 - DNA, 672 bp, Cannabis sativa
aaacataatactactgacgaaaaccttgtagttaaaactccttaatttaaacgataaaaataggaataaaatattttatcttacgaaccatcgtacttattttttaaagtattagttcaaaaacacatattgacatattattttagtcaaaaaaatactaaaagacaccaattatacttaatactttcctacatattaatatctccaattaagtatttagttctatataatttaatgtaataatttttaaagaatattactagctaattataagaaaacatatttagaaaacattaggtaatgctggtactcaataacaatactatttttttagcttatttaatacgttgacataaaatggtatttatgtcaaaaaaaatataactgtaacaaaattataaaataaaatactttttctatcatatttttttattagaagagtttttagcggttaaattctccaaataatcattttacttgtacttagtatcttaaattttctacggttatgtaatttaaagaattttattagtaaaatttaagcttacaaattaaggacaagtaaaataataaataagagaattttgttataaatatcaataattatgtggatgtccaaatcttttatttattaccatgaattgtaatgaacattcctcttttccttagttt

SEQ ID NO: 130837 - DNA, 832 bp, Cannabis sativa
gaaggcccctctattcctatcctttttgactaaagtagcaaattttttaataagaataaaatttggaatgttctagaccaagtatttttaaaataacaactatggttgaacacttccatcttaggtttttggctttttggaaaggaaaaaaaatatattaattgtatataatttaattattataattaagtagattagaaaaagtaaaccggcctcacttgccaatgtaaacatcaacgataattaatgaccataatgaattaaagttttttttaagagtaatttgcggcaaaattctttaattatcaatttatttgcaaaaaaaccatccaatctcatattttgatagtaaaattctctaaaatactgttccgtttacatttttaagatgtcgtctgtccagcctcattaagtcttaattttgcccacgtgacaataaaaggtcactaaaaaattatcttacgtggcaatattttataaaataaaaataaaaaatttaagagtaatttgcgggaaaactccctccaactatcaatttacttataaaaaaccatataaccttaaagttttttggatgattttttacaagtaaattgatagttgggggggagggtttgctgtaaattactcttaaagtttttattttattttgtaaaatatgaccacataggataattttttaatgacctgtcattgccaaatgggcaaaattagaacttaacgagacttggacagacggcaccttaaaaatgtaaacggaactttggagaatttttccactaaaatatgaggttggatggtttgcaagtaaattaatagttagagaaatttt

SEQ ID NO: 130838 - DNA, 577 bp, Cannabis sativa
tttatctttacattttatgccttgtatcttatgcttgaccttaatatgtttgtttatttgtgttttatttcacaatctaaacatttatattttgatccaacttaggatactttaggaagtatttccattttttctgtttttctttgatacattaaagtagttgttagtctactatgtatatgcgcgagcagttataatctgcatgtagttttaatccgcaagcagttttcgtctgcctttttttatccgagcagatttagtttgcctaacattatgcaagcagtttttatctactgtatatggacatatttcttttagagcaagcttaaaaatactttgaatagttcaccttaagaactattttgtatatcttttgattgcttatatgaatagttaggtcttctgttagcacagattttcgttaacaataataagcctatttcgtgatagggtcatcacagaaattagttgaaatctaagaaagaataataaagcaaaaagaacactaagttttacgtggttttgcagttaactctgcatagttacgagtcaatcttattcatatttttctgataca

SEQ ID NO: 130839 - DNA, 998 bp, Cannabis sativa
  modified_base (951)..(953): a, c, t, g, unknown or other
ttagagttgagagctaaggacttacaggcttcaatgagacttaaagtgacttaggtttctaaggttgagttaaggtcctttatataggagagcataaaccctaattagtagattaaatcatagatatttacatattaaattaataaatacaaatgaccgaatttccccttaaaagtagatattttcataacctcttagtgggctatcaaggcccaactcgcagcttggcttgctgtccgcaggtgaaggtcgcgcatcaatgtcttgccagggagaagctagatagccatacacctatagtatgaggtctgaccgaccatgctatgtgtacaggttgaggtctggctgaccatgctcctgctaggatctagcagatcatgtgcctgctagaatcttacaggtcatgttcctaccagccctaccaagaggaggccagcctttggcaagtggatgccagctttgtacaccttttccttgtagaggtcaggttcccttggtcaaacagaagcacccttggtctgaaagtcaccttttggccgcccaacttatgcctagaaccaggctggccatataagctgttcctggccgacctatagacttcccttggctatccagacatgctggtatagatcctggccggcctatagacttcgcttgctgcttgacggttttgccataccttgtatggagaccttttcttgctgttagcaaggttgtgtttcacatgtactctgtcttggcttacatggacatgccacgtcaagtggaccaaatttgggatagcatgaacgcttctcgaaattcaagattgttgattgaggagagaataatttttcccatttaatttaatgtcataaaaaaacaatatcaaatttaaagtgtcacaaaatattttaaaaaaaaatcactttgttgacctcgcttttagccaacaacagtgagtctaatttnnnaagcgacaagtagtttataacgattgatatatgataaagtaatat

SEQ ID NO: 130840 - DNA, 863 bp, Cannabis sativa
aaaataatattaaaacgatataaaaaaacaatatataaataataaaaaattgataataaaataataaaatacaatataaaaatacataaaaaaaattatattttatgtaaataaaattggtaaaaaaatattaaaatcttaatagaatatttttgtaattatttattgatattttcataaataatccaagaaaattacaaagtacggaactataatttttttattattatttttacaggttttttttttatgttctactgtgtattatgctgtaagctgtgcacacatattcatgttgatttcatacggctatgtaaaaatataagtaaaaaaagacgttagaaagtaaaatatagtctgtaaaaaaatgccattttttgtgtaaaatttctttttgattcttgaaaaaaaaatatatttttacgatttttgtattctatttttacaatttatagtaaaagtaattaactactgtaatggtgttcataaaatattcaaatctaatctgcacgatctaatctaatctgcaaagtatggtatttatacttgtgcgcaggagtggactcacatagaagcgatgcgggacagtcggccccctaaaaaaaattatgtgtttaagttagttacgacatgtatttataataaaagatgatatttatagatataatattaattttagtgtaatagttaagttatattgcatataagttggaagtcaagggttcaaatcttacaaaagaacatttgcttttgcctattaccaattagcagtaaccgatccaatccacatatatttatgtaaatttttaaaaaatttatatatacagttaatatattttgggggcttttttatttttacactt

SEQ ID NO: 130841 - DNA, 681 bp, Cannabis sativa
tacatccaagcatggtagtgtgtgtaccaccaccacttgtttaccaaaaaaatattacagacttatacttgtaaaggaacgagctttgagcgacacgtggcccatacttttaaacgttgaacctttgcgtgacacgtgtccgagtggtacaaaatggttcccattatccagatgttgcacgcacggacataatgcttcccacgggatcattcagtcagctctaatattgcatgtaatttaccccaatagtgggatttgagcagataccttaggcaggtcatgggcctctccatacccgccacttagcctttaaattccccttaattctcatacgaaaggtacaacacaacttacatagctaaaactctgccaatattgctttaggtcttcttttccaagagaaacttagagtagagagttaaagtttcctacaaaatatcgtaaacaccaatacgacccttagaggctaatataataatttgtggactaagatttattaacactttaaccacgtaaaaaatcatctctttatttctgtaagttattatttttttagctcttaaatatttagtttccaaaaatcttgataaacggtttaacatgtcgtattgcattgcattatgtttgattgtattgtatttgtcttatttaatacaatactatatttaatattgacttgta

SEQ ID NO: 130842 - DNA, 662 bp, Cannabis sativa
atgtaaacaatcttctaagcaactatcccttcgtaatcgtccatgcaatgttacagcctcacgatatgttactaccaaaatgccaccaactgtcctgatatcttcgaatgacaacgacccttttacatggtttagtagtatgcgcagaaaatatctctcaccttcaaatggatttgcagtaacaatacgccctataactgttttctttttccgaggagtccatttcttgtgttgacggttccaaacataatattctggaatttgcttgtacaataattgatttgcattttcatctactcgatttaacatgaagaactttgttagcatggatttttgtaatgtttagaattggcaacgctacttaggtcggcatttcctctgaatgtgactgggtgttgatcttgtagatgtaaatgcaaactgtacactgcggggttcatctcattaacaacaaaaccgtatatcctccacattgcttcggggacaacaatccaccagaccgtttggaattgatggatttcatctactacttcagtgttgttattagaaaccaaattaaatgcaacacgatcatggcccttatatatgtacttatagtgttatttgacagcttttacaatggaccaaatttcaacattaatgtgacagtcaaaggttgcaag

SEQ ID NO: 130843 - DNA, 1996 bp, Cannabis sativa
aagtgtttgacgatgctcgtctgcaatcgatatttttgtttatttttatgatttcttagaaccagtgattgaaatatctccatatggtcactacaaaacatataaggttaatcaagttattgtcaaatggaaagatgtctttaaaagcaactaaaaattgattaaaacatttatcgctcactctattttctgctttgatgttattaaatttaaccattcttggtaatcttagtattcgacaatcatcaaacaggggtttatttgcatcacttagaaaattatcgaatttttttaggatcattaagaaattcctcctatgcttcgtcaagcaagtccaatggatgatcatcgaaatcattactctcaacatcatctacccctgcttctctaatggatatgtatcatcagctaaatgtttatcatgccaataccaagtagtataacttcaattaagacatcgtaaatacacataatccttaatcatctattattacaacaatctacacatggacgatgaatacgtttgggatttctagaagtccttagggcaaactctataaatgcatcaaaccctacttaaaattgcagtactgtgtctctctcctcgtgtgtaataccctaggatttatggaatcggattagcaaccctaacttgtttaattatgtattaatgtggaattatattattatataatttaatatgtgaaactatactgataaattgttttaaagacctcgttaggtgtgggcattttttgtattttgaccagagaagggtaaaatcgtaattctaatgatatattgtgcttatgagctatattattatatagtatatttgttctatctatctgcacgtattctctaacaagccggcgcagtatagtcacatttgggtattttgggtcgaactaggttcggggcccaaaatgtatttttgggatttaattaatttgttaaggtggtaaatgagaaatttgaaatattgtgttatgtgtgtgatttatacgacaattttgcccttgatgtgtgcgtgtgtgattatattggccccaagggcattttggtcatttgaccacctattctattttcatcaaaagggaaaaaaattagatattattaattggaaaatcataatttctgggtttgaaccccataaccggccctttttctctctcttcctcatcttttccaatttcacccaactttgaagaaaaactaggaatttgtggtttgatcttgtttgcttgggagttttgagtatttgaggtagttattttgaattagttcttgattagtttctgaattaaaatacttattggtaatgcttgatggagttcttgaagatcttatgagttttgatgaatgttgataattgtgaagtaaaatatggtgatttcgtgtagttgagcttataggattagatgttattgtatctagactatttgtgtgagattttagggttgttaatgttgattaatttttggggttggtcttgaaactctgggattttctttgaagatttgaagttggttgttcaagcttgtgaactttgagtaattatagtatttttgctttagacttgaatttcttgttcttgtacttgatatggagctatgttttaagctttaaattcattgttgatgttgaattttgtttgcgagatattgaatttgatgatatgcagctttgttatggaatggaatggattttaggttgattttcgaagttattaaaaaatggcatttttaaggatacagggcccctcaccgcggccacggctaggctcatcgtggagagagcaacctgttgttgctcaccgcggccttgctcgccgctgcgaggccctacttgccctggggattttaaaattttatttttgccataacttctaacttaggactctatttgggacattctttatatcattgaaaagctcgttctgagctatatatgcttatctataaatgaaatgccaattatgtgattatataaaatt

SEQ ID NO: 130844 - DNA, 812 bp, Cannabis sativa
tttgtttttatttttctactaacgcttttgtccataatcaccttcctgtggaatcgaccgcccgatctatactacaaccaccgctagtggaaatcacatttgggcgttaaacaaatgcccagatttaaaaatctcaaccatcaccaccaaccctaaatttgaataactcaaacacccgcacacatagatcgaagtcacactgaaccaaaagaacaaatgaaaagagtaaatactgagttgctcaaaataataatcgaattggactatggtgatacttaaattcctacattctcccattgtttctcctaagtctttacaatttagattcactcccaattttcacaatgccaaaaatatttaaaggatcaagtatgaattttttttaaaaataatacttaaattcagtgccgaaatcttaatcgtaaaacaaacctaaaacagttgtataatccaaaaaactaaaaccaaatttaagttaatactatatttatataaattatatcataattttattcagaaatacttctctttgaaaaacaaattagaataatcatctaagtataaatagatcactaaaaaataaggagtattatattataaagggtgttgcgattaaacaacacaaactcaaacaagaataaagaataatgatcaaataattaacaaacaagttagcaataaaaccaaaagtcaatattgatagaaaaccagaaaattaagacagaaaacacaaaaaaaattattttggtttggatctcaatttgagcttgaaatttcgtattttaatatttccagtttaattatttaattaa

SEQ ID NO: 130845 - DNA, 777 bp, Cannabis sativa
agctcacaagagcagaagacaattgatgccattgttaagccaagtataccattcataggctcttttaatgcaactgtcatacaagcacaaatattagaaaaccttgtcgtttcatattgatatctattataatattttgttaatacatttagctcaaagttaagcaagaagttgctgtggtgtagtggttatcacgttagtcttacacactaaaggtccccagttcgatcctgggcagcaacattttttaattatcatttttatatcttaagaaacttttccatgtatttatctcttctccaatttctttttttaagctcttcaacctcatgacgctcacgctctgcaacggtatccctctctaacttgggcacaaaaacaggtataagcattgctatactcgtgggttcttcgtctcaattagtctcatactcagactcttctttctcgtcttcctctacttcttcctcatcctctgatgggagaagtggagcttcttcttgctccctttacgcaatctcttcttagagcatgtccaaagacacgacaaagctatcatgtatgctgtgatttcttccaaagagataacatttatggtagcgttttgaagatttctcgacattacacgacatatatgttgtgcgtagtcactacattgtttttaaaaaaaaaatatttaggtggcgtttggtaacacttttttaatccgttttttgtttttaaaagtagaaaagtgaaaatatttttcaaaaacacgttctataaaactgtttttac

SEQ ID NO: 130846 - DNA, 582 bp, Cannabis sativa
  modified_base (522)..(551): a, c, t, g, unknown or other
tttatataggaagccttaaaccctaggtttacaacctaaatcccttaaaaatatgatagtttgcaagttatttacataagacaaaaatgtccttagattctagatacttcttagcctgtctgttgggctttcatggcccaatttgcagcccatgccctggtccatgtgtagagttgttaatggagtcttgccttgtccatcttggccgcctataggcattcaaggaagtctgactagccatgctcttgccaggtcaatcctagccggccattgtcctgccaggaccttgcaggataaggcctacagggtctggcaggtcactataggtccaccaggagcaagctaacctttgagtttcgaggccatccttttacaagttgaggatagctttgtatattatttccttgaagaggtcaaattcccttggtcgaacggagtctccctatgttcggaagtcacttcttggccggctagcttattcaaagatctttgttatcctataggtgttggaaattattttannnnnnnnnnnnnnnnnnnnnnnnnnnnnnttattaacatcctaaataagaactttctaaa

SEQ ID NO: 130847 - DNA, 576 bp, Cannabis sativa
ttttttaaaaaaaaaaaactcaaattttcagtaaactaacatacatttaataatgtggctattattatttttattttattagtaactatttttatttttattttcaaataggagcttaagtagtgaaggcctaaaacggtcgcatataataatactaaaataatttgcaccatttttaaatgggagccttaagtagtggaggcctaaatcggtcgcatatagtaattctaaaataatttgcacacgtccaagtctttcaacaagtatactaatacattttacaaaaaagacataaaaaaactagtatactcatacatgctaaaaaaagagtatagtcatgaatgaaatatcacacgtttgatcacccttattaacaataagctaaatattatttaactaaattctatttattaataacttgagcttgtacgtgttatatgtaaatgtcatcccaaagtacacgtgaagaccactactgtaatgaccgctttagtaatttggattagtaaaagcaattagcactaatttttattattttattattatttatgaattaatttaattgtggaccccaat

SEQ ID NO: 130848 - DNA, 693 bp, Cannabis sativa
aaaaaaaaaaaaaaaacttaaattaattttaagaaaattaatcttaacatttttaaaaattttcttaacatttttattttaattttcttaaattaatttcatatattttttattttaatttttttgtcttaatatttgaactatattttatttttattgtatatgtatatatacttatagtgtatataacttctaaaacaaaaagtatgagtatcatcacttcaataagtaatactaccgacacacactagaatgactctaattattacctcattattcattattcttcaataaatataaattagtcattgatacataatatagaaaaagattgaaactttttaggtgcactttgttaacactttttttaattttttttttctttttgtttttagagttaaaaaattgaatatttttaaaaacataatctataaaattatttttactttttcaattttttaattgaaaatttgaaaaaccaaaaaaagtcactttcattattttttaaacaaatttttttaatcaaacccaaactcgatcctggccttgatgccgaacctagcacccgactcggacccacgcccggtcccgaactcagacccgattttaataaaattaaaatataaaataaaaataaactttacagaacacaattttttttctgtttttaaaattgaaatacaaaagtggtta

SEQ ID NO: 130849 - DNA, 1343 bp, Cannabis sativa
gaggatgacagccacattagcactcgaattgctggaaccatgtaagtaaattttacaaaaattcaatatcttattgtacattaatgatcaaaaaggtatataatttaaccttgaaacatttatttgaatgatgtgtcagaggatacatggctccagaatatgcattatggggttatttgactgaaaaggcagatgtttatagctttggtgtagttgctttagaaattgttagtgggaagagcaatacaaactacaaacctgaaaatgaatgtgtttgtcttcttgattatgtaaggagaatgtatcttacgttacttctttaatatattaaatttttatgaatatttggtggggtgttcttgaatatagttcattcatttacaggcattcgctttgcaacgaaaggaagacttactggtgctaatagatccgaatttggagagtaattttaacaaggaagaggctgaaagagttcttaaactggctcttttatgcaccaatgcatctccaacgctaaggcctacaatgtcagaagtggttggtatgcttgaggaacaaactgctattactaatgtggtttctgatcctgatatatttcgtgttgatttggaaagtgacttgagatttaaatcactcaaaaactactatcaacaagttcaaaggaagaattcttctgaaatccaaggttctagttctttcaaccaaagatttagtgaaccttctacaagtagttctgctcatgatctctaccaagtcaatcctgcatccttatctcttcatgatctatatgaaatcaatcctgattccatgaacaacagtgacatttcttctttggtttcgggtcatagttcatcagcttggcattagggcccgtttggttggtggtaatgggccagaaaggaatggaatggaatactaatggacctgatgcttttgtttggttggaaaataacaattttggaaaagaattccatagtaatgctattcccccaaactaatggaattgcttttccatttttcatttggtggaattataattccattccactactttggcatatcaacaaattatctctcttctcctccagccatgggccaagcccaacaaaccctaaccctagcaaactgaagattaatctgccgccagccattgttgtgactgtcttcttcgattatctctgcaagtgccgggttccttgattggtggtagcgttgccagaggtgattctctctctctctggtttggtgattctgaatctgttcttgttgttttgtgtatgaatgtgtgaatctgttctgaatcattctcatcctcttcgctccttagagcttctaaggctacc

SEQ ID NO: 130850 - DNA, 704 bp, Cannabis sativa
  modified_base (37)..(49): a, c, t, g, unknown or other
taacaaaatacagggtccaatctgtaacttttgcaannnnnnnnnnnnnaaatagtatttacccaaatataatacatattaatctttcagtaatatataatataactccttttcaaaaaaataataataataaaacctaataacattttgccattagacacttgagtaaagggattagacttatagttatcaacaccaataaaatgttcaaagttggtgtggattaatctaacaatttaatataatttaagatggatactatttacttgacatttatatgtaatttataaatgcacatattactttaaatcatatgtgagcttgagtgagttatttgatttctattttatatcactaaaattttactttaatattttctttattcatcctaaatatattatctctttttttttttaacataatcgaagatatatattaaaagaaactagatctgatggtcgttacacaatatgtatacattataaaaaattgtacctatccatccctgtatattataaaagagaagataataatttaaataaaaagtaataaattatattttacttatattcaaaggcctggttaggtgagaagaataatatcacctatcagacccgtctcaaactaattaggatcctaaaataatttaattgggttttttattagaataattacataagtcactattttttgtaaaatattta

SEQ ID NO: 130851 - DNA, 900 bp, Cannabis sativa
  modified_base (843)..(856): a, c, t, g, unknown or other
ctatttagttataacctcccaattagaatataatttacttggtcccaagtgtattcttggatagaggttctactgtacttttaaattttaattacattcaattcttattatctcttggctttccaaacaggcctattcattacacagttggttgtttggatttggaataccttagaaaacaaatcttgtcctttaaccacattcaaatttacctaaaactatctcgtaattacctagaatccaaatttgaccaaacactgatttcattcaaatcacactctagtaaatataaggaaattacattttgtattcactttttattttttatttattattcttatatatgttagggattctaatttttataaattatatgagattatatttaatactttgattataagtaaatattatcaattaaaattatgttgtaattatatttagtttagatgtaatataaaatgataattattaacttatcccaataaatatctacaatatattaaaaaaacttaatctgttaaaattttatgaattcgaatttcggcccaagccttgtactgaattcgaagtgggccttatcaccaattgtaaatcattctcctataatgtcatacttccctgtaatttgcaaaaataccatattacacttatacttggaaaaatatcaggcacatgcaatcatctctttttcactaaactaaacacataaatataaataaattagatctggtgttatagttttttaagtgagtttttgatactgtaaattatttaaaattttacaaaaattagtgtgatgtccaaaataactattaagggtgttcatccgatccaatccgnnnnnnnnnnnnnnaacaacatccaatccgcactaagtgcggatttcatattttggat

SEQ ID NO: 130852 - DNA, 690 bp, Cannabis sativa
aatagtaaataatatttattatcattcttgtatttaagctatttttcctattttatttgtgcgttaaatattttacaataagaggatatgatcagtcccgttttagttaagattttatatatttttttgatgaaaatacctttttaaattttttaaatatcattataaaaaaatagaacgtaaataaattaggaatcatgagcttccttcttacgtacattctccaaaacaaggctgatatgagatgatggatttgaacgtacttaaatatgagtttgggctaaaagaaacgtatgggcttgggctttatggatccaaaggcttaattggttatgttcctaatccaaggatacatgcattttttttttttttgataaagtttctaaatttgttttcatatataaagtgttttaattttatcacaaaatattaaattttaaatggcatttttgtagtgtataaacttttggaaaattctaaagggtgtatattaccctacttatatttaaatattaaatattaaatatttttttataataaattattttaaattttgtatgaattttgtgaaatctataacctctataaaaataagaatagttttgggctttccactaagtaaattacacaactagcctttactagatattaaaatacaagaaaaaaattcattattttgataaccacaaa

SEQ ID NO: 130853 - DNA, 1192 bp, Cannabis sativa
ggcgaagccacctaggatcgagtcaacttgtttgtttctgttgtatgttgctgatgtggatatttatgtgtataagggactggttataagtggaatttactcaacagtattaacaattagccccctgaattttttttttttacaatttgctcccaattgcttcctctgtcactgccttagacacaaaagtaactgagctcggcaactttcttgaacaaatcggagcggcgtttcgagaaggtgacttgtttgtagctcttcttttccaatttctttatttctatcttttgtcttccttagtggttctttactagtattattattagttggagtttttgtatcttccatgcaagccattattgaatattgaagaagaataagaagtgactttgttatataatgaattgattttattattttattcatttgtacaatcacaataaatttaggttgcccattaatttatgtctaattgaattttttaaaaaattataatttatttcttactaattattaaaatgttgttatgaatagatatatattatttatattaaacaaaaaaagagaaaaaataaaagtaaatgatggattgtaaaaagttgaaatctatacacacagataatttttctttttatatctatatataaaattcagacggctattactactaattacacaatttaaccttctaaaatagttatattaaaataaaaaaaaggcgctttttaaattaattttatgtaatttcggctctaatcaaataattatggtaatagttttggtacgtagctagtaactatacgaaagtttttctagtaaattaatatttataataggaagtttcaataactatacaatgtaaaattattttccttaaattataagtatgtaattatatcccagacaaatatactaattaaattgtttaattaattagtacctctaattacataacattccaaactcaccgaaaaaaataaatttagaacataaaaatgtaagtgattacatacagcattattagagtgacataattacgagttagacattttgattcattatttattggaaagaaaacttcaactgtgaagaggcatagtgtggaaattgatcctctaaaccaacttattatccaactcatttaaaccaactaacttaactaacattcggttatgttagttagttagttggt

SEQ ID NO: 130854 - DNA, 555 bp, Cannabis sativa
atccacataattattaatatttataacaataataactttctttttttttttcttctcacacaatagcttatttttgagtcataaaagtttcgtagttaagaaaaaaaaaagcattatcattcttttaaatgggctgctgtattctccctcctaggaatccaagatacacatcacagaacagagcctaactactatctagtcaatgaagaaaattaagagcgaaattccatgtaggtgaagctttgttaaagaaagcttgagtaggcacttggcaatccgaagagaactgcgttcaaatatctttattttattatatttgattgtaatccacttttcttaatacactgaaatacatcatcgtgtaattaaaattccagccccagccaaaataggatagattttagtgaaatgtcaacttttcttggctgttaaaggaaggaaataagaaaaagaaaatactgaaaatattcatgttatagtataagagaaacttacaaaaattgggttaatttttataaaaatattgtcacacggaaatcttttcaaaaataatgt

SEQ ID NO: 130855 - DNA, 624 bp, Cannabis sativa
  modified_base (41)..(52): a, c, t, g, unknown or other
ttgtcatttaacaaaacacagggtccaatctgtaacttttnnnnnnnnnnnngtccaaaatggtatttaccccaactttctattataatcactttagttaatttttactttcaaaaaattttaataattatattcgaaaaattttaaatataatttacagtagtgaaaataaaatttatagcatttcaatttatcacgagtattcaaaaaatttcaaatatatttttagtacggtaaatacttcgaaatttattaaaaatttatgagaataataatgttgtaattataacaaatacaatcatgataaacagaattgactaaggaattctaataaagttaacggtaaaacttctctaatacgagaattgctaattagttaatgtttctagtactataataagtattatctagtaacataaaaaaaattattaactactcataaaatctaatgtattatagaataatgataaaaattggattaaatataaatttagtttattttttaactaaatttaacataaattttatactatctactaaaaaaaagtgcaatataaaaatgggaatattgtggacaatgtcccacatggaataaatggtagagaattaagccatatataagaa

SEQ ID NO: 130856 - DNA, 1096 bp, Cannabis sativa
atttggtttggtattgctaccacagtttatcagactcttgagatcaggtttctagctcatagacaacttaggacacttagatttttagccaaaggttaaggcctttatataaaccctaggtttacaattcaaatccctaagaaatcgtatagttagttagatatttacaaaagaccaaaatacccttgattctagatattattcagctattgtgttgggcttttggggctgaattcgcatcccatctttgttatccacgtgtaggagtgtcctatggggcctgcagtgtaatcctttggccggccgagcccttgtactagccaagcttgtcggccatgatgctatccctgggctggccggctgttagccagctcctccagccagctcctgagagtgagctggtctgtcacttgattcttgtttgagtgtcgaggtctttgtttcctcggatgctgacttagccttccttttagtgagctgtattgccacgtggcacatgttctgtccacgtaagcatgtcacatgacgaggacgaaaattgagataacattgctgtaaatgatgaaattcaaaaaaggcaattatgggagaatttgattggtattactaggattacaagtcttccttggataattttgggtgacattaatgagatcttgagtatggaagaatggataggaggtaataaaaataacaaccttctgttttattgcaagaatgtgttgagaagtttcatatggaggatataaagttctcggacagcttcttcacttggagcaacaaataggatttggaaactagaatctatccaaagatggatagtcttagcttatcaaaagtggcttgacaagttcccaaatgcagaagtgtgcttcatggttcaaggaatgtttaaccacagcctaggcattcttacgctttaccttagataagcatgggcaggaaaccttttaggtacttcagaatgtggcagcaagactagggttgggcatccaattcaatgcaacatttttctcctcatctgatccagtccaattagtaattggatttgaaaacttaccatctgatctgatccaattagacctcaaaatccaat

SEQ ID NO: 130857 - DNA, 897 bp, Cannabis sativa
ttatagttgttaatttttttttttaaattaacattatttatatttacctataacttgatgacatgtcagtcatcctatttttgaaatcgcaatctttgtattccattcacatattcctaaataaatgaaacaattaaaaaatatattaatttataaattgaattgttaaaaaaagttatgattaattttaaacctttaactctctgctcttctctttccctgtggtatgccaaggtccttctttcttctcctcccatggcttcatcctcctctgctcgcatcgccatctttggcgacatcataactcactctcactttctctctcttatgtttttttcttctggctttagagatcaagtttctctttgtctctgttatgatcaaaagctatgggttcccaagctatagcatttgtgattgctatgaatatgatggaggtatttgaaaatgctttcctttatttcgagttttttttatttaagtggttgattttcgacagagttatctatatatgattcaagattttcttttgctctgtatcctaaagcttaacaaggtcaattggtttagattttttcgtaatgtcttagtttaactttcacaagccaaaagcttgagctatattccaatttgtttgatgataaggatttgaataaatttcttgcctgaatgattgaaccatctcagtgattggttgttagactgaaattaaaaacaatgaaattagaacgaattaccgatagaataatctggctgagtcgcggacaatgtcgctctctttaagacgtttcgcagctctccctgaagtgtgcacgacagtctagcaaccatggcgtccccaagataaaataacctctgtataagtacgatacgttctgcaccgaactgtatcgctct

SEQ ID NO: 130858 - DNA, 953 bp, Cannabis sativa
ggtaaaataattccaacattatcatcactaggaattacactagcctaggaagcagggaaacacccaactaaggcactgaaatggacgagatttgagaaaacagaatattcggggaacctgccaaaactggttaaccaattttacagcactagcaaaccggttaaccggtttgtacaagttttccctaaaaaatcccaaacttgctcaaaactcaaccaattgccaccaaactttcaagagtacctaaacagtgcatatacaacatataccaaccaataaatcctagaaaaacccactgaattcaaacatgccattagagaccaaaggtttagtttcaaaactcaaacattcacaaatccaacaccatacaataaaaccagctaccaaaacttagaatcaacctaaaatgaacataaaaactgatccataacctaatcaaaccctagcagccccaattctcacaaatcactagttgaaatcaattaaaaccttgagaaaaacatagtcaaagagtgtctagggcttaccttagtttcaagaacactttattcaaccttaatccttgttgaaaacacagaatttagcaacaagtcccctggttttttgctggttcaaagagagagaaagagaagagagtgttttccttaattttcctattttcttgatttttcctccaaatgaaaaaggattttctaactgatcctttgatgaaaaataacaaggctaggtgtcaacaccaaaggcaaccaccactcactcccttggcaaaagactgaaatgcccttggtgcttaattttagcctaattcaagcctaggggtaaaatagtcaaaaactataaccttgctcaatcgcgttattttattttttccaatacacatcccactaagaaataatgttctagacttacccatgtgatcaaactagccctccatcgcattttctgttgtcgcc

SEQ ID NO: 130859 - DNA, 556 bp, Cannabis sativa
  modified_base (499)..(507): a, c, t, g, unknown or other
attatttcgttgcaggtttttattcaattttttaggcagaagcagttgttttactaagaggtttgcagtgagcacgagatgtgggactaccagttgaaaggtttttccaaattcactatctctggtctcagctttggagagttggacactgtagaatgaattagggttattttttctaatattaaaattttattgtctagctttcttggatcatctctctcatgtcagctgcaactttaatgtagaggtttataaattggctaagcatgctcttagaataaacaatgaactttcttggatgaaaaaaacccacctcttgtgtaactttcgttacttttgttattttaacttttatcgattacaaaaaaataaaaataaaaaataatactgccaaaaccaagagaaattagcgtacctaaattcaggttctacatagcatagaaaaaactttatacggtaagagctcatatggtacgttatattaggtcgtattgtattnnnnnnnnntatattaaattggattatatatcatatttttatataatactatgttaaa

SEQ ID NO: 130860 - DNA, 738 bp, Cannabis sativa
tctctctctctctctcaaccgcgacgatctacaacgccaccacggccaccttctctctccccatcctctctcttcgttctcactctctcgtctgaacaacgagccacctccaccttctctctcttcgtcctcgctctctcgtccgaacggagatccaaacaagccacctcctcgttgccgtctcagcgaacctaggacccctcaaaatttataggttggagttagtgaatttctttattaattttcttgtaagttaaacacaaaccatttaatgaattggttttgtttagtaattgtttcacttattcttataaattagtatgtgaagagaaaatttaggtcagtgattattaatgagcattgttcaaaagttaataaaattaaaattaaaactatgttcaaattttctcttcattttgattttttttatgtgggattctgtttgttcccaagaagattagtgagaaaacgtaaactaatttgtttttattttaatttgtaatgagtcaaatatttgacttaaatttgagtttctcgtttgtttatagtctaaagaagtagaagaagaagaaaaataaatcaataataaagttttaattttttaattattaattatagtcgataatacaaaattgtcggcaatagcgatcgatcgtgatttaaaaccatcgataattcttcatttattgatgactgttgaccgaggttttcggcaactattaaaatataattataata

SEQ ID NO: 130861 - DNA, 803 bp, Cannabis sativa
atcatcaagcgctaccctaaaccaagctgaaaatacaagcactatagtctcatttgcaagctaaaacagaacataaaaaacatgacaaataaacattaatacacatctaatccacataatacttattacacacatgaataaattcaacaacaaaagtagacgcacaaagcaacaaacacaacagtagcaacacttaaacaacacactcatttcaggaacacaacacaataacagtcaaactaagctaattaactaaggagaaaagagatactccctcaacaatcagactctccaccaccagagtccctttctttatcatcaacggggcaccaaggctcaaggatttcctctgggaaagcggggaatgcagcgcctgttttaggctagttgcgacgaagagttcgcatcatccacgcatcttgctccctttcgtagttccagtgagaatgcagccgcttacacatatgcgactgccgctggaacatctgttgttgtaaagcctcatgcttggcccgccgctcatccattggatcccttaaagtagaggctgcagccgtggatgcagtggtgcgcttcggggcacgagcaggcctgaagctaactactccatttttggaatcggctcctcttcagacaacatcgatacaccagcgtatctacacatctcagtaatgaggcatgggaaaaacaatttcccttttacccaatgtgcacattcaaggatctctttagctatcaccttgccgacattaatcttcttgcctttcacgatgcaatatagcatccacatcctttcccgactc

SEQ ID NO: 130862 - DNA, 753 bp, Cannabis sativa
  modified_base (631)..(634): a, c, t, g, unknown or other
atgatttactttcatgtaatatggatttataacgatgaatattgtttatttgttgatttggatgtgttcatgttggtttatgtgttacttgatgattgttatatgatttacggaattttttcctgaaaataattttattttctttctaaaaatattttatttggaatccttgtgaaaaattaaccaattttggtttttacggttgtcggttctgataaaaattgagagagttatgatttttttgaaaatcgggttgaaggggtggcggggggtgcacgtcgcatgcaccagtcactcggacaaggtgctcatgcgcgtgtgtattcctctaacatctccctgtctgaaaccgtgtaaggcccacatgatgctgcttcacgtcgtacctcacactgcagctgaccgagatttttcggttaaggaggctgcaactcctccttccatgtgcacaaaggggctactagcagcctctcgatggctgcacgtggagccttgctggcagccacaccttaaacccgttttttgtgggatttttcatttttttttttttttgaattttcccgattttcaaaccctaattttaaaataaaatattatttttaatacatttaaacttaaatatcaattttannnnaataatatttaatttttaataaataatattaatttatgatattttgaggtttaaattttaaaaattgattattttattttttaaattatggttagatttttaaaaatttgttaatttct

SEQ ID NO: 130863 - DNA, 1447 bp, Cannabis sativa
aagattttacctacaaataacaataatgttccaacagtgattcaagcgctttgtggaaaggattttgtttacaaatcaagattgaatcattttaatttaaaagatggatatgagaactttactgtatctaaaatttttgtgccagatgatattggaacaagctcatgaatccaaaaagaggaaggtaatatttctatgcaaattctaattttgaattaaaaaaaaaactcaatacagtacatgttatatatgtaatttaagaaaataaattgctaattgtttttgtaggaaacaaatattgagaggaataaaaataattttaataaagtaactctattcacacttactatcttatatttattattaaaaaaattatagggaagttagttcaacacataattttcttttttattattaacatattaaaggatttgaaagatttggaagtttaagatgggaatgtctggtgaaagtagaaagagaaaatttcaaattgttgatgatgaaaaaaattagttcacatgtatttagtattgatttttgccttttggctatctttcattttgtgtggtttgaaagatttatttcttctaagttggttttggtccaagtttttagtacaaacaagtgtttgcgtggtggttgggcgtctatgccattttcgttgaatattgggttttttggctatgtgttttatagttgaatattgggctttttggttatttgtttctgtctattgttaatgtggatgttaaacctctagatcatttgaatttctaagtgttttatgttgaaattattttatgattgtctaacagtatttttattttattaatgtcttaattaaaatatattatgttttaaatacaagctttattattatcaaatttgaataatagaactaaaaaccattaggaattataaagtaaaaataaaattaattatttcaataataataataataataataatatcaatatggaaatcaataaaaataaaaatatatatatataagaaaaagaatgcttacaaaattctgtgtcacctttattgttcttatttctttccaaatctttcaatttattgtcttaatatttatgtttcatttttttatttgatttcttttatcttaatttattgtcttaatatttatgtttcatttattgtcttaatttattgttcttattttttaatattcgtcgtaatcttatttgaaagacaaaaaaagctttaataataattataaaattataattacatcctatataataataaaaacaaaatttaaggtttctaacttaactataagatattagtgagctgatgttgtatgcttaagagtcttattttctctaagggaaatttgaaattatatacttaataaacaataaaattggaccccgacataatttgtaaagtgggatacattttcctaaaacccaatttt

SEQ ID NO: 130864 - DNA, 587 bp, Cannabis sativa
atgagagtgatgttttcactcttcctgatatttttgatgactcccaccctactataaatcttctcctacgattgtttactattcgtccctttaaccatccctctctcatgaaaactctgtctcaaatgtggacctcccagtgtcgattctctgtagttgtttttgaacactctgagggtttgttccttgttacttttggttgtgaaggagacaaaaagaggatccttgataggcaaccttggcatttcgctcaaagccttactgtttttgcctctccagatcattcctttcccattactgctgaccttttgcactatatacctttctgggttcaagtgtatggaattccatttcgctgcaaatcctatgatcttgctaagcttatagcttcgggtttgggtgatcttattcaagttgatgaggatactattaatgagggcactgggccttatttgaggggtagatatcttcttgatgtcaataaatctattaggaggggcattaaaattcgcttccttaagatgggtagggaatttaccaagtggttggattttaaatatgagagactccctgatttttgcttttat

SEQ ID NO: 130865 - DNA, 690 bp, Cannabis sativa
caattcaatttcattacgtattatattactattatattattcttattctttaatgttttcttggattggaatttttatgaatattcccaatcgagcgtcatccttgatctaacttttaccttaaacccttaggatttttcttcactctccccttccaatcacactttggattcgatgggttatgcttttgtttgattcgcaaggggaagagcaacccacctagatcttaactttgtcctttttctttcttttttttttgtggggggtttttggaattgagtttcttagggtttagtttttcttttttgcttgtgttattgtgatgttgaaggtagtggcaatggcggcatcggcgctggtgggcatttgagtgagaggaattcgttatgttgttgtcgaagaaacaaggcataattcgcttctttttcaaggagatggctgctcttacaattcccagcgacgcttttttctacagaggatttcaaatcgacccctcctcttcttattcttcttcttcggagcaatctaacttcaccattccactttcgtcgcgttattatagtacttcttcgtctgtgagaggttgctttgattcagattctcttactaatcacaacaataatcgcaaccctcgtggtcgttcactccatactaatagtagtaaagccaacaatgggggtcgtctaagca

SEQ ID NO: 130866 - DNA, 1126 bp, Cannabis sativa
tggaattagaaaactgccatcttaatcgtcgattggaggaagtaaattggcgtaatgccaagttggagagtgaaataggtgcagtaaaggcagcgcaggaagatagtacccaaaatcaagctgaccttgggaaaagagattcttgaggcaaacctcatggctcgaagaccaaggggtagaggataacccagagatatatttagaacactcaggagatgcaacttgtgggaactgaggagaacctagagacacagcctgagatacgtggaacattagacgaaaattgccaacccactcttcaggctcaagagaatgaaactcgtgcaaatccttataggaagacaaaggtgaatcaaaccttgagtggaagggcaaggtttgaccacaattatgacaagagggatctacaaggacatccgaacctgaagaagcgtgacctccgtcaatgactcagttcaaggtaaaaggattcattccatttgcaaatgcatgagttggagaataagttcagagggcatcaagtcacgaaacccaggagacaactggggcatgatactataggaaaacctgatttggaggcctcgagattaaagaaaaaagatgattccaaaaggctactcaaggatgagaagcccaacacgtatattcctctttatgccaaatatagcgagctcaacgaaactcgggaaaaaatctacctcgcacatgtataagaagccatttttggcgagccaacacctatgaaatatgtgaggcgcaagagggatccaaataagcggtgtgaatatcatggtgatattggtcataccatggaagagtgtcatcaattgaaagatgagattgaaggtctcatatcgcaaggacaacttcaacgatatatgaaatggcaggaagatgcctatgatcagtttgatttgtccaataactcaagcgactgaagattataaccctcttccgtgagaagaagggaggctttggttatctcgagagggagcgggtaacaagaattcaaggggtagttactccgataaagtaattgtgtaaaagaattgcgacgtgagtagatatcggcccactgtggttgccatatcaagctgccacatggaaagctggacgttaaccagta

SEQ ID NO: 130867 - DNA, 2251 bp, Cannabis sativa
  modified_base (540)..(550): a, c, t, g, unknown or other
  modified_base (851)..(853): a, c, t, g, unknown or other
aaaaaatacgaaaaattataaatcctagagttacattttaattgaaatatcaataaaaaaatcgtacgaaatatatcattgatacaatattttaaatataaggagttttactgccaacttcttattacatcctccgtgaccgaaaatatatgccagaatatttttttttttatttttttatggcggtgtttgttatactcgctgtaaatttttgaataatttacagtgtcaaaaataagaatatgtggaactctattttcggcattgtatactattttcaaaaatttataggcatgatactgtaactaaaatgaataccgctataaaaaaattaaaaaaatatttcgacatgtgatttcgggcgtggaggttgattagtttagcacaattgtgttgtggggaaaagcaactgtagttgtgctgtagaaaaaagcagctgtagcacaactgtagaaaaaaaatctgagttaagtgtttggtaaattataaattttcaagtgctgcaagttgttaagattctataataataataataataannnnnnnnnnnataataataataatatattaatttatttcattaaaatcacaaatatatatataaaatatgttatatatttttttttattttttatatattattaattattatttttttgtataaatttttagtcatttgataaaaataatttttaatattattaattatatttatgtcaattgtaaaaaaaaatttagtttataagaaacttagattggtattgtttgttaataatataaatataaatataaatataaaatatttttaataacaaaataagaaatttgaaatttaaatattatttattttnnnattttttccttcaaaaaatattttcatttttttgtaatctgtaataaataattaaataaatttttagtaaaaaataatttattatagtgttttaatcaaaacaacttttttccaaaagttgagttctaagagcattatctttaatttagttgtagcttttccataaattcttcaataagtggttttttattaactgcttaccaaacacctttttgccacaactattttgagaagcagcttttagcttttccaaaagctgtgctaaactggccctaagaccatctctaatgagagatataaaaatagtgctatatttagcacaaaaagtagttttgtagtaaatttacacaaaattttagctttgtgctccaatgcacaattgtaaaattttaatgtaaaatttattatttaattaatgttttattttaaaaaataaaatttaataactttataatcaattttattattattttaatatgtatgactataaaaaaaaataatataaatatttcataatataatgtcaaagttaaatatactaataaaataataaaaatgacataaatgttaatgaaaaagtagtacatttattgtggtgtaaattttatattatagcaaatattttgccaaatttggcacacaattttttatgtgccaaatttacagcactttttagcacaccattgaagcatataatttttgttaaataagctatattttaactttcactttttatttacacgtttattggagataagaggttgtaataaaagattgtaattagcactcttcttcaaatatatcattcaaagaaaatttaaagataaaatcagtttgttagataaaaaaaaaagtgacaaaaattaaaaatctgaaatcaaaataagtcaatttagttaattatttgtcaaagctttttcatgcaataaattatgctagaactcggtaagaaagagatattcattacagagagaacttgcgatttaatatttaattgcggtttttggttaatcatagttcctagtcctaatccaaaaaaacgaaaaacttgtgatgataatttattttttttcggttaatgatatatatatctttttttttgaagaaaagcgtacgtgcgatagattgataaaatactgtcagacctcgcagtcattacaaagtatagtttcgggcaaagaggatagaggcactaggccgaacctctgatgagaaaacgcccacttagccacgttatgggccataaaattacattgtctactaacataatcaaacatacaaccaataaagaaaggcgaggtgattttacaaaaggacacgaagttatcaagctcccaccgggactccttcccattaagagcattgatcaccactctcgaatcactctccagaataaga

SEQ ID NO: 130868 - DNA, 661 bp, Cannabis sativa
  modified_base (555)..(561): a, c, t, g, unknown or other
gagagagagagagagagaagaggattagggtttcagacttaaagctctatggcttataataagacttagggttttaagattaagttaaggctcgttataaaggaaagcttaaatcttaattagcagtaaaataagagatatttatatattgaattaataaatacaaatgacaaaattgcttcttaaaagtagatattttcattgcaccttagtgggctatcaaggcctaactcatagcttggcttgttgtccacagatgaaggctacacattaatgtcctacaagggaaaatttggtcgaccatacaccgacatgatgcaggctggccggccatacaaggtatgcaagttaaggtctagccgaccatgctcttgccaacatctgacaggtcctatatttgctagggtctagctagtcatgttcctgccagtgtcgggcaggtcatgttcctacaagctttgtcaagagttggccaggtctttgcatgtgtttatttcattgttttagagaattcatatttaggttattaattctattggaattattttaccaggnnnnnnnatttactaacaagtatgttatttaacatcctaaatatgaacttcaaaaacgatatgaaataaacacatataaagtataagaaaccttatagtggttgcag

SEQ ID NO: 130869 - DNA, 853 bp, Cannabis sativa
taatggtttttccttctcaggtgatttcaggattggatcgcgcgcgaggaggatcgatgataacgtaatcggtggttttgagtttgtacacgtgatcgatgacaatgtgattcgtggttatgagtttgctggatctgaaatttttgttttccttttgattttatttttttaattattttttagggttagttttttagtttgtgttcatagttgtttatctctgaaattttagcagtatgtaattctaaagctaggcattcttacagcaggatttgtggtatattttgttgtcatttttttttgtctcctgtgcaacacaatttttctttatacaacatgttctcaactcattgagagagagagaggcaggagagagaaagagcaatattgttgacatatttagattttataaattgagttttctttaaaaaaaaaaatgaagttgatgtttataccttgcaataattaatttggaatttgaaatttttatttggttattttgaaattttgtcccaaccgaaataagcaaacaaaaaaacaaaatattgatatcattgaaaataaatatttttaatttcctcaaaaaacaaataaatatttttaaaaataaaaaaaataaaatcttatatcaaaaaaattattaaaatgaataaataaatatagtggctctttttgtgtgtcactatatctctaaaaatattaataataataataaaaaaagatatagtgacattttttgagtgtggctattacttttcaagtctgacaaaatttaactctataagcctatagtgacgcgcagaaagtgaatgtaaaagggttcagtgacacgtgtgaagtgtcactaaaaact

SEQ ID NO: 130870 - DNA, 1278 bp, Cannabis sativa
tcttgttggtggctggccgaccaaaggatggatagtgggggttgtagctaagcctgatatccttggctggccccccatgctgctatttactgagatttagttggtctcaccgttagacctttgaggcaaggtctgtcctccctctggaaagggaagatctaccctagtccctaaggggctaggtttgtcagcttgtcgatagacccttcctgatctatcaactaatcttccttaaagtagatctctaacgagattctgggctcttacaccagttcctgattgaagtgtcttatcaaattgctagcccctatgttgcggtgatctaacactgcttggctagatcgaaggatgtactcttggtcatccatccatctcacgaattcatctctgctgagcaaatacatcacaatcagtagtgtgtggttcttcaaggaattcgcatctctgctaagcaaatacatcacaattagcagcgcgtggttcttccattaggccgatctggcagacaacctctcaaagtctagctaactcgagattttctcccaagtccgcatgaggcttgccaatcgtaggtttgccaattcctggtcttgtctctccagtgcaatactggagataagatctggttgtttgtcctaggggctacgacccatgagtctttccttcagtgggaggagccaatggagggtcctcccttggaggaaggggcctgctattcagatccacttggatgtttgtatcagttgggccaaccgtagttgccaggcttgtggaacttgttgtagtgataagattgaccatatctacgtattcataggaattctagttgtcgctggaacatggacatcaggatctgcagtctgtgggtcttgagggagactcgaagatgcaaatagtgcaactggggctcttctcattttaacaatgttttttgatcatctacgatatcctcgctctcaattcaagtactaaattgttgaccacaaaaagtggccaatcgatggcgatgtcgtattaatctgatgtttgccacgtgttacacaataagaacaataaagtaaataagataaggatttttatagaggttcagcccccttaattagcggttaatgacctactccccttttggttgtattgatacatagagataatactattcagatcactataggtgggatccgatatagctctctataaggttataaagcatgggtgaagtaggcaaatctctaatgtgagagaggtatcgtgtaaaaccctaactagcataggcgtatt

SEQ ID NO: 130871 - DNA, 1614 bp, Cannabis sativa
  modified_base (1126)..(1136): a, c, t, g, unknown or other
actctcgcctaccgggacaacgttagattcttattttgatcgagtaaaaggttgctagaatggtgtctgttatacccaaatttcggttatcatttgaagagaggacatgtggcaaattaggaaggatatgaattaatgaatgtaatgataattacatttgaaaatggaatagctcattaatgcggtaataacagaatatgcttacaactcgctgactataacgtcttacgcgagatagaggtatacaaactattgtctcatacgctaacaagaaaccatgcgacaatggatgtgtaaggcaaggcatcaacctcgttacgcatcaagggttgtaagcgagatataattactgttaagacacttagcgtataatacacaatatacaaactaagtataatagtcggacaaactcgagcaactaatagcgaggcgtccctctcgctataggaaggcacattgcttgtattactggtactttcactaatcagcttcagacatctttcaatgagactcgcaatctcgtggatttagttctctcagataaaagctgacattctaatgtcgttggctattgaagttcaccttctcgccaaactcgcagaagcgacaaggcttacattatcaacctcggaaaagatgtgggaaaagctctagtatgctatcaaggttattgatagtgtgttcctatcaagacaacccaaaatgttatgattttcaacatacacgattaccttgaccgagtaaaagcggacccatcacagctatgtgatattcaaatattaaccgcatttattttacgtggaatgtaatcaaaccctacgattttaggggataattgttgtaaagatatcagtcaactatgtaattaactgcctgattatgtaattataaatagaggcaagttagactgaataagggacgaaaaattgataaggaaaaaggccctagaactgtataagaaatctaataagatttcgtggactatgcagaattttaactgcaaaactacgtaaaaaaaccttcgtgttcttatctgttttctgtgcaagtttatcaccatttagtctcaaatctgaataacgaaaatctgcgttaacaatgtccattttagatgagttgacaactnnnnnnnnnnnatgatatctttgactcttgcctacggggacactgtatcagtttgttggaaaccttggaaattattgatgtgcttgttttgtattttcacatgtctttgttacttgctaaatgataattttttaattgtgtatgaatttatatggaacctatgttgttttctgttattaattttgtagtataatttcgaatcttcattgttggtctaacttaatttgttgctttaataggacaaatcccaaaggattttcatccattggacaaacataatagtgttagatctcaacatataagtatttataaatgcaacaattagttgtacatccaaagatgacaacttagactagtatttacaatatgaaataatgaaaaagtttataaaataagaatgattttggttctcgcccaccgggacatagttggattcttattttaatcgaaattatcctttatttttcctcttagctttttcatttcgaa

SEQ ID NO: 130872 - DNA, 1220 bp, Cannabis sativa
aagtgacatttcttgtagtgcaaagatatacattgtttggatttcttttaataaaaaaatataataaaacctctatttaaaaatatacttagattaagcgaattacattctacttaagagattataactaaacagaggtatactagaaaaaaaatgaaaaactcaaaaaatatcaaatgtaaaaacaataacaataagtaaggggtaaataccattttggatctcgtattttgcaaaagttaccgactggacattttattttgttaaatgaaaatatatactatatatattttaaaatagtaataataagaccatgagttcaattttcgacaattttttttaaataaccaattgaaaaaattcctagcacgaactgatgtagaaaatgtaatcagttttgtcatgacacatctagattggactactattaagttttattttgataaaaaataagttcggtgtcttgtactattttgaaaatagcatccattttatcatttaacaaatagattattcaatcgataatttttgaaaaatacaaggtccaaaatagtatttatccataaaatattcttgatactactagattaatattacgtgcaatgcatgtatacttagttatattcttaatttttattttggctatatatttttagctgtataattagttttttttttatatgttatatttctataaacaatatttttttaattaaaaaatatttaatttaagtgttatttataaaaataaaatatataataatatttaaaaaatttattgttaattataatttagtttaactttaatacttttaattttatgctatttttcattcttttagaaatgtcatacacttttttttttgttaaaaacataatataaatatattttcttagtaactgcaataggtataatgatgttacaatattgatcctgtaagaaacataaataattttttattttattgttaagaaaaaataataataaaaaattatttttttaaatatgtagatagggtaaagaaaaataataatagagttttttttagatatgcatgtacaatgagtttaaaattgatcttgcacgttaaaaaaacactttatgttattatatggctacatttaagataatatagttatcataataaaattactttttagtaaatatatataatattaattatatatatgtaacaatttaaaataaaattattaatttt

SEQ ID NO: 130873 - DNA, 1530 bp, Cannabis sativa
  modified_base (1485)..(1487): a, c, t, g, unknown or other
ataaataaataaaaatataataaaataaaatttgaaaattatttaatcaagttgttctaaaataactaaatttccaacttacgtggagtggtatatgaaaaacgaaagacaaattatattgcagtatattgatattttaatatactacttcaatagtgtggtatattatttttatgtgaggtggtatatgaagaacgaaagacaaactatattacagtatagtcatattcgaatatattactttaataatgtggtatattatttttatgtgggtggtatatgaagaacgaaagacaaagttagatatttattgtaagttttgcatcaggtttgacatggaatacatatttaacattgcggtatattatttttcagaacaatgatatatcagttttacttttaggtatatgagtttttttatttaattcaatttatattccagtatattactttaatagtgcggtatattatttttatgtggggttatatatgaagaacgaaaaatagtatattacaatatattcatattcgagtatattactttaataatgtgatatattatttttgaggggtagtatatgaagaacgaaatataaagtatattatagtatattctatataactttaataatgtggtatattatttgtatgtgaggtggtatatgaagaatgaaagataaagtatattataatatattttgagtatattagtatatgaagaacgaaagggacaaaatgtgaaatagtaatttaagtttgaggtatagatctattttattggggtgtattctctttattttctatggtatatgaaaaaggaaaggaaaggaaaaaaaacttgtggaatattaaactaattttttggtatttttatttcccattatgatactatattaattattaaatgtgatatatctactttgaattgtggtatatatttttatataaataaaaaataaaaataaaaattagtatatgaattttatgaatattgagggacatagtaaaatataaacttattatctagtatattaatgtaaaagattggtatatctattttacatgtttagtatatcatgaagaaaactaaaaaaaaattaagtgaatcattaatattagttttatggtatattcatattgttgtaagatatatcatttttatgtgatatagtatatatggggtatgttgtttccatgtttaagattgtacatatatatattgatacgaaccacacaaacagttgtgatgaaacccgataccaattatggcagcctctaagaattctcgaaatttggatgtggaaccgcgacccaatgcttagttaagcatgaaccttggaataaaagaagatgccacaaacggtggtggaaatccgtttgataagtcaggttgaacgccacaaggaatactccttgataagttcgaatagttctgaaacaccctaacgtgattttaaacatactgtccagctcgttgctaatcannnaggttaatgaaaatcgtgattaattaaaattttgctatttaat

SEQ ID NO: 130874 - DNA, 766 bp, Cannabis sativa
gtaaaacatattccaacaagaacataccatgatttcttgccctccaaaccactctatcctgaaaagaaataggaattctgggaatggataccatttttctccctatctcttccccaaaaatctacaatacgagttcctcattccaattgtgtccaatagaaacatctgcaactgttctagcagtaaatctctgacttcttaacctgctcatggtatcggcaaattccattgggtttaaccaagggatccaaggttggcgccagaagtcaatgaattcactcgaagcaccaatggacatagatccagcacgaatcatgtctctagtgcctaggatactcttccacagggcagaatcgctgtctttggggcgaacactccaaaagttttcattacaacaatatttcttgagtagacagttaacccaaggtttatcaatcctgcaagctaaaaacaatcccaacttggccaagagagctttattaatgtcttcaaacctcctaagacccatgccacccgaagacttaggctgatagatatgatcccacgaatgaagagccatatatctatccttcgcaacacccccgatccaccagaatttcctaataattgcatccatttcacgacaaagtagtcactagaatattgtttgttgacatagcatagattggcattgaagcagaaaccgacttaatcaaagtaagtcaagtagctatatatatacacacacaaaatatcatatatatcaaaatgaaaatatcataattaa

SEQ ID NO: 130875 - DNA, 546 bp, Cannabis sativa
gcaattctaaaataaaataatagtcaagccatgtacttaacactctacttatctttttgaaagaacaagctcataaatctaactaaaccaaaatttgatgatatgatatgatagaatggggaccaaaaaaatcttgaagccgatttcagattcaagaggggtctgtaaatgggtcgaatacaaaccaaaagatatttgttgtgcctgcctgggtaattactcttttttcttttttacttgttttagatattttctatgaaaaagataattatatttcaatttaaacttaatatatcttaacgaaaaagaaacctattcctaatcaaatcagggtttttgtcctatatatatataactaactaagacattaaatgaaaatgaaagtgaagagtgaagactagtacgtggctaattacttaattactgatattatcgaagcaagcaattggaagaagcaagctggttctttcttctaccaatccaaatcacaacacacaacaaattaaccaaccatcaatggacactatgacttctgttcctggggtc

SEQ ID NO: 130876 - DNA, 1233 bp, Cannabis sativa
aaagagctcattcaactcaagcgtgaacctaagttgaagggagacaatagagccaagtagtatgcttaagaatattcagagcaggagaggccaaggaagaagaagaagacggcttccccaactgaccaagcaccagtggaaaacgctatcaggattagggaacctgatatgcctacttagccatccgttcttgtggagggaaaagggaaggccgtcctggtggaccatgaggaagactcttcaaacgacgatgtcccgtctatgcttgttcgggaaaatgctcctgcccgcgtggagggtatttttaacttgcacttacttctcttatattatgcttttatacattatatctacttctaactgcttcattttattcgtgcagaaatgtctcagaaggtactccaggccttgaaaaagagagtgggagacagctcgggccagtctcctccgaccaagaagtgtaaaggcggtgagactccgtccagagagaaggtgccagttgaagagatcattgacctttctgaggagcggcctgttgtagaccttctagtttagaaggtctcaaagtcaaagagttccaaaggggggagctcgaacgggtctgatcaggctaggaccccttcaacagccgtggcactgagcatggaggccaagagtggtaaagatatgctccagtattacttacaccgatcacttcctgaagtgagtgaccaactgtccggggcgaacaatgagctatctttggagctggtcctaggaggagtcttaaaggaagctactcaggtaactatctccttctttatcttattttcttttatgtagcttggactttaacattatttctgtactggtcaatgtgaagatggattatgcttactttcgagccaaattagcagctgctaagaaccttgccaccaccaacacactataaagggaggtggatgtggccaaaaaggaaactcaggatgtgagaaatgagctcggggaggtgaacaaaaagcttcttgttgctaacactagggttgaggagctgactaaggaaatgtaagagatgcctttgaccgagcaactggagacagataatgtctctttgtccaaggaggtcaatgagcttaaagacgagagggagagtctccacactcttctcacatagttagagggagatgtctagactaagcagatcagagaggaagagctcttgaaggaggtggaaagcctggagacagccaccca

SEQ ID NO: 130877 - DNA, 1389 bp, Cannabis sativa
cactcgggttccccaaaccccgtgcattccagctaatgattttcatgatgagttgcggggttgccttgcaacctccgcaatggagtcattggagaagctagaatcttcaaagtcagaaactagagtctcaatatcatcatctcgtgacaaaggagaagaagatgaaccttgagtgttacaacatcgtttgagtaacttccgcatagacaaagagtcattagcccatttgaaggtggaaagtggtggctggttttcttttgcagaagtaatatttggaggaaagtgggttgtattgtgctgtataggtaaggtgagagtggtggaatgggagtgagagttcatggagataggggtgagaactggagggtatgttgcaaaggtggaagagtggatatctggcacataaatatgcgtgaggtctgtgactggtaaactagccgaaacttgtgttttagaggcagaggaaagagtcacattgtgtgatttcggatggtcaacagatatcattttttgtttgcctttaacatcatggttcgaaggtaaaggctgactcatgggaaaggtagtagcaaccgatggagtagggtgagatggtaagaatctgctattggagacaaggtgaggggagtgcaagttgtaaagcgtatttggggatgaatgtggaaaagcttgtacagttggtgagggcagagtatgtgggacttgaggactgaaatcagaactagcagggataacaaaggggaatccagtagaggcagccgtgtgagaagtaagcaggggcatagtggaagatacagtattgttggctaaacttcttgggttaggatcagcagtagaagattcaccttggtaaagagtagacggttggggttgcgatcgtgaaaccaattgaggaatggatgaaacaagggctttgcgagcaagtcgggtaacaaaaggccaagcattggctttagaaaaatcagtgcgatatttatcataacccgttgttggaagtctagcgcccttcatccatggcccatattccaagtcatcatcattaccattgtccattctttccataaaagcaatacatttttcaaaaggatgtccaattaccccacattcaaagcaaaattcaggtagtctctcatatcgaaaatcaatccaaaaatcatccttgattcggggcaaactaatcattcgacctcttgggagtggcttgttaatcaaaatcttaactcggatacgaaggaagggaccccatccctcatcaagagattcctcatgaacatctacaaattcaccaattagatttcccaaagcctttgcaagagttttagacttgctgagaaacggtagacgatacacctgaacccaaaaacaactagaattgaaagtattgactga

SEQ ID NO: 130878 - DNA, 653 bp, Cannabis sativa
aaaaagagaataaagatgaagacaatgaagaaggaaaaaaagattttttttttttgaaaaatatatattttttaatttacaaatttttattttaaattatgttatttaattttttaattttttaaataattttttacgttgactaatagaattgtgacatgtgtacactttgttgacatagatgtacacatggacaatccaatatggtacttaacacttaaaatagatagaaactataaattacaaatgatttcctagttttgaggagttttactgccgaaatttaaattttgggagtttagtgcaatgaaagtgaaaattttataagttatgccacaatttaccttaataattataacattataagaaggcagtgttagagaatctatttcatgtgaatttgaatattatttataagattataaattgctcttttcacggtatcaagtatcagtggtatgttgttataggtgtaatttaatatcgggtcctaaatattttaatttaataaataatataaaaaactactaaccactcacaatgcgccacatcgatatagtgttaagcaccttaaggtggctcagagcatttccaatagggcaacatttatagttgccaaaatacatatatatatcatcctaaaatattttttt

SEQ ID NO: 130879 - DNA, 1211 bp, Cannabis sativa
tgtgtttttcgaaattttgaaaataggttcctcctccttttctccttttcttgctaatggaacattttcaagcttactttttactttttaggtttataattattattattattattattattataaaaatcaataaaaatatatttttaaatattataaactagggaactaaggtattcacaatttttgtaatctggtattagtggtatgaaatgtatatttcattagagttattaaatttagggctgtgctcaaagttatctgatccaattataattgattgataggggtgtgtaaaaagtgatctaatcattgatccaatcttaactgatccaatagaatggatatccaatcataattgcatcagattggatgtaaattttgaaaatccaattagatcgaatcaatagttggatgggacatctaatccaatgaataaccgagcaaaccgatctaattattatccaatcatcatctaattatatttaaataatttaaaatatatttataattttatttatttaatatattttatttgaaaatatatattaattgaattaatatataatttaacacatgagattaatgaaaaaaaatcttaaatctaaaatattaattctcatcttcctaaacgctaataaaattgaataaattttatttttagcagttttattatgagatcatgaaaattagattggactaaattaatgtttattatgtatgttggattattaagttttaaattatgtttttttatatattttttctttttaatgaaatcaacttaaatggtagctaaaatagattagatgaatccaatacattccaataaaaaatcagtcaatggatccaatccaatacattcattggatcggattgcattggatgactcaattcgattggattggatcgaatgacaaaattcagtaactaataaataatatgattggatcggttgggttgggtccaaatctattgaatgtgatccaatgaacacctctactgaccgactcaatctcaactgatccaatagaatcgaatatccaatcataattggaccggatcggatataaattttgaaaatccaatcggatcagaccagttgttggataggacatccggtcaatggataaccgatccaattatcatctaatggtcatctaattatatttatatataatttcaacatacatttataattttatatattt

SEQ ID NO: 130880 - DNA, 1143 bp, Cannabis sativa
aaacatataaatgataacatgaaccaaatgccacattaaataagtgatgaaaatacttctgctctttattgataattaaataataattaaataatagagattacattaatattaaattttatttagggcacaaagcccaacagtttcgtgtagctccctgaccctcaagatctcagggttgcaagatggattcaaacaagaagagcgtggagacttacaatatctacaacttcaaggttctgagacaagttcatcttgatatcagaatctctagcaaagatatgggaatcttaaacaatttcatcaatgaagaaagagaacaatacaaataatcaagaccctggccagacccctacctggtcggccaaggatgaagacccacacgttgggcagggccaactcacactttaagccctgaccgcctgaatgggctggggtttttttcatgggccttctagactacttcaagtcgtccccaacactcctacaaatttggaacagttcaagccacccatgaaaataggaattcttcaccgcaagtaacaaccctattttctagaattagtttgttatcttttttatatttcaaatcataagttgtaaaatcgtaacactatataaaggaccttaaccctatgtaaaaatggacattctttcattgattcttcacacacacttaagagctcagaagcactaaggcatttgactctcttttctcctcgtcacttcacaagtcttctcatacttcttatatgtaacacatattctcatcatcttgtaacactgaagagagccatagcaagaaattacaaggttataacctgtaatttgcatgatattatctcaagagtaaatacaacaaaaaaaggagaaggtcattaactgatcaaagaagccgaacctctacaaatttatgtgttctttacatttattatcattccgtacatggcagtcataagaaaaatttaatcctaatcagactctgcctcaattggctaaattcacagtcaatattttggtgctttcattgagagcccaaaattcttattcgaaaagctctcatctcatattttttcactactagaaaaatgagttttagtgactcatgttgagtgactgcaaatctatttagtgacacttcac

SEQ ID NO: 130881 - DNA, 593 bp, Cannabis sativa
  modified_base (39)..(61): a, c, t, g, unknown or other
  modified_base (538)..(559): a, c, t, g, unknown or other
aatgttatttctgacctatattaataagtaaatctgatnnnnnnnnnnnnnnnnnnnnnnngggcataaaacccaacagaatgacctttatttagaggtaattctacagttattcttttttaatactttaagtgcaaaatcagtatgtcacttccaaattgttaagttatttagttgttgttttaatataaaattaaattaaaaatagtttaaaatctaataacaattataaaattaaacataagtcaactatttttcttatttatcctttctcatccggttcaaaaaaatatttgaaataagtgagataaatttacatagtgaaacgatcaccgagaaataacattaattgaggaggttgagcctcttgtctccaaactctccaccatgaactttgtgttttagtttattttttatatgaaattttcagataagaaaaaaaaaagaatacaagtattatatataaatgacataatgatcatgctagaaacgttatttaaaaacgagtggacttaaaaaactgttgggttttatgccnnnnnnnnnnnnnnnnnnnnnntaatcagatttgcttattaatatagatcagaaat

SEQ ID NO: 130882 - DNA, 651 bp, Cannabis sativa
  modified_base (596)..(597): a, c, t, g, unknown or other
agatgggatattgaagatatcaaagggatccatgacagtgatgaaaggtgaattaaaacatggcctatactcccttattgggaagactatcattggaactggaagtgctgcacctgctgttacaggtcaaaatgatgacacaaaaatgtggcatcttaaattaggccatgtgagtgaaagggtaatctgagaacttgacaaacaagggctactcaagggaaaattggactcaaaactacccttctgtgaagaatgtgtatttggcaaaagctgcaaggtgcaatttgccacaggtcaacatacaaccaaaaacaaacttgattacattcactcagacctatggggtgcttcaagaaccaaaacattgggaggatccagttacttcatgagcatcattgatgactattcgaggaaggtatgggtgttcctgttgaaaatcaaagacttggcctttgaaacttttgtcaactggaagaagttgattgaaaatcagacaaacagaaagataaagaagctcagaactgacaatggattggaattctgctctgacatgtttgcaagtttctgcagaaaagaaggcattgccaggcatcacnnagtggtcaagaaccctcagcaaaatggccttgctgagagaatgaacagaaccct

SEQ ID NO: 130883 - DNA, 705 bp, Cannabis sativa
atggttagagcaagaggtatttttataaacttgtgttgctaggctgtattaaatatttatagggcctgaccaatgtatttgtataatatttttatcattttaatctatacatgaaaaaaattcaaaaaaaaaatgaagaagaggagaattgattgtggccggcaagtagataaaattaaagctaaagggctcgtttgctacgccgtattgtattgtattgtcttgggttgggttgtgttttgttgtgttgtattgtattgtattgtattagtattatttaatacattattatgtttggtattgacttgtattaatagattgtataaagttataatatattttcaatacactagactccaacaccaactacgggttcgggtctgagtctgagtccggttccaggtccgggttcgggtcctcggtctcgggtttgggtcccgagtcccgagtccaggttcgggtcccgagtctcaggtctgggttcgggtcctaagtccgaggccgagtttgtgtcttgggtctcgggtgcgggtctgggtttgagtctaggtctgaattcgggtcttgggtttggattcgagtccaggtcccgggtctcgggtcgggttggagattggtgttgacctcgaatcttttgtaagtattataatacaagctaatacggaccatttgttatgcatatattaaataatacgacatacattg

SEQ ID NO: 130884 - DNA, 895 bp, Cannabis sativa
tccacaccaccaatagtagagtttcaaatcctgatacattttggtggttctcgagtacaacgaataaggtgtagtatgagcttcattaagtatttcttttatgagctaagcactatcttgaacacaaactcgagctttgtaaagtagcattctgttattcgagattgaaaagtccttaggccgacccaccaatacctcatctcgaatttcaactagcttagcgtcttccagttgtgtctttcagatcctttccaacaaatctgactagaatgtcaggttatgtaattttccaaccacaaattcaatttcagccttaaccatttctgaagctagatgaggagctatcattacaatattaaagacttgtccgggaccttttctacttaaagcatccaccaccacattggctttcctgggatgatacagaatttcacaatcatactctgtgactaattctagccaccgcctctacctcatattcaaatctttttgagtgaagaaatatttgaggctcttatggtctatgtaaatcttgcatttttctccatacaagtaatgtcgccatatctataaagcgaacactacagcagcaagttctaaattatgcgttggataatgttatttgtattctttcaattgacaggaggcatagtctataactctgttagctcgcatcaaaacgatcccagaccctatctggatgcatcatagtgaacaatgaacttttcttagtctgatggagaagctaacatcggtgttgtgactaattactgctttaactcccaaaaactcatttcacacttgtcggacagcatccagcttcttgtttttctcccaaaatcgagccaaaacaacctcgggattgggataaaaaggaagacggggttcaaaatta

SEQ ID NO: 130885 - DNA, 1126 bp, Cannabis sativa
ctcttccgatctaataaaaaatacattaattataaatttaaaatacaaaagtcaagttccaaactatattatataatacatattatatattgttattcttaatatattatctatgtaataaaaataaaatgattagattgtagagtttttttatttttaatatattatatatgtaacaaaaataaaaaatgagcgggttggcgggcgagttcaggtccaacccgaaactcgatgattataaaaaatcaactcgcgatctttctttcccatcatgtttaggatctttgtctcgtccctcaagaatgggattttcatcaatgtatttctcagtactttgagtctttttagcacggcgaatggttgcctctgttggatctccatcgattcctatcttcgcctgggctgcaggagctacttcgtccataggagtgtctccatcacgactacaagttttattttgggtaagtaccatagttgcattatattattgtaacttgttttactaggatgtaaatttactaatatgtatgttgattataattctataatttaacatcctaaatataaattctctaaaataatgaattaaacacatataaagttataaaaaaccttacattggtggtagtagaataatatgactccttccgttcaaatctccaatccttgatcctttctgtcataagagtgtgatcaagatctgaactttgattctccttcagttgacagtatgaactacataatcctcctcaatatgctaggtattactttgacacgtgtggacatattctcaaactaaggagcatgaatttctatgaagaaatctcaagaagaattcataaaataatgatagaaaataataggtttcttttttattcaatttgtcagacaagagagagtctagagtcatcattggaaccaaaaccattaacgctctatttatagggatttatcaggtttagtgttagagttaaatgggctgattagaaagatcaatggcttagaatggaccctcatggtcaaatctcttatgaagcccatgagttagaattttgccattattttgcttccttaatgaaaaaaacttctttttttagtattaccatttttctgctctagttattta

SEQ ID NO: 130886 - DNA, 1219 bp, Cannabis sativa
tcatgctcaacactaggaatcaggagaatacctcacttgctgctgacgtctttaggctagggattaaacttaggaggagtgacgataagctaaaacttgcccttgatggccagcagtccataaaggatgagtatgccggcaagatcatttacgagtttaagctacgcaaccccgaagctaatttttctcacaaggaggatgcttctttccttaagagtacattggcccaagggaaagcattgtatgggagcatgatggaggcagactagaccatcgtctagccaaaaggatcgtcactggggtagttcaatgaggccatgaccgacccatctactgagggctttgaccaggtggctggctagccaataaaggctatggttggcccacactttggcgatcgagacattgaaacttttgattcagctccacctacacctgcacatatgtactttattagtatttcaactttatgattttattagcaaagacattttatttcatattttttacggcgtattggcctttcacttttgaacactacttattttcaatcatagggcattcatgttaatacttttggcctacaggcactctatttttgaacattattactgtttagccctcaagctttttattatggatatgtgaccaatcaagcagtttttgattctagttatctttttattgccttgttctgtaagtatccaattttttttatgcaaagatgaagtatgcctgtacttgacttagaggcaggtttagtagcttatactcagcgttaaaatttctctgcataggttctctatgctactaacattatggaaaaattagagttttaaaagaaaaagataaataaaaagtacaagataaaagatcttttctcttcttcttttaagctctaatttttgaatggcatttcaaagtaggattagcctttaaatccaattaatcctagtgccataagaaacacatgaaaattttaagttttcaaaggaaaaaaaatatcatatttttctttgctgcttaatttttgaaaattcccctacacaagaataagggaatttaaagtactaattttattgggaatacttgaagaatagaaaaaattgcttaagattgtaaaaattgatgcccatcttgtacttttgagggaaacggctcagttcacgtcatcaagtcaactccactcaagtgtaaagttgacttgggggaaaatttt

SEQ ID NO: 130887 - DNA, 1314 bp, Cannabis sativa
ttttgtttttcttattagaacacaaaaggatgcaagcaagagggttttgagtttcttagtggtaatattttttaaaaatattgaaaaatttcatatcatctaaaaatgtaacattttattattattattttttttcatatcaatttttacactcttagttttaaaaacacttcaatacattattatttaatatattatttattttaattataaatattgtcacgttacttatatatttttaatttttaatttttttttaaagagataatatcaatatcatgatagcacatatttaactctaataatatatcattcttatattttgtcaaataagtaatttatttaagtaagtatcttttaaaatttaaccattgaagatgctcttatgacagcaaaaactccatatttattgaagctacttgagattcttaacattaaaattatatgtatattagagtaacttacgacaaaaatatttaagttttcacatttgtagcacttaaatatctcagtcatttttttagaggttaaaatatccaagttcaccatttattgtcagccgctaatactctcaattatttgtccgctcttaattggtccatgtaatataatggtgccatgtcatatttttttaaaaaatacttttattttatttccactaattaaaacataaataaataattttaaaaaaagaaattctaaaaatttattaaaaataaacaaagaaacataaattaaggtgtggtttggtgatacttttattttctaattttttaattacaaaataaaaataaaattttatttttgaaaagcaaaaatgtgttcattaaacctcttttatttttcaattttaaaaataaaatacaaaagtatgttctacaaaatttatttttatttttattttttgattttatttaagtcaggtttaggttggaggttggcttcgggttcgggttagaggtcgtgttcaacactagagtcgtgggggagatgggtccaggtctaatcgatgtacaaaatattaattaagaaaaaaattttacttaaaaacatattaaaagtaactttttttttttatttttaaaattttgatttttaattaaaaaattaaaaaatgaaaacatgtttttaaaaaataattttacattttcaaatttaaagacagaaaagtaattaaagtgttacctcacctaaattaaattttcataaaataaaatataagacctttgttccttactgaaccatagaacgaaagtgttcttaaaaaaaaaagatagaacaaaagggataaaatcaaatccctaaaatcagccg

SEQ ID NO: 130888 - DNA, 823 bp, Cannabis sativa
tattttatatgtgtgtaaaatagactgtttgaacattattttttatattataaattattctaaatttctcaaaattttgtaaaatattttaaatagctaatacgtacatgcatatgaaaaaaaaattagattaaaaaattattctaaatgctgaaataaataaaaagtgcatcaatacatcctttaaaagaggtacattgtagaatcactctctttcttcttagaatctctgaggcttgagactatgaatattatttagtagtatatattaaatttatatataaataatactaagtgatatatataatttacactaattattttaattttaaatgataaatgtaatattcactattaatcattcatatattatacataaaaaaaattgtatgattaatgttttttaattaatttaattgaagaatctagtgtaacattatcttgagttacaaaagaataaatattaaaaaaaaagatagtgaaataatgtgagcattaaaaaaattaaaattgtaagaaaccaatctgagattagtgtaattaaaatatataatatgtattacagtgaaatttttcttatttttttgtacccagcacgatatgattcgtatttttgcaagcttttatgtgagttgagccgacacgacaaacacgtatttatagtttaaaatagggaaacactataaaaaaaaaacaaactatctttagtgacaagcttttaatcacaacaaaattttcttgtgattaaatatagtatttaaatacaaattgtcactaatgtgccgtttggcaacacttatatttttaaattttttaatcacaa

SEQ ID NO: 130889 - DNA, 794 bp, Cannabis sativa
cttaggagaatgagacaatgaactcgaacgagaacgagtaatagccattactcaaaaacaaaaaaaaaaaaaacgaagaaaaaattgtagaaaacaagaggaataaaagataaagatgatatattccaaaaaaaaaaaaagataaagatgataatgagaagaatgaaggacaaagaaagtaaaataaaaagggaagaatgagagagtgatacagagagtgggtaagagagtgaataactgacaaagagacaagagacaagagacgtgtatatagtatactgattgatttgagacaatggagggaaacatgttattagttacactcatgacataagtaaactatacaaagtgtgaaaaaatttaaataataactgcatattgatttaaaaaaaattagtaaaaatgaaaattgaaattaaattactgtaaaaaagtttaaaaagtaaaaaaaatggcaatttatgtaaaaatctattttttttttctaataaaaagctcaatttttatttttcgccaaaaatctccaaaccgcttgggtaggtcctaattatatactatataataacataaattaatttattagtgatgagaatacaaaagaaatgttataattatagtcataaaataaaattgtattaaaatgagagttataaaaatgaaaagacactcgtaattaatatgtagcttgtgtatgtgtgttttttttttggacaaaatatgaaagcctcaaatattagaaaaaaatagaaagaaaaaaattataaaatgccacataaatttaattgtgttttttt

SEQ ID NO: 130890 - DNA, 625 bp, Cannabis sativa
  modified_base (32)..(44): a, c, t, g, unknown or other
tttattttattttaataaaaaataattttatnnnnnnnnnnnnnattataataataaaaatgtatttttaaattttgatattgccaatattgcgagccataaaagcttcccctggacagattctcaatactcacaaatccatcatgtcgttctcaccaaacacttcaactaaggcacaggctttctttagccaaacttcgggaatgccgatatgcgaatgtcatgaaacataccttggtctcccggcatactcttctcataataagcaagagttgctcagtaatgtcaaggagaaaatttggaagttactccatgcttggaatgaaaagctcttctctgtcggaggtaaagaagtacttttaaaagcggtggttcagtctatccctacatatgccatgagttgtttcagattgcctattggtttttgtaatcaaatagaatccatgatggctaatttctggtgggggacaaacaaatatggctcaaagattcactggaagagatggaaattgctatgcaaatccaagtttgagggtggaatgggttttcgttcgtttcttgatttcactcaagctatgcttgcaaaacaagcgtggagatgttagatatattttaccaggatcta

SEQ ID NO: 130891 - DNA, 526 bp, Cannabis sativa
attttgacatgaggtgtaaaaatctcttccttaaaagcaaaagcacatatattccattaaaaaaaaataataaatatatataatacatctcgaaattaaatttaaattatcaaaatcatgaaatcacaactccaaattataaatgaaagatcaaaatcccagtttagattcaaacaaaattcccaaatttcttcaacataaacattaattctcaaataatgaatcaaatgtggctttttatactacttgttaaaattctttaattatcactcataaaatatgaaataacaagattcaatttcattaataaatatattacatattattataattgcataaatataaatttaaagaatacttttgttgatttaaagaaaagaactaaaatagcagaagcgggccttaatctataaatagtattgatcttaatctagggaaattataataaatggccccaaatcataagactatattagtttatgtcctcatttcaaaaaaatatagcaaatgaccctaaatcgtaaga

SEQ ID NO: 130892 - DNA, 1440 bp, Cannabis sativa
  modified_base (1388)..(1398): a, c, t, g, unknown or other
aaccaggtatttcgggctgaaccgggttcgtgcccgaaatgcagattgaattgaattatttggcattttatttgataatgagaaatatgaattttatttgaatataaatgagcatgaaaattactaaattacccttctatgaatgaatatgtgagaattggccctaggggcgaaatggtcttttcacctttattgatttacttgaattgaaaattgaattttatgaaatgaaattagaaattttggattctctctctctctctctctctctaaaacccgaccctctctccctctctaaccctttcttgaaatttcaagcttaaattggtgtgaattgcttggagttggtttgttttggagcttaagacttggatttaattgtgcttagccttgcaaggaattgaggtagtttctttaaagctttaattccacttttgttgctgagttttgttgttggttgagcatggaaaaggggttgtgatactttgatttgcatgtgtttgaattttgaattgttctatgtgagtttatgcatgatttggttgtgagttatgttgttgagctttaggtggagttttgggggtgttctctagctctaatccatgtgtttctatggtgttttgttgctagaaattatttaagataattgggtttgaagctctttttcaagagcttgaagttgctaagttgagcttaatttcatgcttttatgtgcaatctgaaataaagggttattgttggatttcaatgcataaaagttggtattttagttccctatcttttgttcgcaaccttatcttgacaattttaaagtttgattgtgatttgtggtgaaattcttgaattttggttgttgaattcatgttgatcatggcgtatttttgggttttcaactcacgtgtcgtgacatggtctgagcatgccgtggctcgcccctgttgttggaacctgggagttcgtcccaggtgccgcagcatggcttgggcatgccgcgacccaccctcgagtttctgggcaatttggagttccaactttgagaatgcataacttttgattccgaactccgatttgggagttctttatattgttagaaagatcattttgagctctatgtgattatataaatttgaaatgcaatgaatatattttatgggtgcgaaatgaagggttaaccctatgtgtgaaaatcccgaattttgtgactaggattaccggcacctggtcaggagcaccgagggatttggaatatctactattacgggacaacatagacaatagttagcacgtagagtacgcacagtggcgcttatattgaaaatgatatgtgtgattatgtagtaactgggattggggttattaccctaacatgagcggtttaatagcctagnnnnnnnnnnntagtgatatatgtgtgtaaatgccatgccatgttaaatgtaa

SEQ ID NO: 130893 - DNA, 777 bp, Cannabis sativa
tttccactattacttacaacttctcaaaccattcaaattcttctttcttaacattatttggcatatcaaaggaaattctattcttaacttgccactttgtttgctagaaatttttttgcacactagcagctgcctcattccacaatatatcatttttggtctgccaaatattgtacaccaatgctgctatacctgccataatcactctctttcaaaatttgtatcccttaactctatccaacttccgaagcagcccctgtaatggagtgaggggcatcttccagccgagccactactctaaaagatgtattgattcctgtgaaaaagagcagccaaagaacaagtgctcaacattttcagaattcccatgacagaataagcatctatcatctcctacaatatgatatttgagaaacctatcctttgttttaagtttattcaacaaagaaatccaaaccacaaaacaatgcttgggaatattgagtctattccaagcatgtttgctccaatgataatgagtgtcagcttgattgtacatcttgtaacctgcagcaattatatacttattattcatgaaagtagcaggttctattcagtttttgagctcattcttgagctgaactaacttcctccaatacaagctgctttggagagggcattgtatccccaccaatcttcatttttgatgaagacactatggtaccatttgacccacaagttgtctttttttgttgcaattgaccagatgttcttaattaaagcagctttgttccaatc

SEQ ID NO: 130894 - DNA, 839 bp, Cannabis sativa
taatatatgtatatatctacatataaaaaatttgatgtatatatttgagtgagggctttagcccacacatgggctaaagtccctccgtccctgcctagctatttaagtttattcagcaaaaattttatacttttctatatattgtacagcttccaataaaaaattacacatcactacattagattagaaaaataaaatctaaatatctaattttaaaattaagaattttgtgaaaaaaataaaactataaagaatttaattgatacagtttatagaatttaaggatttgattccgttagttttttcctaatgattaattatatttatggtgtataactaggtgtgtggtttatgcattgtcaccttgagttgcacaccatgtggggtttgaaaatggcttttgttgttgagaatgggaagttgccaagccaatcaatcttgccaccaccaaaagatcttccaccctgctaaccaaaacaaacgacacgtcgttcgatggagctcttacttaattcattttatttgttctgatttcattcattgtcgttttttctttctcctttcttttgtagcaattcattgtcattttcaaatatatctgtttctttgttcttttagaaacaacatacatcatgtcattgacttcacaattgtataattatgaaactatagctgagatttgtatgagattgcttcgtgtacgtataattaatggaatcaataatcattgagataattcttttcatttatttttttagggtaaattgcatcataaatatttcatgtttcagattttatacactaatgtttatttttggaggcaaaaatacataatgtta

SEQ ID NO: 130895 - DNA, 706 bp, Cannabis sativa
acaaaggcaaaataaatcaaagacaagtatcaaagaaccaccaccattaaaccactattttccttatgaggtcaaccacataattctgtaccaaagtgatcgtctctcgacaacccatcccgcagcaatccataaaatgttgaataccacacgtgacaataattatgctgttctatctcgaaattaattggtgatgagtggagtagcacatcttctaatacatgactcagtatttttatatttaatccaagtgagacaatattctccaatatctcttctcaaaatagtggatattttttctcaccaatcttgaatcaccttatcacaaggtgtgctatatgctcgctttattttttttttttagatttcaagcgtctttgcaccatctaaatctcgtaggattggctaaccatctggttaggcatggatcgaaagcccgttggagatatggctatgataccacgacaataatcatgcgatttcatctcaaaacaaattggtgatgagtggagtagcctagggggtgagcaacggtcggtttggtcagtttttacacaaaaaaaaatctaaaattcggttttcatggttataatccgaaaaccgaccgaccattatacaaatgtaaaataactgacctttttaatctacggtttggtcggtttaaactgaccaaaccgaacttcgtttttaaattttttataattat

SEQ ID NO: 130896 - DNA, 725 bp, Cannabis sativa
  modified_base (258)..(260): a, c, t, g, unknown or other
aaaaaaaaaaatagggatggtaaatggttttttcgtgggtcgggtcggtcccaactcgggacattcaggtcactatttgggtctttcttttatctagggaagaacacgggggagaatttggcaaggagtgcacctaccccatccacatttagaattttaattctcgtccctacttattccccatcgaaaatgaacggggataataaaatttataaaaaaaaaatataaatgtataaaatattaaactacataaaaatnnnaatattacacattaattattattataataaactaattagtatccaaaatacaacttataattcataaaaatataatactaattaaaaatatacaaaaataaatataaaatataaaatattattagaaatataaataaaatactaaacgggaacaaaagaaaattcttgtccccgtgcctcgttccccatatagacagggaatcccaccctattaggggtccctacgagatctcatttccatagagaaaatatgcatccctactcttacccaatctactactttttctttttggtcgggtcacaactcaattctttttttttttttggtacctacctactctggtttagattatgagtgttcatcaaaccgctcaaactgtctgcaccgaaaaaaaatacggtttgaaattctttgtggtgaggtcgcggtttgaattttccctaaatcgcgcggtgcagtgcggt

SEQ ID NO: 130897 - DNA, 943 bp, Cannabis sativa
tgaccattctaaagagaatgcttagagcaaaattggcatttcgtcaaaaccagcaagttaattgtcaacctgagcacctaactgatgaccaaaaaaatgtttagaaatggccccaagtttcaaactggaagttacatttagttcccgtaaatagtcaaaaaaaaaaagaaaaaaatcctcgaaaatagttcaaacttccattttgcaggttaacacaatcaagtcctgagttttggtggacagtaatagcctacagaaggcccgagataaatgacgtcggactggtttgggataatgataagtgtgtttccagattactggcaaatattttactttcttataaacaccttatcttagttattaatctaacaaggataacaaacaacttcattaacaatttcaagtttatccccttaagatttccaatttgaaataaattgttattttggtatcaattcgttcattatagagtacttttaacggttcatataaagaccttattttacttattaatctaactgaaggtccactcaaattttttatttcaataaaaaaaaaattatgatgatgttccgatgactgtaactgataaaagtaattgttataggttgcgcgaatcatattaaaacctaagaaaaatctgtagaaaaaaaaatcttcaaataaaaaacatttttccatgttaaaatgaaagactcattgccatgaaaggttatttcgctataatgtacaacccattattggggataggttttaatgttttatggattcgcacaattttaaaatttaaaaaaaaaaaacaattattgtgaaaagatggatcagacaaattggcttgatctctcgaaagagataaataatgcgctcagtataatcagcttcgatcatctggggaaatagtcatcacctccatctcatttttttttccaaaaaaataaataaa

SEQ ID NO: 130898 - DNA, 1917 bp, Cannabis sativa
acacctgccatacaacccaatgatatgcctaaacctacttctactactattcagaataacctagataatgacagacctgttagaacatcccataagccctcatatttacaggatgatcactgttttttagctcaaactaactctgtccagtgttgcaggaaccttcaaaggttacaccttattctatttctcaggttgttgattatagcaggttgtcatctacttttcgagcagttattttggccatttctagccattatgaacctgaatttttcagccaagccaagggcatacctatttgggataatgctatggattgtgagattgatgcccttgagaaaaaccacacttggatcatagtttccctacctattgaacatcatgcaattggctgtcgatgtgtttataaaatcaaatataatgctgatggatctattgagaggttcaaagcaaggtttctggctaagggttacaatcaacaagaaggtgtggactacacaaatacttttgcacttgttactaagttagtcactgtgaaacttgtgcttaaatggatggtatatttacatcaacttgatgttaataatgcattcttgcatggagatcttaatgaggaagtgtatatgactttacctccagggtatagtcctaagggggagcttccaccaaatgttgtatgcaaacttaaaaaatctctatatagactaaagcaagcatcaaggcaatggtttgctaaattttctagtgtcttggttgaggaaggcttccatcattcagccatagatcattcattgtttatgaggcacaatggagataagttcattcatattgtcaggtaacaatttggttgaaattgtggctctcaaagttcaattgaacaacaaattttagcttaaagatcttggaaaccttaactactttcttggattggatgttgctaggtcttccaagggaatcattatatctcaaagacattatgctttgcaaatgttggaagattttggtcatttgaggttgtaaaccagtgaatactcctatggaggtcaacataaaattgagccaggatgaagaagacagattggccgatcctaagctctataggaggacaattaggaagctgtaatatctgaccattaaaaggccatatgtatattttttttgtcaacaaattaagtcaattcttggttactcccaaagctagacacatgaaagctgctgagagagttcttcaatatgtcaagcattgccctgggcaaggttagttcttccctgttacatcagaaatgcaacttagagatgcagattggggtgcctgcctgatactagaaggtccactacaggcttttatatttttctcggaaagtccttgatttcttggaagagtaaaaaacaacatgtggtctctaaatccttagctgaagctgagtatagagctatggccaatacctcttgtgaacttgtttggctgctgtctattcttaaggaattgaaaatcaaacataagggtcctacttggctttattgtgacaacaaggcaactcaatacattgctgcaaacccaatttttcatgagagaacaaaacatacagagattgattgccatttagtggggaaaaggtgcaagaaggtgtaattaaaactagtcatgttgttaccaaggatcagcttgcagacatatttactaaggggctttttcctactcaattcaatgctttcaaagacaagatgggcttaataagcattagctctccatcttgagggagagtattaagtgttagctgtcacactactattactaccactggtttggtagttataatctattgtaaagtcgattgatttattatgttagttagttgttttctttctaaatgtgtaattaattttttgtaatgtactttcattgagcttgagcta

SEQ ID NO: 130899 - DNA, 927 bp, Cannabis sativa
  modified_base (50)..(69): a, c, t, g, unknown or other
taattatattcgttttagaagttcgtatttaggttgttaatcaacatacnnnnnnnnnnnnnnnnnnnnctggtaaaataattccaacagaccatgatagaggttaaggtagcactgaattccaaagaaatacagaaaaagtatgatgaaagatcagatggtgttagggatggtttatttgttaaagggagaaatgaaccaagagatcccaagagtggacattgcaagccaaacaacaagaacaatcaaaactaagggtacaacctggggtacaaatccaagactaagtccaaaccagtaaaaccatgttactattttaagatggaatgtcaatatacagatgaatgctacactctcaaagctaaattgaacagagaaaatggaaaagagagaggtgatgcagtgattgtctttgatggttatgagtctgctgacgctttagtggtgacaaatcaagaatcaagaaatgaatggattcttgacttagggtgttctttccacctgacactaagaaaggaactatttagtgaattcaagaaaattgagggaggattcgtgttgttagtggacaacaaaccttgcaagattgcaggaataagaagtgtgatgatgagatgcatgatgatcaagtaatactcatacaagaggttatgtatgctccttaatgtaacagaaatttactttcactcggtgaacttattgttgggctttgttccctaaataaaactcgatttcaacataatcttttccattcaattatcaataaagaaactgattccatttcattgctcatttaatgtgttgtttggttcatgtgataaattatttgtttattgtgttgtcagttgaaagtaatcaagattgtgcgattaaatgtatccctatgattcatcagtacacatggtttaactgataggataatctaca

SEQ ID NO: 130900 - DNA, 1316 bp, Cannabis sativa
ttcataggatccctattccttacctttatccttttaaaaacaaacataaataaaattttccttttaatacccattattccttaaatatttatgctttgggttttctcttgtctttctattttaatatgtggttacggaattagtgatttagaaaaagcataaaatttcgattactcgtaattactggtgtattcaagtcataccaagtactttactgaaagtttaaagcaaaaaaaaaaaaactactctgctgaaaatagttgccaaagaatggtaacatgttacatcattgtgcagtctgttagactcaaagaagaacatgccacgattcatgtttgttatcatatggcctagcatatccaaattgaatttttttcatttttttttccttttctttttgagatcagatctagattgagactctcctgatccatctcacctttattaatgtcatctattatgtggaaattaagtgtctctttctgactgtgattagtgattactcaaggtggattttatactaaaatagactaagtagttgagttttgttaaatggggatatgattatgactaagtgaatgtgactatgtaacagattcaatagcttcaacaaaaggtagggagtacagtttttcttatttcttctaaaaccactatttccaattagacagataaactttcatctcttttggataataaataatgttaaaaggactaggagataaaagatataacttgcagtgaatagtgctaaagctaagcactcttttatctcactaaacttcccaaatataacgtgtgaaaatgaatgttagtactctccctcaaaatggtagcgagctatttgaaattcattgctagttatgaacggggcaggtgaagtgttacactcagaaacagtgttaagaacattgactctaagacaactgggaaacgtaataaactcttatacacaagtagctggaatccatattttattaggttgaggacttgggtttggggccctgtctactcttgaaagtaaattcaaagatagttgatccagcaaatgtacacgtactggaggaagttattggggttttgacccttgcagtggcagtagatattgaatctgtgattgctatcataattttgacaaccgtggagttccccaaataggatattgaaatagacagtcattggtttagttgattcgagatgttgtggttgtagttggttgaactcattattattacaacataggagtaacccaaaccggacattgtgtaatgtgtgtgagagagattgaagaggaaaaaatggagagagagagagag

SEQ ID NO: 130901 - DNA, 886 bp, Cannabis sativa
ggcataaaacccaacagtcattacctaaaaaaaagggctaaacctctataaagtctgtgtgtctctttacatttattatcgttccacacatggcagccataagatacgatcctagtcatcctagtcaaactccaagtcaattagctaaattcgctaaattcactaaattcacagtcaatattttggtacttttattgagagcctagaattctcgttcaagaagctctcatctttatcatggctatcataagacttagaaatttgactaaattacgagatcctatagccacgaattcgaatgtccaagtgccacccatggcgaccaccccaggaggggctggacaaccaccaagttctggccagctgcctagagtgtccactatagtctaactaggagaacaaattcctactagaccctttgtctagcccacaactaaaattcttggcataggagtgggacctcatgtctatgctggtaagactaggcctggggttggtgaccctagcattgacgaaccccacatggacttgggggatgatactgaccttgccatgctgagagaggccgtaggacaagttcagggtcatactaacctcttgcaccatgatcaacaagaaacatgcactactatgggcgatgctttcacctagtagagatgtaaattcctgaagtggatggatcggcaagccgcaatcctccaagctctgcaagtggagctaaacccgttagaacaaggaggataatgacatattaggtcattcaacgagagagttggagctcaagttaaagagtcctcccttgtcagagatcctcgtcggggtaaaactgttggaaatattttatcaggatctagatttactaccaagtatgttttattaacatcct

SEQ ID NO: 130902 - DNA, 589 bp, Cannabis sativa
atttgtcattctctaaaacacatgattcaaaaacaaaagcattaccttcattcttagggctgagaagtctgtaacattttgatttaaaatgtcccttctgtccacagtgagaacatagaataatatacttacttaactgttctttgattgttcttattactggttcaatctattgttcaagagtaactgtggaagtagaagaactttctccaatcttttcaactgagcttgaagttgcagtattgtcaaaggaatctttctcaatattctcacttcttcctttgtcatgggttgcagcgttggagaatgaccttcttgcattgtcttttcataagcatgcaattcaacgtctagcttgtctatgtcaaacgagttccaattgttaatcatgaaggatacaacaaattggctacactcaagagataaactattgagaacaaattgaactctttattcttctgataacaaaattcccaacatggttgctttctgaaattttaagttcatcataagtaagtgagaagtgatactctgaccaggagtcattttcgcactttcgagttcatttgcaaatgcgttaagtaaaaga

SEQ ID NO: 130903 - DNA, 605 bp, Cannabis sativa
tggaaagaaggtctcttcactccagaggcagaagctaaccccttcccacgaacagcaggatcaggaatacttggggaagagctaactctcatagcaaagtcaccaccagaagatgaaatctcagaacaagagataggattattaaggccagtgggggaagcatgcatgtgatcagttgacttgtcagctacaattaaggaatcagtggaataagatataaaagttgaaggcctcaaagatatgtcaaagttaggcctagtgggttgcgaggaagcaacagggaagttggggtttaatggggttggcatcataagcactccagtagaggtaggagaggcaaaaggtctagtaaaatgatcatttaggctgaggaaggaagggaaattgatagtctgagcagaaaaatgctggggaggcatattaaggttgactggttggtagttcaccatagtgatggcagggggatggggatattggaaaggttgtgttttgtcagtgatcttttctttgcccctaagaaggatgttataaggacacaaaggttcagttagaagctcatcacacctctgtaagaaagccacacagaatttttttgtgtgatccaa

SEQ ID NO: 130904 - DNA, 2015 bp, Cannabis sativa
tttagggtacaaaacccaacagtgcggtatgaccatagtacttcttgtagttcctctggccagttccctttagcttcttcaatccatttttttcaaagtgtcttattgagttgttcgacctgaccatttgattgagggtgtgccactgcagagaaactttttatgattccatgattcgtacagaaatctatgaacaattggctgacaaactgtttgccattgtccgagatgattttgtgtgggagttcgaaccgacatattatattcttcaccacaaagtcctgtacttttttagatgtaatttttgccaatggtttagcttccatctactttgtaaaataatctattgcaaccactgcatattgtaccccgcccttacctttgggcagttgtccgatcaggtttattccccaaataacaaaaggctaaggactttgcatttgagttagctcgtcaggcggtgcacgaggtattttttaaaatctttggcatttatcacatttctttacatatgcctttgaattttccatcatggtcggccaaaactatccttaccttaatattttctttgataggctttgccctgctgcgtagttgccacataatccatcatgtactttggacaataaccgtgcaacttcttcttttgtaacacatctaagcaatggcatggagaatcctcttttatacattacaccttccacgatgatgtaccgtacaactttcctcatcatcttccgacctttgtttctgtcatttggaagtactctgatgttgaggtaggctactatgggtgtcatccagttcggagttgtgtctatcattttaatttcctctgtacaagtgatgttgggctcttctaagaattgaattgggattagagtggctttatcagttactgtgctactcgcaagtcgggctaaggcatcagaagtcgtgttttcttctcttagaatctgcctaagagtgtaacccttgaattgtgcgagcagatcctatattttgcttagataagctaccattttctctccctgggcctcgtactctcccgaaacatgatttactaccaattatgaatcactacacatctcaatctattcagcatgtagctcccgagcaagtttcaagccggcaatgagggcttcatactctgcctcattattggaagctttgaatccaaatttgaccgccccgtgcagaggttgccctcaggtgtgacaagggcaattcctacaccagacagttgatctgtagctaacctgtctacgtgtaatttctaggtaggtctatgttcattgttgttcggtagggtttcttgtactggctccgagttgtccctaaggttgctttcttctttgcccgtgccctcaattacaaagtcagttagggcctatcctttgactgctatttgtggttgaaagattatttcgtactgacctaactctaccgcccatttaagtaaccatccagaaacgtcaagcttttgcaatacttaacgtaatggtcggtcagtgtatacccgaacaggatgagcctgaaagtaaggccttaacttccttgttgctaagattaaagtaagtaagctattctatcaatggatatcgtccttccgcttcaatgagtcttttgctaatatagtagactggatgttggatgttgttttcttctctaataagcacgacacttacagtttattttgtaacagctaagtatatttcaaattcttctccgtctaggggatttaagagtacgggaggttttccaagtgttccttttagttcttgaaatccattctcgcattcctccgtccattcaaatttcttatttcctcgaaggatgttgaagaaaggaacaaacttgtctgttgacttaaaaacaaatctactgagtgcgactatccgaccaaataagctatggacttccttagttttacttggcaatttcatatccaagagggcttgtattttctctggattggcttcgataccccaagcattaataataaaaccaagaaa

SEQ ID NO: 130905 - DNA, 798 bp, Cannabis sativa
acgtaaaatatctagcatcatttatcatttatttattatttctgtagtgtatctattactaaaaggctatgtatttagttaacgaaaatttgtgttaataatttttttattgaattcgtcgactcacaaatatgttgctatgtttaggtaatggtaaatttaacgtacaatagtgagttcagaacttaggtgaagattgtatatgtctagtcgtctaaacttaaaggtttacaatctttgatacactgctggtacacttttgtaaatgttattagatgacaccttttgataatgacagtataaaatattttgtatttggatttatgaatcctaggttgtaaatattttttaaatggtgtttatatttagtaaagttttaattaacacgaaattttttattaaatgtactttctaggttaaaactttttgggtctaattagaaaattttagatataaaattgttacatttttattgttaaatatagcataacttttacaaattctattagaggttttttaatgaaataaagcaactcaacttatcatttaatgaatggtatggaaatatcaagaaagttctatagataaatgtatggaaaaagtttcaatagttacatcaaatttgtaatcatgatggttacatttatttttagccattagattactatttaataattgtgatatatttataaatttaataaaaataaataataaataacttgtaaccttgtaataactttatattttatttccttataaacatttaattaaaattaattatattttaaaattaaatta

SEQ ID NO: 130906 - DNA, 653 bp, Cannabis sativa
aaataaaaattaaaagttacccataaatttctcaaaaactaagaatttcagttatatagacacactttatatagaatagatatataaacaattctcttttatatattgtttaaataaatttttattttatttgaaagtctgttataaaaatacacatagagattcatgtaaaaaaaaaaaaatatacatttacgaaataaagactaaattctctattagaagtaaaatttaacttaattgtagtgctccttaaataaggaaataatatataggaaaaattagtgattttttttttttgctatttatatgcacttttaatatttttagtattaaatcataattttattatttttatatgtaataaaaaaaattgtatctattttgttgtgttaacctaaagaaacatatttttattgtaaataaaaattttaaaattattatacattctctcgacaagtggataaagtaagtgattaaattcaactaaaagatattaatgtaatttaactaaggtcgaaattatttttatatatttttttttgacaattttatttttgtagtttaacgctatgcaatatttttatgtaaaattatatgtgatattaatttttatggacacctaaatatataatattttagtataaattaaagtt

SEQ ID NO: 130907 - DNA, 779 bp, Cannabis sativa
aaatagacaggactttgttttgttccaacaaaattgcataatgaatctcaagaagttttctgcatatgcagtgtttaatgagtgcaacttgtacaaaaataaccacttcaagaacaatatattttatactgagaaaaaaggtgggagaaagaatgtgataccttctctggccatgtctccacattaaaacgaactagaccaacacaaagcacaagagcaatgctagtgaggaacagagtacaagagaggaatttctagcaattcaggctccataacccctgatacatacaaaaattacttaacggatactgtgaacactttttttttcttttgaaaaaaagaaagaggccatttgtcttagactgacccctccctcccggttatatattgaaaaacctcacttgtgtcggaggaaaaccatggttacataagtgttagcaaaaagacactcaaacaatcataacccaaaatagcacacgagtaaaagatactcatctgaccaaacaaatatgaaaattgcatcaaagtttttcattctctaattaaatctaagaatgataaatgctcaaaatattgtcttgtacacccaagttgcgtccaggatgaatctgattttttcccataagtcctctaatgaacactcgatgcctttaaagattttattatttttttctaaccaaacagatacaagtataaatcttagtagtatatacatatgaagcaagtttcaatggtgacaattaatatataatcatgatagttttttttttttttgagat

SEQ ID NO: 130908 - DNA, 681 bp, Cannabis sativa
aaattgaggtgattttaggttagaaattgagtttggaactttttatagcttaagtctgaacattagtggcgtttgccaatcaaggcctcaattttagtttctgttgcgtaagtataatagtatgtatggtatatatgtgccctatgaagtttggggtgatttggacaggttctggtagcgtttcggtgagtgcgtaaacttggaaaatcacgtttttacccctaaaaagctgatcaactgattttggaaccggtaaacctgttgtggccaaccggtttaccatttcgggcagcctcgggaactcgataatcgtatttttaccataacttttcactatcgggtatctgttttggacgttctatataccgtttcgaagcttgcgacaagctctaccatatggtgtatgttttagagccaaagtataaattctattttagtgtatctgaactacgaggtttggaaggaaaccctaggttttcctttgcaaccgttaggcagtgttttgggataaacacttattagtttattattgttatgacttagggcctgggatcatcgatcgtaatctaagtaggccagccaatatacctgaatcagagcttgaggtaagaaaagtatattgtactgtatagtacgttgtacgtaatacaattaatattattatgaattgattaatattga

SEQ ID NO: 130909 - DNA, 891 bp, Cannabis sativa
ttaccacctggaccaccataaagcacccgtgagtcacagagactaagcaagaaatgtgaataaaataataacgaataatattaagcaattcaatcagtgttattcagcaattcaatctcaaagtaatttgcatacacatttatacaatattatagacataactctggtactttataaagtacccctttaccactcgttaatcaccagctgaatatgtcactattgttgcatgataaagcaaacgatatgtaagaaacctatctgcagtttaaggactaattactcgtaacagtaataatcgttcccaatccttaggtcataaccttggatcaacatacttttaatcataatcttgataataatcaagatataatcattcaattgtcaacacttagccacatatggtgcttcccacttttcttacaataattaagaactcaagagggccgacctaaatggaaaagcaagctaggtaattccggtcctatgtcacgataactaaagcccaatgaataccttaaattgaaattcaggactaaaaccctaattctcaaaaccggacaaactctagtaccgcctgaccaaactaacttaaacattcttaaattactctgaattacactcttgaaaaataccccgaaccaaaatcaagcttgaggagaaaacccgagatttccccctgctggccaaactggtctaccagtttgccagttgcctggaaaaccggtcgaccagttttttgggcagccatggggaactctggttttccacctcaaaaactcatcaaaccctcaccaaacttgctcaaacttttcaaaacagtataataaccataatacaacatatcccaagctttaaaacacaactcaatctttaactcaaaatcacatg

SEQ ID NO: 130910 - DNA, 1897 bp, Cannabis sativa
ttgatgtatatatggccctaaatttgttaatacatctgcctttataccattttgaaaaatacatggtttattatgttatttaataaaataaaaagtctaaatgataaaatttgtaaaacacagggtctaaaatagtatttaccctaagtaataccttggcatccttgtttgagataaggatttccctcgtatccttgcttgcaacgacaacgatatccaccaccattgtgggaatagtaacaatcagtgttttgtccacacacataggaagatgatgatgagttggattgagcttgctcacacgtctggtttcccacaatccaatccaccacaatgataggattcttcacagcttgttggggcataaaatcgagacgcattttggatatgttaaaacttttttgatccgccaagaaagcatacccgcaggggttgaaagggttaacatgtttgtggttattgaagctactcgttgtaactgataaatacttgagatgcttgggaacagaggtctggcaacaccctaaacccgaacacgaggtttgggccgacatgtttacattttcgttgcagacggagatgcaaccactcccgaaattatttcgtgaagcgttcatgaaggcaagggtgtcgcaaccgaaagcaaagagcttgttctcagaatctgatagggtgaaggacttactcaaacgtatcgagggtgagttttcatgaattaagataccattcctatggtaacagtcgtaggagtagaaatgcttaacactcatgatggccttttccacatcaatcttggtaacttctaggcctccatacattagtttaggagaagtactagtagtagtagtgctgcaattgagcaagaagtgcctatcaatatctttactaatggcgcagttttggtggtggattccgaaggggtatgggacctcaacatctccacattttgtctcacaattgggtgactttaccatagtaagtgatgatattgatggccataacaacaccaaaaagaggcaccacaagtaagtattcttcttcacttccattaataataacaataatattaataatatacaatgatgtattatgttatgtatacttagtagttagcataagattttctttctatgttatatatatatagtatacagtatactatatatcttccttttctagctagttgcctggttcctatcatcacagcctgtttgacttggtattattattaatgtatatatatatatattatatatatatatatgttatgcagttgacctggtactatataatatatagtaaaattattatatttaataatgacaaataaaaactcattataataatttgtgatgacatatatataaaacacaaatatatatatatataataatttgaatattaattaatatttcttattacagtgtgatcaagtaattgtaggaagagttgtatacatatatttagaagtaaaatattatatataatattaattaccttgcattgcatgcatatgtaaaatgattgaacctggaaatcttccaaattgaccaggtcgatatcgatcgatctataattggagaagaacaatgatggagtagcagtctagtaatattaattataaaatgagttgaaaatttctacaatttatagaaaactacaaattgtagttgcacttgtacaccatgcatgcatgcatgtatatcaaggtatctttcgacttcgtcaacactgaaagctaccatgttagaaataatatgtatgaaccaaccatcgatataaatgtacataaatggatcacaaaaagaatgcaaattaattaaacattaatatctttatatattaaaagtacctatatctaacggcatttcttgatttaacagaatatacttaaaaa

SEQ ID NO: 130911 - DNA, 1080 bp, Cannabis sativa
tttttgtctccctctaattttttttttttttttttaaaaaaaacatttatctactatctctaacttcaaaaattaaaacatgaaaacaatatacattaaaaaaacttttttttaggtacaatatgttatccttcatttaagatactattttattaataatatttttattatctttacaaattatcaataaattataaacacttactattaaaaatttggtatatacaataattttaataatataattaattcttatatctataagatactattcggtaattttatatattaacatattgcaaatttgttttcttaattaattttttttattagtatactgcatcgtaacttttaagaataaaaaaatttatagtaattaataatgtatttaatattttgaattttattaaatttaaaattttataattttttttttctaaaaattagttataaaaaataaacaaaaaaattatttttaattggtggtctattttcaaagacggtaaaaattattttattttattattattataattattttgaaaaagaaaaatttcaagataattttatctttaaatatatttggttacttttttcatagtgaactataaaattattatttttagattatattatattattttttttatttgagatatgttggtgttacttttttttaaatgttttaataataattaagaaacaaataagttataataaagtataaaaaaatactatatttttaatgtaattcatatatgatgtttaagatactatgtggtttctttgtaagttattttagaagtcaaatttaaattataaaataaatttaattggaaaataatacttatttttttttcaaaaaagaattaattacttattggttaattaaaaaaaattgataaatttaaaaaaaaaaactaaaatgttaatttttttttagtcatttttttttgtgacaatgaaaaaatatatacttctcacatattaaaatgatcaccttaaagagtaaatcgaaatagtataattttttagaccaaataattattagtatagtaaaaaaaatctttttaaatataa

SEQ ID NO: 130912 - DNA, 1273 bp, Cannabis sativa
  modified_base (1160)..(1179): a, c, t, g, unknown or other
taataataataatattaagttattcaaaagttaaaataaaataattaatttttaaatacgttttaattaaaaaaaaaaaaaaaagggggagggggcacatgggtatagcatcctttagaactttataaaaattatgtattagtttaatttttttttttaacaaactgatttgtaactaaaataaaacaaagagttcagttacaaaatcaaaagatacacaaattggaagcaatacaatttcaaaccaaatctctatccgttcctagagccttcttagcaagagtatgtgccattacattgctttctctgggaatgtactaaaccttgacactaggaaaagaaaataaagactccaacactttactaaccaaatctgatagagaagatctatccttccatttgttatttaatttattcactaaaagcatacaatcagatctaattgaatccaaagaaaatttgacaatatcacaccattgaagtgctgtcaggacagcctgagccttagccgatattggagaaaaaacacaaggcatagataaacaaaaaccagcaactacctcgcctctataatcttcaacaacagcaccaaaacccatctttaaaccctctctactaatcgatgcatcattactaagaacagacattccataagttggataaggaagtgactgctcaacagaaggaggtgaagcatgacccgcattgttagaaatctcttgccctcttgagtattctgcaaataatcaagcacccacttttccacatctgcaataggagaagccttagtagtaaacaaagaatttatctcccattccaaatggcccaaagaatgttgaaacataagcaaagtttttccttagttaaatgttcgaaacctgctaaaagaaagcctttaatatcctgaagtttatgatcactataaaactggaaaagactggtttttctccaaattttgataactttggaacatcctaggagagcatgagtgacagaatcaatttcatttgagtaaaccgagcagttaggacggttaaggatttttctgttaaacaagttaaaggaagttggaagaacatggtgaaaaaccctccaaatgaaatgcttaattttgggagggatttgaaggttccatacagttttgtgccctaaataaaacnnnnnnnnnnnnnnnnnnnnttactaataaagatcagaaataacattttatgttccatgattcacatgatttatttcatgactatatgtggataatgtatgaattctatttaag

SEQ ID NO: 130913 - DNA, 788 bp, Cannabis sativa
gaagatcactgggaactgatgtgtctgcttcttctggcgagaaagatgataaaagagtagaagaaatagaggttttggcgttttcagttttggaggcaaaaattagatatagaattgtatttgaattttatttataaaaatgaacagtaactcgagagtattttccatcaaatggatgagaattttaatttattttacattttttttaaggaaaaagaaaagaaaaacaaattctcctataatattccataatataattatggaaaattctatatttataggttttatatatttttttaaaacaagcatattgtatatatattatcttaaattagagctgaatattagatagatttatcgggttttggatttgcaggttttgagttcaacaaaatgaacccgaatttggacccaaaataaaatcgggttggcaggttggtaggtcgcagattaactcaatctaactctttaaaaaataaattttatttagtcaaataataatttttttactttatttatttattaaattaaatatatataatatatatagaataaaaaattatgtataaaaatattttttttttatattttaacacaaaatataatatatagaataattttatggtaagtatacttattttgtctttataatataaagatatttttttagcctttgatatttatgaattaaaagtgtctatctaacggcatttcttggtttaacagaatatacttaaaagtaaaagaatattctgttaaatttaacgattagtttgatctcccgttaa

SEQ ID NO: 130914 - DNA, 973 bp, Cannabis sativa
ctaacagaacccgagtattggggggggggtttaccgcagaaatttgggttgtgagggtttagtgaaaccaaaacgaaagtattgagggttttaccgccatttacccttaatttaaatgcagtaaagagagattgaaaaagaaaaaaggttgagtttgtggggttatttggcaatggttttggataaggtgtcggagagaccttcctttttgctttctaacacgattaaagtcgcttttgggaatctttcgtttgggcagtcatctagaactaaaactaattattttaatattaatatggaaaatttacggtaaaatttcttaaaaagtttactttgatataaattaatttttaacttcaaaaaatagcatcaataatttttaaggtcaaattttttataagtttgctagtcctaaatttaaaggatctgttaaattatttataattgtcacgtgttgaactattattggtttaaataataattttaataaaagattataaaaattaaaaaatattttaaaatataattttttttcgtttttttctttttatttctccttcgtcttctacctcccagcagtccacccccaccaccccacatcattttcttcctccacccacaccaccccaactttgtcttcttcctccacccacacccacacccacaccccaaccccaattcacccccatctccagccacactttggtccccgagctaatcgaagttccaccgtgcacggtggccgtcaactgtcgacagcgaagcttgcgaaaaccatcgactagatctaaaatatctttacgaatagaacaagtttttgaaagtcgctttactcaatggatctcgaatacgactaaatcggatccaaaaatttctactatggctagctcttaacggcaactgaacggcgaagagagctacgagaacttcggagctcgtggtttgaaactcgacaaaggccatggtggccttg

SEQ ID NO: 130915 - DNA, 1136 bp, Cannabis sativa
atatatatatgaagtagtttaatcattaaaataaaattaatattttgttaataaatatcactttaaataaaaatatatattataactaactaagtacatatatattttttctcctcaccttgtgtgttcgtccataatcttttcaaaaagtgaaatgctaaatgtaaatgtgaggtgtattattattgttgttattcaatattgaattttacttattttattttattttaataaaaattacaatataccgctaaccaattataaaatgtcaccttaaagtaatgttaagtaccttagtgctcatttgaaaatagattatgtataaaagtataacattttgaaataaatgtgcaatatttcaaaatatgtattttacgtataatttattctttttaaaaaaaggtaaatattattttagactttatgttttgcaaaagttaccgattggattctctgtttgttaaataataaaatgaaccatgtattttctaaaataatacaaataggaccctgaattgattttttatcaaaataaaatttaataataacccgatgacaaaactgattacattttatgcatatgttcgtgctaggaactatctttaagttgattatatgaaagaaaaaaaaattatcaaaaattgatatcagggtcttatttgtactattttaaaaaatacaagatttattttattatttaacaaaatagatggtccaatcagtaatttttacaaatcacgatatctaaaatgatatttaactttttaaaaataataataataagtgtagatgtgtgttctacttctactagcgttggattttttcaactaaagttgtattggaactagtaagcaaataagatccttaagatcctataatgactattttttaaagttagattttttatgtctaaaatggggatgcatacaggatggaaaattggcaaaaatgctccttccgttcttatttctgttaaagattttatttctcaaccccgcttattctccattggggatggggtggaatggagaatcccttaatagctaatagagcaaggacgggacgagaaatcccctcataaaaaaataaagtttataataaaattttaaatttataaaaatattaaactatataaa

SEQ ID NO: 130916 - DNA, 900 bp, Cannabis sativa
gaggaacctaaccagtcacaacctgcgaatatgttacgcatacccagctggcgatgtacctcaaaaaacggctgggagtttcccagtgacccaaggggcatgcattttttagcatgaccctgaagttactgggaaacacccaccgttttgagcaaatctactagcgaaagaatatgcttatattgggacactaacatatgtcgcaaatggcttggcgtatcgcagtacctcaaggaacatacgatcacacggatgagcattaaaatagtgcgacacgcccaccatttgaaagacttaaccagtgtccccataacaaaatataaagagaatataaaatcctagttcctaaacaatgattggaagtgataaagtctttgtgaagcctaaggtaggcaggtgtgcgagtattcgaagtgttcatccgaatacccgcgtgtattcaagaaataaacagataggaaaggtgcgattattcaaacattcttcctaaagttcacggctatgcaaatttaaggtctatttatttgggattacccagttctacacagaaaaatatagccttatgtatgtttcctacgagcatgcattttttaacacctcaaaacagaaaaacccagagaatacagtttttcctcttaagcagaaatcaaaaaatgcaaataaaattcgaaactaacctttagttttgatgattttccctgtagttggtttcgatcatttctcaaactgaagagattcaagaggaagaagcaggaatctaggcgaggtatgagagtctctttgagtctcagtaagagaggaaaaagaaagttaagaacaagagggaaaaatgaggaagttatttcgtatcaaagagtttaaatactcgtatccctcataaattgggattatgacacgtgg

SEQ ID NO: 130917 - DNA, 1352 bp, Cannabis sativa
agattggtagggatagttcaaaagagataacttgtctttgagtgccagtattgtatgagcacaagttcccaggagatacaaattagggcatgcataatctatgctgtaggtatcttagggattaggtgagattaatttttatccttccttgattgatgtgattcttcataatggagttgtcactaacccctttgattagcgtgtaatcgctgtaaactaggcttacgttgtctgacacgtgctcttataggtgttcccagatgctttccccatgctgcattaaatgtgaggtgattgttcgaatatgttctcctcctcccggagatactttattatatttctagctaccgaaagggaaggacatgctttttgtacttctccgggagctcactccctgaactacacttgttcgtctatatacgactcagctaattcttgggtgaggtgtccttttggtctatgtgtcatacgcagctgtggccacatattttggaaaaaacccgaggtaacatttacccacaagtcttatttaataacaggtaaatgagacttatatgcggcctgtggtccttaataaatatagtggcacgtgcccctggcgcgtgggtcacatttatgatggtcatcattgatttttatttccttttacaaccaacgattcgcttcccatccattgatagatctttgcattaatgctggtgtcatagaggtactcaaacgattcaaccgtcctttctcctcttcacacatgttcatcccatccgttggatcacgaaattcgaatcgctacgaattctcattgtacaatggtgtttgatcccaactgccttgcactccttctggcctataaaagccagtacctttacttcgttgggttactttcaccactttgcgattttcaacccagccaacacattcgaaaaattttagaaacctccgacttcctacttttgttcctccgccgttgtcagaccaaactttatcaccggaccctgccaacttcgcgcttatcacctttctgtaagtctcttgttcatagtttctctgctttttctgcatgttggggcaaaataagaatggtgacattctcatttggttgcgcttgatttctgtgatacggtggttatggcggaggccttggtgatgcctccccaaaaaaggaggggcggggcgtcagatggccactgtcgtatgttgttttatttgcacgcttactgtctttttttctttgaggctagcaaatgatcttgtttgtttgccatcgagtgtttgaagcgacttccactcttttcttcttcttttttccctttatttttgttttttggatgtttgtgttagaaattattttacca

SEQ ID NO: 130918 - DNA, 539 bp, Cannabis sativa
  modified_base (39)..(40): a, c, t, g, unknown or other
ggatgttaataaacatacttgtgtgtagatctaagatcnnggtaaaataattcccaacacattcatcttcaccgttctaactacctcaaactgagtctcgccctgataaattgcatgaaacattcggttgagagacaagttgccaaggatccatgggaggaggcaaagtcatcaatggttcttgttgtgtagttgtaggtgcatcatcttaaggtggtacattctctgggaaatactttgaattcttgtaagctttaacttgctcaggggtaatcatggctcctactctaatgggaacatcagcattcctaggagtaacaccaaattttttagccaactgagtgatgagcacaccatgagccataaaaccagtatgtcccccttaaactgagtctcgtcctgataagatgcccaacatatcgcatcatctaatcaggtgaacctgtacctacgcccggtactcacattcatagtatcgtcacattgtcattgcctaattagacaattgacatttacagaacttgtcatgccatgtggta

SEQ ID NO: 130919 - DNA, 916 bp, Cannabis sativa
atttggccttccttttagtgagctctactaccacatggcacaagtttcatccacataagcatgccacgtcatggggaaaaaattggagtaacaaatataatttcctcatttagttaaatgtcacgaaaaattatctaatatttaagtatcttgaattaaattaacttaaatattacttttcaatttaattaaatatatagaaaaaatataaaatagtttacttagaaattaattatctaaaatttatttcataaactaagtgttgattttctaggtataattttttttaatctatttattataattaatcattaataaaattacataactaaagttgatctaaaattaaataagaattaattgtcaactttaattaaattttcaaactttaaattttgaaattctaacattttaaaaaaaaaatgttttctaaaagataaataaataattattaaaataaaataaaatatattctaaaaatattctattttaagttgttctaaaattaataaattttcaacttaaatatcattttttatttaattaaatatataaaaatatttatttaagtatcttgaatacaattcaacttaataaatgattttttatttaattaaatatcaaataattcgaattagtttactagaaaataattatctggaatttatttcattaaacaaagtgtgtttttctaaattaattttaaaaaaaatctaatgataaattaattttatatattttaaaattaattatgttgctaatcaattttttattaggttaaattaatataattagcctaatacaattattatataaagcaaatgggccttcacaattggggtagctcatgttaggaagatccggtttagtatgtcatacccactactatggacccctaactctcacacaaagccca

SEQ ID NO: 130920 - DNA, 522 bp, Cannabis sativa
acgacatatcgtttatcgcttataaaaaagactcattgtcgttggctaaaagcgaagtcaataatcatcattgtcacgtgaattggatgttcaattattatatgaaaacatacggtaataccctggttgttctacgagacgtattattcttaaactcgtagtgtaaattaatacttataaatatattgagatcttaaggcttgtggttcatattatgaaaaactaaaaatattttttttttaaattgctttcgttttctattctgatttggattataaaaactaataaatacgtatttgacaaagcatgaacaaccccattaacaaccgttggacgatacaaaaaatgaacatcataaaattcattacaacccactaaaattttcttaataatttagctaagaatccattggaaaattgacttagggccagattggcacaactgtgctgtggaaaaaagcagttgtagttgtgctgtgagaaaaatcagttgcaaaagaactgtagaaaaaaactgaactga

SEQ ID NO: 130921 - DNA, 512 bp, Cannabis sativa
cattattacttaccgggcccactccacgtggaaaatctctggccacacgcttcacccttctaattaaaaagtttgctttttttcctaaaaagcaagtttcaaaatccaaccttttcttctttacaggtgtggtgcgcttgttaaatttagaagacacttggatgccaatattcaccaatggggctttcaattttttattgctcgaggtcccaatagcgtcaagttcttggatataagcatctttggcgtaatttttttggataatgatctcttttcatcaaggtggccagagatatcttggccatttaagaagttattcgtatcttcacacaaaggatcattagccaaattaaaaagagagcccatagaggctctaatcctcttgcacggccccacagaagcctaacattagatgtttcatgagccttttctaagttgttgagacacccaccatcaaacttgttaactcaaacttttaggtctccttattttgatgattaacaaatatttga

SEQ ID NO: 130922 - DNA, 720 bp, Cannabis sativa
  modified_base (676)..(694): a, c, t, g, unknown or other
gtaatgggttttatttagggcacaaaacccaacaatacgttgatgagaacggttttgaaatcatatgataagttttctataaatctatcaattttataataattcaagggatcaagcctaacattatgttatgtagctcgtgtctgacttctattataataacagtatttgataaatatgagttgaatcggtcattttgtacacacctaattttttatacaaaattatattaaaatttgatacaatttattatttagttattattaaataaaagttataatttattttatatatataatttaaatttttttaaacattgcaaagcgcgagttatttactagttttatgaatagagtaagggatgtatttgatttagatggtgcactagagaagcttccctcaaattaatacttagtttataggataatttgcggcataacctccttaagtggtcagatgtttgcaattaacctccaattttaaaattttggtggtaaaacctcttaaacccatgttctgttagcaattagtcatttccatccatttttgggtgttaagcgccaagttagaatatctacgtgtacacagtgtatacgtagtacaatttaattagtccacataggtttaggaggttttaattttttaattgagaatcaaattttttttttaaaaaaannnnnnnnnnnnnnnnnnnttttaaacagttttttttttcttaat

SEQ ID NO: 130923 - DNA, 898 bp, Cannabis sativa
  modified_base (859)..(861): a, c, t, g, unknown or other
atagaggttctactgtattagttattttgagcttttaaggcttattctattattttgtatatttttatgtttgatgaccagttttttgcattattttttatggtttccgtattttttatagtttttgtgcaattttttatggcttgcccctaattgtttaaagtagatttgtgatgtggtcaatggatacgataaatattttattttgtactcatgccttctacaaacaagttttcagatttgagagataagtgtttcaagtcttgacatgataatatggattgttttaccatctttatttgcattagctattttttttttattaaattgtgttgtaatagagttttatgtattattaatctgtaagtcaattttaagaaataccaactgttacagagattttttactgataaatttattttaaatattatttgtttgagagttattatcttctaactattgagaatttcttttattaggttttaatatcatcacaggggattaattaattttttatcttattttgttttgtagatattttggggaccattcttgatatgttaatgagttgacttgtagtatttactaatacaagttaaagctctagctctttgggtgtcttttttgaggaagttataactttattgtcaaaattttcgggggtaattttattttatgttgctcgctggctttagcagttcatggtttgacaaagcaccctctagttagacgatgagctatccatgttcaaggaagttcctgtgctgtttgcggatgtctgtatcgtaaattcgtgagtaattttaatcactacataaaaaaaatagataattatataaaggaaaacttacaaaaatannngaatttgggttaatttttacaaaactactgtcacacg

SEQ ID NO: 130924 - DNA, 518 bp, Cannabis sativa
ttatacatatatcctatgtactcacagataagattttatatatccaacactatagtccaaatactcaagaaggaaatagatttattttcgattacttaagagtcgcttataattaagatgcaatgcatgcataatttttaatcaatttttccctttattttcgaaatgaaaagagtccacttttgacaagggctataattataatgatggaatattggataatgtattactggatgtctatgaagaaacgtcacatcttttcagccactatatatataatgacaattaattaagtgtaccaaaggcttgctgccgactgtgattatatgcgaaattgagattattatttagggcatgaccatgacatttgcatttgaccaatattggttttcactttccaaaagcataccatatattaatagggacatgtaaaaaaatatgcatatgaaatactttaatattttatccctaaactaatacatatcgcaattgaaaatatatgatcactttatctaaaa

SEQ ID NO: 130925 - DNA, 848 bp, Cannabis sativa
gagcatttatccccatctttgagccaagagattctggccctttgtttccaatagatcgcctttctttctagagactcatccagctctcggcgaatatcacgttcttgaatccagtctcgagacccagccggcagactctgtagagagttgagtttattctccagctcttttataaccacatcaagctttccaaattgggttctactccagttcaggagggccaccctagtggccccaacatttttgaagattcttgcaggggcccaattgtgcttaactgacttccaggcattgtccactaccagattgcttctagcatcacgggtccacccttcctcaaatttgaagcatctcttatacttggcgaccagaccatccgacattaagcacaaaggcctatggtcggagttgcaagtctgggacgagcagaggatggccctaggaaataaatttagccaggcgccattcactaaacctttatccaacgcagatttcacatgatgcctcccagacctatggttatcccaagtcaagttgtccccttggataggcatattgattagacctcttgcgtccaaaaggttagagatgattaggatgaaaggatcccgacccgaggaaccttctctttcagaggcactgagaacaaagttagtatcacccaagatcagccagggccccccaaatctatctcccagagtcagaaactcagaccagaactttttcttcgcatgtaggtagggaggaccataaacacacgataggagccacgtatgagaggggggatctgaatacactatccccgatatatgattgcacgagctagagatacactcaaaactaaaccc

SEQ ID NO: 130926 - DNA, 603 bp, Cannabis sativa
aacatcacctcaattcaaacttaggtcaaattatcctaaacctacaaaatcatggcagggcattaaaacacataatttcaagcttcattctcatgtaaacatacatcccaaactcaagataacactaatcaagataagcccaacacttgagcaaaattcctcacaatctcactatcaagaacttgaataccacaacatactttaccaacatccaaacaacaataatcagagccaaaattagatttctaactctgaaaattaaaaaataattcataatttaacaagttcaaacaactaaatagttatcaatttacttccattctttacacatgcattcaagatcaaaattaagaatagagcatgcttttcaaactacgacaaatctgaaatgaaagttcagcaagaaaactttaggagcttaccacaaatccaagctcctacccacaagagattcaactccaaaatacctccaacttcaagaacaaacaacaaagtctaaactttttagaagataggtgaaagaggagaggggggttcagtttagggctagaggaaaacaactcagaaaatgtgtttcataattatcaaatatcacattttgtt

SEQ ID NO: 130927 - DNA, 950 bp, Cannabis sativa
ctttagtataattcatagaatgtattatgaaaaaagacaagatttttattaacacatctttctttaatgttttataaatagttagggttttccaaaatttcttttacaacttcttctcttttgttctacgtgaaataagagcaattcaaaaaaaaatttcttactctaattttcttctacccaaaataataagcccagaaaaaacaaatcaagttctaaaaccttagaacagaacccagagaactctccctaactcaactttcatgatttaacacttatatattggtgtaatgagatttattaaacatgagtttattggatatgttttgcatttgactttttggatattttgttattttagataatttgaattctgaaataagttttatgaaataaaatttaactagtcttttgaatcaattgtgtaatgaagaaaaaaaaaaggtattatagaaattaatgttttttattatttaggcttgtgaaaataataaaatcccataagaaatattacaaaacaatattattgtttattattttataatactctttaatattagtgtgtaaatgtattataaaaattaaaataatatttatattcaaacttataaatattatacaaaagtattattatagagtatccaataatactttcagtataagtgaaaaaataaattataaaaattataaaaaataatgttgattcaaacatattatagcattaagataatactaagaaaatactttttaataatactttagtataattcatagaatgtactatgaaaaaagacagaatttttattaacacaactttctttaatgttttaaaaatagttagggttttcctaaatttcttttacaacttcttctcttttgttctacgcaaaataagagcaattcaaaacaaaattttcttgctcttattttcttctaaccgaaataataag

SEQ ID NO: 130928 - DNA, 854 bp, Cannabis sativa
tttaaataaaattaattaaatatatttcttaataaataaatttaaaattaaattaaatttatatatttaaaaaatataattaaattgtaataaatctaatttttattatttaaattaataattaaataataataataataataatacaagtctaatatattttactattataaaagaggtagtaatggtaatgatgtctatattggcaaaccaacttcacccctaacaacattattaaattacaattaataataaagataagggtaaatagtggcataagtacctaaagttttaggtttgtaagcgtcataaacctaatgattttttttagtagcataagtacccaatgtttataaaactgtaatttttttccagtttttttttccagtttcatcagtcatcagtacagactcgtacagactctgttattgcagactctgttattgtcttaaccagaacacatataagacccaaattttagattattgtcttgaccgatgacttttctaataccaatgacttttctagcaaacttattattacatgttttatcaaatttatttattgttttacaattttttttttaaaatatgtcataaaaaagctcacataaatgtaaaaaaaaagacactcataaccccatgaaattatttatttattgttaaaaacaatcatagattatgagtattgaaagcaaaaatttcactcaccaaccaacattactcatagtaatatatccaagatcaagtatttatttaaagcatcgaattcataaatacacatacctcccaatccatccacatgagtcattttgcttgaatgcctccaacaagaatcaccaacaagttttcaag

SEQ ID NO: 130929 - DNA, 612 bp, Cannabis sativa
tatttattgaatctttctcaattaaattatagaacacctaacataaaactaaatatacgtgccttgtacgtaactttcttctagtataaacataaagggtttagctgcaaatttttctatttataactaataaattaaaaaatgtgatagatttggagttattattttttttaaaataaaataaaatgtggtagtatatataataataataataataataatatatcgatatttttataaaaaatttattaaaataatagtaaaatatgaatttgtagatttatgctctaataaaatattaaaaataagataattaaagagagaaaaaaaaatcgtaaagttttgaattaatttttttactttgattcaaactcttttccatattttttacatatttatattgctatgatgttttattgcttgatctcaatgataataacaaaaatttattagtagaataaataccaaaacttacttttcatcaattgtttaaatatatgttgttgtgttagacaacaacctcagccagcaaacaaacaataatcaacacaccagaaatgaattaatgagttgcagaaaatataataacagaatttaaagaacacaatcaag

SEQ ID NO: 130930 - DNA, 691 bp, Cannabis sativa
agatgtgattatagactttcgatcaaaatagagaatcataatgtactcgacgattaatatgcatgctttcaatctaatagaaataatgaaacatcatatcaatatgaaagtttattcaaatttgaggtagaagtctattatgataactttggtacttcaattaaacttttttttttttgagtatttaatttcttaaatgaaaaatgtatctgtaccgagttacttaatgtcatgacattttcaacatttccataaaaatatatgtaaatttaatttttggttgtaaataaatactttcggttatatttttgaaactctataagtatctagccattaaatgttaagtcattatccacgtgccatttttttattggtatatttcaactttttttttaaaaaaaataaaaatgtgatgacttggaccaattaagaatcgccacatgcaaatttacttaacacttaacatctaggtacctacagaagctttagaagtattattactgttaaaaattaaacttaagtatttatgccataaattactctttttcattattatatattattatcaatataaaatgaaaattgattaaaatttaatataaatataaaattacatagttttaaaaatatatattattaaattcataataacaataaaaaaatcatatgaatttatttattataaaattgt

SEQ ID NO: 130931 - DNA, 929 bp, Cannabis sativa
cacctttgaaagacccctgaattcttccatttaacataagggaataagaggctccatggaggcaactttgaatccaggaaataaatttggaaggaaaacatagacctttcaaaagatcatcaacaaagcactaatccacaatatcataagctttgctcaggtcgatcttcacgatgcatctagcagagatattcttccgagtatacccttttaacagatcttgtaagattaggatgttgtgagctagtaaccttttctttgacaaacgcaccttggttctcatgaataaggaagggtaggacttccgatagtctggaacacatcatcttggagatacatttataaatggtgttgcagcaggcaataggccggtaagcaggtttatctctattccctctgtcctatgcctggtttgtagtttagcaaatgaaacccatcaacacctgtttataagctgttgtttcaccgaaaaagttgtgcaggaaattaccacctggtgtgcctgtttctcttggctgagcaacatcatggagtggttcttccggccctcgaacaacctgcaaggggaaggtgctaaacgcgattgttttggcgcctttatactttatttggagaaatagaaattaatgtatttttgaattgaaatgtaatgctataggatacattagcaaagagattaggcaggctgtgaagtataggctgctttgttgcagcagtaggggaaaaacaaaaaagtttgatgaatatattttcaatgtaatcaatagttggtagaggggttgcttgtttttgggcgtctagttgtttttgttgttgaactttgctggttttgaacaaagaatcctttcttgttaaaaaaattttgtaattttttttattatttgtgtgtattagtaaaataatgcctaaaattttcatatttgactcta

SEQ ID NO: 130932 - DNA, 1453 bp, Cannabis sativa
  modified_base (1105)..(1109): a, c, t, g, unknown or other
  modified_base (1395)..(1427): a, c, t, g, unknown or other
gacatttgcaaaaacacggtttttcagaattgaatcccaatatactgccataactactctacagtaaaatggtgttgcgtagcgtaaaaaaatacacgctaatggaaacagataggtttatgcttagctatttaacactgccaatatccttctagggatatgctttggagatggctactgacattcttgatgttatcccatctaaatccattcccaagacacatgtataattatggaatggacgcatgcctagtctgcgccattacggaatctaggggtgccccactcacgtcttacgaaagaaaggagggaaacaaaaaactaaattttgcatgtgtattggcaactataatgagattagtggtggataatttatagtccaaaagatgatagtgtttttctcaagaaatttttcttcacgggaagatcactatgtcaagaacttcaagccatgcagccacgtttctaggggaaatgctttcgaaattgaatcaaactaatgttcctttgtcttctacaccagtataagatgatcccacaccctcagttgaaccagtttaatttaagataattgaggaaactatcactaagggtcttgtttaagaagtcatagtacttcatcatagttggagagttttgaggaacctgattatgcccatactcgtcttcacaaagcggtcattgtaatatagtatgggcagtcatgtccacaaagagatatcctaatcaaaaagtaattaatagaactttaagcacaaaaagtaaataaattgttggtggagtttgagaaaatatcgatagtaaaattaaagtagacaaaattggtagaatatttcaaaaacaaaagtaataaggtttcaaaaatcacctatatgtttgactcctttatttgggttttgattcacacatataatacaattagattgctcatgtaacacattgaaacttaggcgcgctacaaagattttctaattaaagtgacaactttactaataaaaggggtttcctcaaaaattgtgtcaaattaaattttaatttaaactattaaacattataaacatatctatatatatttacataaaccgggatcccgtgtttaaacttnnnnnatctttatcaaaatacttttacaacatgtcacacaatcactacgaaatatagccccactcgtttcaagaccgaacactcctggttgcaccgtcccgacatgtacaatcattctctaagctcggaactcactcctgttcagcttttgcttttcttttacctacacacaaaagtaatatcagtgagttaacaaactcagtaagaaaagcacacaacatatatttgttgggttttgtgccctaaataaaggccattacaatttaatatgattagttatcaatttaagannnnnnnnnnnnnnnnnnnnnnnnnnnnnnnnncatgcttatggtttaatatatgcaca

SEQ ID NO: 130933 - DNA, 534 bp, Cannabis sativa
tggagttttcaagatgaattgcgccttacactttccattgtttagaaacatttttccattatgggcacttgcagaataccgcaatcaagttttattgttgggcaaggaccaaaacccttaattttacaatatggtgtgagatcatgtaatgacacgtttattatacagtattcgaaatcagaataaattaatggagtaatataagagaataaatgaagaacaatcagaatcaatatttgtaatatgttgtttattttatcaagaaatgtaattgaaatacttaaattgactaaattgtcattttaagttaaactatagtagtggtagttattttataaaatatattttaaaagataaaattatcattatatatttaatttaaaaaaataaaataaaaataaataaaaattattgaaaattggtgagaaaagtattctgtttcttttatttcttattcgatcatcttgtcgttttctttaattttaattaaataagtaaataaatgtaagagaatgattactttaatagttcaca

SEQ ID NO: 130934 - DNA, 1763 bp, Cannabis sativa
tcacaattgaatatccaatgtttggcagtcggttgtaattggatcggtcggttgtcattggattggatcaatttatgcacacccctacctaaaataacatccttgtctagtttgaggagcatatataagcttaaatttctccttacttatatcaaaacaactatccctatacataactggaaagttttagttctatttgcaaagcataccatccaattaatgcactcattgagaacaacagagcaatccacagcacaaataagagcttctatatcagaagtaggtattacaaactctgaaaatatgttaggcattactattttcctccacgaatcgcttctcaaactataaatccaaacttgattaccctctttaaacacattactagagcgatcatcataaccaacctcagttaaagatgtgcactgtaccacttttaaatcagtggtcaagtgattatagccaagtccaactacagtagtagtataatcacgtaccttaagagtagaagagggcaattatttaaactcgttaatggtggggttccataaataaatctcgccacctgtacagcgagaaaaccctaatacgccattatcactgcccataattgacatatttgttggaccctcttcaagaaagggtaatttgtgtgaagaaatttcattaaaagtgtgaggatcacaaatggataaagatggagaacttacaatgttgtcctggaggaaagctaggcgaggtagaggtggatgatggtggaagtgaagatcgataaaataaggagtccgtagaagagagagccaagttttagagacgcactcacaccgtttgagagatttgtcatcgagtcttgaaagaatctccacaagaatatcacaaggaatattactgaaaaccctttcttctttctcacgctttgacgccattattatttattttctgttaatttgattcagagagtaaaattttcctaaaggttttcatccactttttatatgtgtaacatttaacacaataaataaatatttaaatttaatttttagcgataataatacttatattatataggtacttagcttattaatttttttttctaaaaaaaattagtttttttttaaccaaaaaattaaactttattaaagtaaatcagctactaagatagcttccaaaccagcagggacaacacccccgcgggaaacagagtcaggaatagaaccagaagaacgagctaaaaagttaaccgtttgatttccggaccgtttaataaaattaattgaaataggaaataaaagagaagattgcataagagcaacaaaatttgaaattaaaagccccaccggagacaacaaacgcttcttctgttgcacgacttgcaccagcagcagcgagtccgactccataaccacaccagcaggcacacccccctcaacccaccttcccttcacccaactgagcgcctccttcaatgccatagcttcagcaaaaaacgggtcgggttgaccataagttttaactgccagcgcattaatgaataaaccattatgatcccgagcaatccaccccaaaccaagtcattacgagctcaccgaactccccaaagaagcatagcaaacctctcaagacgatcattaggctgcaccttacaaacactatcaaaccagctgctaaacactacagcttcactccctccaactgtccctcccagccccctggccagaaaactcttagtaaaagcgcaactaaccattatatgaaaaattgtc

SEQ ID NO: 130935 - DNA, 1058 bp, Cannabis sativa
cccattattaaaattaatttaaatttaacattattatttccatcaaatctaaatccggtaataaattttttaaaagtaaaaattgcttttcaatgattcatctttgtcaaaaaaaaattagctagggagatgaatattcagttatatggtgatgtgtgtatgtggtgggtgtttgagataagtgaggtgaggtgtcacctttggtattatatgactttatgggtttatttttcttggtggagatcatataaatatattgtgtttctttttttgttttttcactattgttgctgaattttttatgatgaaagagatatcacttttattaatgaataatttgcaccaccaccagcttattcatggcagcagttatggtgaagaagaaagaatattgaaaaagggaaaaaagtagaagagaagaaatcaagtatgataaattgatgtttattgtgaggtggtgaagtgaggtggcccctttggtattatatgactttaatgaatttcttttctggtggagattatatatatatatatcttgtttttttttaaaaaaaaataataattagaaaaaacaaaaataaatgagattataattgatagaattattatggtaggttgaatgaaagatatcattaatgtttaggtggaaatggttttttttttttaatacaattaccaaaatggattatggtgggataggtttatagcttggtaattataagtgtaatataaactctataaattacttacatatgaataatgtgagataagaacatacacaatttttttttttgatgaattttaatcacactcatagtattattccaatcactatttagatggtaatgatagattcatgataaagtgaaaaatgaaaatagttgatcctattttgaatttagtattttataaaataataaattggattctataacttttaaaatgatacaaagtagtaccttaatttttaatatttttaatacaactaacttgaagacatttagcacgagtaaatacaaaaaatgtattcaattttatcataataattttagggataa

SEQ ID NO: 130936 - DNA, 979 bp, Cannabis sativa
ttgcaagttcttatactgatcttcaaattcaaaatatttatcttttatggattttgatccactaaaaggattttagttgacttggtttagttaagtaagagcagataattaattactacattagctcgttggaggagtacttaatacttttctacttcattattatatcctgaattgtgatcataacagtggcttgactactaactcatgtgcatatagctagctaatgttttaggatgaaaagtaattcacaaaaataaaacaaaaagaggcaattgattactttgtttgctttgagattggtggtagtaattgggtgtttgtattgcttcaagacataatcacatatagcagggtgatccttttgcttgaattagcctagcctgggtttttcaatgacttttgcaggcaatctaagtcagtggtacttaaagccttaatgctgtcaaacttgttaactttcttggttctcctggtatggttactctctatgatgtgcttgtgttttgtgctccagaatacatatacatatacatgcatatatattgtagttatagttaactctgctgcactatttcgagaatttttatacactttatttgtattgcaccagtaatttttagacactttttatttgtgttcaaacatgaattattggatccatttgatttttatacttcatttattaattttgaaggcttttctgtttttcttcttttctttttttgtaagaattaattttcattattattgccttctgatgtgttttttgttaggtggttatgtttgcttgcttcattagtttgtttttttttttcttcgatagcattttttttgggaatgtgggtttggatggaatgaaattgcattgtggtatcattattgtggaatttataattttataaggacaaatgcagaaaaagacgtatattttgatggagatgaagacattctagaagtacaagatgctactatacaa

SEQ ID NO: 130937 - DNA, 1092 bp, Cannabis sativa
  modified_base (1060)..(1060): a, c, t, g, unknown or other
tttagggcataaaacccaacaatggaagctaaggctatgttctagagtcttagttgggtgctacaacttcaattgtcgattgcaatagtggagactgatgctttacttatagcaaatgccatacaaaaaggttcttctacaattacttcttgtagtgatttaataattgatatttctagttttatcctttttccctcaagtgaatgttgtccatgctaaatgttcagccaacaaggttgcacatagtttagctaagtttgctttaggggtggatgagacttgctcttggttggagaatttacctccaccgttttactctattattgtaaatgacataccatcttaatttagaataacaagtatcttttcctcaaaaaaaaaaagtttatttttagatctacgatgatcttaattaggttttaaatgacatttaatcttagttagtcacttaaaataatttaacttattattttaattaaataaatagtttaaaattaaacttgttgtgtgcctatataaagaaagaaaagaagatagtaaatcctaatgtctcatcttcctctcctcttcctttctgcaatttttgataatagtctatgccatagaatttcaaaaattccatctcacttccctattgattttagccccagtgaattgaatatcggcccacactattcaagatggttctcagactattgtggaagagcatgtagaatgttacatgttactcattaaacgaaagatagatttgggttcattactttgaaataccctgctacaaaacaagaatcaagagtacttagagtaattgaacctaatgagacattatatttcgatgcattctaaatggaaggaaatcttaatctttatatgtgattatttattgttataggtttatttatatttaggatgttagattatcgttgtataattaaatgttcatgattagtaaattaagatgctggtcaaataagatccaataacttgcctaagagctatggtaatgatttactttcatgaaatatgaattaaaaagatgttttgtgttgatttggatggnttcatgttggtttatgtgattatatgatgaat

SEQ ID NO: 130938 - DNA, 1941 bp, Cannabis sativa
  modified_base (162)..(163): a, c, t, g, unknown or other
ccaaaatttaattcgtcttggcccatatattttcagggccggccctgtattataatatatatatatatatatatatactatatattgcatatatataaacatagaagaagaagaattcaacacatacacatgtaatataataatatatatatttatatatanntatatatatatatatacttatttacaagtttaagtatagattagtagggattaacataacttgaacaaggtagttacaccttatctctaagcactaagaaaagtctcatggaaatagttttgagaattatcaatccttagacttttctaacaatttgctttttttgatataaaaaactagttcatttcaaatgagcaccaaagaccttattttataatgtttaggtgattacacttagaattcaatcacacaacacctcatttctctcatataaatgagtattaatatagtttataataactatatttcataactttgaatagaaaatttgacttagtatgcttaaatgtaaaatatgttattttaatatactccctaattagaaaaagtgtacatatactttttgtaataccctaacgtttaataactggattagtaaccttaactaagttaattaagtaataatgagaaattatattgttatatgatttaatatgtggaattattgtgatgtattacattttaagaccccgttggtatatgtcaggggcattttcgtaattctgacctaagaagggtaaaaattataattttatggtatattgtatttatggactatattattatatagtatgtttattctatctttatgtagatgatttctaataagtcggcatggtatagtcacaaccggatattttaggccgaacaaggttcagggcccaaaatatattttcgaaatttaattatggattatatgtgttaaatgagaaaatatgaactatgtgatgtctgtgtgtgagtggaaatgacaaaattatccttttatgtgtgctttagtggcaatatggtcatttgaccaaataatctattctcatcaaaaatcaatttttagcaaatagaaattcattttctgggttttgaaaccccaaactgccctctctctctcaccctctctgtttttgtgatttcaactaaattttgtggaagaaagcttaagtttggtgtagaattttacggattctcttacttggaacttggagaggattaggtaactattttgatctcctttttgttgcttgaatttctgatttttaagcttcatgatgatgttcttggtgttcttatgttggtggttacatgttgttgtaaattaagagaataagtgatgtttttagtttgattatactttggtgttatgcttgatgtttctatattgatttgggaagtctatggagtggattgtgatgttgaaattttagaaaataccttgaatttttttaggtttgtgctttaagttatgtacaatattaatttttgtgtagcatgcctaaagtatgttttttattttgctcttgagctatttgttgtgcttagttttataccaatgttggattggtttggtgttgattagagtttgatttgtgcataaaatttgaatgagttttggttgaattttgggttagtttcgaaagtatgaaagttgggtttttttgagggagcagaggctgtcgccgcgaccacagcaaggctcaccgcagtgagctccaacagattggagctgccgcggcgaggaccctgttttcctgggtttttattttttttgtttttgtcataacttttgatttcgaactctgccatatctacaccactaacaaacaaaatctaaagttagctatgtaacaagtaatctatacgaaatattaaatgcaaaacaaacattatgtattcagcataaacaaacacaatataaagtaagctatatatcaagttaccaa

SEQ ID NO: 130939 - DNA, 2548 bp, Cannabis sativa
tttttctttaattgttaattatatcttttaaataaagtaaaaaatacctaacataaaattagtatacgtgactcgcacgtaactttttactagtatatatatatgtattaatttgatataatatgtaaaatattataagttatatatatatatgtattgatttgatataatataaaaaaatatttgttttttaagaatttaagacacataaatagaaaaaatttgctagagttattgattgcagcgaccacaaaaaagttagtattttttttattcttatatgttaatttgtaaataaatgtaatttgtatatttattaatttatagtataaaaaattatttttttagtttaattttaaaaaaacacatttaatatagttttaaaaaatagattttatgtattttttttttagtgttactaattgtttaatttcttctagttatatgtaagttttgtgtatgtagaaataatgtgaatttgtgatgtatctgaagattgtcggagtgtttaggacaaatttaaatttttttggataggttaaaatatagttgttatactgccaaaatgttagtagaattttgagacaatataaattataataatattataatttataataagttatcaaacttataaaaaattattgaaaaataaattataaaataaattattatttaaataattaattatttaaaaaatttcatgaaattaaatttaaatttaaataatttaaaactaagtaattaataaaaaaaaagtgtaattttatatttttttaaaaaaatattaagtaattagattttcaatttaatatttttttaaaaacttaatatttaaatattattacaatgatattaaaacaaagtatcttaattaaaaagaagtttaattttatttttttaaaaaaaaaattataaaataattagatttttattttaaaaaatatttttaaatttatttaatatagttaagttttattataaatattttaaaattcaatgcatttaattttaaaactaagtatcttaaataaaaaatgtttaatttatttttaaaaaaaaatattaaatatttagatttttaattcaataattttcttatatgtactttatatatttaagtattattaaaaacatattaaattcaatacatttgattttaaaactaaatattttaactagaaaaggtttaattttttaaaaatttatttaaatcttaattttattaaaagaaagataaatattataagtttaattatcctaatatttctttcagaattatcaaaatactatttaaactaatagttaaaaaaaatcataaattgaaataaaagcactattagttcaacttgtacataaatcataacatttgtgtcacacaaacaagtttgattataatttattaattataattttttggtagatgacaatcgataagacttgggtgaccatgagaaatcgtaaggatccagcttactgggaaagtcttcaagtctttatggcacttgcgtctaatcacaaagattgtgacggaagaattttctgtccttgtgttagatgtatgaatactagactgcatccattgaacattgtgcagacacatatcttcacaaagggttttgaaagcagttatcataggtggatttaccatggggagtcggatgaaccagtcgaggccagcaacaatgttgatgtcgataagatggttgatgtaattgaaaatttcttccctcctataaacgaggaagaaagagacactgatgatggtattcagaggggtcaatattatgatgaaatgtttaaggagatcgaggcagagttatacccggattgcaattggatatcctccctcaactttatagcaaagttaatgtacttgaaaaatttgggggaaaacaccaaattatatttttgatgaattgttgaaattgctaaaatttgcatttccaaaggataacaaaactcatgctgttatacccgaaatttgaccatcgtttcaaaggaggacacgtgtcaagttaaggagaatatggatcaacgcatgaagtggtaattatatttgaaaatggaataacccattaaatgcggaagtgacagagtatatttacaacttgctgagtgtaaggtctcaagcgagataaagatatacaaattgttgcctcgtgcattaacgagaaaccatacagcattggatgcacaaggtgaaacatcaacctctctacgcctgggtagacgtaagcgaggcgggtgaacccaagcaactaatagcgaggcgcctatctcgctatatgaaggcacgctcttgatgctttcatcagtcagcttcagacatctttcaatgagatttatagtcttgacgagttggttctctcgagcagaaattgacattcaaatgatgctaactgttgaagtaccccttgtcactaagaactacgattgtcgggtgaagaagtgatgggatttacattgtcaacttcaaagaaataggggaaaaagctccagctcgctatcaaggtcattggtactgagttcctgtcgagacatccca

SEQ ID NO: 130940 - DNA, 2291 bp, Cannabis sativa
gtgtattttctttggcaaagaaataatccttccttagcacgggcaatttcaaaaccgaggaagtactttaggtctccaagagctttgagtttgaatttttgatgtagagaatgctgtagctggtgtagatttgatatattgggaccggtaatgatgatatcatctacgtacaccagaagagctatgaaagaatcttcggatcctttagtgaataatgtataatcggcttgagattgcttgaatccttcttggagaagagcatcggatagctttttgtaccattgtctggaagattgcttcaggccatagatcgacttgtgtaatttgcataccatttttgtttctgcattaagagaagaaggtagggtcagaccttgtggtatttccatgtaaacttcctcgttaagatctccattaagaaaggcgttattaacatcgagttgtaaaatgtgccagttcttaatggtagatatagcaagaagtaatttaagggtgaccatctttgcaacgggagaaaaagtatcaaagaaatctagcccttcttgttgcgtgtaaccttgggcaacaagacaagcctttagtctttctattctcccatcactatggtatttaattttgtaaatccaacgacatcctatagctcttttgttggctcgaagagggactatagaccaggttttgttatctgaaagtgccttcaattcgcattgcatggcttctaaccaagctaaggtttgtatggattcaaagtaagttcttggctccttggtggacgaaactggaaggataaaagctttgtgagattcagataagttagaatatgaaatgaatttatcaatcttatgtggagttgaagaatggtcttggatgagtgagtagcactcaaaatctcttaggtagcccggtggtttggattgtctactcgatcttcttgggaggtcctgggttatttgttgtggtgaaactgctggtgtaagtgaaacttctggtgtaaccgtgggggcagatgcttgttgtgttggagcttctggtgtaccagtgggagcagattcttcctgattttgatatgagttactactgagctcatctatgtgaattgtaggatttgaagcactgctaggacctgtaggatactcacagtcaggtaagtcatttatcatagaatgaggaagtatagtgagagacaaaggatatatgttagcattctcattattttgtttctcaaatagataaatgttttcatgaaacacaatatttcaagatacaaacatttgtttattattgatatcatagagtttgtaacattttacaccttgagggtatcccataaggatacaagtacgggctcttggggagaatttgtaactctggtttgataaagttgaagcaaaaaccaaacatccgaatgatctaagatgttggtagttaggcaacttatcaaaaagtaattcatatggagttttgttattcaataaaagactagggattcgatttattagataagctgctgtcaacacacactcattcctgaattttatgggaacacgtgactgaaaataaagagatcatgcgacattgagaaggtgctaatgttttctttcagcaacggcattttgctcaggcgtttcaacataagagaactcatgtaaaatgccgtgtttagaaaaaatatccttaaacaccagttctggtgcattatcagaacgaaaaaccttaaaaacctgcttgaattgagtctgaacataggtcagaaattgaggtataatgaagctaacatccgatttgtgttgcatcaaaaatatccaagtgaatctagaaaaatcatcaactaaagtcaaaaaatatctgtgatttgtgtgtgacacaagatgatatggttcccaaacatcacaatgaacaatatcaaagattttattagaaaccgtattgctatttggaaaaggaagtcttctttgtttagcaatagggcaaacatagcaaggagaagttttatgtaaatcagaaatgttacactttaaagtattcttaagcagattcaaacgtttgttggataagtgtccaagccgtgagtgccaaacttcagctgagacagagaagacttgagttggatttggtgtagtatcaagaatttagagatctttgacattactacctcttctaatcgtcttcttgctggctttgtcctgcattgtaaattcatcagcagtgaaataaaaagaaataggggaatttttagtgaggtaacttacagagatgatattgtatttgaaaagtggggcatataaaacatt

SEQ ID NO: 130941 - DNA, 893 bp, Cannabis sativa
taaaatgcaagccaatcttgcttttgttgcttccaaatccaatcacaatcggtttaacccgccaactgtttgaggaaatcaccctgagttctcctcaagaatcccagccaaaggaaatggccgtgcctacataccacctcatgctcgattgatatgtcaaatttgtatgaaatttggccactctgcaccgatttgccactaccgttttgataaaacttgggttccacccaaaccaggagctgctaatccgcgtgcatatcttactgaagtggacatggataatgaacctcaggtatattcctctaccatattacccgattttggtgatgaccatgtttggtttgctgatacaggggccacggctcatgtgtcaactgggtctgaacctcttgactctaccacggcttacaatgggactgaagctgttgctataggtgatggtaagcagcttctaattactcatgttggctctacatctttaccttcttgcacctctatagtccttcatttaaattctgtccttaaagtccctcaaatcaaaaagaatttagttagtgtttctaaactcactaatgataatgatatctttcttgaatttcacaagagttgttgttttgtcaaggacaagtccactggggcagttcttctgaaaggaccagttagagatggattatatgtgctaggagcctccaagaattcaccatatactctccaatgcaatctcaccactacatcccacttagatgagtcaagctcttctgttaatgccattttcgattgtaatataaactcactgttaatacagtgcaacattgtaattcttccttagacataaataaagattctacttctcattccaattttattggccattctaatgtctttatgtctac

SEQ ID NO: 130942 - DNA, 530 bp, Cannabis sativa
ttcaaatcaataaattcataaatactacaaatagtagtaacctattaaataatatgatgaagatgaaactcattaactagtagttgattaaatttgcaaagtccttccaatttaattggcttaatatagtataatctttcaggaccaactttgagtattacttttcttgaattgatatgtttaaaatcaagtagtaatgctattactattttgagaatatgaatatgaagtaaagaaaagaaataatatgatgaaaattgtatgattacgaatgtattctagtgtgtattattagaatatcaaatatttatttcagaaaaaaaagatatcttattattattatatgtttatttatcaaatctcaacattcaacaatccaaaaggtaatctttctatctcagattatcaacagcaagacatgttatgaatgagagcgatttgattatgcatcttctcaatggcctaagaccagagtatgatcctgttgttgttgttgttgtttatgtgatgagccttgtccgtaatctctc

SEQ ID NO: 130943 - DNA, 1554 bp, Cannabis sativa
ctgctaagtacgatttaatatacaacatctagtgtgtgtgattttaattctgatcacatatgtagatggacatgcaataaaggtactttctataattagattatgcatgattgaaccaatatgtaataaatatcattcattagctttttgtttaccataaaaagagttcatcatatcacaatggatgatcattaatagttgaatcttgagtatacatgaactcatgtttgtgttcattgagttctttgaatcactcgttaacgtttctcagagaaaatgatttttctgtttttggagcttaataatatgagtgtttgggaaaatactatacaatagtagaatctaaactttcttaacggatcgaatattagttcccttatagtgttaattttgagagtgctaacagctggatccaaatttataatgagttatggattaactatttacattgaattaatggtacataaggaatcaatagataattagaagggtaaattgatattttgaccaactctaattatcaactaataactggaggacgaactacttatattgattatatcaatagattacaagtaagaattctgtaaatataattttacattgtccaagagtgcaatttcatatttatagtagagtaataatttaatcaatatataaattaaattattctattgatgagattcataataatcttgggtttattggagcttcgaatattagtccatgatccctaagtcacctttatacaatagtgtataggggaagattttatttgatgaatggattttgagtgagaattaatttctatgggaaataaattcttaagggaaaaataataatttgtgaaattattattttaattaattatggtagttatgaattatataactaatattatatcaattagttaaatataatattatattaaataatattaaatagagagatgaattatttcagagaaaataatatttattttaatccttgtaaataagatattaataagaattaatcaattattatttattagtagaataaataataaatcttatttgttgcaaaattgggaaattaatttttgaccttaaaatatgacccccacgtgtatgcctattctacacgtgtagggtgacacataaaggcccatgattaatttaatttaattattttatttagttaaaataaattaaattaaattaacttaattatattttaattattaataaaatacattattagataattatttaattaaaaggatgattgctaaaataaaagatctactaatatttgatatttggttattagatatttatattagaatttaaattctatattcaaatcaaattaaacatttatcttttatttaaaataaagaattaaaagctttgtttataacaatatgtatatatgtagggatatatagaatcataaataacaacaattaataagccaaaaacataatagcaaatagagacagataacaaactaaaagtagagaaaatagaattggatttttcaaccctattctctctctctgtctctctctct

SEQ ID NO: 130944 - DNA, 1002 bp, Cannabis sativa
tatgcagtacaatatacttttcttacctttaatctaggttcatatatgtcggccaacccatgtggagaactatctacgatgatcttggctctatgtcacaaaaacggtaaaccaataagtgtttatcccaaaatactgcttaatagttgcaaaagacaacctagggtttcctaccgaaccccataacacaaatacactaaaataaaacttatattttggttctaaaacatacaccatatggtagagctcgttccaagctatgaaatagtatatatacaacctccaaaatggacatccgagttaaaaattatggtcaaattacaaaatttggcttttttgaaaactgaccaaatagaattctggttggtagcattcagagtttcgattggtacaattcgaaattctagttctgaacagccagaacactattttccttaaccttaaaacactccaaactcactccaaaacattattggaatttattttaccaggatagatttactaacaagtatgtttgattaacaccctaaatatgaattctttatgatgaaattaaagacataagagtttagaaaaccttacattgatagcagaataatatgactccttccgcttagatatctaacccttgttcttttctatcacagagtaataaaaagatctgagcctgaatctctttctctccttcgggttggttaccaccgtcttccgcacaattttcgatgccaacttagcaagttgatcaaacttttttgtatattctattactaacatggtctcttcttgaaccagtttagtaaactccttccgcttagcactacatactgcctcattataatatttagcattgaacagatccctaaactcttcccatgtcattatgatgatgtatcgggtgtgggataccaactcccaccacacaagagcgtcctcctggaattgaaacatagcgcaggtcacccaatcatttttggtgacacccataaagttcaggatcttggt

SEQ ID NO: 130945 - DNA, 583 bp, Cannabis sativa
gtatctcaggctgtgtctccaggttttcctcaattccctcaggttgcatctcctgagggttctgcatatatctctgggttatcccctaccccttggtctgcaagccgtgaggtttgcctcgtaaatctcttttcccaaggccaggctaattttgggtaccatcttctcgtgctgcttttactacagctatctaacgctccaacatggcattacgctggtttacttcctccaatcgacgcctaagatggcggtgttctaattccacaattggtatgtatcttgtttggtcgtaagcaccatcgtcatcaacctggttagggagtggtcgattgttgctcatccaagatctgtcaagcaaggagcccaatactgggtcttcctagggcttgcattttgttcatgcgatgactcgatagatccctgaggactcaatggttcttttccaggacgatgattaattccttcttgaggattattatctttggtgtcatccatcacatttatgtatgtcaggaggcttttttctgagctttttcacagaggctctcaatgaaagcaccaatctgttaacgcagatttttgt

SEQ ID NO: 130946 - DNA, 533 bp, Cannabis sativa
aatactacaaattaaaagagaggaagacccaatgatatatggtaattaaaggaagagttgggaagatattgttgttattgcatcatatgtatcatgaaagtgtttgttgatggtcatctaaccatagtgtacatgttaagtagtatgttggtgatgttacactttaagttacatgaccatcaacaaacatatccatcaccatgccatgcctgcaacagccaatatgatatatgtgaagaaacagctaataacaaaaaaacaagccaatacaagtatatatggaccaattttcagctaaaaaataaaagctttactaatacaatacgggtctgtctctttaataatatgattaaatttaaacgagtatattcttggtatattcgtcaagtgccaaaagcatatacttttaggataaacccttctcacgtctctgggtagtgtagtatttgtttgtttggtaggtgataatagatttgggttctggtattcagtgttgactggctagtaaactgaaattgcaagagaatacacaa

SEQ ID NO: 130947 - DNA, 1563 bp, Cannabis sativa
tttcacaaaatcaataaataaacttacaaacaaaaagttcggtcatttcaataaacccaggaaaggattagtctaaacccaacatgaattttctccgttggttttcaatttcaacatttaaatacataaaagaagaggagagttaagaaagaactaaccctcttaggaagccgagtgctttccctgacaagccaggacctcatcaaagttcttggacgggtacttgaccgtaataccaccgacctcgaacaccaaattgtcgccactggattttatcccggtaattgaccaccacttgaagaaagccctaactctaatcccatcgagcttcgcgattcgaccctgatcgatgttaccggtaataatcttggagtaggtggccaggtagttatcaggagggagagtgatcttgcacgcgcctccgaggttgactgagaaatcgcctgaggtctggttgatgttgtagttgagaacggtggtggaaggtagaagaccgatgggcaagccaaagtttttgagctcggcgtggaccgcagaaggagttggggtagggttttcagaagaagcagaaacaatgagaataacgaaagagaagaagaagaagaagaagaagaagaaggatttagtcatggctttggattctggttcaggtttttggttagtggtttgtttaaaggaggaggaagagaagggattaaccaattccgtacataactaattctaattcatattgatattttattgtcacagtcatatcacacctatctcatcttgacaacaacgaatgaaagattagaaaagtccaacccaagaccaccaatacgcagtcgttttcattttttttttttttatttttgtttcgatatttcttgaggtggtgaaaagaaaaatggattttttatttttatttttattttttatagataatatactatcgatagtattttaaatggctaatatacaatgtgtaataaatgtgtgtatatctaattcagatttttagaatttttgttaagccttgtttctcttagaagactatctcacattcttaattttttagagatatttacgcacagtgatcatttttcaattttattcccatgattacccctacatattttattaatgaaaagtagcggtacttttcaatttttttggacacgtgtatacgtggggtatttggcgtgttatacccaattttttactgtatttcatttcaacatatcatttccaaccttttgagtttgattcatattctctttgttctcggtttctttctttctctctttttttctctttcattagcattgttagggtttcattttctctgctagggtttatattgtgtgtggatagttgttcggaggagatgatgcttacaaggagttcgatgttgctgtcgccgtcgctagaggcttctaatgtaaagaaaaaaaaacagaaaaaatagaggagagtaattaaaaaaaaatggatggatcttctttgaaagatgtcgatattgataaggagaagaaaagtaagacagcttgcatttcgaagaggagtggattgtcaaagcct

SEQ ID NO: 130948 - DNA, 1072 bp, Cannabis sativa
atataaaaatatgatatataattcaattcaatataatacaatacaatacaatacgatctaatacggcgttccaaacgaggcctatatgttttaaaacaaaattgaagaacatacaaaccttcgtcctccgcctttaacgaaactctctccctcttatatctattttcttcaattttcaacccaaaacttagtgatctaagctcctatagtagcaggatagcaaatcattgaagagggagagcttaaggtaagaattagtttcgttttaagtcgaatacaattggttttatatagtggttttgagaattagaatagttatgagggttctgaccctataagattgttctcggatagtcatgggactagttccgatactttcttgctgaaattgaggtgcttttgagttagaaattaaatttgggactttttataacttaagtccgaacactagtggcgttttctaattaagggctagattttagattctattacgtatggtagtatgcatggtatatatgtgccctgtgaagtttggggtggtttggacaggttccagcagcgtttcggtgagtgcgtaaatttagaaaattacatttttttacccctgacaaaccaatcaaccagttgggaaccggtcaaccgatcctagccaaccagtttaccatttcgggcagcctcgggaacacaggaatcaaatttttaccataacttttcactcgagtgtccgttttggacgttctatataccgtttcgaagcttgtgacgagatataccacatggtgtatgttttagagcaaaaataattttttttagtgtatttgtactacggggtttgctagaaaaccctaggttatcttttgcagctgttaagcggtgttttgggataaacatttattagtttaccattgttgtgattgttaacgcagattttcactagctaaatttgagcctaatcgtgataatctcacacagagaaaataaagctataaaagtaaaaatatgaacacagggttttttacgtgattttgcagttaaaattctggatagtccacaagtcaatcttattcagatt

SEQ ID NO: 130949 - DNA, 923 bp, Cannabis sativa
gttcaaaacccaatcaattattactaggttgtttgaagttctttatcagtgccaaaacacagatttatcttatagcaagtgatgaatgctcatcttcttattagggacaagatgtctcggttttacattgttctaaactcgatcaaatgcccggtgtatgagaaggtggaggagactcatgagtacctattttttaactgtgtgttatctcgaaaagtccagggtttaattttttgcttggatggggtataggggttggtggattgcttatgctggctagaaatacatttatttttaatggttattttagatcaatttttagaattgtaaatgatgtaaagaatacaataaaatatatattacaaattataatcaatagaaatatgtccaatcatgagagagactactttttgagattacagagtaggtaattatggggttggagttgtttggctggaaggaaccgtgagtggctttgttttctgtttgtgtttatatttgcttctatcgatcaatgaagtgttttcttcttgataaaaaaaatgtaatatttagttttattaccattttaaagaaaataagaaaataatcctattgataatacttggtatttaaaatattataagtgcacaatatcttttcattatcaacatggaaagacatttatgtaattaaaaaagtagaggctaaagaaaatgattagtattgtagttttttaaaaaaatttgacttcaacttgtaactgtgagagtaaagataaaataaaataataaaattataatgaaattaaacttgtaaaggtaaaataatctacaaatataacaccaacaagctacttttataataataagataaatatatataaatatctttatatattaaaagtgtctatctaacgatatttcttggtttaacattcttgg

SEQ ID NO: 130950 - DNA, 556 bp, Cannabis sativa
agtacattttggtagaaagacaatcgtgtaaaattaaaaaaataagtccttaaatttaatattttaaagaataattaatatttttgtcattaatatttttatattatcaaattttacccttattatatatagtatattatttgataataatctcaaaatataacttttatagtaacttaattattttactatattttatttaattttatgtaattgataaataatacaaattaaatatcttttacctattttatattaatgaataataaattaaaagacggaagttgaatgagaatgaaaattctttaatatatatcaaagtttaaaaatgtaatttaatatgttaaaatttagaaacccaatttaataaaaaaaactataatcacgttaataaaattatataaaattaaataaaatctttaaattaaataattaagttttaaccatctaaaaaattcagtggtaaatgtaagagaaaaaagcgtaattaacttttttttctttcaaaatatgatatggttagatttttttttttttttttttttttttttttttt

SEQ ID NO: 130951 - DNA, 689 bp, Cannabis sativa
taattaaaataaatgcctacattgatcaataaattataaaccctattccatatcatagcatacacagtaagtagtattacaaaaataagttttgctattttaacatcacctaactattttttataattaatctatacattaacacaataatttcatgaaaaatacaaaaattattgaaaatataatataacaattttacaacagtttataatcaatataaagtcatataaaattaatttataattttacgagtaatctagttattttttatcattattttaagtcttagttatataaagtataaaaatgatttaatacctaatcaaatcactctgtaacggtttataattcatattaagtcatataaagttattctagaaattaaataatacatacaataataatatatagaaattaaataattaaattaccacaagtacttaattatttacccaatattttttacactaacaaaatattctaactcaagaaattaaaatttttattgtcactaaaatctcatatatttaataaaacttcttaatatgcaaattaataaaagttacagcccagaaagaggatattacagcccagaaggcttctagataaattcagcttatggaaagttctatacagtttttggtgttatttcagtcatggattaactactagtatttctgactaataca

SEQ ID NO: 130952 - DNA, 501 bp, Cannabis sativa
atccacataattattaatatttataacaaaatgattaatttgacaaatttctcttcagactattttactttttttttctactgagttccactcttctagcttcttcttcatcttcaacatatatttttttactccacacttattaagtgttcatcttcttcttcattttttcttttttatttttttatattttgtgtttaaaaaatcacacatgtttctataatttttgtctttcattttttttctttgtatcttctatttttgttttaattttttcttcttcctcctttttcctcttatttttgttaatacattagcaatatgtaagaaaaaaatttcgataaatccctcatagccctacatttttatatagattctgtaacgcttgtacttttataaaaatactagttttatttacaagcgttaatcgcggaaaatcataatatcgcatttttatttaatacttgaaaattttcacaactggccagttttcagacaaaa

SEQ ID NO: 130953 - DNA, 823 bp, Cannabis sativa
tcaaaatgacttatagattgcgaaagtaaagcaacgattacatcattagtccataacaaaatgaggcccccacttctaccaattctggggacttccaaaccagggtcaaaatggagtttaaatctaagatggtcaacagcatttttagcaagtctagattccatgataaacaaaatatcaggtttacaaacagtcactaagcggaagagattacggaatgcacgatcactcccaattcctcgtgcattccagctcactatcttcatggcggcaggcaggcctgctcagaggcaaggcttgcacttccagagaagtttccagtgacttgcggtttgtccgagcgagagcacttgatttgttgacggagttctccattcaccatttcggcttgtcgtttgaatttgtcttttgaatcaggtttgtttctcttccttgatgcttttgaatccgcaggagaggcaacacctggttggtaggtcaggttcatcgcttcaagccatttactagtgtcaagaagcgggatgttttcgggcaatgggacatggcaatgcttggaactagtggatttggagctgctggaattctgtgaagtgtttgtctgactcatggtggaggcttggggagatttttgaacactagtattgctcatagtggcattgagaagagttgtgtaggatggggtgatggtgtcgggttggtgtgggatagtagtgtggggctgagattcgacttggttccattgcacggagtcttgggtgaggggtagaaaaggccggcttgttgggtttgaccgtgggtatagcctttgtcttgggggctatag

SEQ ID NO: 130954 - DNA, 1163 bp, Cannabis sativa
  modified_base (53)..(60): a, c, t, g, unknown or other
tccggcttgtcagattttattttgtgaagcatcatctgatgaaaaaatgctcnnnnnnnnattgtaaagtctctctctcgaaaaactgtttgaaaggagatttcctcaccctatcccatagactaaattcttcaaatttggccttaatcttcgggtagtaataactaccgccgcgccaagtgacatggcctacgtaatgctccgatactagaattattagatgtgcaggtctctgaaaaaaaaaaaccaagaattaaatattttgtatttttttttgaaaaagtgttaggcacaacacacctcacttttttcacaaataaaatgacaaaataaaacaatttaaaaataaaaatttataattaactaatattcttgttaaatactccaatctcaattaataaaacaataactaataaaataataaataataattaataattaataaaacaataattaaaaaaataataatcaataattaataataaaataataattaataaatcaataaaaaataaaccaataataaataaatcaataaaaaataaaataataattaataaaacaataattaataaaataataaaaaataaaacaataattaaaacataaaaaaattaaaacctatcggagccacaattgggcctatcggacacaacataaaaaagattaaaacctatacaaagaatcgtgccccatcgggcctacaatcgcgtccgtcggacccaacataaaaaaaattaaaaactatacaaagaatcgggccccaacgggcctacgatcgggtccatcgaacccaacctaaaaaaaaattaaaactacacaaagtaattaagccccatcggacccacaatcgggcctatcagacccaatataaaaatcaaaacctgtatacaagaaatcaggccccatcgggcccacaatcgggcccatcggacccaaatcattttttgaaaaaaaatcaatcaacaacatcggatccaacacaagcatcggacccatcggggtctgacatcgaacccatcgggccatcgtcttctccaaatcgcaatttccgtaaatcccagatctaaacctaaatcgaaccctaaatttaacaaaactcacggtgcacacataaacacatacattatacattataaccctaaaatcaatacctatcaata

SEQ ID NO: 130955 - DNA, 1131 bp, Cannabis sativa
aatataaagatatatcatatgcacattttatatggggattattttataaaaatacaaaaataataaattttatatttttatgaatttacttctttcttttaatatttttgtggatttttttttacaaaattctagagtattatttttctgctgcttaaaaaaatgttgttttgacgttgcaaaaaaacaacaattttttttttataactataccgattgttgtttttctattgtttcaaaaaatgttattttgacgttactttcatgggaaaataacgtaaaaataacattttttctagaaaaaaaaccctaaaataaaaaaaattgtacaatgtcaataaaaaaaatccttaaaaaaatattaaagaaatatgctcttaagtgtattttgtaaatttctttgttatatactttggcccccctaaacttcttatcctggctccaaccctgctgatcaccctagaacctttcgttctatcccataattggtggttcatttaatttccacctactgatctgctcgtaagatgagttcatatatttcaccacatccagtgatacaacaggaagtgtcagtagtacaagaatagacagaagacaagcctgttgttctctcagatccttccccttattgtctaatcacatcttgcatagtagaatttacatggtttttcaacattatgacaataaaggattcttttccttaccctttgccccgagctgagatagctcgctaatcaggcaattaaattgtccttactgtataacttgtcacacatttaatccacatcttccaaacacttaaaattcaaatggatatcaatgtacatataccatacacatattcttatcaaaattatcactatgctactttttctaacatactttataatagcctagtcaggtaatcatatagcaaataatataaatacttactataccatgagtcgacctgtcctcgcagaaaatgtacatattcgactagtctttaggacctttaaaaccatggttgctttgataccaagtcgtaatgccttaatctatagggacgcccaaggccggccctaagttgaaatgggctataggcaaaaaaaaaatgaggaaattacatgatatacccactttacttta

SEQ ID NO: 130956 - DNA, 927 bp, Cannabis sativa
  modified_base (49)..(51): a, c, t, g, unknown or other
ttttgtcatttaataaaacacaggatctaatctgtaacttttgcaaaannnagggtccaaaatggtatttaccatatttttattaacttgaaacatcatttaatataatggaccaaaaaagcatcactcattctactaataggagcttatggcatgtttacttatcaagattgtgaatgtgatgtagggtacttttatttaataataggaataattatgggttaacataaatttaggagaaaattaagggaatacttttcctctcattttgttcaggtatgctattacgggaaatgaggatttttaaaaattattttattttttattaccaaaattataagataatattgacatcatataaaaccatatactgtaaaccctattaatttattttttttaaacttgacaaccgcatccctcttctctatcatttatctgttctcagtttctcctttttttttttttcaaaacaaactcaatcaatctctcaagaacatatcaagtaagttttctatcattttttctaatatatatcattactactattatttataatattactcaactttaacttctttgatgtggtgatacaattttgttttaattaagctgtggctaaagtagtttgaaaaatatttatttgtgtgacgatttacatgtgtgtaaaacacaagtagtaataattgagttttttatccattatttctaaatttttgtgattcaagctgctaatttgtacctgtaaaaattgtattgatcaatataaattgggtaaatggcagcaaaacccccaatactttcgttttggtttcattaaacccccaaaacctaacttggaaactgttagcaatttaacacttccgtccaaatttagctgttaactgccaggttggattgtccacgtggacacaataaacacgtggcaca

SEQ ID NO: 130957 - DNA, 1061 bp, Cannabis sativa
aaaaaaaaaaaaaaaactacactattttcaaattttatttacacaaataatggtaccaattttaattatgtacatgattttatattttgaattttgaagttttgctgggaagtcttttttacatacataaatttcatttttatatcataaaaatacatttcggttacctttaaaacttatacgtatacataaagaattggggttttaatctattatttttaagttgtattatgatagtttataatataaattgggtaacaaaaaattatattcgaaacaaatgagttgtcatgtaatataacaatctattatttttatatatcaattattttagatacatttttgttactttaaaagaatggtttgctatcgggacagccagcccagtcgacatcgaagaatgcaaagaaggtggtcaattggtagatattattactgccaaaagttaaatttatgtatttatttacaaccatgagtaaaatttaggtatttatgcgcaaattactttatctttcttatattttttttttaaatgttacaataaaaagttaaaataaaaaattataaaaataaagtagaaatagtatggaaattaatgatatgagaaaaaatttagaaaaaaaaatattaaaaattattttaagtttaattttttttttttaaatattagagtttacttattaatttagggaaacttacaaaaatattgaattttgacccaatttttacaaaaatactgtcatacggcaaaaataacttttatactgccttgagactttttttttttttcttttatactgtaaataccaaaaataaaaaatgaggtctccatctttcacaccaacatacagaaccacaacagcaacaacaaaacatcccaaaaacaaccattaaatatggtgagatgaagtagaaatattaaaaccaaccactgaatattgtttttctaatactgttattggggctgtcatagtttttctaatattgtttttgggttgttctactgttgttttgtatgtttaacaaatattagttttaaattacacaggttaaaccaacca

SEQ ID NO: 130958 - DNA, 788 bp, Cannabis sativa
aaaaaaaaaaaaaagaagtaaagcaggaaggagcataacttttgatatgtttgtcaattttaacttttggtttagagtgatagtcgattttaacctgttaagttactcccaagtggttctttgaatgaaatagaagtcatgggttcaaatctaaatggggaatcttaaatttaaatgtaagactattttatagataattttgcacccagtgttcagtagggatcagactcaaaagaacttggcaaacattcgtgagtgttagcgtgagcagagttgaagctctcgtgattatgcccaaagagagaaaggagccacacttggtagtcttctcctcccctttctcctaaataaaaaatgggaatatacttatttagtaccttgtgttttcataaaaaatatatttggttcgtgttttcaataatacttaattagtacattatatttttaaattgtacatatttagtaccttaaagtaaaatttaatcaatataattttattaatttaaccaaaaagttctcaattatatgtaatcaaatgattttaaaatacaaggtactaaataagcattattaaaaatacaagataccaaatttgtatttagataaaagtctttgttgattttttaaaaaggaattttcaaatggctaattaggatttttacctcctaaactttaacttatacaaaatcatgtctcctgaattttttaggccgttaaaaattctccctaaactattgagatggctagatttaaggacttttctttaatttcatttaattttactattt

SEQ ID NO: 130959 - DNA, 710 bp, Cannabis sativa
tatccaaacacacattgcattttaaaatatagtgtaattaccatcctagtaattaccctacataataattacacagttacttccaaacacacataaagattttggatttggctggttggcctaagacttccattttgacactgtggacaattatgactagaaaaattaatcataatgtataataacaacagaaatttaaataaatcctcactataacaaattttatttttaattataacaaaacttgtaacttattatgactacaagtaaaaaaaaatatgactaattttaatattataactaaaaaattcgtgattaaaggttttaatcacaaaaattataatttgttactaaatatatttttaatcacaatactttttgtgactaaaactaaattagtgacaaattgtatttaaatactgtattttagttataaataactttttattgtgactatttattcataaaaaaatttatattgtgaataaaaaattatcaccatgatttttttattatagtacctgtcaaataagttcatatataataatatatacaactaatctatggaaaagggctaatgataattgctaggacaatggtacataaaacggtcacctttatgaaaattttgattttttatgcttatatatacttaaaaaatttatcctaaactcataatatttgatatttgtagaatatgacacatttta

SEQ ID NO: 130960 - DNA, 626 bp, Cannabis sativa
attattaacaaaaaaaaaaacctagaaaaaatggtagtttttaacctataaattgcaaacatcatgaaatcattcaaatgcaaaagagtttaaaataaataaaaaaatatatatataccttactcgattataggctatcgttgatggagctgtaatgggtaaagagtttgaggaaaaaggccagggttttgatcaggaagcagggttgaaatggggtaggtgggatatcaatgctcgctatatgaaaatgggataaaaggatttcacacgaaaacccttttatctacgttcttaactaaaaaccggaataaaatagttttaataaaacactgaggcacgtttagttatcccataaaaattgagtgttgaactcattttttacttttgatattttttttaaccttctaccaaacaggactcttgtttaaaaaaaattaactgcatatttgagacgctaaatttgaaaataagataaaatgtctcaatataacttttattccatattttatttttgttaacttaaaaataggataaaaaattatctttttttataataaatttaagggaaaaaaacaggaatattctaaaaagggaaaaatattacaacaatactgtgggccggccca

SEQ ID NO: 130961 - DNA, 2493 bp, Cannabis sativa
  modified_base (288)..(298): a, c, t, g, unknown or other
aaatctgattatattgaattgagttttatttagggcataaaacccaacagtacctacgctcggtactcatatatcactgacgcctgtacctaataaggtacaacgcccgacatatcgcatcacctaatcaagtttacccatataacccattcattgtatcatcacattgtcatttcttaattaattaatcttttcattatataacagtaataaccatatctcagtattaattaattcaaaacagtactaattgtattataatacaacgtactatgcagtacaataaannnnnnnnnnntttaatccaggttcatacatttcgcccaacccaagtggagaactatccccagtgatctcggtcctatctcacaacaacggttaaccaataagtgtttatcctaaaacattgcgtaatattcacataagccaatctagggtttatatcaaaccctgcgatatagttacactaaaataaaacttatattttggatctaaaatatacaccatattgtaaagcttgtcccaagcttccaaacagtatgtagaatgtctaaaacggacacttgagtaaaaagttatgacaaaaatataaaatctaatctcctagatatttctaaacacagtgaaacttgaaaatctcaaattttgaactcaccgaaacactaccaaaacttatcaaaatcactccaaacttcacagggcacatatataccataaatattaccatccttatgtaatagaaattaaaattgagcccttaattgaaaagcgtcactaatgtttggactaagctttaaaaaaagttccaaactcaatttctaactcaaaatcacctcaaattcaacaagtaaacatagaaactagtcccatagctaccaaagaacaattttatgaagtcaaaatctccataactactctaaatcacaaagcctctacataaaactaatcagttttagcttaaaatataattaaactatactttcagcttttcctcttcaaggatttgctatcccgctactactaaagcttagatcgctaggtttcgggttgaaaattaaaaaaatggatataagaggagaaggttttgtcttttttttttcaatttatttcatatctcctactaaatattctatttgaaagaaagaatgtagattttgttcgtacaatttcatctgatataaacttatgatatatatataataaacttacggtaagttttataaataaatataaataatattattaataaaaattttattactaatagttatattattattttttagtcactaaaaaacctctacttctagagtatttgcccaacttcaagtactctaaaatatcctggtatttctaaaattaatatattccaataaccccatcaatatttctaattaaaactattgtgatatttttggcctccagtcggttctccagggtcgccgaatatgaaaatatttttatttcacaaataactcatattgtatccacatatttcaaataaatttccgtaattaacaaattttgcttatttatcgggtcttcagggtcgccgaacctaaaaaatatttttattccacatataactcctattacattcacacatgctatataaatctctgtaatttataaattacgcttgtttactcacttattgtaaaatttaaattttatgctaaaatagattagtatgatcataatctcacttatttcctgattaacccttaatataaatataaaccctaattatttaccattaggcttatcaggatattaaaaaaatgtattattatatttgagccaaatttatgttggaaacttattagtactttaatagaatgaccaatgtcaaaatacaaatcaaagacaagaaatacaagaacaataatattgataaaataatgttacactcttgacaaaatatacacataaatatagaaaagaagatgaagagaagattataaaaacacaatctaaatagcagtacatatagatgtgagaacaatctcaacaccactaacatcaagtgtcaagtaggggaatcataaaatttaaacaaggttttacacctttgtccgaaagcttattttcccttgccacaagcacttagggaataaggaaatggaaatagccttttggatatatcaagcttttggtttctagcaatgtcatctatttgataaaaactcacaaaaaatttgtcctcacaagtgaaccaaaaacctttatttaaagtgtttaagatcacatactttgaaattcaaactcataaccccccatggatattatgaactcaaatgtaactcatgcacaaaccataactcctataacattaagaatttaaaattaagatgtgtaacacttttttacacacttaatattggtaataattgttgaagttacaaaatgtaagtaactccacctcttatgttatatttatgtgaatattagatgtatgtaactctcaattacattatatacattaatctcata

SEQ ID NO: 130962 - DNA, 624 bp, Cannabis sativa
aatgctgttaaaaggggtcctaagatcattcacctcaaagatatagttgatgcagcccttgctgaatctgcctaaactggtgcccccataggtttgaattttactgatgtgtaattcagttgcaattaacctctaattgtcgaaaaaaatccattaatactaattatcaagtacgcatcatttttattttccccatctaaaatggcataagattacttcttggagcagatagatgccttgtatgcgaaaatcaattggttatgaagatggatattactaaatggcaatacaggttagtatgcaaccagaaaagattaatttgagtttgttttgcacatgctgcaattgtataagatgctataaatatattccaccataccctttcattacaaagaaaaaggtccatataggatatagccttgaaagtgcacaaaacatagcaaattataaagacgaacagtttcatatgcaattgatttagtggctaacttatcagaagaatgtgaagcatcaaagaaaccttcaagaggatctcacaccactatcctgcaatatttgaaagttggcccttaatcagaatcttcatatacttctccatcatctgatagctcatcgaatgatctc

SEQ ID NO: 130963 - DNA, 601 bp, Cannabis sativa
tttgtaattagcatggtgatttttttttaataatattagtactcaatgttagtaaaactgtaatttttgtccagtttcatcaatacatattttgtcagtgtcttaaacatgacacatgtaagacaaaattctatatcattgagtctgggtagaaacatgtaatattatttacttccaaaaattatttcaacaaactcaaaaattaagtatggtttcaaatttaagacactaacagagtccgtattggcgaaattgaacaaaaattacagtattactaatattagaaacttatactgctaaaaaaattattaaatttatatctttacaaacttaaaactttaaatacttataccacatttatcactttcttaaacccaaagatgcaacattaaaaccttttgaactattgcttgtttgcttgcattagagaattctttagccacgggctataattttgtggtggtggaaagcgactcgaaagttgccattaatgggcttagaccatttccaattaatggtgtaaattttgtgttaaatttgactcagaaaatgaatcaatgttatatttgactcaaattttacaattgagcttcaatgcatt

SEQ ID NO: 130964 - DNA, 1261 bp, Cannabis sativa
ttctatcaataattttcacaaaatttaaaattcaaaatatcatttaataaaatattgttgtatcaatttttaatagagaaataactatgtatttgtcgtcatttttttattaagtattttaatcccaattccttgctaaattttcacatttaaacataataaaataaaaatgtgtactttaatttcaaacaccctacaataatattttgacttgataagtaactctacaaaattatcccaaaaatttattagccaacttgaaactgatcaaatcttagaaaatttcatcacataaaagatttgaaatcataataaaataatatcttcttcttcttttttttttttttttaattcacaagacctcattttattttgagaaaaaaaaaatagatattaagctatgacctttatttcattaatatatatacattttaatttttttttttattattattatgtataaaatgagacgttgacaaaatttcccctttttaaaaattaatataataattaataattggaatcgattataaactttttgtatttgtttttttttttaattgtgtcatcgtcactgtgttctagcgtttggacatagaaatggtcaatttagtttatttttctcaaaagacttagtcagattttggtcgagtaattaattctcaatatacaataacttaataaataggtcataatgattgtgacatatgtttcataagagagtattatagttttcaagtcaatggtacataaaaaattgtcaacaaccctttggcatttcaatttttaattttttttttttttttgaacaattcaatttttaaaattttgaaaacttacaatgtgtatatatatagttcactataaatatgttaataattttattacaaattttctgtattaattaatgtaacatggcatagcctataacatatagatatactaatacaatatctattgcatgtatttactaatttactaatcaaaatttataaataaaaatataaaatagtataaaaaaaagtcaatgtcattcatacatatatatgcactacaaattgagaactttatgaggaatataatttcatttactattattattgttgtgaatggtcacgtattaagattagggtgactttaaattttggtgattctgttacatgaaaagttatagggactaattagcaattgttagtattgcttagttagtataaatatgtaatactattacacaaataggagaggaatgaaattggcattt

SEQ ID NO: 130965 - DNA, 774 bp, Cannabis sativa
aaatttaacaatctcaatagttaaggggggaatttttaacggcaaaaaaagttcagggggcatgtttaaaaattcccattaaataattgggcttagagaataacaagcctaatatttgtaagggaaacttacaaaaatactagaatttgggttaacttttacaaaaatactgtcatacggaaatcttttcaaaaatactgtgtttttataaaacacaattagaacacaaaatagttaaactcaaaacaacagtagaacaactaaaaaacaccagtagaacaatggtgaaaacttatcacagtatactgtagtatggaacttataaaaaaacacagtaaaaaattgtaaaaaaaatggcaaaagttagtataccatgtgaatttccctatttgtaatttagaggagcccactaagaaagtcgatcctcaagataaatttacacaatatacctaaaaataaatttttcttacatgtttacggtcttcttttttgtttacatttttcatagttttttttctttatagattttcacttgtttttttttctagagagaaatgttactttcactctactttcttgtagcatcaatataaaagaaacgttgtttttgaaataatagaaaaacaacactctgtatagttgttaaacaaaatcacattgctttcttgttgcacaatatttttccgtcaacgaaaaaaatacgtaaaaatgtaaaaaccaatagatagtaaaaggagtattgttattggatactagtagtgcccaacacctttt

SEQ ID NO: 130966 - DNA, 782 bp, Cannabis sativa
ataataataaaataataataattagtgctaattgccttttctaatcacattactggagcggtcattacaaagaggaagagaaaactctagcttactgcgagaaggccaagaagaaggaggaagaggccgaggcagaggaagaagaagaagatctatccaagtctcccaccatgtaggcttggtttttatttatttctctttttgtttctgaaaatggccttttggccgagacaatagtttgccccttgtggcattttttgtaaagataaatttgcgaagttggatggccaactttgctttttaatgcctcgtacttttaagtttgaacttcaatatgtagttttttacttgagtttcattcaaaatttaaacaatcatattttgatcatgcataaaagtttcttaggggttcccattgctcgtatttctttttgacgttgagtagttaatagcctacttaatgcgcgagcgatttagcatctgctctgcacttcgatttgtgagcagtaatctgtttcaagaaatcttgaatatattttaatgaccttgccattttgtatatatttttattgcttacacgagtagttacgtcttctacccacgtgttaagtttgagtacttttttcaagacactgtctcgtttaatactttcctctagcgcgagccgttagtatttagctttatatgcgagttatgaggtatatctcttttataacttttaattttcctttctcgtcaaataggttttaaatcaaaagttatagttgtttgatccctttctc

SEQ ID NO: 130967 - DNA, 718 bp, Cannabis sativa
ggaagagaagaacctgttgtttggcctcttctgcatctaacactctgttccaccattttcctctgatgacttcatttccttccacctctatcaatggttccctcacatcagagttttccatcttcttttttagatgtggtatcggtgtactatatagcactcaaattcaatatatatatatatatatatataaatatctggaggatggtgtcttgatatgtttgaactctgataagctatttatataaaactgcagaactctttctattataaggaacattcacagtacacaagagctctatatttattttatcaaacaaaaaaggaaaaatgtctatttaagagctgaaattgaagttaatcgaattcacacgtacgttttgctttctctaacgttttatgatctcaggtttaatgtctattattctgacaaaaaaaaaggtatacattagagaatttaatatccagtttgactgaacaaaaatagaacaggcataatacattacacaagtggttgagtaataacttcgctacggtagcgttttgttgggagaaataaaaacaaaggaatatgaataagaatgagaattgaaatacgaagctaatagaataaaatttaaaatacataaaaaaaaaattgataaaaaattattaaattttttctttccttttatttcaaaataaaatagtcattaatgatattccaatactttaatat

SEQ ID NO: 130968 - DNA, 520 bp, Cannabis sativa
aactcaacaaattccttccgctttgcactgcggaccgcttcgttataatatttggcattgaataaatcccgaaattcttcccaggtcatggtggtgacgtctcggctgagggacactaattcccaccacacgagcgcgtcttcctaaaactgaaatgttgcacaagtcacccgatcattcccaacaactcccatgaaatttagaatcttttctatcacaatgagccattactcgaccttcatagaaaaattggaggcgcctgcttgcaaaacctctcgtatagtggctccgtacgattgcactacttgaaccataacgacctgaacttgtggtggaggaactgcagtagaccctactgccttagcctaaaaatctcttcgtcttgctagaaaatttgatcttacatttctgaaaacctttgctcttaattcagaggagcttgaggtgggttttcatgtctaccaccctgaaaccttccacggtctctgccgcatccacggggattctagggaatttgatt

SEQ ID NO: 130969 - DNA, 936 bp, Cannabis sativa
  modified_base (42)..(50): a, c, t, g, unknown or other
ttttagaagttcatatttatggtgttaatcaacatacttgtnnnnnnnnntaagattctggtaaaataatttccaacaatttgtatttcatatagtatcaatatattttctattaattacttacttttagaatataaatctcaacaatattttccaaaatagtataaaatagtaacattgagctcaatttttgttaatttttttttaccataaccaacttaaaactaatttctaacactaagagatgcaaaaaatataatcagtttggtcataaacaccttcaggtcaggttatgaagttttattttaataaaaattgagtttggatactattttgtacaatttaagtaaatataagatttgttttgtcatttaacaaaacagagtatttgattagtaacttttataaaatacgaggtgtaaaataatatttaccttttataatattttgaataatttttttttcaaaaaaatgaaaaagtaattaattataagaaagaaataaactaattaaaatttaaaataaaaactaaaattgaattttgagtgagataataagtaggtaaaatggtagagctttttcattgaagaagaaaaagatgctggttagacaattttcaagggttgcactattttagtgtgcatttttcactaatttagtgaaaagtttattatttgatgcaacaactctaataatttaatactaaataaaaatgtttttcttcaaaaatctcacattttgtactatttacataaccaacaataattaacttatactataattatgcttattgtcaaaaataatttataataattttaacataaattaaaaagaataatttaaagggcttttttcataaatgtacaacaaaaataaaataattacaaaaaatgtgcaaaaaaaaaaaaaatcatttgaaaaacttatacattttaa

SEQ ID NO: 130970 - DNA, 1171 bp, Cannabis sativa
tttttttagatactaaataaaaagtaaataattttttaaaaaagataatattttattaaatttaaattataagccttatttaataaatatgttgtatcgcaaccattgtcattaccattattatcaccctattctacgtgtagtcgatattattctaaaaaaacttactctgatacataataaaaatcaaacaatgaatatgactacatatttttatacataatgatttgaaaaaatctataaaaaatgaaaatacaacattgaatctaaaaattaattgaaaacttactatacaatatttgtaattatactttgtacttaattatatattttaattattcatgattatttaattataaaaatagacctaaaaatattaaaaaatatatagaaaaataaaaatacagagttgaatcaagtacaatatttgtaattataatttatacttaattttatattttaattagtttttttaattattaataattataatttatatatatgattagagtcagaatacttttaattagtaattataataataagaagttaatttattattagatattattatatatagattaagttgttattataatgtcgcgtttttaaagtttaacttacgtaagattttaaagattttagtttgaaatatatatatttttttttatgaatcagaagttgtattagcttaaaaaactgtttgcatacactcaaatagcacccgttaagggcctaaaataatcatctatacattttagtttgcatggaccttgtaattgatttctgtatctcactacaagaattatgcattttaatgaggacaaatttcgtcagtaaaaggtatgtatttcgtcagtaatgaatatcaatggcgacataccgtcagtaaaaagtcgttagtgatacttcgtcggtgataggtattattacttgacgacatttaaagtcgtcagtgataaaaataattaccaacaattttatcgttggcaaaaagaagcaatttttaaattttttttaatccgtaagtctatcaatgacaactttttcatctttgataatatatcgccattgatttatttattttaaaaaaattatagataaaaaaataatttttattaaataatttcttaattaaacaatattcaaaataattaaaataaaagtgaaa

SEQ ID NO: 130971 - DNA, 1012 bp, Cannabis sativa
  modified_base (51)..(61): a, c, t, g, unknown or other
tatttaaaaaaagaagtaaaaatgatagactttaaaaaagaaggtaaaaannnnnnnnnnnaatataaaaagggtatagagtataatttcctctattattttctcaccctcaaagaagaaaaatagtgattttctcttcttttgtctcttccaatgaaagcaaaccaacgatcataaaggtccatacatataatcaatatggggccaactccatacttctttttctttttttgcttaaacttcaactccatacttgccaataagtaaggacaagtgttattgtaaaataatattttataatattagaagaacaaatggaaaaactgagtaaagcaaaagaaacttttatattgattgaactgagaagaaatagtacaagagcagtgtttatatagtgttgaagtacaagaagtggttaaactaactaattgactaagtgataactaatttaacaaaaaattaactaaactaactctaataagcccttttaaagtggtgtgtataaattcttgacacccatcttaaatataatagtattgaattgagtggggacatgattcatttgaagtgttccatttatgatcttctcttaaactgtatgataatcgatttcaacatattttgttctttcatggtatactggattatcagcaatgtgaatagcaacactgtgttatcacaatataaaattaaaggaagtttaatggatacaccaaattatgagtatgaatgtgaaccaagtgagttcataggtagcatgggccattgatctgtactcggcttcagcagaggacttggagataatttgttgtttattagatttccatgacaaaagagagtgccccaaaaacaacacagttgcctgatattgatctcctcaaatatcactacaagaaaagcaacttttgccggcgcagttggccaagtgcgtcggcaaaagttgtcagcattaatgagatgctgaatttgggattggattcagctataccttttaccggcgcaatgaaatgcg

SEQ ID NO: 130972 - DNA, 773 bp, Cannabis sativa
tggtctagttattgagtatctctctattgttgttcaagtggaagaaaaacctaatatatcttgacaagaactacaaggtttgttgctcagttttgacagtaaagttaagaaggtgcggggtattaatggtagcaacaagtaaggcagctcatctctcactggatctggctcaaatccaactacaaatctttctacaaatgaaaatttagctgccaaaccaaataacagttccaatgctaattaggtagaggacaccaaaacacatactaggtggtaatcgtgggggttcatctcagtataactgtcgaggaggtggaaaaggtagaggtcgtggtcgatccaacaactcaaagcctacctaccaagtgtgtggtacgtatagccactcagccgcatattgttataactggtttgatgaggcttatatgggacatgatcctagagctccaacacctcaacaacaaggtggaaatacaggcgatcactttgcctttgtttcctctttagaggtggcggataataatgtgtggtatgttgatagtggtgtcaggtatgttggtagtggtgtcagcaaccacataacctcggatgtatcaaatttgaatttgaaattagattacggtggtaagtagaaactgactattgaagcaaatgagagaaaaaaatgtgcccgtacataaaattttaatccaacaatctcccacttgggcaacatatgttacctgataaatgtataaccttatgagctcaaaatttgctattatgtaaaggta

SEQ ID NO: 130973 - DNA, 1043 bp, Cannabis sativa
gagagagagagtgcgtgaatgaagatgagagggagaagaggcaaattttttgggttagaggagaggggtattttggggtcactattaaaagatgagaatagttataaaattttttaaagggtagcataattaaacaccacctctaatgtttaagcataatttatcaaatttccctttataaattacaacttcgataaagaatgaatggtaatcaacattagtaattacaaattatgttattttttgaagcagaatttattatatttatcagtaaaacaagttctgaaagataacatatgtggtcagtctttagaaataggtcataaaaaaaaaaaaaagtccttactatagttactataaagataaatgatatttttaaaaattattaaaaaatatgtatattttttaaaaaatatttttttatttggacccctaaaatgagtgaactttaagcgcgcgcttagcccgtctatacccagggtcgaccttgggtcattaatgttatttatataaactgtcaaactacgacaatccgaactgttgtagcccgtaattgacaagactattttgggtggtttggttaatttagattgttcacctcttaatgatttgattgtaattcgtaataaataactaaccactacattagaccggatcgtttataataaatacttaatatatatattctgtatggataattacataaaacattaccttttgtaattttttatatttttacatttaaatatttatttttctatatttttatagtattctataaaaacaacacgaaaacaataagaaatttaataggaaaataatatctaaacagcaacaaaaaataacaaaaaatcaatgacaaattaattaacaagagtacaatataaaaatacattaaaagaccgtattttctgtaaataaaatcattaaattcgtaaaaatatttaaaagagaaatgtaagtaaatggccctatttctaactctatagatagttaatgtcccttttttaaaataataaagtaaatgtccttttttacttttt

SEQ ID NO: 130974 - DNA, 983 bp, Cannabis sativa
cgttccaaacgagcccatacaatacaatataatttaacacaatacaatataatataatacgtaataacaaactagtcctataaaagaaagaaaaaaaaaaacaccattacaaaagttttatcgaaatcgaaacagagttagagtcagaggagagaagaatggagaatacgagtgatcatgaaaaagagagcttaattggggaaatccaagaagaagaaccaccaatctttgattcgaatcccaatcggaataataatcccagtcccaaatcggtgagaactaaagttccggaggttgaggtccatctataccgtaccggaaaaggtccgatcgatgtcttcaagtcgagtcttggtggttgggaccaggatcaattggaggttaggaatattctcgataaatatggcttcaaatctctcttcgctttcagtactcaaactggtcgtggagttccgattaggtttcatgctaggaatggaaggtctttgctcccttataaagatggatctgtaatttacgttgatggcgagcccaaggtaccttcttcatatatacataattatatagatagaatcatagataacagagaaattttggagattggattttgattgtcatcgttagccctagttgacttttttttaagaagagaactctatgaatgaactgataacaactgatgttaatttaggctttgtttcaaaagattcaatttttgtttatgtttggattgaattgaatctataaatcaaagaattcaatttttagaaaaattaaaactgagagtgttgtataaattttagatcaattgttactgatgttaattttatctagctgttatttagtttccatttttgcatattaacaggttctatcaatgtatttagttattttgagtatttaaaaaaattgaagaacaccaagaactgattatttaccactaatgtgtacaagttttttgatagataattataactgatatt

SEQ ID NO: 130975 - DNA, 596 bp, Cannabis sativa
tttcttaaactcttatgtttttatatcattgttttagaattcatattaggatgttaatgaaacatacatggtagtaaatctatatcctggtaaaatatttccaacaggcgacacgaccaagcaacaaccacaaggcccagatcgatcaacatttttaatcgacttggaagacaaaagaaactacaaagcaacaccaataagactaagcgagcccttacaaaaaaattaagaagtggtgagctgatacgcacatcaccacacgtgatgtctagaaagcagaattccttactctttccaccttggtgaaaattatcaaagcgccaaacaaatatgactttgacctagaatgggagcgaaattcacctctctcagatcagatcaaggcttttaagatcccctcaaagttcaaaaatctagtctggcacccatacactggtaaagaagaccctctctctcacatacacaattttgaagtacaaaattgacctgcaaggcatttgagacaactctcgatgttgaatctttcaagccacgctattagaaatggcacaataatggtatctcaagctgtattgatgtaacgccctaatgctaag

SEQ ID NO: 130976 - DNA, 1657 bp, Cannabis sativa
  modified_base (38)..(53): a, c, t, g, unknown or other
tttgggtacaatacatataaaaggaggtatgtttcaannnnnnnnnnnnnnnnaggtaaatttgattaattgatgaataaaagaggcatttttcaacttcgctttgtacagatgaaggcttagtgcatgtgatatttttataaatatttgtatgtggattgtataaatgtttaatagtccgcccaaagtatttttgtaattttttttcccttttttgtatttttctgttattttcccttcttttaataatattactaatataatattctgacctcttcctattagttaattcatttttttagcatctctctcctattatcgtttttccattgaagaactaattctcaaatccacaatgaccatccccaacctccttgtcgcaaaccccgatctcctcggcctagagcttgcgctgctgctcggggtcggtcaaggggcacgagcggctaaggtagcgactgagccaccgcctatgacagcaatggtgtgccatctacgtcaacagcgagaggaggaatggcggccgacggtgtggtgaggagtctagggagaagttgaaacaggaatacaatttgaagtcaagatattttatgaacatgtatttcggtcaccgcttatgattcattaggtctagatacttataagaacacaattgaaacaagaatcctaattggaagatatcagcctaaaaattgtttgtgtggatcctatcttatcgtgcttagaatctgaaaaaaaaaaaaaaaagatgatgtagcatttgtgggtgccttgtaacactgaatgaagttggtaccagagaagcaagagtgtccaaaagcatctggtttttggtgatcaaattgttaatcaaagagatgttttctcccctctttattgaaactttgttctgcattaaaaacctatatttcaaagtcgcagttggccggccccttttcataggtttactttaccttcttattttatcctaaaatgtttctttcattcttttttatttttaagaaagacatacgaattttattcacaatgacagaagggccaactctaatacaaactttgatagaataagactgaaatatttgccaaaaagatgaacttgagctcctaggcgccaaatctgtcacaccaaaaccccatcaacaaaaactaatataaaatctaaaatcaacttccccaaagaagccaagcattatcagaacaagcgactgggttccaatggagaatttgttgagaaaatggggaaatggagaatttggtgaactagtttttttgatgtgatctgatgaaaaataagagttttattttttttaaaaaaaaatataaggttaattttagttgatcacctctggataatttgttaaataaccaatagaagttttaactttttctatttaagtgtcagattttttttttttaatttatgaaaataaaaaaaattaaatatgctacatacaactacatgttaaacaatgttgaccctcaaatgtcatatagatgaatggtcaaaaaaatgtatgtatagtatagagacaaaactaaggtcaccactatagaattattccatactagcaaaaaactacgtgcgaggcacgtatattaaattttatgctaggttttttctatgttatttgaaagtgagattattattgaatactga

SEQ ID NO: 130977 - DNA, 871 bp, Cannabis sativa
  modified_base (838)..(845): a, c, t, g, unknown or other
acaacaagtattgtgactaaaaatatatttagtcacaataaattgtaatttttatgactaatacatttagctacagagtttttagtcacaactgtgttttataattagtcacaacttctgtactttcagtcacaaattttgtggtgactaaaagtaagattttttatagtgtaaatgaaagaaactattttccaccaaagcacaagcctagccgaccactgccatatttgtggcacaaagagtggaaatagtcggccacatcaaatggtgatgagatttttttaccaaaaattactttttcatcatctacatgtcaaaaccaagtgagaaaagtcaccaagtggtatagaaaccacttggccgaccactactatctttttggcacaaatagtggcagtggtcggccacaacaaagaatgagaagttttttttggccaaagtgtatttacaacatcaatatatcaaatacaagtgagaaaagtaacacaagggcgcataaccctcacaggtgaccactgccatctttttggcagtggtccttaacgaattggccaagaaccaatgtagctaaaatagttttctagcatccatatgactgaaataagtaagaaacaccatccaaagctttccacaagttatggctgaccactgccatcttttggccccgactgatggcagtggtctcttattaggggtttggatgcccaaatgaggttttggggttccagaacccccaaaatatgattcatcataaaaaatgtcaaaacacaccttgaggggtctggcaacatgcatggccgagaacttccacttgggcatgttgttgggttttatgccnnnnnnnnaactccatttcaatgtaatctatttt

SEQ ID NO: 130978 - DNA, 645 bp, Cannabis sativa
ttattttaaaaataacaaaaaaaatgaagattgaaatctcaaccctaattttaaaaaaatacattatctaattaaaaaaaaattaagattaaaatctcaaccctaattaatttaaaaaaaaaaattaattatactcattgtataatattaaactagtatatatatacatatatgttgtgaataagtgaaggtatacctactaccaaaaaagggatgaatgtccatgacgcatagatcattattgtagtgacggtgaagttatttgatataaatatatttatatatatatatttggagaagtatttgatattatttgatcaaaacaaaataaaacaattaaacgtgactatatagcttatttatttatttatttatttattttgaaatagactatagcttagttatgacatatttattatgtaggacagacagtatatgtatttatttatatatctaagatttaattttggataccactagtaggtatgtgtctgcctccaactccatgcatgtgacaatttttctagatatattcattcaatttcaacttataatgttatttaacggtctgcatctatcactcacaaacttcaacgtacaactattatacataatcccctcaaataaaaaaaaaaaactattata

SEQ ID NO: 130979 - DNA, 506 bp, Cannabis sativa
aatggccgaggttgtggaagctaacccaaaggtaattcgggctttttgtagtgggctgagtaagggattaagcccaactaaattaaacccattaaatccagctggacccacccaaagacactttaatgggctgattgggtcaaataatgctaaagccttccattacccacttaattcctcacgtgcatcaactcctaacaaccagagaagagaattggagatgggcaaaggttatcgcaggttgactgagacagaggtgcaagagaaaaaagctagaggagtttgcttcaagtgtgatggaccttggacaaggggacatcagtgtaagtctcctgagttgcaaattattttggtgcaagatgaatgtgaagatatggaggaattggcagccatggaggagttgggagataatgggcaagaaggtttgacagaggcacaagtggtggaagtgtcactcaattctgtggtgggattgacttctccaaaaactatgaaattggtgggta

SEQ ID NO: 130980 - DNA, 1238 bp, Cannabis sativa
  modified_base (1179)..(1190): a, c, t, g, unknown or other
taccccaagaaatggttttgccttatcatcaagcttagatctctcgtctttaggaataagaacaaatgctctacactcaaagactcttaaatgatcgtatgagacattttttcccctccatactctgtcatgcacatcaccgttcaaaagaactgaaggagaaaggataatcaagtcaactgcagttctcattgcctccccccaaaatgacttagggtatgtttggtaggaaggagggagaataagatggatggagatttgatgaaggatggagaatataagggagggagatgagagtaataatccttttatgttgtttgataggaaggatggagtgattgaatgatagataattactaatttataaaattactattttatccttataattatttttaataatagttattgagggtttttttgtaattttataataattgaagatggagagttctaatacttctattcttggagggattctgaattagggatttgagtggatttgctatcctctcacctctcatttctctacttcaattcctctagccaaacaatgggatttgtgatctcctccctcctctcatctccatccctccacttctccctcttaccaaacatagtgttaggtagcttggcatgggaaagcatacacctaatcctttctttaattgttatgttcattctttcttccacaccattacgtcgatgagtctttggaactgaagtctcaagcttgattccatggagtctataatagtattaaaatggaccctatattgactgacattatctgctcgaacacacttcaactttcttccagtttctctttcaattttggtatgaagttctttgaaagcatagagcacctggtctttagatttaaaagcaaaaaaaaaacaaaattgttaagaatggtcatcaataaaaataaccaaataaagtgcacctccaagagttctagtttgcataatccagacatcagtatgaaccaaattaataacattagatctcctagatggtggatgtgtatgaaaagaaactctatgtatttttcttgctaagcaatggtcacaagttttaagaagtgtaccttgcaaatttagtaagaattactttctagcaagattttaaagtcttttctcgttgatatggccaagcctctggtgccaaagatcaatnnnnnnnnnnnnttgaactgcattaatctctcctttgtgtagcttagcttccatgacata

SEQ ID NO: 130981 - DNA, 554 bp, Cannabis sativa
atttataattagccacaactttttatttttagtcacaagttttggtaagattttttgtagtgattgatgtgttctttgcttcggtgtagactttgacagcgaaactcggtctctttttgttatgtcagttctagtttgtgtttagagcataggcattacaaagtttcaaacttttcgagacagtttgttgtctcttttactcgctttgtaaaacaatttctcccccttacaattgatcagccctatatttttactaagtctcccttaactgtttcaacaccttaggactataggatatagcttagttaaaaccactaagaatttgacaactcagcctcgaaaatcctaatcaatcatactaatgagactaatataggtgtaacagcaatcttgtctacttggtggtgagtccaattgttctaattttttggattcttacttcaaatttggaaaaccatataacattttctaacttaaacaaaaaacctctacacttgtatgtatgggaacttaggaggcgtttggttgggaggaatgaaaatataggaataaaa

SEQ ID NO: 130982 - DNA, 1100 bp, Cannabis sativa
atttttgttttttaaaaataatttttttaaacacaagattttactttcattttgtgattaaaaaattaaaaaacaaaaatgttaccaaacggaaccttagtaaattaataggtcaagccttatttattcattatttgattgaataatggataatagattttgaggaaagaaagttggtgttttcttaaaaagaacaattaatggatttttcccaaagctatgaagggggagtatgaatgttctttttttttttttttgagaaagtaccactattattataaatcaacagtcatttacagtaatagtgaaaataggatagggtatttctcctaaccaacaaatgtcttgatccaaatctaaagcatgttttgtcaagccatgtgcatatcatggttagcattcctcctaacatgagattatttgcttcagggaaaaagaataaaagacaacgaacatctaaaatcaaataagagaaactagacaaatctatagatgtagtagttaaagcatgaaagagtctaagtgcatctgtttcaatattgctgaatttttttttattgttggagagcctaatttaagctatgaaaaaaatacttttgcctccatttcatcagaacaaaagcatcgttgtaccgactttgaaagtgcagcaataacttggccttgatggtcccgaacaatagcacccacacccaaaatttttgctgtagaattcacagctggatcaacattcaactttataccaataccaataggaagttaccattgtacctcacggtcacctcttggtaaagctatagtgacctgccaggtcctggcaggagcatggccggccagacctcaacttgcagaccctggtctgccaaaccatatcctgaagtgcatggtcggccagacctcccatgtaggtctataggcgaccaggattaacctagcaggactttatgtacaacctaaaatgtggacaacaagctacatgtgaatcgggcccttaacagcccaatttaatatgtaaatatctaagagtttcattgtaaattaggattttaggcttcctatataaatgccttaactctaacctagaaaacctaagtcactaa

SEQ ID NO: 130983 - DNA, 702 bp, Cannabis sativa
catgatcatttgaacggcataccatgagatactcgctccgtctaaataatagttgtaggatagctcacttagatgaatccgaatttaagagggatttagttagcctatttgggggatatactccaatcagctcttaacatacttgtcacgtgttaccttgtgaagtgccatgtcatcttatgcaaaatttggaataatatttttccccaagtctgcgtgggaactcctagtcacatgggaacatatacgttctgcgcattgctaagacatgtaacatgtgctagggttcatgtgtcatttaggcagtgtcgtttgccctgaatgaggtgagtgtacttctttagtcttttcaaatcctagcatttaatgctattaaaaaattgagaactgaggaaacgtattttgatggttgcacacctccactcctttaatgagtatacttctttgcacttttttttgggagaaaaacctaatttcaagtgcatactgatactagcctttggtgggtctataagagggatttttaaattcattcagaactttcaccagttcttcaatcttcaaaacataaaataaaaagacagagttccttataggatccaaaccatgttgagtctaaagttaaacatttgactataatagactcaccattaagcttcatatagagtttctaagaaaccatgtatgaggctaagattgtat

SEQ ID NO: 130984 - DNA, 577 bp, Cannabis sativa
attattagaatatgtaattattttctgtttatagatttttaaggggcatatttgtctttttcatttttagttaataaaattaaaattaaaataaatgaagtaaggaaaagaaaatgcattcgctataaaaatgggggagaacatttccctttgttttctccataatttgtgtgggtcccactagtttctccctttccaaaatttagtaaacaattgtatagaatcaataccataccatttatttctattccatttaagtaaatatgccatatagtataaaaatataaaatctaattactaaggttgtgtttgttataagttttagtttgtataagaatgtgagcaaaaaaatcacttctgggaaatatgaaaccaccccattaaatgtctataggacccactacattcttaaataaaaaattgcaccaaaagattcatttcaaatgccctcacattccaacattaccctacaacaaagagaaatggtaaatggcaccagtggtgcttaacatcctcctatgtgttaatatcgctattagtctaaataagtatcgagttccatataatttaatataat

SEQ ID NO: 130985 - DNA, 783 bp, Cannabis sativa
aaacatttctataagcaaactaggttaatgatatacatatacatatatatatatacaaaaaaaaattcaaatctacactagatcccatccaagtgagcatttaagactataatggttcctataaataaaggagatgctataattggattcgacttctcaaaatatacttttggaaaaagtagtaaatgtataattgctatacaccaaaactgccagattaaattatacactttgagtgaaaccaaaaatgaaaagcgatcgagaagaaaaacattgtatttttgaaaaaggaagaggtgtgattatgacaaagattttggtggtaaagaaaggtacgtaatctacaatacgatgattaattgagatattaaatttgttattttcctcacccatgatatgatttcattccacagatattttttttatattatattattttcttgacgaatagaaatgataaaaaaatatgaaattctttctataataatatcaagtgtcacgatctagttatatgccttcttaaatattttggaggttttattctaattttaaaaattaaacccctaaaaaattgcaatttaatagttttaaatattgtcatacgattatatattttacaaaatacctaaaaattcaaactattatagaaaaaaaaaaatatgaaaagtttgaagaaaaaaaataacagtaatgaattttttctttttttcttttttcttaaaagcagtaatggaattaaaaatgggctttcagaattgaaaagaaataattacataagacacc

SEQ ID NO: 130986 - DNA, 608 bp, Cannabis sativa
caagaacaggattctcaagggcaggggcttgagggggcgcctctacgggtgcctcgccccctgcctcctccatgttcacaacctcgagttgaattctttgttgaggccgatcactaaaaaagaaaagaaaaaggagaacccaagcaattaaatacccaatatcctaaggacatacgggtattggggagggcctccctaaattttcttggagaggtccccaccgaaaccatcactcaaaaaatgtcattctcacggaacaatgcctcaaagcagtaggtcgggatcccacaagaaactcaatgaaaatgcaaaacccagaaattaatcccatttagagccctaacaactccaaatgggtagacagaggaaaaattgacctagaatttcctaagaatcacccctgcaaagttttaatttttacacccacttcctagacaaatgcacacacacttatgactcaacattctcgaccctaattagttcaattccatacaacatcctaaatattctttcaaaagcaatcacatgcaagatagatccaagacacaacttgaataaacgacttctatcctagcatagaatcaaaaatatcaacaagtcctggaaaa

SEQ ID NO: 130987 - DNA, 896 bp, Cannabis sativa
atggccacgctcatagtggtggatgtgaagtctccgtacaacgtgatgcttagaaggcaagtcttgtacgaccttcgagctatctcgtcaatataccatttgtctgtcaaatttccaatgatggctggtattgattgtctccttggcaatcaagggactgctcggtagtgttataatgcttcgttaactctcgccaagaagaccccctttgcttctttagccccaagggggaatgatcaaggcctctcccacgaaagcgggagagacaatgaaggaatctgggggtgaaaccacagagaagacggaaacgacacctaaagccacttgaaggtgcgcccaagatggggatgacattgacccttattttttggaaatcgacttaagagttggtctgatcgaagaactcgaggaaattcccctcaacacgatgaacccaaccaaggttgtcaagattggaacaaacctggtagaggctttgagcaagattctcatggcttgactaaggagaaatcaagacatttttgcttggtcaaatgaggacatgattgggattgaccccgaggtcatctgtcatgccctaaacatagatagagagaacttcaaacctgtgcaataaaaatgcagtctctttgataaagagcgctctaaagctctcaaagaagaagttgaaagcctacaggagaacaacttcatcagggaagctttctactcggttagggtatccaaccctgttctggtgcctaaactgaatgggaagtggaggaattacgtcaacttcactgaactaaacaaagcattccctaaagattttttcctctaccatgaatagatcaactggtggatgctacgaccaaccatgaactcctcacattcatggatgcctattttgggtacaa

SEQ ID NO: 130988 - DNA, 1124 bp, Cannabis sativa
ttttaatataaataaaaagtcacctatgaatttctcataaatcaagaatttctgttatatagacacaatagatatatattttttttttttgatttagaagagttgtacgattaagggtaagggtagcgtatatagatttttttattttttttttaaaaaatacaaaaataaatagataggtttacagatattttagataaataaatgtttaaaaataatttagagatataattcaagatatatataaaaaatcttgatagaaaaaaataataaaaaataaagtaaaacgtggccatataaaaatataaaaaaaaggcaaaatgtgttaattttgctaaatgataaaagatagaaaaatgataaattataaagtaaaagatatttgaatatgttaactttgataattttttttttttaaaaaagtattatttttaaaaatttcaattttttttttttttttaaaaaaaactaaacgtggccatataagcaaaatatggctatataatctaaattttagaattatcaatttcaaaaaagaaaaaattatataaaaaccaaaacgtggataaatatatttagatttcataattatatatattatattaattaataattatgaaactaataaaaaaaaaaaaattaaggagagaagagatagtgagattaaagtgattttagagtgtcacatcaccgcttcatatttctctttttatataaatatatagataggaattcaatccgaatgaaactaatcacagtctacctttcaaaagtagaataagcaaactaaactttgactgaaccattataattttgtgtattttctatttgtttgctatttacactattaatcgttttattaattattatgagattttgctagattaggtgaatatttacaattctgtaagtgggtgttcttacttaaattgaatactttcagtttttggtgttttctaactttctctgatagtaatctccaaaatttttttgactagaaaaaacataatgtttagtattgttttctgttttttgttttaaaaaattatttttagaaataagaacaaaaaatagtttttgaagtttttaaaacacaagttacgtttggttagtgatttttaaaa

SEQ ID NO: 130989 - DNA, 900 bp, Cannabis sativa
  modified_base (848)..(857): a, c, t, g, unknown or other
ttctttaatttttaattgtatcattttcaaataacatagaaaaaaattagcataaaatttagtatacgtgccttgcacgtaatttttgttagtatatatgatatatgtttatatatttatatatatatatgatatatgtgtatatttaaaataatatatttttatattattaaatgtttggctgaaaccctgaacagagtacatgaatttttaacctcaacccaacattacatcaaatatatacttcctctcattatgttccaaaaaccataataatattagtaaaaagaaaacacaagctaaaattaggggagaaaaggcaaaatcttgtatgtaattaaaaataaggatatacattttccgtaattggaatatattagttcgttgaagtgtggaaaaaatatcgatgcaaaggaaataaagtagaaagaaatatatcatcatcaatagaggatatagccaaaaaaaaatcagctctataaatatacatctatgagaacgattgaaataaaaaaatagattaatagaatctaaatgtccgcaaaggaaagaagtgaatatctattctcactcaagcatactaattcaatgaacaaagaagtttatcaaagagcttatcattcatacaaaggggatcgtgtgtctccaatcaagggtcttagttggtataagtatagatttgctgtattttgtaaaagagtgtattgtttacaataatattgttgatttttgtaaaatacatctttgaatatagtgaaagttattgccctggtttggggaacccaaacactagcagcctagaatgagtttcctagaatgagtttctagggcaggtgaagcttgtaaannnnnnnnnntgaatctttgattttgttctttttatattcaagcttaaatcaa

SEQ ID NO: 130990 - DNA, 790 bp, Cannabis sativa
ttttgaggttgatagtcaatttttcagcccgagtcgcatcgtcgagacctgtttcgggtaagccagagcttatttttgtaattcacttagtgtgaaatttgaggtcaataagttcagaattacgattaaagtgtgagacatgacttgatagagcattaaattagctttgaaatgcaagttgaatcgcgccaatcaaatcaatattcaatgagttatgactattttactgaagtcagttcataaccaagtgcctaggttgacatatgacgtcaacctggacactgggtaagtgagaaaacgtcacgcaaatgtactttttgatgcctaagggatattttgacatcacttagtcagtttttgttgtctggcaaagctggccaccagttctcaaagatgtttctgttttgtgaaaatgagagactcgatactctttatttcagagtgagttttccatattggaaatgagaaatgtgaagttatttgacctctctaacatcatagatcttagttattgtggaaaactagacgaacgatcgaattagaattagaatcgaataagaaaaacctaacgcagtaggtcatttgtcaaccttggcagttagtacttcatttcttagttcttgatttgtcattttgatacttccaaggttcttgaacttaaggacggagtttcctaccccctttttttttagggattttttcaataatatacgttaaatataaattatttacaaaaatacctttatatatctcaattacaataataccttgccacgtcattaaaaaatac

SEQ ID NO: 130991 - DNA, 548 bp, Cannabis sativa
aaataacattcaagccagttattaacacattatagctatcaattatctaatgagaataaagaagcttcatcggaaaaatcctaattggccaatcacaacaacagatcaattagctttttgtttttgaaacatattgagaaagttttccatcactcacaatccttccactttttttgagtgacatcaacctatccttcttatgcatttggttcctatctctttatgaaaaacagagtctttttcgttttagtttgtttaatatgggttaaaagacaatcttttaaaactatcctttattgattatgggtttcactattcttggtgagattcatatattatctctaaaatgttaaaaattcatttttttaagtggtgcataagaagagttatttcatatgtgaaaaagaaacggctcgaaaacagcatttcactcaaaagagcttggaaaaacataaacaaatcatggcaacaaataagtgagtcatgtaagaagcagcattaacaaatgcaaagcatttaaaagcgtaagacggcatcaatacctgatt

SEQ ID NO: 130992 - DNA, 1288 bp, Cannabis sativa
  modified_base (26)..(47): a, c, t, g, unknown or other
  modified_base (1229)..(1231): a, c, t, g, unknown or other
ttttcaaaaacaaaaattttactttnnnnnnnnnnnnnnnnnnnnnnaaaacaaaagtgttatcaaacggcaccttaatatgtctataattttagatttgtctttcagtttatttgttgatgatattaaagttttatgtaaatattttaatgctgtgaattttattttttgcctcgtagctactaatgtagtaactaactctcttgtaaaatttgttttgtcagttactgtaaatacagattgatagcctaattatccaagttgtactagaaatcttatcttggctgaggtcaattatcaatgaactcctagctctcggtcccttagatgtttttttgctctttggtggtattttttgagactaattatcatgctctccagactttgatatctactaaattatgtctctcgaattttgatatgtaccaaattatgcccctgagttttcgtctatgttagacgttccacactaaaattagacaaaagtccttaaatctaataatcttaatagttcaaatgaaatttttaatggccaaaaaagttaaagaacataatttggtacatattaaaatttaggaagtaaaaatttgattaactttattattatttttttatttttaattgataatttgttatttgagttataatgttgattaattatacaaagaattgtgattcatattaaatctaataacattaggacatgtaataacaaaagctagtagagtttgaacgcaataaaaaaactcatcattagaaagtagaaaaaaaagtctagcaaagattctttatttaaaaaaaaaaaagagaaaaaaaaaagaaaagaaaaagacatgaaagccgacataatgtaatattaaaataaataaataaataaaaattgtttacatcattttgaatatgataagtgacaacaatgccaaactcaatatttccattaattttagattttttttaagtagaattcttttcgtgctttctaatttctagataatttaaaatattttataaattttaaaataatatataatacaaaaataatgttgaacaatttatggagatggatatatctattttgttgaattatattttaatttttaatcaaatataaaatttacttattaaaatttaattcaaaagtatagaagccacatggtgtaagctctcagcattaaaggcgtttggttgggatgaatgaaaatataggaatgagaatgggaatgggaatnnnaataggaatagaatggaataaaatttaaaatagataaaagaaattgataaaaaaatc

SEQ ID NO: 130993 - DNA, 1741 bp, Cannabis sativa
  modified_base (759)..(765): a, c, t, g, unknown or other
cctgctcctcccctggtgccataatagcaggggaggtcttgttcgtctcctctgaagccataacagtagaggaggtcttcttggcgagtgataatgaagtgttatagcactcacagacagtcccttgattaccaaggagacaacgaatactagttgtcgttgggaacttgatagacaaatggtatattgaggagatggcttgaaggtcatagagagcaggtcttctaagcatcacattgtactgagacttcacgtccaccactatgaatgttgccatgatggtcgtctactttagggcagtaccgacagtaagtggcagtttgatcttgccacatggaggaatgtcagctccactgaaaccatacatgagttgttcgtatggttccacgtcttctaaagttaattccattttgagtagggcttgctttaataggatgtttgaagacgctctgtcatcgatcatcaccctttccaccatcatgttagttatttgtacctcaacaactaaaggattgttgtgagggtagctgacatgataggagtctaattctccaaaggtgataggttcacatccgtagcgttgagactttggaggacattttactacctccaggactttggctcttgatttatgtcgaagtgatcttgcatacatttttaaggtctttcttgaatttctagctatgtgaggacctccaatcacgatctctagcttgcctgtaactaacgtaggctagagaggtgcattgcccccaactnnnnnnntaaaataatttccaacataaacagcagcatgtttttatctgatgagaaactctatctcatcatgcaagtgattacacaaatttgtgtcatgactgtaatttttatggtagcgatagaattttttcatgtccctcttccctaactctttgaaaggaagaggtttgcattataacaatgttgactgtatggccgtatagatctcctcttttggagctaagagaatggagtaggtggtgaagcgaaactcataatatcgcatggtcttcccctactcttacgcttctttcctctgggggagttaccttgcttgcccccattgttggctctctgctcaaacctccactcttcccattactctgtgccttaatagcaggggctttagtgtctggagacatcttcttgccaccttttgacccctttgctcgggtgacggcttcttcaagtttgataaagccatctgctctatctaagaagtaattcatggcgtataccgtcttaagacaaaggtcagaccacaaaggacttatctccttaagcccaactacaagtgccataacccttgagtccttggtaagacttttggtttagcgactgcctttaagaaccattggatgtagtccttgaggggctcgtcttcctgttgcttgacatccaccaaatcattgggctaaatttggcattgtcaagaaggagcgaactttttgctaaaagaaactactagacctttctataagtcgattgatgtaggagagagcttaaggtaccaccgttgagctaaagccgtcagcatggcaaggaaaattttgcacctgacgttgtctctcacatcacgcaaatcagtttgcactgtgaagtaatggatgtgagacagtggatcctccttcggagatcagtgagtgtcgttctctgtcgagctcaaattcgaacaacttaggtgttgtgatccccttcactaaagtagctaaggtgtcgaatt

SEQ ID NO: 130994 - DNA, 556 bp, Cannabis sativa
aaaatcaataattaacgctaattgtgtttactaatctatattctaatgtgcggtcattgcgacaagagttcaccctgtttggcaagaggttcaccactaaggggctagctggaaaaagtttgtccaatcaggggtgttgttaagccagagatccttagctggtccactagacccttagttgccagggtttggctgttcttgccacaagatctttatggcaagacttgtcctccttcaagcaggagaaggtctatcctagttccatgatgaaactggttggaaagttttctatagaccctccctgatctatcaactagtctccctcttctggcagttctctaattaaactgccttatcaggtcactagcttctatattatgacagtctatttccacctggtgagatcagaggttgtactcttggtcacccatccatctcaaaattttttgtctctgttgtgtgaatacatcgcaaccaacatcatgtggttcttcaattcgaccgacttgacagacagcctctctaagtttggttaactcgagatcttctcccaagt

SEQ ID NO: 130995 - DNA, 504 bp, Cannabis sativa
agttaaatgttacttattctaactttgtatagataccactgtaacaatgaagaattcttttacaaccatcaatgaagttttgtttaaagtatatatatatctagcgtcatgtacatgtttcattcttctgcacatgatattggatatgttgacataagaatcgtgctgagattatgtgaattcatagatacgactttgttagtattaatgttgaaattttgacttaaaatttctacacaactcaacaaattaagaaaatgttagacaacttaaggtcaatcttgacctttcactagtacttatgcatggacaaaaatgaaccacacatacataacacacacttgtttttatttttcttataaatagggaatttgatttagtatgcctaaatgtaaagtatagtcttttaatttaccaccaactagaaagaggatacttatacttttaatatattttcctcctaaaaatgcctttacatttcaaaaaagtctctctctctctctc

SEQ ID NO: 130996 - DNA, 605 bp, Cannabis sativa
aataaatgaagaacattagaagcttctctttcattagccctgcaatacaaataactattatctcccaagagcatgcattatgcattatagccatattctattaaatttcaaattcaacccataacaatttggagtggttgattctctcttctatctaatgttatttgaggttcttcaaataaaaacaaatggagcggtggatggtcacgtggtggatggtcacgtggttgattggagcacctatataatatcaaacaaatgtccaataataagaataataataataataataataataataattcctttgtgaacacacgcaattgcattttactaaaacgtatatgaaatcgcaaacaaaattagtcagaaaatgtataaaatatggttatagtgatctatttttggttttattttagcctatattatttgttagatatttattaaattttcaaattccatgctaattaacacctaatttgttgggtgggtagagtagactctccattaaattaattatataaaaaataatcaaagggcagattaattcataataatcagaaaggagagaggtctcagttctctgtagagagagagagagagag

SEQ ID NO: 130997 - DNA, 531 bp, Cannabis sativa
  modified_base (477)..(484): a, c, t, g, unknown or other
aatagttaaagttcaagataaaaacgctaattattcaatattttaatagtaaaaataagtaaaatctaacataaaagactatgattatccaaagagatatttttattcttccatatcgaatgataaaaacactaattattctatttaaataaatcataaatagaagttctatccttcattttgaattaatttttttttttccaaaaagcagtgtacatataaattaataggttcttttacaatgcaccacacttaaaattaggtgtaccagcggacatttttttgatgatatgtgaataattataatcttgatttttttgtatgataatgtttattttaattatttaagacttgtttgttattcataaaatgataatagttaaaagaggcattttatatgatgctgtttattctagttatacaaaaatagaattcaagtaattttacaaacgtataatgtaaagaccgcttagtttnnnnnnnnaattagcagttaattatgtttgatcatggaaaattatttatagatat

SEQ ID NO: 130998 - DNA, 736 bp, Cannabis sativa
tttatccaatttttcatttaatatcgaaaaaaattcattcccataatctagaatgttattttattaaaagaaaaatagaacataagtaataagaattaactctattataaaggtataatatattaaaatttgagagaggaaacaaattataaatatagcattgttattgactacatgtggtattcagtattttctagaaatcacattttacgagtagttgatgatattttataaaaatcaccctatacctaattgtaccaacactgatacatgatgaaaatactagacacaataatatctttttaacatttctcttaaaaatatatacagacaacaaacctaagatgaataatatgctaaaattgtggctgaagttaagaatttttaattaaaatacatatttattttttaatattaattgtatttatttttagagcattgctattagtcattagtagtgtcgggcacagatgtatcaccttatgattggctagcgatactgcataaaagttattatattaaattatgcgggatccgatactgatgagtgtacatttgtacactcattcttagtcaattattagatggattagtatttatttttctatagatcagatgtgttttctctaagtgtataggtttgtgctgaaaagaaattttgtgatgaactgagatctttgagtacatttttgacaatgatttcattattttctcgaagagcttatgaaacccaaaa

SEQ ID NO: 130999 - DNA, 1547 bp, Cannabis sativa
aatgtaatctaatttctgctactgatgaacaaggaatggcctgggaaaataatgtcttttaaggaaaaagaaagaaataccaacctgttcaaacccgcgatggaaaattggcaaaactattggctttatttttgcacgaacaatgagactggccgttccccatttcaatcgtcttataggcgcatcttcttgggaaactatcccttctggaaatatatgcaactgcatgccccaatacaagagctggaataagactcttttgcattgacacacaattttcttttttctaaactatagtaagctaataatgtctaaagtttaaacaacagaataactagaatgaccatcaatggatatcaagcccttcatttgagccattttcttaaagagaaatatccacacaagtggagtttgattaaaaactgatacagaaataaaaaccccatcaactttccctctcactaaacaagcataaagatttcggtcttctaacattcctcacataccaattataagatcaagagaagagggctccactttctctctccctttcttcccttgacccggtaactctcctcttctatcttctctccctcttattacagagccttagttaattctgcacaaatgtttaacaaaggatttacatatgcaaagaaaaggagactttgacaaggaaggatttagacagaaatttcggtcaagaattaatcttctagtatgcatttttgtgataagttcaacctttacagttcaggtaagatatgcttaaagcaacttacgatacacaaaaatataactttgaaacacattattgataactagattctaagcccgagctaagtgtctatgatcaagaaaggactcaagtaagaaaatcgctatcaataagagcctagcctacacttggccaacttactttttaataaaaagagtaagagattagtgatgactttctctgaaatatgagaatagaagtgaatacccacccatgctccagtatctaatttttcaagagcttcattcatgtgttcttgataaatgccaccaccccttgtgataggtatgcacttccctatcagaattcacaacatctttaaagaatttagaaaggctaaacatttattgaacaaaaaatcaagcacaagcatagaaaaggggggaaagattctaatgataagaagtaaagtttaaagtttgaatatttccgtataagttcaaattttcttataactctaaaaaccaatctgtatctattatcgaagcttgtcaaagctaatatcacaatgctgactatatttgtatcatgactagctattatcttccaatagcaaaaatctaacatcttgttcttatcaatggagcttgttgggctccaatttaaccaaacaaaaactctttactaagttccaatagttgctaaagatagcattgtaggattaagaaaacaacataaaaatacaaatcttctaacacttaacaaaagtaaccaaattttcacaatttacaataacccaacaatctgaatccattcaaatcaatacaga

SEQ ID NO: 131000 - DNA, 737 bp, Cannabis sativa
atggtttccaatatgggagattgataatctaagtggttttatgtgtttaaagctccaggaattaggactgattttaatcgtcgacctagtacgtcgcacattccaacacttagttgattttcatgttatctcttggtatgatttaacacgctcttccgtattgttcgcagatagaccggctcgacctttattggactcgaccagcaaagaagtcgtcgaggttctcgtttgtctccctgtttaagatcgcgactgccaattgctgtgcacgactttgaaactgcaggaacacaagttgattccagagaacgccagccttcatcgggagccagtatacaaggggccgtctaaaactaaaaggagaaaataggcaagcgtctttccaagcagacttctcaactgacatcaggtaacatatcgcacatacagacttatgcatttggattgattgttactttaacttgtcttttcttgtcctcgcagagatgactttcctaaaacaagcactcgttcttaatcgcaaggcgaagactggaacaacgaagacttcacatgttgttccccaaaagaggaaaagcgatgtcgtggttatccctactgcgaattcatctaaaaagctagctaagccttcgcaagataaggggaagaaagtcgtgatcgatccagctattcgggctcgcgatttcctagttcttcaggagaagttcgtgggcgaggagttcatgtccaaggcggag

SEQ ID NO: 131001 - DNA, 1080 bp, Cannabis sativa
aaatgccgttagatagacacttttaatatataaagatataaaatatatacaagattaacttactataattataattacatatatataaaaaattataatacatatatacaagactaacttattgtaattataaaaaggataattgtggcaaaataagtctctaaaaatataaaattgatgcagattagtctttaatctcgaaaattgatgataatagttcccaatttcatattttctgtaagtccgttaattttcttttctaacagatccgtttactaattaaaaatgccacgtgtcaataacttattagtccaaatcgtattttttattttaaaataaaaaactaaaataaataatttaaaaactaaaacaatttaagtatatataaaaaattaaaaaactttaataattccttttcatttttcttttcttttattaaaattaaaaaactttatcaaaaaattaaaattaaaacatattattaatcccaaactccacccacctgatttttctcctcctccttatttttcaaaccatagctcttcttctcctacaatttctcttcaacaagaaccatatctatggtctgcattccaactaggataaatttctccgaaccacatatgaaccttccaagccacaccgatcttcctcactcaaaacgactacgcaggcttcactctcgatctccaaaaccacaacagattcaacattttgaaatccttcatctcctccttgatctagtcatcgaagatttcctctcattcttcaattttattaaaaaatatcaaaattaaaacctccaatttcaaaaaatagggtttcaaaaaatcccctatttttttttttctacggagaatttatgggaggagtgatttgtctcttaatcacctccctgatctaaagtgctttgacgacgttgctttggtcacacccatgtgtagaatcaacgaaaaattgaaacccaaatgaacaattccttagattttgactcaatttgctaaaaaagaatccaaccctaactgtagtactgattgaagattgatgcccaaatcggttaggattgaagagaagaaattg

SEQ ID NO: 131002 - DNA, 1032 bp, Cannabis sativa
atccacataattattaatatttataacagaaagaatcaatatatatatatttgatgtgagaatcaatattgatattgtagattcgattaaataagttcttggatattaaaaaggctaatttttatttatatacaaataaatgtataatattacaaaaaacaaaatgtgcaaaaaaatataattacataattctatagaatttataaatatttacaaataaacatatatgtttataattttaacatgttgattactttcaattgattttctaaaaaaatagataaaactaaatatgtaaacataaaagttaatatttatattttgatatattactgaaataatatgtttactaaaatttaatacgaaattaaaaaaatatatacaaatacatttacaaattttatttatatttatatatgtttattaaatatttacataaaaaaaatattattggaattaaactaaccccataaaaaaaatatttttattaagtttgtgatgatatgttggaatcgaataaatgaaaacaaaaatctgagacagaggacgtcggtgagccgaatcgaatcactctcagacgactgcccttgaacccctcacagaagaagacgttgatgtgggaatgagaaaaaaatttctttctatgcagttatatcttggtgcgccaccgtttacactaaatgatccagactcatctaaaaaaactttttttctttcgctagaagttattgtacaccactctttaccacccctactcttttagaaaagaaaaaaaacttaaagtgaattttctcaaagaaaagtctccaatattgattcaggatatataatgtttatggtagtttttatttatagaaaagagtagattaatttgcataaaataaaataaaagaaaattagagaaagtttaggattagattattaatatttattattaatttagtatatgtttattatgataataaatataatttatttattaaaaagtcataataattttaaaaacaaaatacttaagtttatttatttatt

SEQ ID NO: 131003 - DNA, 858 bp, Cannabis sativa
agaaaacagttttttgtcattttaaaaatttaatggtgtttggcacaaatttttaaaaactatttttttttcttacgaaaaaaaaaaacaatattttagcgccatccgagtctagattcgggtatggtttcgggtctaggatctcagtatgtgaacaaaatataaaatataatatgttagacaaaaaaaattatttttgataattgaaaaacaacattttgatgttttctgttttttaattttttaaaactcaatttttaaaaaacagttttttaaaatttttaccaaacgactcctcatagtttttaaaaactgttttcagttttaaaaaacagaaaacagtttttaaactgtaaagccaaacagcctatcaatcttctcttcttcccaaattgtgtcaatatcttatcttgtaaagattatctctcttgtttaataatttggtcaatatgcattgcacaactttgattgttacatttcaattcaattgcttaaattgttggaagtttttgtttgtactccttcttacatgattatcattctttttaagtttgtaaaattctgaagttaaaactatttggccaactttaattacagactcagacttcatcttctaattattttagttatcatcatttttcttatgcaaacacaaatttagcggagttgagttttaaattttaaagagtacgttttgtaactagtaccactatgaagctagtacttgaaactttgattccatttgtatccataaattatatattacgtgtacgttttgtaaccagtaacactaggaagctagtacttgaaactatgattccatttgtatcgataaattatatagggaaatttgatttt

SEQ ID NO: 131004 - DNA, 877 bp, Cannabis sativa
ttatgaaataaaaaattcgaaaaactaattataaaataaattttatttttattaataattataacaataatatttgtcacaaaatcttcacttttttatatattttaaaatatcaaattatatttttagttccaacactattaatttgtttataatatacacgttaaaatattatttttaaaattatatcatttaatataaatatgatatatatatatatattataaaaattggacaatacggcgcgaagcacggcttaattttctagttatataataataataattaataataatgtatattttagtatataaactaagacaaagaatgaaacacctcattccttacaaaaatattgagcgggtcactcaaattttggcgctatattttcactttgtctctttttgtttctttttttcctttgttttaaacagttttcttttttattttttttactttatttctctattgttatctctcattctttgtctctgacgacctctgagcagagatagagtggccattcttgtacaaagagagcaagcccaaatcattgtccaacaaactctgtcctcaaactgcctagattttgattttgttgcaccgaaatctggtgagttttaattttattatttaacaaccaatatgtgattctaaatgtttagatttaatagctatttttttttattctggacttctgattttgaatcctagataaatcttttactttaattcattagcatcaaaatgtataattgagattgatgcttgagtgacattttttgcatttttatttatatttgattaaagggaatttctctatttctcaatctctcttttatctttatatattaaaagtgtctatctaacggcattt

SEQ ID NO: 131005 - DNA, 709 bp, Cannabis sativa
gaacacacctgaaaaagacaacacgggcatactatataataatatagttcaataagcacgtaaataaattaattccactgttttacccttcccgagtataaattactaaaattctcctgactcaccaacgaggtcttaacatatcataaatcatataaattcacatataataaattatgtaataatataatttctcaataatacataattctctaattagtttttgctaatccaatctcgtaattctagggtattacaaaggataatccaactgacatgttcactaaaggggttcctattagcaagcttaggcatttcgtaaagctgctaagtgttgacaccagcaaataatacccttaggggctcttggaacagtctatccattattgatttcactaacttcagctaaaggtggatttgtgatgttagttaaagttagttaagtctatctggtattcagttacaaccagtaaatttctcaaagcttcaatctcggcagttaagttagttggggacaatactgtctctccaacactcttggacattgcccttaaataccaatcgcttctacagtcagagataaccttttttaacttcttcttcctcttcttttaaattctctatgtatagaaataaagctatatgtcaatgttggaaatatttaaccagggtctagatttactaccatgtatgttttattaacatccta

SEQ ID NO: 131006 - DNA, 710 bp, Cannabis sativa
  modified_base (103)..(103): a, c, t, g, unknown or other
gttttatatttatatttctttttaataaaataaattattctatatattatattatagtacaaaaattctatacatattaatattaaaatttaaaaaaaaaaanaaaaaacaaaaaacaaaaaactaaaaggtttgctatgattacagtgcacctgcatatatgaagtaaaacggtagcaaatcaatattttagtgccaattatgtagcttggttggaaatgagtataacatatttgatgttttgttgatacattacaatttcccttagagaggtattatattagtataataaagtatttggatctcatataaattaattaatgtaataactattatgaaacactataaccatttacaatacagcctctagatggcatgctaggcaccactaattagggatggacatttttctcatggggatggggtccctcagggacccgcctctgataggaaggggattccccatctaaatgaggaacgggggcagggacataaattactttttgtccctgaatgttaaagagggtgggaacggggatcatattctccaccccgatgggaactcgtttagtattttattttatatttatagtaatattttataatttataatttatgtttccattattttagtatattaatattctttttatgaatttaaagttatgtttggataataattagtttattgaataataattaatgtgtaa

SEQ ID NO: 131007 - DNA, 1226 bp, Cannabis sativa
cagcttaacagcaaggaaagctgagggttcagcacattcatcatcagcagtgtgatcaggagttgcagagaaggagtggattttggtttctaaatcagtaaggtggagggtagcattcagagtattggacaagtcatccatgttgcagcaacaacaggaaggacgaaagctataaaaggaaagagatatttctatgtaggtaatactgataaggaaattttgcaggaaaatatttggtacagtgaatagcagaggatattcagttttatagtgatcagggtataaaattagtatcactagaggcagcataacatccagagaaaacctctccatgtcaggtaaacgaatgattgtttctgcaatgttgacagtggctcctataggatttctagcgttctctatgaagatagaggtaatcataagccaaggtggttcagggggatgggatctaattaatatacaagctaaaaggagaatttctatacagaagagattaaaaagatgaagagatcgatacaatggacatttaatcgtagatgggacacaaacccaggagttattgcaaattagaagttaacctgtgaggaagaagacaaaggacttgaatggtagagtccgtctgctaacagccacaagcttcagtgagagggaggctttgctcgagatggaaccgtcacacaatggatgaacccacggacggacttgaatgccgattgacggcgacgacgacggcaacactgacaggaaaagaggcatctcgaaccctagggcatgcactctcaggcggactgtccagaagcttcttattatatcctttgttttgttttttcattttaaaaatactttattaactttataatttaaattaaaacgcagaatttttttcttacatatcataaaagttatcgataagtgaatttatactaatattttttttcgacaatttctcttttttaatatacaatactagcgaacaactacttaaatattcatttttcatcttattgcgaagtataatttttactatattcatagctgaaaaaaaatattttgtggtagttataagagttataactttgtacacaattagaacatttaaagtgttacctaaaataaaatagtatgtcttagtagttgctaagcaaattaatatatattattaaattaaaaataaataaaaaatggtatgtcaaatcaatatttttttttttgataaatcagaaatt

SEQ ID NO: 131008 - DNA, 1014 bp, Cannabis sativa
tatggcattcctcaagacttttttccatatttgtaagtttttttaaaaaatgtcatatttagtgtaattaattttttatgctatatatatcaacacttatctttattttcccatatttttgtaaatagcccattgattaataagtacctaatttacttcgttcaaaaataaaatttacaattatattatcaatacatgaatgaggtgctaggtaatcaaccacacttcaaagattttgtgagaaatataaaataaataaataaaagattagcatcgtaaatgaaaatctatagtctgtatatattgaataaagaagttatattaattacaaatattgtattccaaacaagaagaattgttagctccatgatccaaccaaaacccaaattagtaaatgaatttggcaaacctaataagaaagaaggttaatatagaatgttgtggcaaattaaagagcgtctaaagcagcagttagagcaagaacatcatagtattcatcacatgcgtataaagcatgattatgattatgactgtccttacacccacactcctctgagactgagctgttcttattctcaaatatatgttcttcactcaaaaccttcatactgatcttcaccttaagtttagctggtttaagctcaccacttgaatgagccatggtcacccacttgtctaataccatgtttggtgactcactaacatctttccatgcaatctcagcactgcccaacagttttgaaccaccaaagccacttctcccaagaattggcactctgtttctccacctcagctccaaaaccaacttctcttgctttatcaatttggtgatatccactttgttgtcctcaatcccagagcactccaaagagaaagtttcattccaaacgtggtcctttttgatggggatttctttagtgtcgatcccaacttttcttttgttgcttccaacaggaagataacatcttacaaacaggtcacctcttggttttgattctacactttttgcttcta

SEQ ID NO: 131009 - DNA, 1121 bp, Cannabis sativa
gaaataattttttctacttattattggtacttttaatgtgtttaatatcattgataatatgcttaatgctatatcggtatggtaccactttttccttatattttaaaattaatttcaattctatttgtttagtaaattgttttttgtacttactattggtactcttaatgtatttaatgtcatatcggtatgatactcaataattagtttgtaactttttgtcttgtgtattttttttttcttttgtatggataatttttgtactatttactattatttttgtaaataattactaattagttagtaattttttaataatctttgtaatatttattattttttttatcttttatgtttttttgtttttttttttttttaaattttatgttttttacaatgatttttttatacttgttattggtacttttaatatacttaatgttatatcagtgtggtactcaataattggttagtaaattttttgatccatttttaattttattttttatgaatgatctttttactatttttttggtaaatgatttttttgtactattattgctatgtgacatcttaaggtgctcaataccatacataataattagttagtatttttctaaatcatttattaaattaaaatttatgggagctgatattgaaatacaccaatcacgatatactatcttaatatttttgtcattaatatgtacatctctttcgtaatttcgattataattttaattttttttacatctaagttactaatttaattaaaaaatttattagttcttatttaaatataattactaaaaattaaaaaaaatatgtttaatccattaattttttacgtgccttggcacgttctctaccacctagtatatacatatatatatatatatgtttatatatataaagttttgttttacacatataaggttgttaattgtggtaataccttttaccatattcaattttctggaatatatatgaacgattacaagtttcccatttgataaatatacatatagggggcgtttggtatgaggtgtttcaaataatttgattatagagaatattatgaaggagaatatgattatagagaaatgtgtaaactgtgtttg

SEQ ID NO: 131010 - DNA, 665 bp, Cannabis sativa
aacacagggtccaattttggtaacttttgtaaaaaacttttgtaaaacagaattgtaaaacagaaggtccaaaatggtatttaccctaaaatttaaatttaagcttgattattagcctatatgttatatacacaataatttatttattatagggatatgacagaaaagctatctgaattttatattttttaacacttaaccacaaaaattaaaatttttgtagcaaaactacccaaatttttttctgttttctgttagctatttatcccttccatccaaaaaaattatgttaagtgtcatggtggaatgccacagtgtacacaagtatacacatggcaaatttttagtggttcacgtaattttaattttataaaaattaatataaaattataacaataatcaaaaaaataaataaatcaattttttttctcaaaaaaaaaaaattatttcctttctttttctttttcttcttccttttgcctggaaccaaccgagttccttcttcttcccctgcgactagaaccagccgttcctccccacagtgaaccctaggtgacgaacactaggtctgactactctctctctctctctctatctttgatctgtcatatacctacacagtctcaaaatcattccacttgatccccaagcgatgtgggattgca

SEQ ID NO: 131011 - DNA, 544 bp, Cannabis sativa
cttaatctcttgcaattctttgatggtgttacttttcctctaatttcactcgtttttttccgtgataccagccttgagagaagtgacttgatcctttgcaagtttttgaagtcctggggcagttttaacttgagcttccaaccccttgatgactcccaatttgttttgaagctcgaagcttttggacagtgcttgagtcttaaggtcggccttagcttgcagagcattgtcacgtttggtgataagattaacattgccagtttccaattcctcgagatgggccttgtattttgcttttgtgagatgcaaaggatgtcttatagtcgttgtacttttgcaaataatttttgttggtctcctcaactgcctccttgcaataggatttaacttcattctcttggagctctaactctttctaggtggctagagaaaggtctaacgaaaacgccattgtttgcacctccctataagtttgccccgcgaaaaaggccatcagaaattgattagaaaccatcaggaaattacaatagaatttggtgctaag

SEQ ID NO: 131012 - DNA, 1203 bp, Cannabis sativa
taatattaatatagtacattgtcttgtttgacttttcaaaggtaccacaagaattaatatgttccttatctttatgtatgcacatatataaattttgaagcaacttgcaccataaacctaagtcatcaacttatacgattattttttgtttgtatatgcacatatttgttccaaccttgagattactcatgccctaatgggttgccccagagcaaagaacatttggaagctttcaagattcaaacaattttactatgattatcatagaacagacattagggaattttatctttaggcattgcaaaatatctcaaaacaggatttcccaatctttattgctcttatctggcatatatggaatactcgaaactcaattttatttaacagatctggtattcctaacaatgtggaagagtttgttattaattatttacaggaatacaatgaggctcaacaaagctatcatgcagatcaattggatttagaggccactcccatcactcatcgtcctcagcggctgcaaactattgatttccaagaggattctccatctctttatgtggatgcagcccttgatcacaagaatgttttaacagggaccggttttatcttcaagattggacatcatcgtgttgtagcctctcactatcgccttctgcctggtgcttctactcctatatttgctgaagggcaggctctattgcagagtttattgtggtgtttggactctcagttgagtcataagtttgttttctcggattgcttgaatttggtctccaaagttaacagtgaatggcaagaccactctgctctttctggtcttgtgtctcggatacgtatgctcttctccaacttccctgaagcatctttgcatttcctgcctcgtcagttcaatatggacgcccatgatcttgcaaaagaagctatcaggtcaagggaagaagtttaggagggattgttctgttccttctctgctgcttggtgttcttgtttcttgttcttgcagcttgttttctatcaaaaaaaaaccttgagattactttgatctctttcgaattttacaataatcaagttttgacttggccaaactgagatattttattttatttttttgattaattgcaataatttacaattggtcaaaatttatattttgggaaaattttgacagcataacatttaaaatttttattttcttctttg

SEQ ID NO: 131013 - DNA, 699 bp, Cannabis sativa
agggcccacattgtgtacaccatgatggcccattttgtttactttatggatcaagggcccagacagagtatatatgtacacaagtcaagtgcgttttgagaagaaagaaaaaaataaaaactatatgattatttgcgactgcctatagtttgtgaatgaatgatgaatctgataaagttcagaagatgtcctttgcttatgacaaaatgcccgttgcgtcgttgcgacatgactctcgataccatgacaagaaaagaaaattatcgggttttatttctaaactaattgacaataaaaagagtaattctatatagaaaataaagtgtctcttattcttaagattagataccattatatatggatgtagtgaaaatgcatggagtagggagatactccaaaaagcaagatatattgtatatgggtgtgagtgagtgtacttgatctgaccaaaagcaaaagtgaagaaaagaaagggttaatgaaggagacatgtacatgtgtctcctctgaaaacttttacagttcaattcattgaatgactgtaaaataaatcacattgattgatacataatatataatagttaggtgcatatattttattactacctggacctcaatatagtaaaaaatatttgggtgattcattctattctagggctcctcttttaacaccaatttctcttgttttttttttttttt

SEQ ID NO: 131014 - DNA, 714 bp, Cannabis sativa
tgacacaattttgtattttttttagcacgactcaacatgactcatatattcactacaaaaaaacagttacttttaatcacaaaaaaaattatattatcactaaaaataagattttttgtagtgattttaatgatacaacaagacatgatttatattttttatagcacaacactacgtgacttatattcgaacttagaaccttctctttataaagagaagtgtgaaacattaaactatgcctatgaccactccaatacatcccacttgaatctttaagaaaaacaatatatagtattgaatacaaaacttatttacccaattttaatttaacaaataaataaaaatcttcataaaaataaatttatgtcccccaagtagtatacattttctaatttctcaccacataaaactaatcctagcaatgaaaaaatattactaatcatactaattgtattaaaataaaactatgaaacggtaaatttaaatgaataaatagaatttgtatcctctcaattatatcgttggtagaattttctcattgaatttctatttttttgtaaaatatttatcttcaactacaaaataattgtaaatttctttcctttaattgtatttttttttgagataatgcgtataactataattaaatacaaaaacttatttaattaagggataattgcggcaaaagtcccccaaaacttgaggttgatgccg

SEQ ID NO: 131015 - DNA, 547 bp, Cannabis sativa
  modified_base (53)..(59): a, c, t, g, unknown or other
tttattttttaaaaataaattttttaagaataaaaattttacttttattttgnnnnnnnaaaattaaaaaacaaaagtgttgccaaacggcacttaatttattatttaccttcctataaatttatgtatggagattaatatgaatatctagtttttattattattatatgttatgacatagatagatatataattatttctccccaaaataactatatataattgttctaaagaaagttttagattataaataaataaacaaataggtctctgcttgtaatttatttattttattataaaacttgttttaaagtttttggaaaaaaataataatttataagctagattcttgattctttattaatattattttattacatacataaatagtaactagactattatcttttattattttataataaaaagtaagaataaataaaagggtaaatagtggcataaatacttaaagttttatgtttgtaagcggcataaacccgatgtttatttttagcggcataagtacccaatgtttgcaaaactgtaa

SEQ ID NO: 131016 - DNA, 1645 bp, Cannabis sativa
gggcataaaacccaacatttttgtcacgctcctctatttttgaaaagacgcaatccctttgattttggcggttgtgcagtttcgaggtataccagaattaaatgaccatcttttccacttccactttgaatcatgtccattggatcaaatcttttttgaaatcattgtcatgagtataaaataaggaaaaaggaaccacctttgcaccatttcaaaaagtttgataaataccctgaacttcttcgttaagggtcaccaataagcccgtctaaagatttgcatgccatctttgtcttccacctttttcttgcgagtttcctccgaattcatttcttcaaggcgatccttgtttcgtttgaaggtttgccaacggatttcccaagcgttgccccaagccctaacttcaaacggtaatgtggattagtggattagttgcttgattcacttgtattgttatcatctcatctggtattggtagtttttttgggttaaaactgttcatacgagggtttaggaaatatgtaggttgttttaaaacttccaacgcattaccttctagtttgataaaattctctccagggattgggactgctttttgctggtagcaatgtcccactctggttcaagagtttatcatccagaagctttagagtttgagtttcctacagaattggccatcccatataaaaaaatccctcaaacccacctccaaattagagctaaacgatgctagggctagggaacacacagtgagaacccaataggaagatatttctagtcgccacaggcacttcttgcaagaaatatctaaaggcagacgccggttcttacgagaagcaacttggctagaaccacccagtgtgtcctttattcctgtggcaaagcctttgtttttacccaccgtcacaattgctattgaaccaggtgacttggatttcgagattatgcctcccaaaccacgtacatccaaaactcctcaggatcccagcgtcaccttcgaggctgagttaatagaattgaaggtgctatctatctcaggctacacaagtgacatgttgaagacctgtggaattgcacttgggcaatcatttcaggttaggtcagtacgagagggtgaattcagttgctaccccctgcacgctttgatagtagtaacccaggaaccagtggtgagactagtactagtggttcaactagtacgggtgcttcgagccttgagcatatttgtgcaggggccatcctccctcttcgggactacttcaaggattacacaaaattatgaattagggttgtcccatgcctgtagagattgagtacctttactcagttaaagtcgttccatcgaggaagaacgctgcagggggctttttctatcttggcactcatgctagcgagccaaaagttatcgtagacttcctaaataaggtgtccttcaaggaagacttcttctggacgtctggtctctcccccattggcacaaccacattttgcaaactctgtaaatgatggttctcttctttcttgtttagatcagtctttttttttttaagtgcttgactaatgtgttgtttgttttgacaactcttctgacgagacctacccctacccccaagatggttagtaggcacaggcgcttgatgactct

SEQ ID NO: 131017 - DNA, 612 bp, Cannabis sativa
atagagatattccataattaggcacaaaacttgaaagattaaacaactattggcttgtttattaagccatataaaaatcctattgtattaaataataaataatattatatttggataaagtaatatattgtattaattattacaactaaaacttttaatacaatatatgttgtattatttagtacataatgaatgaatctgtattaacttgtattataatatttacaaatgattcatggtcaactccaattttcgacccgaactcgaattcgaattcgaactcgaatctaaacctgggatccaaacttggaccctagacccgaacccagacctcggacccgagacccaaaccgggaacgggaacaaaaccaaacccggactcagactcgggacccagacccggacttagactcgaactcgaacccaggaccgggacctgggacctagatccgaacccgaaatcgagacccgggacccggacccgcgacccaaactcgagacccgagatctgcgacttggacctaagacccagacccagaccttgacccgatccgtagttggtgttaggatcgagtatattgaaaatatattatctttacacaatctattaat

SEQ ID NO: 131018 - DNA, 1311 bp, Cannabis sativa
  modified_base (147)..(150): a, c, t, g, unknown or other
  modified_base (786)..(793): a, c, t, g, unknown or other
ttattgttgaaaaccaaatctcatgtttaatttaagggtagtagtagactctagagtgacaccttttaattgaaagacccacatgcatattgatcctcctaagatatatctatctcctcaccatgacaaaataataataataataannnnaataataataataataataatcgttgtcgtttaatcatttatataaatttgaaaaaaagaaaagaaaatatatataacgaaatattgattgcacccaaagcaagactggaaaagaaaaaaataaataaataagtaaataaaatatttattatgtacagacggggataagaattttcatccgatccgactagatgaagatataagaaaagaaaaaaccaatgttatatactataatcaaatattgaaatggtaatttagcaaaaaaaaaaaatcttgaaatgtttattttttctactaatttattatctaaatttaatttgtactaataataataataataagaccttttaatttttcaaataaataaatatcgccatcaaattgaacgtgaaataactatgtagagaaaactcaatacattaatattatttttttttttttttgtaagaaaaagataattcaatgtttgtatcttttcttaatatgattctcttaataggcatacataacaaaaaaaaagctatttttaaaaataactttagtcccaagatatatatattttgtggctaaatgtaacttttagtcacaataaaaattttgtgactaaaaatatggatacaagttgtcactaatttnnnnnnnntcacaacaagtattgtgactaatagtacatttaatcacaacaagtattgtgactaatagtatatttaatcacaacaaattgtaataattgtgactaatacttttagctacagaccttttaatcacaataaaaaaataacaatttataattagtcacaactttttatttttagtcacaaattttgttgtgactaaaagtaaaaattttgggagagattgaagaaatgtcctatagaatataggcttaatttacaaatagtttagtccttttatttaaatgattctaactcaagtaatcatttcaatgaaaacttatacgttatttttgaaaaaaaattccaccccacaaaaaataaaaaaattaaaaatttcagtatatgatgtaaaaagctcaattcttttataaggtccaaataaaatagaggaaattacactctataccctttttatattgtcttttttatttatttttaccatcttttttaaagtctattatttttacctctttttttaaatatt

SEQ ID NO: 131019 - DNA, 563 bp, Cannabis sativa
  modified_base (517)..(532): a, c, t, g, unknown or other
accgacgccaaaagtggcgtcaaattcccttctaaaaattttcaaccctatgacgtcggttattaattattatgctgaaaaaagcgactctaaaggcttgctttgtagtagtgcttctattatgttatttactactcgattaaatttcttctcttaagtgtcaacctgaattgttgataggtacacttgtctaaacatagttgttgacgtaattttttgtcaacttaatctaagaagacaattaattagagaataaattcaagaatgacaaggtgaaaataataatggataccaaatatttttatgtaattttgaaattaaatccatatagtccgcgagtcaatattatttctgaattttgattgtgtttacaatttggcaaaatttctataaatccagaattgtctatcccgttttcctttgagtgaacccttatacatagaatagagcattgttattgggcaccagtggtccctagcacgtctagacatgtcgctttgcgattggctagcgatannnnnnnnnnnnnnnnatattaaattatatggaacccgatacttagt

SEQ ID NO: 131020 - DNA, 685 bp, Cannabis sativa
tcttcttgagctagcaagtcatctagaacattttcttgacatttcagatcatgcaacataacaggggtgtgattattgatgttgttcaagtttgaaacatttttctgcacttttgaaatcttttttttaagattcccgaacttgtgtctatgccactgctgtaacaaaccagcacagttgctgatattcttgttgaatattgcagcagcattatcggcatcagcacactgccagttctgttgtatgatatcagtggcttcttcctcatgtaaccacatcttttcaaatcggaacctcctttgcactggatgttgctggtgtgttgccgaatgttgcaatactttgacagagattgctcgatggtcaaaaccatagtaatcaaggtgctgagttaaaatcggttgaaaagtatcacaccatgaagtgttcacaaaacaccagtcaagtctctcctttaaagcatcaagtgaaagcctgcctttaatccaagtgaatgaatcgccttcaaaggcctgctcatgaaggtgacaatggtcaagaacttgtcgaaatttgtccatttgcgcctcactacgaagagctccaccagacttattggtatttgacaaaatttcattaaaatctccaattactatccaaggtagtaaaggagcaacatccttcaatcgttctaagagtgtccaag

SEQ ID NO: 131021 - DNA, 674 bp, Cannabis sativa
aactttattccaaaatagaccacataaatttgacttatttatttgatgacccaacacacattttatatatacaattgtgaccccaataaattctaacaggtaattgcagacaccacacaacatcatgtaaagtctcgaataaccgctccaaaacccatacaatagtcagaaagccgcaacccatcatatcaatattaagtttgaaccacccttcagtcggtggagaccacagggcctctggggccacctagtcagactaacaactaaagtatgagcaaaagcctcatatccaaatctcacaggagcttcttgataagcaaacgaaaaagttcaatccaatacactttcgatatagccttaaatgatgttgataatctatttatttatctatatatctatataatactaatgttaaataaggtgatgtggtagttttctctagctaatgtattttatttttattttttattattccaattttttatacttataaaaatattcacttaacatgtttttttttcttaggtcggtaacattttttcaaaaatattataaatttgtgtaattaaagagtaatattcttagggatattggcggctaaaccacctgaattttatgttttgtaacacttaaccacaaaaaccgaaattttggcagctaaactacctaaactc

SEQ ID NO: 131022 - DNA, 1025 bp, Cannabis sativa
tatttttaatataaataaaaaaatcacccataaatttctcataaatctaaatcaaaaattatgttatataaaaacactttatatagaatagatatatctattgtttatttttcaatttcatcattagaaaatttgatatatgaacttcgtattccttttttttttttaattagtcgtataagtctcaaaaaaaaaagtatatgttatatatataattaattaaacggactaaattaaccaaaaccccaaccattttatatgttcttttcttagtttattcatcccttttagttcctcgtaagtttttttttgtttttttttttctttttcttgatttgtttataactaacagaattaacttttttttatcaatctcaaagttgaaacatttgtttttgaaacatatttttcaagaaatattttttttcacaaagagaataatatttccaaatcaatatgtgatatgatttgaagtttgtcaactgaaaggagctcaaaagaggcaggtaataattatattagaaaaagatcaatatgcaaattaaatggtccgaaaattacatcaccaagactcattattattggtatttaatttttctttgttttgtataacaataatataattgtcatcgtagtctttctcatttgtgtgtcatattcacaatttttcacattttaaatattatgtacacccatggccataacttcatggttggctacatagtttatgttattaaatattttttaaataaaataaaatatccatgtgattatagagtaaacatctacattaacattagtgattacaaaaaagaaaacaaaatagttaaactaatattagaaacttttaaattagttttaaaataatttgcgacacaactacgttaatattttatgaaccgacaaaacttaacaatttacaacaccataaatagtgtaggaactatttttaatggactgaaaaaattaggagcacactaatacttaggtcgaaatttcagggctaaaaattataaataaccatt

SEQ ID NO: 131023 - DNA, 961 bp, Cannabis sativa
  modified_base (815)..(821): a, c, t, g, unknown or other
cggttcctacaggcctctatgaaccggaattccggttcctacaggcctctctgaaccggaattccggttcagtgcaggaatcacttaaaaattcgtctcaaccaattcaactccaatccaatcaaaactttccagacatgtgctatacaccctagagaaatattcaaggccacaaaacatacacccaaccgcagaaacaagacttaccattaatgagccaagcttgagtttaaaactccaaagcttgctcaacaacaaaacagctcctaaaatcacttccaagcaactcaaacaaacataaaataattgcagaaacaatctttaaataacaatagcaacaacagcaacgaaaacttcaaagcatgcaaaaactttcatttcttacaacttaaggaaactaacaagagagtttcacaaggattaccttagcttggattatacttagaactgttgctaaacactgaattaaggaagcaaaatcaagaaccctagctgcacaagggtggccgaaagagagacagagagcttgagagaaaaaatgagattttctagcttttctaattttgtatcaaaatgagtaaaagaatggatttcttattttattaaattgcttcagccaaactaagcaataaaatcagatttaaaactaaatattaaaccttcactaaagacaaaactcaataggccagaaagaccataatgcccttgcctatgctaaagagtcatacaatgcacttagggtattttgggaaaactctaaattcccgacaaacctcgacattcccaatgtctaacaataccgccccgctatactnnnnnnncaaagatgtgattctactgagccatacactacgttccaatgttgacgggcacaaaacatgcaaaaaaaatgaaatttctatgtatgacatataaaatgcattctgaatttaaataactcatcataataattaaattaata

SEQ ID NO: 131024 - DNA, 901 bp, Cannabis sativa
gagagagagagagagattaaaaccctgtttgttggttaagaaaaataaaaaagacaaagtagattgaatctttggatttttatataataccatctatgtccaaccaattaaaaagaaaaggaaaaaaagtaatcgcattctctgaattatacaaccatttgacttctttggttttcaaacaattttcgtaaaaatgtacaagcttccaaagttaacagaaaaggaaccaaaaaaaaaaaacaaaaggaggaggaaagacttacatgatgcgaggtgtgatttgaggaagagggagggaaggctcgacggatagagatgaagattggatctgagacatggaattttctgaagcttctccagctacttcaatggggttccatatgttcacagctcccattattttatttaagtcttcctgttgatttttccgtcacttccgcaagaaatatttagctttgccgttttgagttagaaatgtattagtttttttttaggtgaaatatgaaataatgtataattgagtgggagattctatttcagagggagatccaacccaacaagtgataagtctaggggatattgatgatgtcaattgatttggaattttgttctatactcaaaaaaaaaaaaaaatatgtatataagaaccctcacacgcaccccttaataactcatatttgtccttggaccttggtttttattgtaataagaataataaaaggcattttaggtaaatgtatatattttttaaataattataaaaaatgtgtaaaaaaatacaattttaaaaatgtataaatttgaaaatatatttacaaaaattcatacatattttttattaaattataatagatatattaatgattcaactttctatatttagatttgtataattattttt

SEQ ID NO: 131025 - DNA, 946 bp, Cannabis sativa
gtcggttctttgctaggaaccgagggcatagggtctcccaaaaacccttaaaaatttccaatttctaaccgacgggatagggtttattaatatatatacccacggttttttaccaaaaaaccgccttcaaatgtcaatttcgaatcaggtgggtgttttcacaccctttaacttccctttttataaaatgggttaaaaaaagggaagctaaaggcccatattgtagtagtgttaactcatataaactgaaaacgtacgttttggccatatcaaatttgaatccagtgtatataaataaatatatgcattttctaatgaaaaattactagatgaacacataatgaaaacataagataacaaatttttgttttagaacacaagcagacgtaattaccattttaatatttactttatagtttattagtcgttcttagtattaattcttacaattatatcactcttttgttagtttttcaacatatatgtctctccatttttgtttaatctttctgatgaatacaaatttttgatcatctactgatcataacttagtgttggaattttttccatttagatattttcatcataccatacaatgaaaagatctgaacgagacacaaaagagtgaaacataaaatatatgtaactttttaacgttatcaactattcattattgacaatatattctcattcacagttttggataaaaaactaatgtgactatatatactaacacttctgctttcctatttggtgttacacttttttaaggaataatttaatccatcatttatttcagatgaaaacttcatgaaagatggcacgcttgacacaccaatagactggattcccggcttgagagacataagactaaaggacttaccaagcttcatcagagtgttatcaactgatgatataatgtttgattttttaggatcacaagcaa

SEQ ID NO: 131026 - DNA, 1208 bp, Cannabis sativa
  modified_base (1166)..(1171): a, c, t, g, unknown or other
ttcaccatcgataatgttgtcaaaggaataaattgtataattaatgtttattatctgtgagtagatgttagatttaggatctagaatagttagatatgagttttgggcaaaaaattagtttttttgttaggtccgatggtggtccgatgccttcctgttgttaaaatgagtaaagattgaagacgaaggtccaatggtggtccgatggtagcccgatgccttcctgatgagcttaatgaatggatcttaacatctataaatttagatatagtctgatggtcacttgatgctactttttttatgtacataaacataaaaaaattaaaaaaaaatggatagcatcgggccactatcggaccaccatcggaccactatcagactcccattggaccaccatcagtatagatggtaatatggagtacggatggtaaagttagaagagaagagaagagagaatggtataatgggtatgaatataaagtgcctatttttttttttttttaattttagtaagcttgtgttcaaaaattataattcaaattgtaatttttatgattaatattttttgctacaaattttttagtcactatataagaattatagtttataattaatcatatttttttttttttgtaaccgataaaggttaaaataacaaaggtaacaaagattacattttctttcatctaagaaaatttattgtatatcctaagggcatgttagaattataatttataattaattatatttttaaaatatttttgttttgcaatcttctacaaaataaagaagaagacaaagcaaagacaaagaaaagtttatgcaactaaaaacaagtttagttaaatacgtcatcatgtgcgtgaagtggatatatattttagtgtttttgacaggattgccctcgggaccataaacaattaattatatatttttttggagggtaccaatgcaaaatccataaacttgcattgagaagtgacaggtggaacacaccacagaggtcggcctaccgcgttacgtttattgatttgcccactcaccctatttttgtgagaattgagaaatgttagagggcactactggtgcctagtaccttcttacgtgtaatattgctattagtccaactaagtatcgggtcttatataatttaatataatagcttnnnnnnagtatcgctagtcaatcgcaatgtgacatatcgagaa

SEQ ID NO: 131027 - DNA, 1094 bp, Cannabis sativa
tttatgacatgtttagcaacataaggaccactagacacaatatgccacaaatcatagtctatagattgaaggtaagtttccattctaattttccaataaggaaaatccactctcataccctttgatgttcaaagcttaaaatggaatcaagaccactaagatcaacttttggccgaccatctaccgaagctctgccgtgcgtggtggctgacgttagtctatgaccactgatttggaatcaggccaatggataaaaaagctctcagcacgagaaaaccaaaatgagggttcgtttggctcgttgaaacctgaagatagtcaaatggaagtcgagaagcctcatctccagcgagttctcccataacgacgaaggacaatgggagctttgaggacctcaggccttggggtttcgaggctcgtggaggttagccatggccttcatcttggttatggacgaccgacgatagcccatcagacttgggtcgtgatggcacaaggcgggaaagaaggagagaccgagagagagtgaaagggtacctgagagagagagagataaggtgagaaagagagaaagagggggtcggactttctggtttaaagattgttaatggctggaacacaatcggtggtcattggcggtgtaagaaatttttggctgagaggtatattagatatggcttcatcgataaagatgaagtagcaaggcaaaagaaagaaaaaataaaaaataaaaaagaaaagaaaaaaatatttatttaattattattttattttatatttttcaattatttttttataatatttaaaattaaaattatgtggaccattaaaaatctgccacatgtatatcaggggtacaccatggcatgtccactatggcacttaactaatgtttttgaacgggagggtaaatagcataacagaagtgaggtttaggtagtttagctgccaaaaaatcgattgatgtggttaagtgtcacaaatcgtaaaattcaaatagttttatcgccaatatcccttttataaatattaaattaaaatttatatttagatttatctaaattagtaattgtaattaaatatatatatatata

SEQ ID NO: 131028 - DNA, 1919 bp, Cannabis sativa
tgagtagcaacgagctgcacagtacgtttaaaaatcacgtaacacgcctagtctagttacggtgttacactacacatcttaaaaaattgtgaaatttcacaaactggaagctaagactgttgtctaccacttttctattggtcacgttgagaaaaaaatgtaattttaaggcattaacaaatattttgatcaaaaaagtaaaaattttacttttttgatactggtattcctttgtgaaatatgattcaaaccaatctaagaatattttttcccacaagttgcaatgaattcgtattactaagatctgaatatgtgtataaatttcgtttaaatttggttaaaataccccctaattaaaaattgaaaatgtcattctttttagggtatattttgtcaaatattttcttactcttctactcttcattattcttttaaaatctcacctatgcatctcgaaaaatagttaaatttcacagggagaaagctaagaccactgtccatcacttttctattggtcacgtagagaaaacttagttttcaagcaccaacaatcattttatcgaaataatgaaagtcttacttttctcatagtgataacctttggtgaaatgtggctcggactcatatccgaatattttctccactagtcacaatgaattcgtactactaagacgtggatatgtataaatgttttcgcgtaaaatttggtgaaaatgacctcgtaattcaaaaattaaaaatgttcttcttttcagagtaaattttaaaaagttttttcattactcttaaactcgttagtgttctctaaaaatctcaccctacacatctcgaaaatcgtgaaatttcacaagtaggaagccaagaccgttgtccatatatttttattggtgacgttgagagaaaatgtagttttcaagcattaaaaattattttaatcaaaatagtgaaaatctcacttttctagtagtggtacccttttgtgaaatatggcactgagtcatctcagaatattttttttccactagtcataatgaattagtactactaagacgtgaatatgaagattggttttatattaaatttagttaatatttccccttaatttaaaaattgaaaatgttttcttttcaggtaaatttttataagttttttccttactcatagactcgttaatgttctcttaaaatcttaccctacatatctaagaacattgtgaaatttcatagcaacaaagccaagacacttgtccatcacttttctatttgacacgttaagaggaaacttaatttttaaacactaacaatcatttttatcgaaatagttaaaatctcacatttcttatagtggtacccctttgtgaaatgtggtccaaacccatctcagaatattattcttcactagtcacaatgaatttttattactaagacatgattatgaatataggtttcacgctaaatttggttaaaatgatcccttaattaaaaaattgaaaaagttcttcttttgagggtaaatttaaacaagttttttccttacacttatacttgctaatgttctcttaaaatctcaccctagacatctcaaaaatcatgaaatttcatagggaggaggccaagactattttcaatcaattttctattggtcacgttgagagaaaatgtatttgtcaagcattaaaatcattttaatagaaatagtgaaaatctcactcttacccctttgtaaaatgtgacccttgacctatctcggaatatatttctccattagccacaataaatttatcctgaaacaaagaacattataaatttttgaattggtgttaattttaaccaaatttaacgcaaaccaatcttcatatacaagtcttagtagtacgaattgattgtaataagtgggaaaaaatatttcgagatggatcc

SEQ ID NO: 131029 - DNA, 1207 bp, Cannabis sativa
aagcttgcatatgttcaccaccatcagaggaaaatctttagggttgtctgtataccttctcctctagttcactattttagaattgatgaatgaattgaaacgagtaactaatgtcaagattactataataaaatcttttataaagacaattgagaatataaatctcatttgttattgattcttagttcaaaatgaactttttttagcaataaatcttgttttatatctttatgtttcaccatgttgcctagtgagtatttattggtgaaaaacttatgattaatatcctccacccattaggcaactttattaaagatagacttcattattttttaagaatttatttattgatttatggcatattgtaccacaattttaattctgtgcattctatagtttaatttgtgcctcaaattgatattgtagttaaactcttattgtatataatgtaaacactagaaacattgatcttagtattctaataaatcatcttaagaatgaaccaaaatactctttaaggagcaaattgttcaacatgcatgttatttagaaattgtaagcaattactaaatagcatgacttattaaaatttttatcaatgacttgtggattattaatgattaattatggattctcaataaccattaaaattaaaggttgttgtgaattataattaatctaatacttgaggtgtaagtttgaaaaaataaatgatcttttctaaaaactaggttcatagatcgatcactcccactgatcaagtcaattctcaattccataataaaacatgttacccttataccttgtaataaatctgatgaaattatcatttatgatatttgggccaagttctttcatttgacaattgtaccctaaatgtatacgggtatttttaaaatgtgtacatatcataaagtcaggttccagccttatcacgactcaaaatgcgtttaagaaacatctttggttagaacacgattcgatatgtacactcccatggaagagtatcaatcgacaaagatttaggaaagtttagagtttgctatgtaggatccaccccatgtccaacaatgcttagttttttaaatctctcacacccattatttgagtgaaccaggcataagtatcgggcaatgaacccatgcttttaaagaaactttgtaaatggactgggagtttatccatactcacgaattttaatgtagta

SEQ ID NO: 131030 - DNA, 1560 bp, Cannabis sativa
  modified_base (270)..(271): a, c, t, g, unknown or other
actagagtaataaccctagaccatataaccgttcactttagggtaataaccctaatttcagttctcaattaataacaataataacattgaacatgagcaccaccccgcttaactctacgtgctaattactctcttacctaatgtcccaagtacatggagattccaaatccccaagtgcttctgaacaagtgccgataatcctagtcacaatttttagaattcataaatagggttaatccctaaatttcacataatcatacaattggcatnnaaatacaaataaacatatagagctcggaatgagcttttcaacgatattcggaacactccaaatggagtccgaatcgaaaagttatgagctaaacaagttcaatatgcaaactgcccaagaaatccctaggtcggccgcgacactccccaggcatgatgcgacgcctgggttgaaaacccaggtcttaaagcatatgggtcgcggcgctcacagagtatgtcacggtgcttgggtttcaaacctagaaattaccattcaacaactcgaattcaagcccaaaaacacatcaaactcaacaaaaaagtgctcaaactcaaattcattactcaaagattatagccatcatcaatagggaattaaaaacactaattcaagctttaacctacagcagtatatgcaactattacaagctccacaagaattaaagcaagcaacataagtttacaccaaaactaacataatcccctttacaaatgcttgaacatctaaacttctatgcaacccacaagaatatccagaaaattaaagtttaaaatagaattcaaatctaaatcacaactccaaaaacttactaaccaactctagataaatctgtcataacattacaagctcaaataaaaatttatcatcaacaaacacttcaattcaatcaatcatgcaaccaacaactaacaacatcaaaaaatacctaaatattaacatattattcagcatcaaaactcaaaataaagagtgggaaaaactacctcaagctcttcacaatcctagcaccaccactccaaaaatctaacctttgattcaagattaaatctcaaggattaaaaagattaaagagatgagaaagggtgagagagaggggtcggttgggctgtgaaaaaactagaaaaatgcatttcatttttcacaaaaatggtattttattgaaaatataattagttggtgaaatgaccaaaatgcctttcaatgccaaaataagcatacacgctcacaagggtattattgtcacttcaccatacacacataacttaaataaattttagattattcaattatttatataatgataaaataaaatcccaaaaatgtatctcggccccgaacccaattcagcccaaaatacccagttgtgactataccgcgccgacttgtcaaaagacacctgcagaaagatagaataaatatactatataataatatagtccataagcacgctataacattaaaattacgattttacccttctcgggtcaacatgtcatttattagtataattcataaatattaaatta

SEQ ID NO: 131031 - DNA, 518 bp, Cannabis sativa
gtatccttctaattgatttggagaacgaaatcttttgatataaagtgatctagtgttagtattagtgggacaatttatgaatattgtctgaaaccctaagtgaattaaaggcgacgattgtgtgggtggatatattcactactaggggcatgagttaagttgtgacaattagagccgcgtgatccgcgaaggaaaggttaggagctgtataatccacatttcctaaggaaaggttgtatgtagtgattttgagattatgtatgcatgggactacatggtgttgaggacttgaatgaattgtttgggactacctatattagcaagaagtatcctgtttcggtaacccatcgtgaaggaactccacagttaagtatccttgacttggggtgattacatataggaagtttccccatgaagcgtgtgagttagaataaagcacgttagaaacacttggatcagtctttagggccagtcgtcagtctaggaagtagctaaagtgatgcactcttgtataagag

SEQ ID NO: 131032 - DNA, 1791 bp, Cannabis sativa
aaccaatccaatctgcacttttattatgcgaattgaattggatctaaagtatgaaattcgtacttagtgcggattagatgtactatgagcaaactagtgcggattgaattagattatgaaattcgtacttagtgcggatcaaatgcactataaacaaaatatattaataatattttaaaataattaaataaaactaatgcatggtacatttatttttcaaaacatatcaaatgtatatgtatatatacaaaaacataatctaaaaatacaacctatcttttctatatacaatttttttctcttcctttattattttttgtttgtttatttattcataattaaagaacctgataaatatctttttgagttgcacaagctcagatttgatcttaggaccctcctctcccacacgcaccttattttaatttgttgttacagacatagagcaacaacttattttatcttgtttgataatttttttaaatatattttatgttttatatttaagtgattttggtaatgtaaaaaatatatattttaatattaaataatttcatattaaaaagtaattaatctaaaataactgatctaatctacactgttacggatcggatttgaattattatgcgaattgaatttaaaatatgaaatctacacttaatgtagattagatgcactataagtaaaatagtatggattaaattaaatgaacgctcctaaatacgacatatttttttgtatattaaacagaaaaattattaaaattttgtgaactaatttaacaaagtaaaaaaaaaaaatcattaaagataataaatgtaagtaagtcttactaggttaaatataatttatataaataacggattaaaaatgtttcgatttcgaaagggttgacctaatttgtattttggaaaacattcaaaaaatatgagttatgttgtaccaatttataaaaaaaaaaatgtaaaaatagtgtcgtttcgtaccaatattagtctaatattttcatgttgtattataatttgtgtgtcatatatgtctacttgtatttttttaaataattcgattcatttttttttttataagaactcaaatttgtgtttgattttttttcttacaattaatacgctcaccactattagatatgttttcaattatttttacataattttttttataatattttatacataattatataaaaagtagttataattattaaaatttaaatattttcaataaatattcaaaaatttaattgatgacttaaaataaatatatagttttttttatatagaaatagtttttatgttttctaacactttatataatatttagtattatattcaaattttattgttgtttaatatatgtataagtaataaataaaaatttattattataaaattattggactctttttgtaaaaaaaaaattaaaaattattgcactttttactgcatatacgtgtggtgttgtggcaattattaagactcatgtttttgttagcaattgttattcgataccagtgcaaccaatattttttttataagtgatgctctataattaattagcctgtaaaaatttaattatatatcaatattattataatacccaataacacattttaatttttcaggcagtgctcttgccaatccagtttgggtcctgtcaaaagtgggactcctatttaataagaagaaattacactttataccctttttatattgtccttttttatttttaccctcctttttaaagtctatcatttttaccttttttttaaaacat

SEQ ID NO: 131033 - DNA, 800 bp, Cannabis sativa
aatactaattaaggtgccaagcaccgatataatatatttaatattgaatttcgcacgttttaatttaataaataatatgggaagtcgttaactaattatataatgttacatcagtataatattagataccttaaaatatcaaataacaaagctcataaatgattaacaatattatattagttaataaattaaatatgtaacaattactcaagtagaagctctaacgatgataatagaattggattggtttaaatctttttctgatatattaccattgctatgaagtagtaggaacgaggtgatacattgtaaataattacttatagtttgaataaatttgttgaattttattattgtgtaaattaatgtcataaataggaaaataatagactaacttggctgatgatcataagcattgtctattaacatagatagctaatcattatcatcttacattattatatataagggtataactgatcgattgtttaaaacagttgcctatactagtataggcgacagttttaaatagtcacatatagtatagacgtctgttttaaacatttagctatactgctcattatcctccttggtaaataaataaggagaattatgtactaatctaactcaacgtgaattatgaattttttcataagtgaataaataagcataatttattaactatagtgatttatttggaatatgtattgtggacattgtcccacatggaataaatggtagagaattgagtcatacataagaacatgtgctactccactcattgtcaattggttttgaga

SEQ ID NO: 131034 - DNA, 971 bp, Cannabis sativa
caaaaatatagactaatgatgttctcgttctcgttctcatatgcttttatactgtaatcttgttattattttaaaaaaattaaaataatataacttatcgaaaataaattttttgatattttattttactatatgtgttaaaaattcttcaaacttattttcgacaataaactattcttaatcttttaaaattttattatgatgatgttgtaacataacaaacaccattataagagaaattgaataaaaaaaaaatcaacatttttttaattaaaaaatttaatgaagaaattgttatagaagattttaattagcactctaagaatatttttacggtgtataagtttttatttacataaatacgaactatttatgttttcatactatttttgtgttgtcattttattttattttaaaaaatcgaaaagtttaccgtatcgagagtaaagttcttaatattttaatttatcgtgtgtgttaaaaaaactttaaacttattttcgatatataattttttttggaattttttaaaaaatttacaaaaataatattataattataataaatacaatcataaacaaaaattaagaaaaaaagattctcacatattttttcggatacaaaaattaataaaaaaaatataataaaatattgtttatataattaaagttttgcaataaaaaattataattaaaagttttgttgagcattttttatatcatgagaattggagtaattcttggcatctttggtcaattttctttgggaaagtatcttctcttaaaatttccttgggtttttagccttggattgtttaagaagaatggtcccttagaggatgaggtgagaagtggctcatttaagatgtggtttgttggacatggttacactgatatcagtgcgtttggaagtaactgtgtaattactaagtagggtaattagtagggtggtaattacacagtgtagtaatt

SEQ ID NO: 131035 - DNA, 529 bp, Cannabis sativa
tactccctcttgtacctataattattgtatttatctttcgcggatgaaataatgtttccctgagcgccttctcgctccccggattcaggacgttgggacagaggaccttgaacaagttgaagtcttcaacaaattgactcttcagaatcaacttggccctcctacagttaacagtcgtcaccaaatcgcccacattcaagttttccttattataactggcaaatactcacacgtggttcaggaagagttgggtgggggcgatacagtgcatggggggaatcctgacccagtccgtcaacaaatccggatgctcgaaggccttgaacccgaaagagaagaaaaatcagtggtgatactcctttacattcttttgaaaattaaagggtatcggggtctcattgactggatggtcctgaagcttgtcaaaatcgtctttaaacttgtctccctttgtaatatcccgataagtctaatggtaattaattagagtttatatttatattatgtgttaatcaggtaataagtggga

SEQ ID NO: 131036 - DNA, 868 bp, Cannabis sativa
agaattgttttgtccttggacttcagaggaagtttggtagcttgaaccttaagagcaggggtagcagtactaattgaaagattagtaccaatcagattcgaagaagagacactaggaagattacaaatagcactcaaaggtatctcagaagatatgtgaggcacagaggcagaaggagcagaattagataaaccaaaggcatacccaaattgtgagacatgatctcaggagtactaagcatctacagaaaattcccaatattattcaccgaagtcctagattctaaaccagtcgaagtcgaacagatgggccagcctaagtgtggtaaggaattggctaacagcagctactaaatattggtcttgattataagaagggatagccatatcctcaaatgaaatagaattagacagaccaaaaggattacgtatgaataacgatttagcaagagcttttaagggaattatataggggagaggaggaggataagggtactcatcacattttttcaggtaagagacacttagtaagaatgtgatcaaacatgccacactgataacatatattaggtaagttctcatatttgaagttgagctattttcacgagagactcttaaaatcaacaataatcccccttctcataggcttagacacatcactaagaattctaccacgaagaaagagaccaaaaactatagtattttcatcaacctcaaggaagtcaccaaccttatcacctatgagtttagcaagcttgtaggattttttctcaaaaggaatagaattagtctaaatcaaaaagggagaaaacaaagttgataaggggacagagtgtctaacccatcaggattagcacaagtaataaggc

SEQ ID NO: 131037 - DNA, 1189 bp, Cannabis sativa
taataggacctccttccctataaatgaagagctcatctagtttattttcacattcttctatgtccccataaggtcagatcatctctctctatattctctctctagaagttggagttcttgccttcgctatttttcttgtaatttttgtgaggaataaaaactcgaagtagacgtagttccattaccatcgcgatacaagatgtgaactactataaatttcttgtatctttttatttacttacataaaattatttgtcctctcgccaatctagagagcgggtgttggccagatttctatgttaatattttggtacttttattgggtaccataacttgagatctcaatcatgatggttgaaccaagattaacaagtgttgaaagaagcaccacaactgttcaacccactaggggcacgccaattgttggagctggtgatgagacaacacctacatcccggatgccaggcaaggccaccaactattgctggtattgatgccagtaatcaaattctagctggagagccacacatggagttagaagaccctgagaaagtcgatccttgggttgcacaacttagccaattagtggcaaacttacaacaaacactcctctgagagtctcttgataagcaacatgaatagttccaaacatggctcatggagcgttggagaaatgttgaaaatcaacgtgctaaataagaataaagaagagtaaatcttgcttagtgaatcagagaagcctatagatactacaacagaatggctccttcaggagttgcttcaaatagagctagaaacatccctcatgtgccaactggccacgttggaacaagcgcttaaggggaaacctttaatgcggatggtacttctaccattcttggcaaccgtactatttagcatgcagtaggcaccaagaatccccaaagggatgcgaactacaagcgagtgtctgaaaggactcacactcgggagcgcagaccaacatggccttcatctgatgtgaaacgatcacgtgttagggaaatagtctatgagagagcatccaaaaggactcagacttgagaatgttgaataccgccacctatctgataggaacaaccataatcctgctcgaagtaatcaaaataatgtgggaaaccaatctcctctatagaattatccttacaggtccaatgattctaggccccgt

SEQ ID NO: 131038 - DNA, 1116 bp, Cannabis sativa
  modified_base (1085)..(1085): a, c, t, g, unknown or other
tcttttgacacaagtgtaagccatcatcaaggtgttgagctttaattccaaggaaatagtgtatttggctaaggtctttttatgcaaactatgcattaagatatgtgataagagttgaaacagctgccttggaactacttgtaataagaatattatccacataaacaagcacatatgtggtaggagaaattgctatccttataaataaggatcgatcagctcgagcagaaacaaattcgattatcataagagcaaatcaaaacttaccaaatcaagctataggagcttgtctcgagccatataatgctttttgtaacttgcaaactaagtggggagagctttgatcaatgaaatcaggacactgagtcatgaataccccttcagttagctctctatttaagaaagtattgttgaaatctaattcccttacttgccaaccattagataagaaaatagttaagatgactcaaattgttgttggtttaactacaagactaaaagtctatgtaaagtcataaccatactgttgcagaaatcatttggcaacaagccttactttttattgagcaatgctatcatcatgatttttcttttctatggcactccaactaggaggtagaggaacaaggatccatgtttttttaagagcagtgatctcagcttacatagcttttattccactttgggatccttgaaagttgctgctatagtcataggcacctttgaaagcatgagcactttaggtttacatgctccaactttggctcttgtcaccataggatgattactgataggttcttgaggaacaaatggagctttaggagtatctaaaacttgagtagaagcgaatgcagatgaattatttgatggcacaacaaaggtggacgcagaagcttcagcagatggggaacttggggatgcttcaatagttgttgtagatggtgaattgggatgattagctaaagaagaactagatgatgatgaattttcaacacccaaagttggcatgttgtgttattcttggtcaatacaagttggaataatagcagaagggccaacaaagactgtaaagcccgcttagttantttggaaattagcagttatttatgttaatca

SEQ ID NO: 131039 - DNA, 531 bp, Cannabis sativa
gccactacgggctgtgagcccaccctattttgttcatttggtaaaaaataaaaagaaagctaattactattttttttctcccaagtttgataccaaatcatacctgttaaatttttggttgactttaaaaattctccttaaactattgagatagttatatttaaggacttttatctaattttaataaaaaaaatttaatatggatgaaaattcaagagatataatttactacataacaaagtttgaaaagcataattagataaatactaaagtctgggaatattatttagtacatgaacaatcactgaaacagtaaaattggatgaaattagacaaaagtccttaaatctaacaatctcaatagtttaaagggaatttttagcggccaaaaaagtttaggaggcatgatttggtagatgtcaaagtttgggggaaaaaaaattcctaatagctaaaaagaaaatcacattgtatacacactttacttttgttgctccaaaatgtgcccaaaatacgtggaccagtcaagag

SEQ ID NO: 131040 - DNA, 1137 bp, Cannabis sativa
  modified_base (911)..(915): a, c, t, g, unknown or other
  modified_base (1106)..(1110): a, c, t, g, unknown or other
taaaccctaattatttaataattcaaagtatcattcatatgcggtctttacaagactttagagaaaaagttaaaaattatgaaaaaaaataacataaagtacacggttatctcttacttctctagttattataatggcacctgattacatagttactcttacttgattttctcatatttttcaatcttttttttttcaattttctcataaaataatatttttgaaaaaaaaaaacccatatttttgcacaaaaaatataaaaactcacaatattttcaatttactcaaatttaaaaagaaaaaataactcctagaaattattttttattttttattttttgaaatgcaattatatagaaatgttcaatgatataggataaggtaaatttagctgaatagcttgactagtttaaggtagggctgttcaaaaaaattaacaaaccgccaaacctgaataaattacccaaaccaaacgaaataaaccaacaaaaaatacaacccggataactttacgaaaaattcaaactgcccaatgaatatatggggtgagttgaatattattctaacccgctcaaataacctgaataaaccaatttacatatttttttactaaaattatttataacataatatataaattacgtttaacagttaaactattttacatttaaaatttgtattttatagtgtttaatttgaaatttaaaatttatagttgataatttaaattgtatttgaatattgaagttgaaatttaaaatttatatataagtatattttttttaggaacaattgcataagacaccattttgtgtaaaaaaattatatttttatgtttaaatatatattttttttttacatttttacgatttttcatagaaacaatacgaaaacaataagaaaactacatnnnnntaacatgaaaataatatctaaataacatcaaaacaacaacaagaagtaccatacaaataacaaaaaagcaacaaaaaattaaaagatatttaaatatttaaacttactgaaattaaaagaccgcatttattgtaaataaaatcaaaataattgtaaaaatatttaaaattccgtgaaactgtatttttgtnnnnntttttgttgtttttgtgtatttgtaaa

SEQ ID NO: 131041 - DNA, 1601 bp, Cannabis sativa
  modified_base (27)..(35): a, c, t, g, unknown or other
  modified_base (170)..(170): a, c, t, g, unknown or other
aatttacaaataataataaaataatannnnnnnnngctaattgcctttactaaaccatattactaaagcggtcattacatatttatttctctaaatatactttattttttttagattttaataattattttttatgaggatatgcgtatatattaatattatgtatttgnaataaataaaatataataaaattttaaaaaataagattttggtgatgtattttaaagaaggtgttgtgtggtgtaatgtaaaagtatattgtaaaattaaaaaaaaagttttaatgatgtattttaagaaatagaatagaaaaaactggtctaagatatgtgatagtaacaaacaagcttctactattatatttatttccaatctcattcttctacttttatacttattactttcacttggcttaactaatatgaactttaatttactttaagaaaattgacattagctttaatgtaacatcaatcaatgtatgcttataatttcttaagtaatttattattatttttaagttgataaaaaaattcacgaaatctcatgtacatatttatattataattttttttttttggacaaatatttaaattataattatatataattaggtacaaaatatatatattttttcaaaatacttaaaatttctaaatacaaatacatcaatcaagttcaaaatatattttttaaaatatatatcacaaattattttataggcatcaaaattctttttaaaaatctataaaaatgggaagtacatgcaactagtaatcataaaacttaaagagtaaataactaaacaaataataatttaattagacattaaacatgttaaattatggctgctttgatactttttaggatatatattttgattattcttagaaaaatggataaaatttgactaactatatgattaatatttctaacaaaatagattcaaattaatcataaaacaccttagaataagaaagtaatcataaaagtaaaaaaaaagttaatttaaactaattaattatatatattaaaaattacacatatcaaattatgattgctaaaaaatttaggctatacaatttcgttagtcctaagaaattgttatagtttaacattttttttttttttgaaaaagcaagtaatataatttgacaaactatataattattatattctacacaaagggaatacaaaaaccaaaaaataataatttttttttttgacgtgaaaaattagcaatttactttttcaaatctcttcaaaaacattaaagaaaatgagaaaataataaaattattaaaatatacgaagtaacattaaaatgaacggaaaagaaaacataaaaaaaaaataaaaaaaactttaaaatgaatatgagaacaaatattttatatttgtattgaattaaattgaacttacaataggagaacctgctatataggcagtaaaagattagaacgaatgacttgaaccaagaaacctaaccaactaactaactaaccgaataactaacataacaaactttaataggccccttcaagatagagtgtaaaaatttttgacacccatcttgaatacaatttcattgaagtgagttg

SEQ ID NO: 131042 - DNA, 714 bp, Cannabis sativa
gcggtgtgagattgtacagcttaccctgtattttcccttacggatcacgggactactgactgtcacaatctgcaaagcttaagtggtttagtcttatagcttcacatctgtcatgaataccaaaatcttatttaagatcaatcttctgtaggatccgggtaagatattccatcctaagtacaaagatcatgggtgacatgggatcaccttgtctcaatcctcttttaaccttaaaaaatattgcatatagccattaaacatgatcaagaatcgtacaaaagaacattttacacatttacttttaatagcttgctagttgttgattaaaggcccctgcctaactatggcaagatatcaacaaagtcaaattgcatgattaaacttaatcttctgaaggcgtaagacaccataaaatgggagttcatagaagaaatgctacaagctttcaacttctcaccaaaattcattcagctagtcatgacttgcatacaaactcccacaaaaaatctttacattttacagcgttcataaaaataacaccaaaataacaaaaaaactacataaaataataaaaaaaaacatcccaataataccaaaaaaatataatgaaataatatacaaataacaaaaaatcaacaataaaataacaagagtacaacataaaaaaaaaaaaaaaaaaaccgtgaaaccgtatttttttttttaatttttttt

SEQ ID NO: 131043 - DNA, 1195 bp, Cannabis sativa
  modified_base (1168)..(1170): a, c, t, g, unknown or other
agttccccagaaattccgtttgtggatttcgcaatgtatttctacaacttcgctaaatatttgtctcaatgggggcccggtgggaagtcggaagccatcttgcgggcttcggcaaggtgaccccctctcaccttatctattcatctggcctgctgaagttttgtctagattatttcatactgctctggatcagggttccattcagggaattaaactgagtaggggtggtctgactctttcccatatcttctttgcggatgacctaattcttgtcggtcgagtgaatttaatagaggtcaacagatattggcggtgcttagagaatttctgctcttggtcgggccaataggtaaataagcttaaaacgtctattttctttagtagaaataccccggtgaatttgcgcggtgagattaaggaggctctggggatcgattcccctgaaggttgtatcaaatacttggggctgcctctttttagatctaggcagaaagatgcggacttcaattttattctggataacctcacatcaaagcttcagggatggaaggctaaaactttgtctaaagcagggcgagctactcttataaaatctgttggcttgtctctgccaatgtatgctatgcaaacgactaaactctccagtcgtatggttaacaagattgatggcttggtcagagatttttggtggggttttgagaaaggaaatcatggaattcatctccgagcttaggataaactgtgcatccctaaatcgcggggtggcctgggtttccggaggaccaaagaaatgaaccaggcctttctggccaaatgggggtggaatattctcactggaggtcaatctttgtgctgcagagttttaagagccaaatatctaaaagggcaagactttctgaactgtaagtataaaaattcagattcctggttctggaaaagtgttattaaggcaaattccattttaagaaaaggtgcctgtaagatggttaccaatggtcagaatactacgatctggggggacccctggattccgcatcgtaaaggtttccgcccgaaacaaattgggggtctcaaccccatcatcaatagtgttaggttatttttagtattaattttagattaagtttagtatatttttaattaagttttaatcgtgtttggagcattnnnacgcttgttatcttttatttttaca

SEQ ID NO: 131044 - DNA, 800 bp, Cannabis sativa
ttttaagtgtacctatttgcggagccttccatcggacttgatcttgtacaattgtggagagagttggtgttgcactattcaatatgtggtattttgctttagctgtacgaaaattttgaagataattttcagcaaaaatggccattgctgctgttggttttaatggagatccatgaacaactttgtttctttccgtccaaattgcccagagaagacaaaaaacatgttccatttcagctttagtaagcatagtcaattggattgactaagttgtttatacccaaatccctgacttgatatgtgttattgcaattggaatataatatttctaaatcacaattcaattttatgaaaaataaaaacataatgtaaaaacagaccttgccatggctttcgaagtgaagaagaaatggttgaaattattgtgcagagatttcaaatggttttaataaccatttctttctcatggataaaatcagattgagatatagtagttttgaatcatggatcctaatgttgtgtgagatttctagggtttaggggagagagtttcaaaagccgatgacggtgttccaagttcaactgagtgccaccgaaggttggagttgaagacggagtgccgaaggtcggagttaaagctcatgatggttttaactaattgtctagttgaagtaattttcttaattttatttagaataataaaaaaggaaggaaaataaaaacttagtatggtttaatttttttttaataaaattatagcataaaaaagtccataaaaaggtaaataaaataaaaaatct

SEQ ID NO: 131045 - DNA, 652 bp, Cannabis sativa
tagttggccaagatgttttaatgagaatctagaatgcaagtcaccgacgagagtagatatgagtgttgaatgacttcctattatgatgatatcattaacatacactaagataagagtcacaaatgaaggtgtatgcttgatgaatagactatgattagattttgaagaaacaaagccaagtaattctaaacattgatgaagcttttcaaaccaagaggagtttttttgaggtcataaagggctttatgaaactttcacaccaaatgaggagcattaggaagttcaaaacctggaggttgggtcatgtatacttcttcttccaaatctctctttaggaatgcattgttaacatccagttgttgaatggaccagttatgaggtaaggcaagtgaaataacaactcgaattgttactagtttcacaacaggactaaaggtttcctgcttttttatggaagcccttagcaactaatcgcgccttatttctgttgacggtcccacatcaggattaagtttttccttatagacctatttacaactaatcgttgttctcccaatatgtaacgtccccacttcaagcctccattgggcccttacacccacggaataaatggctcttatacacgagtatgtcactctggctgcttcatgga

SEQ ID NO: 131046 - DNA, 831 bp, Cannabis sativa
gagagagagagagagagaataattgggaaaaaagagaaagagaatgagttggattctgatttatagaggctctggactttgggaatagggaagtaggaaaacaaaaaactcataattcaaaaacattaaaatattatgccataaaaagttcttaacttttttttttttttcatatttcgtgtagattctattgaaaaaatttaaatctgttttaaaaaaagagttcttttatttttacgctttaaagcaatttttttttttttataatattacaaaaattcacacaacaactaccgaaacaagcagccaaaatctaaataacaacgtgcataaaaaccatcataacaactaaaaccataaattaaaaaaagttcaaaaaatggtatacatggaaatattctcaacataaggagtactcttaggtgatgtttgctttgatgtaatgtaatgtaatgagaatgataattgtaatatgaatagtaatgtaattaaataagaattgtaataggaataatattatgatgtttggtttaactctgtaatgagcattgtaatgaaatacataagttgtatattaacaaaaaaaagttttattatttttaatatttaaattttttaaaaaaagtaataaaaaaagacaaaagagatatttcttaacaatgtaatcatttagttttatgatgtaatagggattacaatacatagtgtaatgaccattacaatataaagccattacaaaggaataattacataagataccattttttgtaaaatatttacatttttacgttcgaagaatatgtttttatatttttacggttttccaaaaaa

SEQ ID NO: 131047 - DNA, 1136 bp, Cannabis sativa
tatttactatcgatttttgtttcgagtgtagagatgggaaccttcacgctcattgtattgctaagtatgcattagattttaaagcttctgccatttgtaatgaggttgtgccttgtgttgctagtcctactgtcatgaaggacctgtcttcctctttataattgtttgttgctgaatgaattccctttaaaaaaaccatcttcaaaaataattttggattactaaataaataatcacaaaattgtaaccccaaatcataaatggaagaacaaaacctaattttttttagattttagaaaattctcatatttcttaaatataaatcttaaattctcaaagaatcaatcaaagatgcatggctttagtaccacttgttagaattttatatcactcataaaatatgcaataacaagattcaattccatagataattaaacatattacatattattataagcatataaacaaaaatctaaagaatacctttgttgattcaaagagaataactcaaatagtggaagcgtatcttaatctatagataatgatgatcctaacccattttctagagataatctttgaagtgatttggatatgatcttctaagaatacaagacttagagttctctggttttctctcttgatgagggaagatgaaaatagagttgactcttgttttttagagattactaccagtatattataacctcataattaggttattaattttaagtatttttaatttagctccttaatatgttagaaatattccttaaggtatttacacatttagtccatgacagtttaatacttaatgacccacaattactaaaatcatcacattatatataggtcaaacttcaaatagcaatacaccaatacaaatgagcccatcaaaattttaatctaacacgaatgtctatcaagccacggtgaatgcaaccatttatcaaattttgaaatatcaataaatattgttgatactaatgtggacagagtgaaatatatggtataccataggattatgagcattttacctttaaatgtaagcttaaaagataaggatctatataaatatataaaggaatgttttaaggagattaggtggcactctatttgaagtttcttccatattcttt

SEQ ID NO: 131048 - DNA, 816 bp, Cannabis sativa
  modified_base (791)..(791): a, c, t, g, unknown or other
actaatcagattgtaaagagttttatttagggcataaaaacccaacaggatcttcttcccccaaaatttcttccacaggttaccatcttcgtgaaagctacccccgaatgtggcctcataacctctcttgactatgaacctcccgtcactcgcctccttccaaactacgacgtcgttggagccataaggaagctggttaatgttgccaattctttctcccaacatatccccaaacatctctttgagaagctcaatgttccaactttcattgggattagacatgtctgccaaagaagtaatgcatggaaaccgaggcttcacttggttcataagctcaataaattctccataatccagccatggaatccatggttgcgtccaaacgtccaccgagtcacctttccccactaaagtcatgctacccttacatataatatctctagtgttcaggatacctctccaaaatgctgaatctctgtcacgagttttaacactccaaaaggattctgttttgcaatatttgtccgagaaacaagacacccaaggtctatcacaactggaaacaaattgccaagcaagcttagctaagagggtcttattcatatcttcaagtttcctgaaacccatacccccctgaaccgtaggcttacaaagcttatcccaccttgccaatgccaaaaaacgatccttttccgtagtccctgtccaccaaaacttccttatgattctatcaatatccctacagcaagaaactggaagttggtttgtagacattgttgggttttatgccntaaataaaactctgtttcaatgtaa

SEQ ID NO: 131049 - DNA, 904 bp, Cannabis sativa
  modified_base (38)..(40): a, c, t, g, unknown or other
ccttacctacacatgaaaatagcactgtgagtcgacannntcaataagaaaagcataacataaacatacaactatcccgggttataacctgacacccatacccgatcatagacatgttactgaaataagactcacccttcttgctcaagccaaaatgcctctcaatcattggtgggatgcctttgtctctgtcacttttctcatcaataggttgtctgttcaaaagaataaatacatctccccatttgaaagtttgcttaatagaacacctgattacacctttttaaaagtttttggctgtgcttgaaacctttttctcagaccatacaacaaacataaattcaattttaaaacttcaatgtttgtctttcttggttacaacccctctcacaaaggctatagatgcctccatccttcaagaggagcttacatagctaggagcgtcacatttgatgaaaatatttttccttactcctctttgtttcctagtgcagcacctgctcccaaaacctccactcagcctactgctattccttttccccagttgcctgcacccatcatcactgtaaccacctgtccccatacttctcccccaccatctaacccaatcaggtccacatatatcttttcaccccaacaacaaacacatattacatttcctatgccataacccaccacgaatatagaagaacccccgtctcagactaagcaaaacatcccacaatcactgcctgtttctactagtaaccagcaactgcccctgaccctccctctcttcatccaatgtaaataaggttgttgaccgaggttttcggcaaccaataaaatattataagattagagagctgtaagaaaattagggaatgatttttacgtggttcgggcgttaatgagccttagtcca

SEQ ID NO: 131050 - DNA, 1234 bp, Cannabis sativa
taaaatatcaattaaataatgaaataatctcctattctgatttcctaaaatttatctacactctattttcttaagtttgtgattgggtcaatttgtttccctatacaatagggacaaaagaagcagccccatactagaattcccgtataagtatagtcatatgtaaaatggtcacaatatattttaatgcattttacactctatttatactatttatgtaatttgaacataaattttatattagctgagatataaaaattaaaaaactaactatcttaaaattgttacataaatattaaatttatttatttttatgtaataagcatctttattagagaaaataagaaaatcaaattaataaaattttcaattaaatcgtaaaaactaatagagtttttgattgtgtaataaataaatttaaataataataaaacaaaataaatataaaagttaaaataagaaagttattttttttttatcatggttaagtggttaaaatgtagatgagttagtaaaagataaaatattaaattttgcttctttactaacatattactatatgaattatgtacaatgtaagtgttaaagaattgtcaaaatatcataccctgaccctcttaataatatgagattgacttttcaaagatgtatacatatcttgctatgttacactttacacttcattagtatcaatgtaaattatgtaattatatattgttgtaaagggcaaaaatggttataatagtaagatattttattttatatttttcaattatatttttttaaaaaacctcatcaaagcaacatgaaagcaaactaatctccaataagaaatataaagtttgtattaattatatttgacaaaaaaaaaataataataagtttgtgatatatttacatcaattttaacattgtactctaatttataattgtaaaatttgatgcacaatttttagaagaaaactttattattataatgttggattaaaatttttaatgtgagcttatatatatttgtgtgtatttttatataaagtttgacccaaataaattgatcattttagtaattgtaggtcattgagtattaaagtattataagctaaatgtataaatactttaagaaatatttctaatttcttaaggggctaaattagaaatattaaaattaataaactattaggttgtataatatgttagacttttatttgggcttacattaaattttattggtttt

SEQ ID NO: 131051 - DNA, 1527 bp, Cannabis sativa
aaaacagagggtccaattagtaatttttacaaaacaaatggtccaaaatagtatttagcctttaatgtaaaaacaattttaaattgatcagttatgtaatcctaaaggatacctgctttctatataaaggggtagtctaaatcaaataaaatcaagcagaaatctttgcaacagtggactaagcagaccgaactctgattgagccactataattctcttgttttctctttatttctgctcttaatttgtctatttagtagccaataatttgagtactcgctattctaagtaagtactcgcacgactttaactgagtattctcatttcctttgaatactcatatgattttagtgttgtctaaatttttctcacaacaagattaaaaaaatcattgtgcaagaatatcataataagacactaataactttttttttactattagttactaattttagtatatggtatgttttcttggagatttggttattatttggctcactttcctcattaattattagttaactataagtagttttgttaaactcttcttcttctgttcatgctccaacattcccttttttttttttgctgaaatccgtaaaaagtatcctgataaactaattgacagtaaatgttgccatcttggccccataggaagtggtaataatattcttatttttattaattctcattattacatttagtttatttatgttatattaaccttgattaaatatcatttagtatgtgtaattaatattatcatgaataatactagaagagtattaaaatattagaagaatattataatattataatatttctattttacttttaattgcataacattaattacaatcgaaagcaaaatgatgataaattatggaagagacgagaatgccctggttccaataaaaatttatttggaatatttgattaatgttattaaaaaacaaaaagcaaagaaaaatgataacttaagtagttttttcgaatttgtttataaagagaggtgcatagaaaaaggatcatacaatctaaatacccgtcgagtaaaacttgtaagtaatatttatttacacatcactagctatatatattaactatattttaatttagtgtaaaattattttgtttagatttatatttagtataaactaaaatttattattcctcaaagaaactaataattttataacatatatataaatatttacatagggagccaccagatataaggttagtagatgggaacattttaatcctgaagaaaatgactttcaaactaaattcgaaagctttcttaaacaatcaactataactgttctttcttggaggccgggttgggtggcaatccgagctttatatggcgtagtgtccttgagtcacaagcgctgctcagggacggggcccgtaggagaataggatccggttcatctactacggtgcttaacacaccttggcttttgtctgaggccaacccatgtgtggtatctactcatccggcactggccaattgtaaagtgt

SEQ ID NO: 131052 - DNA, 857 bp, Cannabis sativa
cataattgttgggatattattgttctttttagattaataagttgtcctggttttgttactaatattttcttatcgatataggagttattctattattttttaataagtattttgtgatataaattcagggatcatttataagcgttatcttcctaaaagggtcaaattgtgacattttactacctaagttgtggatactacatatctgacacggcttaggactcgggtcatgacataaactgagttaaaaaccgaagagaaatatcatttttctagcaatgtttgaaaaataaattaaacaatgtaaaaaaaaaaaaaagaaaataaaacatagaataaaatgtttttatcatgtcatgtctatttgtgctttgttttatataattatatatataatgataggtgaatttaggggtgttgagagagggtcaaagcccaccatgagacttaaaaatatattaagttaaatagcgacataagtacctaaaatttaagctttgtaagcggcataaacttaatatttatttttaacagcataagtacctaatatttgtaaaactgtaattttttactaatttcgtcagtacagtttttgtgttaatatatcactaataataaatattagttttatgccgcttacaaacttaaaactttagatacttatgtcactaattacccaatatattaatatacaattgttgctttcatatatatatataaatatatagtagttaaatatgaaaaaccgtatttttgtaaatgtcaattatatatacgaaaatataaaattgtatgcgtctgcagaagcagaaagtaattatgttactgcagagactagttttgtagtgacaaaacag

SEQ ID NO: 131053 - DNA, 1467 bp, Cannabis sativa
tagggtcgaaactagtttcacagagtttataggttcgaaacttgttttaagggtttcacaagtttgaatctggttttacaagttttaagggttctgtaatggtactacaagaatcatgggcatcaatgaggacaaatttcgtcagtgcaatgccccttttcgttagtaatgcctatcaatagtgacatttcgttggtaaaaagttattaggaaaagttcgttggcaaaaaagattatcaacaacgacattttaagtcgttggcaatattaaatatcaatgacaacattatcgtcatttttttaataatccgctcccattaacgacgacaatgtcgtcattattaatgttgtatttaaaaaaattaaattaaatttattttgtttttatttttaaaattatattgaatattatatttcttttaaattaattaattaatttatgaaattaagtgtaaaaaaaatagatattttttcataataaatatttagagtcacaaacattacattaatatatgaaatgattgcgctattttttgatattaatgtatgttttttattctagattttttttttatcattgtttaggttcgaaattgattttcacacttataatttgtttttagattattattattatgcattgtgtattgttttgattatatttgtgattagtatttttgtgtgcgtgtgtttttattttttcatttggttgcaggatgaaatagtttcagttaacttttttgtttagcatttatattctgttatgatttttcataaagtctaaattggtttcacaaggtttaaaattggtttcacgagttttaagggttttataattgtgattagtattgtatattttttattttaagtttttttttattatttttatctctaagttcgaaactgattttcacaattatattttccttttagattattgttgtgcgttttctgttgttgtggttatatttgttagtatttttttgtgctttttttttccatttagttgatgatgaaattggtttcaatttatttttatgtttttgttcaaatgaaatctaattccaataaaaatgcaatggaagatgttgctaaagatttttaagtgctcactctgaggaaaaatttcctccatatcaataagtaaaaaaactaaattgatcaaagttttaaggatttatctttggtatattttttttttttgtttttgaagtatgtttattttttttcgatttatgttgtcgcagttttaaatgtttatttatagttttttaaattagttttttaggtatcttatgcatgttcaatttcttagttatttatttgtagtttttgaaactgattttattaacaagaaactagtttcagttattttcattgtatatcatttatgttttgttttcataatcttcattgttgttgtctaacgaaatgttttgtttggtttcataatgttcattgttgttg

SEQ ID NO: 131054 - DNA, 526 bp, Cannabis sativa
aattaggaagaaaattcaaaataagcaaggtgagtgggagcccatctctcttgaagtagggtggtgcgggccttagtaattatagtattctttcctaaggttggggaggttgtgtccttattggtggtcaaattttctcccatgaaaattagagtttttttgttattgtgaattcctatttggcaccatcacggcgatgtggcgtttaattattagttagtagttttttatattatttaagtcccaatactaaaatgtatcaatagtaatttaatactttttgtggtacttggtatcttaatagcatctctaatgatagcattttttaaagatgttaaaaatttatacatcatctaaaaatataatattttattttatctatcttttacatcatttttgttactcttacttctaaaaccatctctaattggagatgtaagtattgtattatatttagcacaaaaagtagttttgtggtaaatttataccaaattttaactttgtgctccaatacacaattacaaaa

SEQ ID NO: 131055 - DNA, 1720 bp, Cannabis sativa
taaaagcaccaactttggcctcaataaatctatacaattatttacaaacaatcaaaccattctctatctttgattttcactttttgtggcattacaagcaaagttctagttttgacaatcttttgaagccgctggaccaattcctctgcctttagcaccttcttttgccaaatgagatcatttcttgccttccaaatcaagtatacaagtgctacttgaagctttgacattcttcttgaatttagtttgcttagctttccttattgttttgagcacaacctgcagattatcagctcaacccttccactgaagccatctcttcacttgcactagacattgttgggaaaaatcacacctgaagaacaggtgctcggttgtttcatctgcaatattgcagaagctgcagactggggagtcaattactctgaacctgcaaagccgatctttagttttcaatctctgcaatatggctaaccaggtgagaaagctgtgcttcagggtattaattctagaccagacttcattgcaccagtccacccttccctgttcttgaaccagaagtttatagcctctcttccttcgaaaattcttcatagttcaatgtctgtttcactaaatctttaatagacaccattttcctccaataccaactactactttgggaagctttatactcccaccaattgtgattttttatatatacacaatgcacccatttcacccaaagattgtcctttttatttgccacagcccatatgtgtttaaacatggcagctatattccattgagcaatgttcaataagccaagtccaccttcttttttcgggtagcacaaattatcccaaccaacagctccagcttcttccattatactcttccctgtccacaagaaagacctacatattccctctatttctctaatgacttttttaggaaggatcattatctgactccaatacatgtgaattgtactaagaacagagttaaccaacactaacctcccaacatatgacagctttctagttgaccatacccttattttattagtcatcttttgagcaagtgtgacacaatcagaggctgcaattttccttgcacagatgggaactcccaaatacttgaatggtgcttcctgcctcgagaatccagtcatgtccatcactctttttatctccctttcctccattacactgcaaaaaatagcagacttgcctttgtttggtgttaaacctgaggtgtttgagaataatttgagcccttgcatcaacaaatagatacttttaaagtctcctctacaaaacaatagtacatcatccgcaaaactaaggtggtttagcttcaattctgcactcctctcatgatatccgaatgcttttttccttccaatcttgctcatgattcaacttagatattccatccccaaaacaaagagtaaaggggacattggatcaccttgcctcaaacccttttttgcttcaaagaatccatgcatggatccgttgaacattaatgagtatctaggtgttctaatacaagtcatgattaaccttatgaacttctccgggaacttaaaagcatgtaacatttcctccaaaaaatctcaatccattttgtcataagcctttttaagatcaagtttgatcatacaattaggcttagactccttcctaccataattcctaattagatcttggcatatcatgatgttatgtgctatata

SEQ ID NO: 131056 - DNA, 661 bp, Cannabis sativa
aattctggtgttgaatctttgattttgttctttttatattcaagcttaaatcaagataaaatcaatctaaatatgaaaaagataggttagacaagaacttgggcttacatgtggtacaagagaaatactagacacatgttcactggagtaatacaagtgagaaatgaatatcaatggtctgaaaagatccatgaaacttacaaaaatcatagagtaaatatttaagttgtacgctcgcttcattgagtacacaaaaaagttacattgatttaaagcatatgattatcgacttccaaatagaagattttgtttttctccaagtattgcctatgaaagggatatgtacagagggaagttaaaccctaaattcattatgagctttttgatactaaagtaagtataatgtgtttttaatctccatgctaagaaagtatgtatcagactcgcccctatttctgaggtatgatgatgttaagctcagacaaatttattatatgaaaaaaaacatcttgtcaaggttttcaactagaaaagaaagtaatatgtaatgagacgattccacaaagtggtatagagaaataactgttggaatttatttcaccaggatcttagatctactcacaagtatgttgtttaaccccctaaatatgaactttctaaa

SEQ ID NO: 131057 - DNA, 830 bp, Cannabis sativa
  modified_base (221)..(224): a, c, t, g, unknown or other
gctagttctcgtcgcaaaaacaatttcattcatcagctgcagaatgaggcgagggattgggttaagcgggagtctggattacctcaggtaatggttaactatttcactaatattttccattccttggggtctcatgataatgatgtcctggataagattcagccttccataagtgctgatgataatgctatgttggttcaaccggttttggaagaggaagnnnnctcagcggtgtttcaaatgcatcctgataagtctccgggtcctgatgggatgactcatgcgttttatcaaaagtgctggcatattgtgggtcatgatgttgttcgacttattcagaatttttttcgggataaggtgatgcctaaggatcttaatgctactaatcttgtgcttgttccaaaaaacaagctgcatgtagttatgggagacttgagacctattgctttgtgtaatgtgctttacaaagttatttcaaaagttttggctaaccgtctcaagggattattgtctaaggtgatttctgagtttcagagtgcattcattccgggtcgcctcattacggataatgttcttgtctcgtttgagatcctccactacttgagacgtaaacaacagggtaagcaaggttgtatggctttcaagttggatatgagtaaggcttatgatagaatggagtggtcttttttgtatgctattttacttcgcatgggcttctcgattgactgggtaatgataataatggaatgtctgcatactatctcttacaacattgtccatgggggagaggttcttgggccgattgtcccaactagagggattcgtcaggg

SEQ ID NO: 131058 - DNA, 683 bp, Cannabis sativa
aataatattgtgattggggaacatttaaattgaacaagggaaatgagtggccagccaccccaaaccaaatacacacgtagatcatatgtggctcttatcttattcactcacagatcttggctaaggacgaataccctgcaatttctctcaaaaccataaccaatagattaaattaaacttctagaacagaacgtcctatacacaaaaattgacacttgtactgtgtgttagatttgagattgttgaggtgactcattgatgactttgcgtgttgggagatcatcactgcaatgcagcaaaagctatttgagattgttcttttggtttcaggtctagggaaggtaaattaattagggaataaccaataaccatactggtgctggtgatcaatctgaattttcataagaagtagaggctttgaatgaagtatgcactgtttctatagtatttatatatttaccactattacattattgaaattagttcagaaatgtataaaagaaaaataaaatattcgtaccaaattttaaataattttatggaaaataaagttttttgatgttttcatatttttttaatggttgtactcttgttagtttgttgttatttttttgtttattgtatattatttttatgttttgatgttatttttctattaattttatataatatttttgttgttt

SEQ ID NO: 131059 - DNA, 679 bp, Cannabis sativa
aagaaatgcattaataaaatcatcatcttttattaaaaaaaaaaaaaaaattaattgtttttcttatttgtatttttttttttccagattaatctaaagcaagatcaacttggctggatattggaataataaaaaagaaattataagggaaaagatcaagaaaaaagatacgattttgttttttttcctctcaatgattaagttgtatacagaagcctacaaattaccttactaaatcacgtgaatgaaatattagtctgatagtgttacgattattaatgtttataatatatgattaatatttaaataatctgctaggacaatattggacattattattatatgttaattattgttagacaacaacacaatcacgtggtaatatatgtataatgacatttaacattaatggatcttattattatttgtttggcaaaaataagaataaaattttgacacgtgaatcatgttataaatttacttttaaagtctacacgtgttagtttaagctaactactcacttcctggaatataataattttatatatatatatatatataaatatctttcttttttctcaagactaatgaatgtttttttttttttttgaaaataacttgtgcttcattaaaagaaccaggcaatacaaagcatacaagttaaatggatggcaaagaa

SEQ ID NO: 131060 - DNA, 1146 bp, Cannabis sativa
ttctatttctggtgaactcttacatcttttgtattcagaatgctaaattatttaatgaagttgatatttcatctaaaaaaaaaataataaatttgagtttttattttttaaaattgtacaaaatagtattttaaactgattcttttgtcaaaataaaaattaataataattcgatctaagtttgttatgagaaaattgagtaatttttttgtatattcatgttaaaaacttttcgagttggttatattaaaaaaatattgaaaattaaatttagggtaacaatttttttttaaaaaaaaataggatataaatttatcattttataaaaaaaaaaagtctaatcgataatttttacaaaatataaaatttaaaattgtattaaccctagaattaatatatacttattgaaaatgatattgatatttagattaggtctaggtgactagcttcttcttcttaacattattaatttgaatcaacaaattattaaaggcatatttgtttcaaggattctcacttctatatctacaatttcccaaataattaatcttttttaattgtataaaaaattagaaataattaaaaatattaactatacattattttttcaatagcaatttaaatgattataagtatatttaaagaagtaactcatagaattgtaagaaaatttatacttttttttttgtattaattaatgtgttttctctcacaacattttttcttggtaaaatgtaatattaatttgaacaaattatttttttcatacaatatatgtagaacaataataaacaatattgtgtggaagaagaagaagaaaatgattaattaagacatataatcaatttaggtcataaccaatcaacaccacatgagtaattataatcataatcataatagtaagaagaagaagaatattaattaagataagaagatgaatggtcattattgtaaattcctaatcaatcatatttatttatatatatggtaagaaagacttgtcatgaaatgattaattgttggtaggataaatattaaaacaatttaatagttatgttagactaattagagaataattgcaaaattaattaactatagaatagaatattataggttaaattgtggatggagcatttttcctttttt

SEQ ID NO: 131061 - DNA, 779 bp, Cannabis sativa
gaaaccatctctattaatttctcttgttgatatgatatgatatcatattatgtacttctatttcttcttatatatatatctttatgcaataatcaataaataaataagttgacctttgtttcttaatgtagattttggttttttttttttttttgtttctatctatatatatattttattattatagtaatgtggatcagacttttaaagaacatatatcatatataaatagaatcataatcctacctagtgatgaaagttaaattttgagatctcttttcattgattttttttttttttggaagaaatctctcttcattgattaaattggattttttttttgaaaataaaattgaattttttttatacatatataagtatatatatatttacatgaatattcattaatggttacagtaaaaatgtaatattggttacatttttatataacttgctataacaagtattttacagataatttttttttatttttaaacttaaaattaattatatatttaaaataatttttttaattaaaatatttaataataccttttcataaattaatatttatatatatatatatttttttattttaaggaaataaataaacaaataaataaacttaagttattatcaaattacaatcaaattacaagtaatttattaattatttttagtaaatttttaaattaatcacaaccgttcaataatgatcatacggctaaaagtaattataaccattatagttatatatttaagtgacgtttggtaacact

SEQ ID NO: 131062 - DNA, 726 bp, Cannabis sativa
agttacagagttgttttctgtagctacagaaaaactgtttcagtaccaattttattattccgcatttaattaaataataaaactgagaatattaaaataccaaatttcaatattaaatatgaaagacatatttgaagaagaaaattccataagctttaatgcataaaatgggaaatacacatcataagtactatttagttatatattgcttcatcttccatcttaacaacctcaagaggtttagaagctcataacctttttagaataaaagttacaaagaaaatacattcaatgaaagggagaaaatgaaagtaaagtacttgagtaagttatgtgtaacgccctaacaattaggcactctatgacaaccagtaaaaaacctattcctgctaaactaggattactagaaaataagagcgggaaaatttaaactttaatttactacggaataaaaatataacttgaaataatttaaactttagaaccatttcaaaaagaccacatgtttcgggatcccataaaacttttcgaaaaatattacaagttactttacatgtcaacctaagcggcaaaatttgagaatacaaaatattttaattggtggacccaaccctcttggtgtagtatggctcgaacatgtacaatccatcgccaagctcccgtactcatggctaattactaatagatttaccctttcctgtacagtagagcacccgtgagccaagc

SEQ ID NO: 131063 - DNA, 747 bp, Cannabis sativa
ttattttctgaaaaaaaaaaattacacaaagtatccaaaattatatttttttttttacattttcacgaatttataggaaaaacaagactattttcatgttaccgcaacattatattatgttttcacgacatgcaaacaatgtctttttattaaacaaccaaaaaacaatgttaactttgttgcttttgggtatttttgaaataatcaccaaaaaatgcaatcaactaagtaataaaagcccacaaagtttattgagatgtgaaccctcgatgtgctgatccaattaagaaggaatgaagtataatgtctctatagttagcatgtggttcctgagattgtctgagctatcgaatgggtggagaagagatttgtgcagcaggtgatccttttttatttttcagcgaaaaaaactaaataaaggaatacttacatgaaacactattttaaataacaagaatacaacataacataaaaaatacactaaaattctgtattttatgtaaataaagtttaaaaaaaccgtaaggatattgaaaattccgtacaaaccttatttttgtaatttttttttttgttatttttgtatttttttttttaaaattattccaaatatgaaagattatttacactatatactgaaatttttcaatttgttttactgtggagcagaatttttttaaaaaaatactgtgtaagttttataccgcagtatactgtgttaaattttcactggtgttctaccggtgt

SEQ ID NO: 131064 - DNA, 665 bp, Cannabis sativa
  modified_base (95)..(122): a, c, t, g, unknown or other
tgtttttagtcacaatatttgttgtgactaaaactaaattagtgacatcttgtaaataaatactatattttagtcataagtaactttttgttgtnnnnnnnnnnnnnnnnnnnnnnnnnnnnatttatgttgtgactaaaaggttaaaagtaactgttttatgtagtgtgtgcactcctgcaccacctgtgagagaaactacactaaaagaataaatgatgatgactatcagaaatctacttacaaacaggacacattcaaatctagtctaatattgcaattcaacaatttatctctaatcagtaaatgatcattcaccacttgccaaaaaatgaacctatgttagagatattagtttacaccaaacaactttaaaatagtttaccttctcatgatgaaggaggctttgatagagtttgccaaccagtattgcatgcatttaagataaaaatggctgaaaaaatcctctagagattgactagtttcctccagtatcaactaacatctgcctttgttgaatctttaagccattggtaatgaaggtcgaataagtaacaagtgaaagaaaagagtgttggatatattttatcaggatctagatttactaccatgtatgtttcattaacatcctaatatgaattctataacaatgaaataaacacata

SEQ ID NO: 131065 - DNA, 541 bp, Cannabis sativa
gatctggtttgggagattgagattgagattgagattgggtaaaaaattggagggcgtctgagtaacggtttgcacgagtgaggtgagcaagcttaccattgagggtgaggagtaaggagttggatgacatctgagattgagttaaaccatttacactaactgagaagaacaaaaggagtttcttttggtttggtttaaggaagaagagagttggtcgtatagaaagaatagtaccttttaatttcaggttgagctaaattgcgggcttccatgacagtggatgagagccttttccttcttcggcgcctacaattgcaaatcaaaatagaaatcataaatttatgtaaaaagggaaattttttaaattgggcagagatttatatcaacccttgagcggggaagttatcttgtgagtaatcagtaccttttaattttatgagaaagaatagggaaaaggcagagagaattagcctttgtttttattattcttagctttatatagctcatgacaaaaatcaagaacagctgtaacagaattgta

SEQ ID NO: 131066 - DNA, 1283 bp, Cannabis sativa
  modified_base (1212)..(1226): a, c, t, g, unknown or other
atctgttctttaatattatattaattatattttatacaatatttttatataaaactatatgtgatattaatttttatggacacttaactatataatgttttagtataaattaaagtttaacatagtattatataaaagatatgatatataatctacttcaatataatacaatacaatacaacctaatacgacgttccaaacaaacccttcatatctaggctaagcctttgtaagtaagttgtaactaatcaaatattagtaaataaaaataccaaattattctaaattttatccacttaacgtggtatgtccacatagtcgaaattgaagacatgtggaatacaacttgtcaataataggacaaagccaccttacacgtacggcatgtcaactgtcaagggtttcaaagcgatcaagcaaaactgtcaagcaagaataagcaaaaagagttaagcaggtcatcaagactttggccaaccatggtacgccagccaagggaagcttgtagggcggctatgtcttgagaacaagttggctgaccaaaaatgcttgtcagaccaaagaggcatgttcaaccacggaagcctggcccttacatggagagctgaacaacaaagctatgtggaaaaggctggcatgcacatatcaagactgacaggcacataccaaggctggcaggaatatacctaggctagcaggcacatacctaggctggcagaaacattcttggttggccaatttgtgcaaacaactccgaataggctgaataaagtccacaacaggttcaacaacccatgaagaaagagatattccctcaagatattaatcctatattctaagaatttagttatcattttttgtgatttaaataatagataaaaagatgttaaaatccctattttgaagggatatctttacctatttggtttaggatctttgtaagccttactctatataaagggtattagatcactctagggggctaagtcattccacaagcattaaaaggtctctccaagtcttctctcatgctccatgaagcctcccacaagtgtgaaacctctctccctttaagtctcatatgttatcaaggcttccaagactctaaacctctcttccttcattaattcttcatagaatcttatcagttctttatctaaaacacattgttctcacaaagtgacctagactgatgactgaccctacaaaccnnnnnnnnnnnnnnnagcgtgctttgtcctcactcgcaggcttcctgagaaaactacccaggaggtcaccca

SEQ ID NO: 131067 - DNA, 5617 bp, Cannabis sativa
  modified_base (934)..(935): a, c, t, g, unknown or other
  modified_base (3161)..(3164): a, c, t, g, unknown or other
  modified_base (3368)..(3370): a, c, t, g, unknown or other
  modified_base (3537)..(3553): a, c, t, g, unknown or other
tagtcatatattaccaatattattaagtatgtatttagggaaaaaaatttaagattttctaagtatagaaaatcaaattttcctattctatttaactaacttaaactacttaaaaccaaatttaaaagctttaagcgtttaaatataaactttaaaattaaaaatagagtattatctatataatttttttttattaactcctgaattacaataaattagtcatgaatcagtcttacatgagaaaattgtttgcaaaattgaatgattggttgtgcattactttcctattggacactttgaaaggaaagtaatttttaagcacttacaattatttttatcgaatagtaaatatcttacatttttaatagtggtacctctttgtgaaattcggtctggacccgtctcggaatctagtcacaatgaatttgtactactaagacatgaatatgaaaattgtttccgcgttaaatttggtttaaataaccccctaattcaaaaattgaaaatattcttcttttgagggtaaattttaaaaagtttttcccttactcttacactcgttagtgttctcttaaaaactcaccctacacatcttgaaaaatcgtgacatttcacatggataaagccaagatcgttgtgcatcacttttctattagacactttgagtgaaaaagtaattttcaagcactaacaatcattttaatcaaaataataaaaatctcaaatttctgatagtggtacccctttatgaaatgtggcccggatccatctcgtaatattttttctcactagtcacattgaattcgtactactaagacgtgaatataaagattggcttcgcgttaaatttggctaaaataaccccctaattcagaaattgaaaatatttatctgtttagggtaaattttaacaatttttttccttactcttacnntcgttagtgttctcttaaaatctcaccctacacatctcgaaaaattatgaaatttaataggaaaaagctaagactgttgcgcatcacttttctattagacacgttgagagaaaaagtaaatttcaagcactaacaatcattttaatcagaatagtgaaaatctcatatttcttatagtggtacccctttgtgaaatgtagcccgaacccatctcgaaatattttttcccactagcgtaatactaagacgcgaatatgaagattagtttcgcgttaaatttggttaaaatgacccctaattcaaaaattaaaaacattttacttttcagggaaaattttaaaaagtttttttccttactcttacactcttagaattctcttaaattcccaccctacacatctcaaaaaattgtgcaattttacagggatgaagacaagcacgttgtgcatgactttcctattgcacagattgagagaaaaagtaatttttaagcactaacaatcatttttatcgaaataataaaaaactcacatttctgataatggtacccctttgtgaaatgtggcccaaacacatctcgaaatatttttctccactattcacaatgaatttgtactactaagacgtgaatatgaagattatttttgcgttaaatttagttaaaatgaccccctaattcaaaaattgaaaatgttcttctttttagggtaaattttagtaagttttttccttactcttacactcgttagtgttctttaaaaaactaaccatacacatctcaaaaaatcgtgaaatatcacggggacaaagccaagaccgttgtgcatcacttttctattagacactatgagtaaaaaagtggttttcaagcactaacaattattttaattaaaatagtaaaaattcacatttctaattgtggtatccatttgtgaaatgtggtcctgacccatttcagaatatttttcccactagttagattgaatttttactattaagatgtgaatatgaagattggtttcgcgttaaatttggttaaaatgacccctaattctgaaaatgaaaatcttcttctgttcagggtaaattttaaaagtttttttcttactcatacacttgtaagtgttctcttaaaatctcacgctacacaactcgaaaaattgtgaaatttcacaggaacaaagccaagaccgttgtgcatcacttttctattagacgcgttaagagaaaatgtagtttttaagcactaacaatcattttaatcaaaatagtaaaaatctcatatttctcatagtggctcccctttgtgaaatgtggcccgaactcatttcggaatattttcccactagtcacaatgaatttgtattactaagacgtaaatatgaagattattttcgcgttaaatttggttaaatggtctcctaatttaaaaattgaaaatattcttattttcagggaaaattttaacaagtttttttcttattcttacattcattagtgttctctaaaaatctcaccctacacatctcccaaaaccatgaaatttcacaaaaacgaagccaagaccgttgtccatcacatttctatgggacatgttgagtaaaaaagtagttttcaagcactcacaaccattttaatcgaagtagtaaaaatctcaattttctgatagtcctttgtgaaatgtggcctggacccatctcaaaatatttttgcccacaagtcacattgaattcgtactactaagacgtaaatatacatattcgtttcgcattaaatttggttaaaatgaacccttaattcagaaattaaaaatcttattctattcagggtaaattttaacaggttttttccttactcttacactcgttggtgttctcttagaaactcactctacacatctcaaaaaattgtgaaatttcataaggacaaagccaagaccggtgtgcatcactttttttattagacactttgactgaaaaagtagtttttaagtactaacaattattttaatcaaaatagtaaaaatctcacatttataatagtagtacccctttgtaaaatgtggtccgaacccatctcgaaatattttttcccactagttacattgaatttgtactattaagacgtgaatatgaagattagtttcgcgttaaatttggttaaaatgaccccataattcagaaattgaaaatgttcttctgttcagggtaaattttaacaagtttnnnncttactcttacactcattagtgttcccttaaaatctcaccctacacatctcaaaaaattgtgaaatttcacaaggccaaaacacagaccgttgtgcatcacttttctataagacattttgagagaaaaagtagctttcaagcactaacaattattttaataaaaatagtgaaaatctcatatttttgatagtggtacccctttnnnaaatgtggcccagacccatctcgaaatattttttcccactagtaacaatgaattcgtactattaagacatgaataagaagattcgttttgcattaaatttggtcaaaatttcctcctaatttagaaattgaaaatgttgttcagggtaattttaacaagttttttcnnnnnnnnnnnnnnnnntagtgttctcttaaaatcttaccctacacatctcaaaaaattgtgaaatctcacaagaacgaagtcaaaaacgttgtgcatcactttcctataggacacattgagaggaaaagtaattttcaagcactaacaatcatttttatcgaaatagtaaaaatctcgcaattttggtagtgatatccctttgtgaaatgtggccctcacccatctcggtatattttctcccactagtcacaatgaatttgtactactaagacgtgaatatgaagatttcttttgcgttaaatttggttaaaatgaccccctaattcaaaaattaaaaatgttcttcttttcagggtaaattttaaaaagtattttccttaccctttcactcgttaatgttctcttcaaaaatcactctacacatctaaaaaaattgtgaaatttcacaaggacaaagccaagaccgttgtgcatcacttttctattaaacactttgactaatagattagttttagagcactaacaataattttaattaaaatattgaaaatctcacatttctgatagtgatacccctttgtgaaatgtggccaggatccatctcgaaatattttttctcactagtcacattgaattcgtactactaagacgtgaataagaagattggtttcgcgttaaatttggttaaaatggtcccctaatttaaaaattaaaaatattcttttttttcacggaaatttttaacaagttttctccttactcttacacttgttagtgttctcttaaaatctcaccctacacatctctgaaaattgtgaaatttcacggggacaaagccaagaccgttgtgcattacttttctattggaaacgttgggtgaaaagtcgtttttaagcgctaacaattattttaatcaaaatagtgaaaatctcacatttttttatagtggtaccactgtgtaaaatgtggcctggacccatctcggaatattttttttccactagtctcattgaattcgtactactaagatgtgaatataaaaattggtttcgcattaaatttggttaaaatgacccccttattcaaaaattgaaaatattcttcttttcgggaaaaattttaacaagttttttttttcatattcttactcttgttagtgttctcttaaaatctaaccctacacatctcaaaaaatcttgaaatttcacagggacaaagccaagattattgtgcatcactttactatttgacacattgagagaaatgtagttttcaagcactaacaattattttaatcaaaaatagtaaaaatgtcacattactgatagtggtacccttttgtgaaatgtagcccagacccatcttagaatattttttccattagtcacattaaattcgtactactaagacgtgaatataaagattgatttcacgttaaatttggttacaatgaccccctaattcagaaattaaaaatgttcttatgttcaagataaattttaacaagttttttccttactcttacactcgttagtgttctattaaaatctcaacctacacatcttgaaaaatcttgaaatttcacagggacaaagccaagattattgtgcatcactttactatttaacacgttgagagaaacgtagttttcaagccgttatacccaaaattcggctagagggtacgtgtcaaggaaaaggaaatgtgaatcggtgcaatatctttttatggaataactcattaattgcataaatattagagtatatttgtaacccgctgactgtaaggtcttaggcgaggaattaatgtacgaactggtacttagtgtattaacgagaaaccatatgtcgctaaaggagaatagcgaggcaccagataagaggaacacataccttagcttataataagcaaactaagtgtaaaagtcagatcggctcgaagaacaagagagactcataaccctggcaagtcaaaagatttttgtatatccgcgatcgaaataagacatatcttatcgacctcagaaagaagaatggttccagctcgccattgggatcactacaatcaagtttctgtcga

SEQ ID NO: 131068 - DNA, 1190 bp, Cannabis sativa
  modified_base (47)..(47): a, c, t, g, unknown or other
atctttattaataagtaaatccgattatattgaaatgaattttattnagggcacaaaacccaacagaaacagtgtcagaactcttctcgctgcttatccaatgactctcacaaattcctttagaagttagcaaaggactcctttagatgctcaaccttaagtttgggcagaagctcctcttggtgctccatgggatcctctttgaggtctataggctcctcatcaaggtcctcacgtggctcacctagtgtcacaggaccatcagtgtcgttgccagctcctattattgtcctatttagtggtctcgagtcagggactctcgacctaccgcttgaagctcagtcaatcgaagcatcacaacaagcattggtggccctatttgtcaccgtatttttggaagtccttaggttttcgtacttgaattactttcagaatgaagcatttattcaaacactaaaaacttaaaggcaacaaagggccttgagtggtgttcttaatgaaagcaccaaaatgttaactttgaaaagtgatcaactctgtactgtctgataacgatagcgaccaatgaatgtatgaacataaagtaaaactatagtagttcaccaaaattatagtatttcacttcacttatcctgaagttaatggagctatgtctactttgagctttcattattacaaaaagtcaatttccttacaagagaactctggataaaattactaagtctaccttcgcttcacaatttctagagagagagaagctacgaccttgtagagaggagataaagtgtgaaaaatgaattaggagaactctcctttaataggtaaggcgcggtccaattaaattacaataaaataataggaaaattttcacaaaatttgttggataattcaaactagcccgcaagtcaattttcaggcctaaaacttcagaattgcagcgagggtgtgagccacttagacgtgcctttgaatagctttaatttgccacttgaattttttcatttggataaaaattgagaatttatggccatttcattgagtagtgtgcactgcaaaaaaagttactgccaaaacaacctgactattgggtgtctaggttgacataaatgtcaatctacccatgttgacatgaattttaacctaacgaggcgctaaagacttggagtttgtttggctgtattttcagtttt

SEQ ID NO: 131069 - DNA, 663 bp, Cannabis sativa
ataatcccaagtgccctttaagtaccttaataactatttgagggccttccaatgttcaatacctggattggacatgagccaactcaggatgcttagagcatgagctatgtttgacctggtgctcaccattacatacattagacatcctaaaactacatcacaaggtacaaccttcatttcttatttctctttcgcactattcaaacactattcctccgacaacaaattgtccgcccaacagaatggatgtactctttgcatcttccatgttaaatttctgaataattttctcgatgtacccggactgcttcaagttgattgtccattcctgcttgttccttaaaacttcaataccaagtaccttttgaactggtccaagctccttcatctcaaattatcttttcaacttggctttgatacttttaatctcatatttttccttgctcatgatgagcatataatccatatttagcaataagaacacatctgtagattgctctagattcttaaaatataaatagtgatcatatgtagatcgattgagaagatttcagtatataagtataaaatctaatcatcttgtactttacaacaggtgagaagatttcagtgtagtcaattccttccacctaagtaaagcccttagccactaacttggctttg

SEQ ID NO: 131070 - DNA, 999 bp, Cannabis sativa
  modified_base (68)..(68): a, c, t, g, unknown or other
atgtataaatattatatttactttaaaataattctattatgatagtattaatgattgtttattgttantattgttacattgatattttttggtattttatttaattttttacaggttaattctagttagttatattagttataacagttataaccgttataacctttcaattagaatataatttacttgattctaaatgtattcttaaataaaggttatactgtaatttaaaaaatattgttaactaattgtaaggtaccataaaaaatattgaacattattggtgcgcaataacaatggtggagattgaagtgtgttagtttgtgatgagtgagtgggtgattctcctgtcctggcattctatcgtgtgcctctgtatctgtatgcctacctcactttcatcaataatttgtaactcttacgttgtttgtcacgtgaaggcttcataactattatgatttagattcattttattctatttattggctttctaatttaatagaaatcagagacttggatccactgctactgcacctaattcaaagttaccttattttgaggttactacctaccattaatatttatacatttgtacaatctcgagtgttgtgttgtgttgtgttctcatctcatcttatcttgtatattgaaaattgggatacacaaaaacaatcaaatgttacaaaaaaaaaaatatagaattttaaatgcttttttttttctaaagaaaatacagtttttttttttatatatatatatatttttatgttatatttttattattttattgttagttttttattacttgtatgttattttcttattatttttattgattatcggaaatatatatcaaggtaaaaatgtatttttttttttaccaaaagtgcattattattggtgccgaacacttttttatagattgtgcctcacaaagcgatatttcttaaaaattatttttttaagttatgtgatactaggggtgggcaacatccaatc

SEQ ID NO: 131071 - DNA, 861 bp, Cannabis sativa
  modified_base (825)..(825): a, c, t, g, unknown or other
ttttttaaaaaataccatatttagtgtaattaagtttttatgccatatatatcaaaacttattttaattttcccatatttttgtaaatagccctttttttaaagctcttcaattgtttttaatgaatccaactttttaaagggctaacaatttatcattgatcatttctatgtcaatttccaaaattcattttcaattctattattccttttaatcaaaaaaataaaaattcattgttgctatttattatttttttttttcaaacctttcatatttttttgttgtattgcaatcaataataatttttataaattaattgaagttttttggtattttgtaaaatatataatcgtatgataatatttaaaaatattatttaaaaatttcattttgttataggggtgcaatttttaaaattaatgttagcgaaaaaaacagtattgttaaaaatgttgtttagtaatctaaatggttaattggtttgaagttgtaccatcattattgtattatttttctttaaatttttttttaaataaataaacaatatttcagtatataaaattacacttttttgatttaattatccaattacaatggactgggcagtggcagaactagggaagattggaggagggaccaaccgaacaatatatatatattttttgggtttttttatttatacaattcaaaacagtttttttcttgcatttttatagaatttcacacaaaaacccctataacaattaatggagtaacataaatcataaccaaaatccgtatagcaacccacataaaaattactggagcaacccaaactgtaaattnaaaaaaaaaaataaaaaaaatagcatatgagataat

SEQ ID NO: 131072 - DNA, 903 bp, Cannabis sativa
  modified_base (842)..(859): a, c, t, g, unknown or other
cattattagcattaatgaactgccctttcgtcttctacatcattcccaaccgttagattttccaacctttggccttactgttactaggtgttaagtataaaatgatggctcaggctagccatattccataaactctttgttttttggtgaatttcatccagaaattggattgtcactctcctacggagatgtcccatccaggctcagaaacttatccctcaaaacttgtaacaccgaaatataccaaccgcttttcttctccatatgttcttaaaaaattcaaacctcagttaaaattggaaacgaaaagattccaagactgaagatcatccgattaatccaaaccaaggagatattgtcgatcgttacgagcgattcttacaagggatttctgaaagtaagcatcattctttgtttatagtggtctgatctgaattcattttttttaccactgttacttcattgatcttttatctttgtctctataggaatggtcgtagattttgagagcatgttcgaaggtcctcctcgagccaatgagaaatccagggagaaggtatcccaacccgatgaggtttcaaattccaccaaagaacccaaatggctcaagaacaaagcttacacggggaaatctttgggccacctaaccactggtgttgttaaacttctcgaggctgagaatgaggtctcggctgcaggaaatgggatcttctgatgcgaggaatgaaggtccctactgcagagaatgaggtctatgcagaggtcaagtcctttttcgtgtagacagactttctcgagctctcttgtctcctataaccttgtattctttgtttaggaaaatnnnnnnnnnnnnnnnnnntagtggcatttttgtaaagacaagtttgtaaaccaacttggttt

SEQ ID NO: 131073 - DNA, 821 bp, Cannabis sativa
aaaggacgacgccctgaagaccagggatgaggccgtgacaaggcgtgagcttagagaggccaaggaggcggttgaggaactgactgctaggctaaagtccctagaggagctgcaccaagttgatttgaaaacaacaaccaacctaaccgttgaggtgaagttggtgcgtgacttcagggatcatgctcaaaagaaggcaaaaagagatgccctcctggcccccgttacctgctagcactgcaacaaacgttttgacgacggtgtctttatggcttggctgactaacggtcagaaccttaagcttgacttctatcccaagcctgaagaggtcctcgtccgcttctggaagaagaacaagagacttgatgccttgctggaggagtgcaggggtcctcgtcttccacctcaaattgattaagccagcttttcactaccactatcattattattatttttctttttctttttatatatttaatccttctcccctctttaagaaaatttacttattattattatttttaaggggagacacttaaggcccgtccccaggcccttatcttttttgaagcttctctttgggttccgaacacttcatattcatgtttgaatacgtacttagcttttaactttcttaaatttggtatgtttacatttgtctgtgtggtatgctttactaccccctgagtgacatgaaattcaattttaggtcatttagttttataaactttggattagaggttgcatatatttgtccggtacaaatttactttacagaacataaacttttattttttcaactattggtaatactttcggag

SEQ ID NO: 131074 - DNA, 1633 bp, Cannabis sativa
  modified_base (1493)..(1501): a, c, t, g, unknown or other
ttgttcatattaaatcataaagagacatgtagatagagttacgtacatggaaacattgttatgatttttaatgttttagagcaattgcactagagttgcataaatgttctgatttttgttatgcaactgtaatgcaattgttgtaaaacattttgctaatagttatttcgtctgatgcaaccttcggccaaccacccagcaaccactcaaaaacttttgtctgattgaaactttcgtctaatgcaaccttcaaccaaccaccctgcaactatcgtctgatgcaaccactgcgcaaccacgcagcaactaccatacaactatcgtctgattgtgtaagtgatagtgtaagtggtattttagtaattaaaatcagataaaaggtataaatattgtccacacctcatgaagattttattgtaaataaagtgtcaatttaaattattatgtaataattcgattccaataggagtcaaacttaaagaagggaactgaggattcgataagagacggatgtcattaagatgaagaagtttagtaattttagaagtataaataaatatttaattatcatgttatagtaataaataaaatatttttttcaagtccctgccctacccctaaaattagctttgtgtgtcacttacaatgacggttattaccaaataactgataaggttttataaccctaatcgaaggctcatttattcatcttcttcatttttcatctcataccaaaaccctcgaaaccatagacatcccccacccaagcgtttagtcctttttgggccatttttactcatttttttttttaaaaaaaaaatcaaacaaacataaatcatctaaatctcacataaaacatacataaattgttttaaatccatattttatgaataataaattgttaccatgactatgaggccaattattgaaaaatctttaactaagatcttatttatcattcaagtatgctaaataaatgctaatctaacatcctaatatggaaaccctaaaacaaaaaattaaacacataccaaatatgagacttcgcgacggttctacaaacgatttttttcagggaccgtcgctaaaaaaattaagtaactatttaaaactgtcgggaaaaatttagtattcctgacggtttaaaatcgtagtaaacaaaatagacgctgttttttaataaaatgcgaatttttaggaaagccttatacccgtttggtataagggcccattaaaaaatcgtcacctacttctcgtcacatttctctcatacccacctactttttttctattttccacatgcctacctatttcttctccatttcccacaccctaaaacaaaaatcttaactctcaaaaatctcacccacgcctcctctctcgccgtcttcctctctctctctcgatctctctttcttctcgtccatcgatctccacccacccctcctcccgacggtctccctctcctctctgtcgcatacgtcggaccaccnnnnnnnnncgtcgatgtccctctcatctccgtatcatacgtcagaccaccatcacctcacgtccatctccctctctctctccgagctcggtagaaatacatttatttatttatatacttttttatttattatatatatat

SEQ ID NO: 131075 - DNA, 616 bp, Cannabis sativa
ttctaacatgcccaaacactgaattggacaaattagcctgtctaatccaatccaatcctgcataccaaacgggccctaaaggatattgattattcagcaccgcaccctagctacctagcagcacctgtgtcaaacttttatttggtgacgtggttagcagttttttataatttttatataaaaaaataaatgagattaaatattaaattatactaataacaatattattagagattataaatactttttaatatttctcaacttttattattaagcatttttatagggtattaaagtgtctagtattctcctaagtgttatattattattaataccattaagtatttaatcatatataaattacactaattaggatttttgccccttaaactttgacatgtaccaaatcatacccctaaacttttaaggtcgttaaaaataccctcagaactattgagattgttggatttaaggactttttcccaatattagtaaaaaaatgtaacatggatgaaagttcaggaggcatgatttagtacatgtcaaagttcgacggacataatttggtagataccaaagtctgaggagcattgtttggtacataaacaatcactga

SEQ ID NO: 131076 - DNA, 1008 bp, Cannabis sativa
gaaaacccagaaactccattccagaagctcgaaaaatgtatcaaaactcacccaaactcaccccaaacatgcatataactcaaaatcatttcccacataaaataactatcataatagacagctaatacacacattcatagctcaaaatcacaatatacaagctctatatttcagatcacaccactatgaaaaacaagctcaacatttgagcaaagttcatctcaaatacacactttaaacttgaacatcaaagccatatattcaacttataaaaattagattcaagctcataattcacacaacaaaaactcagtccaagaccccctaataaacaaaacatttacttgaatcccgacatgctcaaagacatagaaaaagcatcataattccatctattcatttatacatgcaatcaagagcaaaaataataattgagcatacttaaaaaacttcaatatcagcaattaaatccataaatcaaaaggtgaaaattacctcaaaaattctcaaaacaaagctctaactcccaagctccaaaaccataaactcacaagcaagaattaagcaaaaatgaagacaatttgagaaaggaagagggtaaaagggggttcggctagggcttgaacaaaggcagaaaaatgagtttcagtattgccaagaatccctttttgttgaagataattcaaagagtcaaaatgactaatttgcccgtagggccatataacactcacatacgtaatcaagggtatttaagtcattttcatcacatatacacaattcaggttattcactcatcaataatatgccaatatcaaatcctgaaattaaatttcgtctccaaacccggttcagctcaaaattccccattgtgactataccgcgctgacttgtcagaaaatacctgaaaaaagagaagacaaatatattatataataatatagtccataagcacacaattaaatttaattcacaattttacccttctcgggtcacaattactaaaatgcc

SEQ ID NO: 131077 - DNA, 869 bp, Cannabis sativa
  modified_base (54)..(60): a, c, t, g, unknown or other
aacattaaattttatttctgatctatattataaagtaaatctgattatattgannnnnnntttatttagggcatataacccaacaaccatatattattataaattataattaagacttttcaagctatttttgtcattcattttgtatttgaggtgtataattgaaaaaaataaaatttaatacaaagtacttaaagtagcattttgtttacattttaagactatattttatttcatttttatagattttgattttttaattacatttttaccaaactccataaaaataatatgacaataacatgtaagcaatatagtacaaatataaacgaactcaaaacaacatacaatttacaaacaacatagtatgttattgcgaaaacaacataaaaaacaacaatccacatttttgttagaaaaaaaagagttcaaattcttaaagatgttgaagagcctataaatttgtatttttgtaatcttttaccaatgtttgagtatttaagaaagcattcctagaaaaaaaagataattttaaaaaaatacaaaaacaacaaaaaattacaaaaatataattttactaaattttaaatattttcaaggtttttaaaattttattaaaatacggtctttttgatatatttctatgttgtactcttattattttattattgattttttattatttgtatattaattttttatattatttatcgttattttttattctttcacgtaaattttttattaatttttgtgtttttattattttttattctgacacagaaggaggtcttttggagacaacgttcaaagcaactttggttacaagcaggagatcagaatacgaaatatttccatgcctgtgcaaa

SEQ ID NO: 131078 - DNA, 1327 bp, Cannabis sativa
  modified_base (212)..(226): a, c, t, g, unknown or other
tatatatatatatatatattgcgacgatgtgtctattttggtacttataaaaagtgtgcattggagatgggtgcccaagtacactaatattataatatcttgtaattagttgacagtttcttatattatttattaaattaaaatatgtgaaactcaatattaaaataagggaaactactccatatacggtttttttaacttttttttttttnnnnnnnnnnnnnnntgagtttctaaagtggttgcagcgttagttgcaatagaagtttctatacaattttttgttacgatttaggttgcagcgctagttacaataggggtttctatatagaattccgtaaaaatacaaaaacaaatgtttaaaagtgtaaaaatgaaaaaggcccttaaaaaactaataataatatgttatatattgtagtgcttgatggtgtctcttaatattttgcataaaattaagatgcctagacatttattattagaataattacataaagcacaattttttttgtaaaaaatttacatttttacatttgaagaattctttttatatttttacgtttttccatagaaacaacacgaaaacaacaaaaaaatacatgaaagtaacatgaaaataacatttaaataacatcaaaacataacaaaaagtaacatactgataacaacaaattaacaagagtacaacataaaaaaaaaaccgtattttctgtaaataaaatcaaaaaaatcgtaaagatatttaaaattctgtgaaactatatttttgtaattttttattagttttgtgtatttgtgaaataatctctttattatttcctaattttatttgcttattggcagagttcatacccaataagaagaagtacaatttagaaaatggctgagatgcaaaatgaccctaaatttaaaaactaagttagtaaatgttccatttttaaaaaaattaagaaaattgtcaaatataataaattagctaataacaattataaaaatacatttatcacatattttttaaatatatatataataataaaattatgttatataattttttttagtattgcatattattatattttagtattacttaaattgtctttcttttagttttcttttttattggttgtaagttggctatataaagccttgtaaacactttggaaaatcagattattttttaataaaattttgagaggttttcatcttaagttcttgagagacctattcgaacttatcaaggagtattccttgtggcgttcaacctgacttatcaaacggatttccaccaccgtttgtggcatcttccttcataccaaggttcatg

SEQ ID NO: 131079 - DNA, 2308 bp, Cannabis sativa
attggtttttcttcatcaacaggccctgttattagtaatcactatgttctgggctggagctttaaaattaatggccaagctcaagaacttgacttgtccaaactcccaaagctaccaagggtcggaccaaaactaggtctattattgaggattgtattaccaaacaagcatagcaataatgagtgttgtgtaatctcaatgcaaatggtatgaagataagtttaactatatatcaatctcttttctcattgatcggcccataagcatgtcttttgaaaccattaaaagatcactcaacgcattgagaagaagaaaagatttaaattcaccattccacgctgtttgtcatcaccctcaccgcaatgctcttcttcttctggcacatcatcagcatccatgccaaacatatcagtaagctatctagactaattgccaacctgcatcacaagcacaattctttagtaaaaaacccttgaaattattatctttacacacatcataactctcaaagtacacataaaaataataagtcaaatgtcaacattcttggggttactatacttggtacttatttatatcatattttgatgtaattggaatattcaaattaagtacctttaaatacaggctataatttttttagctgtaatgacactttaatggattgcagggaaacccattatgaggacaaccatttggtgcccaatcaagaattcaaaccacacaatcacaaataaggacaaccaacacctaatatgaacttacttgaccacaccatagagctttatctttacgccctatcacacaagaaaaaatctacacaaaagaggtatggacctaagttagaaaacataaaaaatttaggttgaaattttaagcaccaatttttgtttggattgaaagatttttcataacaaggaatctcatagctttaaagctatagagtcaaaaacatgaaacaaatgatgaaagctgctttttctgtacttttaatttctcttttttcactttaaacataaattttgacacctgcccataattatggaatgccctaactccttaatttcttgttcttcttcttcctttacaatacaaagacacacaacagtataacactgagtcaatacccttacaaattcacatttatagagcatggagacattaacagctccaaataaccaaacccattatcaaacctagaatataactcaattgtttcccaaatattacatattaaccccaccccataacaagtttcttactaagttatcctccattagattgagaagagaagagatggagacaaagagattgagaagagaaacattaccttcaacctttatcttcttccacagtcgatcgttcaaaaccacctccatcattcttcggtcgcaagatggagacaaagagattgagaagagaagctttcggtggatggtgatgatgatcaatgaataattagaggaggtttctaatgtgtgtgagagagagagattaatcaattggaggaggttaaaaaaaataaatatttatttaaataattattatttaatttaaaaatattattaaaaaataattttaggaataatctaatacattgtaagtataacctatttatatgcactcatcaatttatgacacttagattaaatatttatggttctaaaaatgtacctaccatagggacaaaaataaagtacttaccatagacatgtcctatatttatattcaactacaggaaaatatgcactattagttttgggggcattagtgtaattttaagtagacgggaagttatatttgcaccccataaaatgataaatacactctattattaaaaaaatataaatttaaataatttaattactcccaatatatatattttttttaatttttttcctcacattattttatattaatttcaatacttattttgatttcaattttataattttttttaactcatgtatatatattttttatatttttctaagaaaattttatgtcattttttattttaatttttttgtcataatatttaaaatgtaatttatttttatttgataggtatattttttaagaatatgaatttgaagaaaaaaaataaaaaaaacttagtacaattaaagtataaattttataaggtgctttcaaaagttcttgctaaccgtgtgacaagccttatagacctttgtaatatccgctcactccgaaagggtatttttgtaattttatttagctgagagtattttttttttatgttacatatttatggatttaaatatgtatgggattatttttatgatga

SEQ ID NO: 131080 - DNA, 592 bp, Cannabis sativa
tctgacatgaggaacaagactctccatgtattgatagataaagttttctatggacttgagtagctccacgggaggtgagtcaaccagagggagatgaacgagtttgattcggtgagctaaagaaagtgaggccacaagagaatcaatatatgcatcgagatgggacttcaaggaaaactcgcagaggactgtgatgaaaagtcgatgatcatagtggatcaagcgcttagcgaattcaagggttgaaaccaggtgtcctattgctggagctgggatgaacatcaattctactcttgccattgctgtttcttgatgatgagttatgttcttcttctccctctgccaaatttggcctaatattttattatgagccgtatatgcattgaattgaacgtgagcagagcacctcttattatccactcatatgtcctattttcaacacgtgctcaatataatattaaggccaattatgtaaaacctcataaaacactgggccccgtttggtacgcaggattggactggattggactgaaaaggattggactggactggataagattggattatgctgaaagtaatcctgtgtttggtt

SEQ ID NO: 131081 - DNA, 1031 bp, Cannabis sativa
cccccaaacttggaattggtgcacgcatcaagaccaagtttgtgacaaaacacagcaaaacgagaactagacacagctttagtgaacccatcagcaacttgatctaaggatgggacatgattaacacgaacaagttgctgggagatcttttctctaacaaagtacaaatctagttcaatatatgtttcgttcttgcatgaagaacagggttagtcgtgaggagaactgttctaaggttgtcacaccaaagtattggcgttcgagccaatttaacctgaagttctgtaagtaatgaatgtagccatgtaagctcagaaacggcttgagcaacacttcgatattctgcttcaccgtgacacggtttgctgcttcttgcactgccaagctatcaagtttggtccaaaaaagatagtgaaacctgatgttgatcatcaggatcactagcccaatcagcatcgctaaaggctgtgatatcatattctatgagtggtttaagatgcaggccatggaacacagtgccactcaagtatctcaatatgcgttttacagcattccaatgtgtggataaaggattggccttgaattggaaaactttatttacactgaaggatatttcagggcgagtgatggtgaggtattgaagagcaccaactatcgatcgatagagctgaggattagtctggttctccttcataggcagataacttgagagtgctgatcagtggtgtaggaacaggattagctccctccatttgagctttaaccaataaatctcttatatatttggcctgagacaagtgaagcccttcagatgtatgttgaacttcaattccaagaaaataatgcaactggccaagatttttaagtgaaaacttggaattcagatcacatatgagagtggagataagtgaagagtcactgccagtgatgattatatcatcaacatacacaagaatgagagtgacagaggaggatgtatgcttgatgaacaaactttgatctgactttgaggactgaaacccgagtgtgtc

SEQ ID NO: 131082 - DNA, 890 bp, Cannabis sativa
  modified_base (861)..(862): a, c, t, g, unknown or other
aaaaaagcatgtcttatttttaattgtcatttagaaattgcaatatcttatgtttaacactatattttatcaaaagataaaaaggaagaggaaaaaaacaatttagaggttatatatttatattagtataggtagcccacattatactaattgtcatgtgatagctatattttataaggtaatttttttttttaatttgttaatatattaccaaatttaatatttgactattaaaatgaatttatttgattgataaattaaattgttaatagattttgattatttcattcgagttattggtggtgaccccattggaggacttgaagatcatataagaaaacctatagttttattgaataaggtaaattactaaaactttaatcgtatttatttatttaagtccagaacataaatatatatgaagcttaagaagaaaatctacatgtatattcattatattacacattttctaattgagtatacttaaaatatcattcaaaatgatcctgaattaaacaaactatattgattgagtatgaaagtagttaagatgaccgccgtggttattaactatgctttcaatttaatgattaatattttttatcttttgttttacagttcaagttagacgctccttacagtaacgaggagatcaatgcagtacgtgatgagtgagtagaatttgtgaagcctttaattattaattgagtacaaggttaccactttattgtgatacatgggatataagtttaatgattatttctataaactcttttgtattatgtaattagtttacagttagtttttatgatacatggaatataagttttagaatcgattttattaacaattttggtattnngtgattagttaatagaatcgattactaa

SEQ ID NO: 131083 - DNA, 1004 bp, Cannabis sativa
  modified_base (294)..(296): a, c, t, g, unknown or other
tatttattgatttcttttgtttttttatcctaaaataatatttttatataataatacactatggggtgttgatctattcattctattttttgctcttatatggagttacccacctgtcgtagatttactatgaccaataagatttgagatctcggtatcaaccttttggcctaaaaaagtaatctgtcttgataaagttgtagtttttcgaagagtaatttgtaacataaatacttaagtttaacttgtgtttgtagataaatatttaagtttaatttttgatgataataatannnaaattatatttttaaaattttcgtaagtagttggctattaagtgtaagttaacggtcacgtgacattctttgattgcttttgttcattaaattttgattttttatttgaaattaatttaaatttactaagaaaataatacgtaaataataatttgatatttaacgattaggtacctatagaagttctaaaattataatttatgtattattattgttaaaagttaaatttagatatttatctgcaattgagagttaaagcttaaatatttataccacaaattattatttttcaattaattgtttatttataaatatagtaaatatgcaaagcaacataagatcattttggttatatattttcaaattagaagtgtatgttgtttaggacataaaatatatttggaggcttttttgtttcctttgttcatgtaaacattttgttatctttaaggaaataatgtcactgtcaacaaaaacaaatgtataaagataatatgttgatcatttgccaaattatagaatcaaattgaatatagaaagttgtaatgttttcttgtttagatggaccatgcatgggtatcattaaattattccttttaagaagttttttaagaaaaaacaaaggggaaatttgaattaatatgcttaaataattaaaaaattttattattataccaaatatttacactataaaaaaactatactttt

SEQ ID NO: 131084 - DNA, 535 bp, Cannabis sativa
tatttactttattatttattaagaaaaacaaaaacaatttaagatattgtttactaggctctctaatttatatatacgatttacactaatagctatataaaaccgaaacgagtactaggcactagtagtattttttaatatttctctttaactaatatcactaactaagcacaatatattacctctaaatagtactaaataccactaatacataatatcagtgatgtctaactgagcacccacactactaactccaataataatgataataattaataaaaaaaaaaacttacagtagtaactttcttataaatttgggcaggattagagcactcgctataagggtactcagaggtgagcatttcaagaacacacataccaaatgagtaaatatctactaactcatcataatcctcctcatacagttctggtgccataaattctggtgtacctataatataatttaatatttttcataattaataccaaaaaaacaacaaagtttatcatttaacaaaaatgacataaattttgt

SEQ ID NO: 131085 - DNA, 2009 bp, Cannabis sativa
ttacagaacatatttttgtttttcaaaaacaaaaaatttaaaaataaaaattttactttcattttgtaattaaaaaattagaaaataaaagtactaccaaataacacctaaaattttatcttagttttggaattataattttattttgaaatataaataaaaaaaattatagttatttatttaaatagatttatgtctttaatgttctctcataaaattatggaagtagtttttttattttttctttctgaaatatgtattaataaattttgacattcacattaatcgatagaatccctcctccccttagtaaaattcttcatttcactcttttattggtagactattatgataggtaaaaaaaaatacaaagttatgaaatttccattcaaataagctttgttttatgatcacgaaggattccaatctatatcagcctcttttcattagaattgagaccaaccattgaaagaattaacttggaaagtgttagattgaattttaagtcaacaacacggagttaatattataattataaaagtattgaatataaaattattgcaagcaaataaaccatatcaaaaatttatagaggttcgacttcaaaattagtaatggtctactttaatactcactatttataagattatagataaatgacattaattacaaaatattcattaaagactgattattttcttaatctcacgattctgggtactcataatgacctggtcttcagagattgttaaattaatttcgtggatttagaatgagtccattatactggttggatggtccgtcgagattgtcgcaatctgatattctttaagaagaatcagattaatcctcgctagtcggtaatgttaattagtcagtttattccaactgcttggatgcttgctcgacataaatcttggattgtccttgtttattcaacaattctaacatagtatattgtattaacatatatagtacgttgtatttctctgtttcccaaactatctgactaacttcgttcctcatatccagtaacataccgaccaattgttccttaccacgtgtcgttctttttcttgctatatcactcaagcgatcttttggataactagacaaaaaaattaattaaaatgaaaaaatagcaccaaataagtctaccttataatctataagcttccacttgaaaaataaaaagattaattacatagaattataaatgaataatttttttttcttgaacaatgaacttccattgagataataaaagtttaatgcatcatggacaagcaactaacttttacagttaattagttatgttagttgtcactgttttgtatctaactgtccaactaattcggctgtatttcttggttgtactctctcttagtttgttactcctctttgtactcactctctataaataaaggaagttcttttctattggcttaacctttacaagccttagagacttttatttcaattgctttcagatagtgcttagtattgataggttcatacatggtatcatgaccatatccatagtgcttaaaagttccacaaatcacaaaaaatcttgttagtgtctggaaactcaccaaagataatagtgttatcctaaaatttcactcaacttgctgttttgtgatggacaagaaaacagggagggtcttacttaaagaaagagtcaaaaatggactgtatctgctcactcaacccaccacaagaacactagtccagattcaatgcctactagccactaaggagtccaaatctctttctgttactgaatgtaataatgttagtaataaaatgactacaaatatagtcttcaacccttgtaccaattctaaaatcaataaagaatacaattctactagtactgatgtctcttttattgcttttactgttaacactactcaggttataaacatttggcattcaaagtgttggattatttattttaccaggatcttagatctactcagaagtatgttgtttaaacaccctaa

SEQ ID NO: 131086 - DNA, 788 bp, Cannabis sativa
agagagagagagagagagttttgggacctgaggattctaaaattttggtatacttggatcactgctgccggagatgtgaagccagcgctacacaagagaaggcagaaagagagtgcagtagggatagtttcagttggtaaaagttaggttttttaattttagttttttattttattttaaaaatatatttaaaatgggttggtttttaatggtcgattgacaacatctgggctagagtgggggtggctagggttggctgggaatgctagcagtcaggatgtggttggggtcggctgggtacgctaggcggtaaaaggaggtttagaacaagaagcaaaaatgaaaaaaaagaaaagaaaaataaaataaaattttttgttttgttttttattttattttaaaatttttaaataaattattatttgaaccattaaaaaattgacacgtggcattttatttgggcttaacagattagttagaaagagggaccaacgaacttactgaaaacgtgaccttgaggactattaccaaaaattttcgaagttggaaactaatctgcatcaaccctaatagcatctccaatcatgctctctaaacacattctctagctaaaatagggagtgagtcttaaaaaaatgcgctccaactatgaaaaaatggctctctgtaacagagaatggatatggagctctctaaatatagggagctccctacttttttactaaattttttttaatattattttaatccaaaacactattattttttaggattttttttatttttac

SEQ ID NO: 131087 - DNA, 1215 bp, Cannabis sativa
atcggaggagcatgtctgtgcaccaagaaccaggggaaaagagggggtccaccaggaaagaccccctggtcaacctacaacaaaggcttaatgccaaacacggagacctcaaggcacgtcttaaccaaaaaaagaaaattgcttcagcctcgaagagtatcctaaatgaaggcattctggttgaactcactatcctctagagagacatagcaagagtctttcagaggcataagggaaatgattcagaatctgattatgaggattgggagccctgtgccagaattgtactcaaagtagagctctcaaaaaaattcaaaatgcctataatgactttgtatacaagtgacacaaatccaagtgatcacttgtctcgattcaacagagtcatgacaatcttgagggtcaacaatgacgccaagtacttatgcttcccagtaactttagggggatccgtagaagaatggttcaaaaaattagaacttggatccgtggattgttggtataagctacaaaccgattttggaagacagttcattgcatccagaaagataaacctcgaagttagtgccctgactaacatgaagaaactactcttggagaccttgaagaacttcattacgaggttcaaagaggaagcttccaaaacatagaaagttgatgatggacaataattagccttgttacaaggtggtatctggacgggaactcccttctagaatgaactccaacaggaaggtgcaactagctttcaagatttttcagaaaagagctcagaaatacttcaatttggaagagacccaaataatgatttttggagggtattatcctactggaggctctcggtatgcttttggggtgcaatttctcgaagtgcttactgccaccctttaatctagtgggatgcccagtgtgcaattccaaacgccaccatgatattctcaaaatttccccgtagcaccatcccattctgattatgggttgccaaatagtggtcccgctctaagagcatgttcgcagtaccccgctcaatctgcttcacttgcggcaagtgtggctacaactccccaagcctcccagagcaaaaggttatctaatgaaagcacctggagtgagaacaagaagccaaagagggtgtccgaatacaacccccagtatactcagcatactgatttggtggacacttagtgtaatacccagaattaagaaaaggattag

SEQ ID NO: 131088 - DNA, 703 bp, Cannabis sativa
gttagttacaatatttaaatattttttatatttaaaaacttaatattatagataaatatataaaatcatctaaacaaatattaaaattaaaaataatattgttaattaacaaatattaaaagaaaaataaataaatggtccaacccaacaaactaaccctaaacaataagtcgaccaaacaacctaactcaccacattattagaagttgctacacatttttaccacagtaattaccgatctagaaatttctactacaaatgaagcctaaaatatttgttctagctagccacacatacaactataaatatacctcataaaggtttcatcgtgtaacaaagcttgtaaactaaaagtgtcctactacttccaaacatactacatactcttatatttgttcatatacgactattttttgaattatctcaatcaactaacaagtatcaaattattaacaatagactaattagaaattttgtccactgaacttttacacgtactaaatcatgcccttttaacttttaaagtcgttaaaaatgcctcctgaactattgagattgttggatttaagaaattttatctaatttcatttaattttagtttgtgtactatgtcatgctccctagactttgatatctaccaaattatgtccctctaactttgacatgtactaaatcatgtcccctgaactttcatcaatgttag

SEQ ID NO: 131089 - DNA, 804 bp, Cannabis sativa
attagtaggatcataatcccacttattacctgattaacttataatataaatataaactttaattatttacattaggcttatcgggatattacatctatagtatttgacagatattcaaaatcagagctcagatgctcactactcagaatagactaaaaagtgttatgttgacccagaacaacagattattgacttttaggttggagatatggtatttctttgtatttcacacatgaaaggagtaaaacactttggtgaaactaattcctaggtttattagaccttttaaaattctagagaggatagagcaaatgacgtacatgttggctatgcctccagcactagcagtgtacataatgcctttcatgttttaaatgctttgagaatatgtgtataaagagactcatcttgtagctatgaattacaaagctttgaaactttagtcaaagtgatgtacccaagtataagagctattattttgggggtgtaaggacccaatggagacttgaagcgaggacgttagaaatgatcagtggaaatacttgatagaagagagaagttctgaggaagaagacactggtattagtgagaatgttatgaaggtatagcaaggtcgaagaggcgacttgggaattaaagtttgatatgaggcagaactactttgtatggtttaagtaaatttcgggacaaaatttctataaggaggggagatcgctctaccactaagctactgaggaacaacaggaggttagatctcataaagttcaattcccgttctcaacacatgacccatatgagctcgaa

SEQ ID NO: 131090 - DNA, 571 bp, Cannabis sativa
agagaagaaagaaattgatggtggaatgaatctgggctcctactctgctctttctgccgcccttgactacttctaggtctgaaattctctgctctcctttccttactcccagcctatttttaatagattcagtcccagacttcaaagaatcgagaaaagaagaaattggcctcgaatggtatggagcctcgccgcgaccatgaaatgcctcgctgcggagagattcttgggactgaattcaatgctccctgtcaggttctcgccgcggcgactgggccagttaaaatcctccattctgtcacttttggtcgcggccacgaataaatttgctgcggagaagaacgcaccgattgctgatttttcgatctctcttcactcttatcacacttttgaagccccatactttcaaagctataggaaacctgcaaacacagaaaaataagcgtaatttcatcctaaaacatcacaaacaactcaaaaacgactttaattaacacccaaaaactaggcttaaattagcctaacaagagtatagagagaatttgaattcaatagagagagagagagagag

SEQ ID NO: 131091 - DNA, 553 bp, Cannabis sativa
tcagtctcagtctcagacagaccccttgccctttgccccaaaattattacttttcttaaatctaatatgaccccctcaaaacctcatttttctgtatcagaccctcaaaatttcagaaattctataaacatcctgatttttattttatttttcaatatgtatgtattttcttttctttctttctttttttttttttccttttttctaaaaaaaaaaaatgtgtaaataagtgcttctattttaaaaactatttattattgttattttgtgtttgatcatggtactggtacataataaataacaatggcacctaccctataatttaacattacataaacttaatattttaaactcaattttgatccttaaagacaaattcttcataaatttaaaatcggtttggtaatacttttttaatttattttttattttttaataaaaaataaaaatatttttcaaaaatatgttctataaagttgttctcactttttaattttctaatgatataactacataagacactatttttttgtaaaaaaattatatttttacg

SEQ ID NO: 131092 - DNA, 1313 bp, Cannabis sativa
aatttttggcgtgctaaacttttttgaatttcttttaattttacaggatatcttaaataactataatttacatgaccataagaaaaaatttgactaaaatatcatttcggatactataaaacagatagaaatgtatcagatgcacccattttaagggattccattataaaattttctataatattttttaggacatcatcataaatattaaattgtatccttaccaaacaaaaagtaagagagtgatgtcactaagcatattttgaactacgtcactaaattatcttcaacattttttctaatcactaagattttaggccaaaaataacaaaatattaaaagaaaccatacccccaattcacctatacaaaaaagctataatgaatcaactcaatttctatccacatgactaagatattttggccaacaataaataattatatttttttttgacactttctttacttcttttgtacagtaatttcaattcttgcaagcttttgcaaccaaaaagtttcattccgagagtgccaaagttggtacactagagctaccatagcaccaaagtgttaaaatattaaacttaatttaatatagttaatttctagaattttcttattgctaccaaagtttctagactattcttataattactaaagtgtctagagttttcttgtttgtttgagtacccttgaattttctagaattatctttcacttgtgttagtagagagaactatgtagaacaatgtagaagctagccaattaataatgtttcttagattagtccatagagtcctataaatagagatgtaatcctatcattttgtaccaagtcacaaatcacacaagttgagatataaaatatagattcttccattcaaatattttctctaaagttcttcttattttccaacaaagtggtactagagccaagtttgtgaagaaaaatggcaagtggaagaatgatccccttccaagttccaatgcccaccaagagcaactatgacaaatagagtattaagatgaaggcgctactaggagctcaagatgaatgggatattgttgagaaatgtcataaggagcaagacgatgttgctctttcccaagctcaacgagatgcgttaagggattcaagaaagagggacaagaaagctctctacctcatctatcaagcagtggatgaagatgcgttcgagaagatctcaaatgcaacgacggccaaggaagcgtgggagaagcttcaagcttgcaacaaaggagcggagcaagtgaaaaagatttgtcttcaagctcttagaggtgattttgaaa

SEQ ID NO: 131093 - DNA, 1019 bp, Cannabis sativa
tgaccttgaggactattgccgctacttttggaggttggggactaatctgcatcaacgtgaactttttggggactttcgccgtaaatttctctaaaaattaatatatattaatatatttttagtaatacaatatgaactataactatttcaatcctttatatatatataaacatatgtgtggacgccaatttttcgttaactaatagatgagcctaaattttataaatatatttcagaatgacaataataataatgataataaatactaaacaataaggtttttaagtaattttgaagttaattcttcatagttcacgagtccattttattatggataattaatgagtttacagagtacaataatattttatatattctcttcacattcagaatatttgtcgtgcattaatctgggaattttccccttatttaaaggtgtttaagggtcatcgttattctccactgatattatctttataaccgtttttgaaacatggacaatccttttgtttcataattacaacacatggatacaaaaaaaaaaaaaactactataactgcctttgtctttatccaaaagggttgtgctgactatggtttgttgtgacgtggtattacatctggctttataccgcacattacacattggtaaccgctttttgtacttatcttgaaggcaatttcttcaccaagatatcaaatctaacatacgctttgcattcttcagtaatgttgggaatggctaggcatgttggaagttattttatcaggatttagatttactaacatgtatgtttgattatattctataatctaacaccctaaacatgaatttcttaaaacaatgaattaaagacatataaagttgtagaaaaccttacattggtagtagcggaatattatggctcttttcgttcagatatctaacctttgttcatttctgtcacagagtaataacaagatctgaaccaggatctccttcaggtgttggaattcttcacaatcttccatactatgat

SEQ ID NO: 131094 - DNA, 503 bp, Cannabis sativa
atatattaccaattttaataactttgcatttaggggaaatttttttgggtaatgtaagtataggaattcaaatttcccttttgataatggggagctgctccctttgtgtatcctagtttctctttaatgaattctactttgtggaagaaaaaaaaaattaaataagctaatttcagctataagagcactcgtaataatatcttcaaacgagctcaaaatgtaaaatttaaagaatatgttctaaaataagactccatcaagtgagttaaaatattttaaaattttacattttgaataatatttttctacaagactatccggccctaacaaaaacataaaattcaacaagactattgggtcctatattgaacttatcaggccctcaattaaacataaaaaatttgagaaccatcatgcctttaaaaaattacatttaaaaaataattaaaaataaaataaatatacatatttatttggataatttacatgtatacacttacttt

SEQ ID NO: 131095 - DNA, 683 bp, Cannabis sativa
atgatgttactttatcctaatattggtaacaggttacctaatccaatttagaaagaagaaaaaaaaaaaaggacatgaaaaatggcatacaatgaaaaagaaattgaaaattgatcagtacgtataacttaaattactaatttactaattaccccttaagataatcaactaccttcttaggggtaatcagttacttatacccttccccatatttcttatttttaactcttattgaatttttttccacaaatatatatcctaaaatccataaaaatgaaaattcgcaattaattgaattgaaatttaccctttgttgtataagattttattagttcattaattatgtgattaactgatgttgttttgaaggttccaaatggtttggttagggaaataggagaagcactcaaaaaaaggcaacatttacattacaaaaagaagccctaattcagttgtgaaatcttacttgaatcaatttcaagataccgtgcacaaattaaaaaattgttttcatccaattactcgatattattacaaaatttatcaaaacaatgtcattttacaaagtggtcactttatattattacataacttgtaactaatatataacaatattgtgttattattttagggcatatataattgaagagaaaagtgttgatgatttcaacatgccagtgtat

SEQ ID NO: 131096 - DNA, 728 bp, Cannabis sativa
  modified_base (39)..(46): a, c, t, g, unknown or other
aaataatttcataattaatcatgattaactgctaatttnnnnnnnnaactaagcggtctttacagtacacatggacaactaacttggcacttaattgccaaagatagatgaaaatggctaaaagctaacagaacatggattttggaaattttgcagccaaaatttgagttttgagggttaattgctagcgaagtgaaagtattgggggttttatcgcaattaactatttttttttttattattttacctcgtacatattaagtttaattaggtgatgtttagtgcaatacatgtatgtttaatctatataatttttttattatttcaattcaatgttaaaccaataaagttaaaaatatttacaatatgttaagtattttaaatttaaatttaaatttatttgtataaaattatatacataatttttatttttaaatatatataacaatattataaacttaataaaaaatattttgttaagtaatagtatattctattaaagtcaacttagaaagtcacataatatattttgttaaagttaacttagaaagccaaaaacgaccattaaaccaaaacttttgttacatagccacattttatatagaatacatatattacattatactttaatctttttaggaattattacatggaaaatacaaattgacactttatttacaaaaatacttccataagtggacaacatttatactttttatgtactttta

SEQ ID NO: 131097 - DNA, 905 bp, Cannabis sativa
aaaataaaaacagtaaaaggaaaatatgaacgcaaaggatttttttatgtggttttgtagttaaaattctacgtagtccacgagtcaatcttattagatttctgatggtttttaagggccctttttcttaagattttttcgtccccctttttgatctagcttgcctctatttataatcacatagtaggcagttaatttcagggttgagtggtatttttacaacgattctcccctaaaatcatagggtctaattacatataacgtaaaataaatgcgattattatttgaatatcacacagttgtgattaatccgcttttacagggtcaaaataaacgtgtatcaaatacattgcaaaccgtatcatttaggatgtctcgctcggaatagagcagcgataatgagctggagcttgtcatatttctttccaaggttgataatacaaatttcaccgcttttattctggaaactcaacaccctatctgacaatcgcagctttaagtgacgaggtgatctttgacatgagcatgtcttcctatggcaaggtgaacgcctcgctatcagttgctctggttcacctgtttgttatacttagtttgtatactgtaaattatactctaagttttttcacgatcgttatatcctctccgcgtaatgagattagtgcctcgtcttgaatgcttgaagttacatggtttcttgttaatgcacaaggcgacagtttgtatatctttatctcgaagaagactattcagtcatccgagttataaacacactctgtcagttatgttttcaatgagttattcctcttcaaatgtaattataattacgtgtctaggttcatacttttcccagcttgacacgtgtcttcctctgatgtgctagccaaatttcaagtataacgatt

SEQ ID NO: 131098 - DNA, 852 bp, Cannabis sativa
ccaaaaaagttcagggagcacgatttactacatgtcaaagttcaggagaaaaaattatttcaaatttgctactttctatttactatttagcatctcaactttcaagctctaacatcacccttaattagtagtttcagttattatttattaaattaaaataagggaaattttatactgtaatccacaaataatgagataatatattattttaaatgtttgacatcttaaacgtagttcttctccattttaatggttgaacatgtgcttaatgtgtcttggtttgtactgcttgaatctgaatttcgagtttgaatgcatcaaaaagtcttgaacctgtgtcgaatagtactaatttttcttgattttagatctggagtttagtgcaatattctatattattataagtaataacggctaattggttagctcgttcttctggttcatgtcctgaccgtcttcccagtaaggggtttgtctctattggtttggaagctattttaatagttgatttgcattaataaaattacaatctttgtttcaaaaaaaaatattatgtacaatatatatagttaattatatttttaaattttattttagttgtagatatttttagttataaaattaatttttatagggatattggcggctaaaccaattgaattttacggtttgtaacagaaccacaaaaattgaacttttggcggcataactacctaaaccctgattccgttttgctctgcacacctccgtccaaaaatcacagctaagtgtcacggtagaatatccacgtgtatgtacacccttgtacacgtggaaaatttttagtggtccacgtaatattagttttaaaaa

SEQ ID NO: 131099 - DNA, 1230 bp, Cannabis sativa
  modified_base (1177)..(1184): a, c, t, g, unknown or other
aactcattattagtacttaatcaattattaatatatacttattatcttttcagcaattttcttgtcgtaatcagtgacaagtttcgttctcttggtccgagatttggtccaaacatggtggcatggggggtcttgaacctcatgggcctttttctgcattatattataaaaatcaagtgagtactattacattttgatgcactggaaattatatacgcaagtatacgcagtcacacaagtaataaagtggtaaataagatcgtctccacaaggattgccaacaaaatatgatgaaaaaccaactaattaacaacttaagatctctttgaaagaaaaataaaccaaaacagaatggatgattgacaaaagtataacaaattggtgacactgaaagtaaactcaaaataatttatccatagaaaaaggcatctatggaaaaatagacttgaatagctaaatcctcctatgttgaatctacccaatttttcagcaaagttgcacagagttaacaaaatttcttctatgtttatgagaattttccaaaactcataaattaagttttaccacttagttcaatataaacctatatcaaaccggattacacaacaacaattaatcatcaatttcagtaattaaatattcctattccatttactaagaaaaacttaaatctaggtattcactttcatcatacaagttgtaactactagatctagtctttccagaaccagatctagcttagtaaattattactcatggccaagtaataacaatcaataaaccataagcttacttgaatgaacaaaggcaaagttgctaaaacatgcgtaaaattaatcataccaaacataggggttcataggcattcaagcctcaagaggcttagttcatgttcaaaccaataaataaaatccaaaataaagtgtgttcatccatggttgctacctaattctttgcaatttaacaaatttaaagtatttaaataaaggagaaaaataaaagaaagagaagaaaaattcaaacaaatgaagcttatgtcctccttctttttcgagtggtttcctctttagttacttcctttttggtacttttttcttctgcatttaatttcttccaataatggtagcagctccttcttgatgatggtggtggctgtactgttggaaattattttacnnnnnnnntagatctactcacaagtatgttgattaaaaccctaaatatgaactt

SEQ ID NO: 131100 - DNA, 659 bp, Cannabis sativa
atatatatatatatttgggcaaaaaaaaaagaaacagaaagacaattttttgttgtgctcaaaatcttctatttcccaaactttgttctcaaaaatttgttctctgaatcgctcacttgttttccttcaaagaacacttttcaacagaaaataaataaattcaatttcaatgtcaaagagactgttagtcggagcattacagcagatgcagcagcagcagccacccttctactaacactagtgcccagtaaaaatctttccctcaaggccgcagcttctgtaagaccatctctagccctttcaagcccctctgttatatattgactgacctggaaaacagaacagggtaatgatagagttgaataaatatggcataccacacatatttagtgaacctattaattcaacaccaacttacttggtccagtagacaagtgaacactgctttaacattggttgcaagggtagcaggctgtacaagaacacacacaagatcattcaagttaagttgaacaaatatcttgaattcaaaacaaatccagaaaaatttagagccaatttttaaccaccaagaatgggtggcagaagtctcactagaaattcatctctccatggccaatattcaagattttactatgagctcatactaattccagatt

SEQ ID NO: 131101 - DNA, 698 bp, Cannabis sativa
ggaaaacaactataaaaagttacctaaaatgtaggctaaaaatagcctaacaattcttttaaataccagttagacccaaacatcatactgtcatcaactagctagccaaggcaaaaaatagagcaggatgttatgttataaagtgaagacggaggtggacgttgcttccatttaccggaatgacggcaaaatgatcgaagacatgtggttattgtatacgagaaacgaatttggctggtaagttgtggatgttttcgatgaagagggtggtagcgggttaagcggagaccatttttacggtgtaagctgtattatttttgtggtaattttattaattatatttattacttttatttcttttatggtaattgtgattatagcatatataaaatttggtgattctacaatgcacccctttaaaagggatgtactgatgcacccttaatttgtttcggctttgagaaaaaaaatttagtctaatttttttttttaatattcatgtacgccataactatttaagataacctacaaaattttgaaatattctgaataatttacaatatagaaaacaatgttcaagcagtctattttaaagttgggtgattctactaagggtgttcaataaaatttacaaaccgcccaacccgaataaaccacccaaaccaaaccgaataaactgacaaaaaatacaacccgaa

SEQ ID NO: 131102 - DNA, 758 bp, Cannabis sativa
aaaaaatataatctaaaaatgatactaactttaaaaatcagtttcatcaacattaaaaaaaaaaaaaaaaacaaaaaaacaaaaaaaaaacttataatttcatgaaaagaggcagaaaaaaaaatcaattccatcaacaacataataaaaaatacacaatacctaatgaccaaactttaaaacgatactaattttaaaatcaaatttcaaacatataaattttatgtcaatgccttataattaaatttctaacttaattctctatttcggttaattttttttattttggttaacttcattctcgaacatacaatatggagcaaaaataataaaaagaatcaaaaactagaacgagagagaaaataggaaacaaagaaaatttaagaaacaaaaatacaataaaaaccataaagaataacaaaacaaaaaaaatagaggagggagagaaatcatatataaaaaataataaaaatagaggtgtgttaatattatagagtctaataatcaaataataccccaagtaaacacaaaatccactaaaaatattagagtaaaaggaaacgatagaaaaataaaaattctaaaatgcaaaatacattaaaaaataaaagataaaatcaattaggctagaaacaaaaacaatgaaatatgagcttggatattaagtgcgtttggaaagccacaatgtaattggatttgtatgtaattggaggtaattacacaatttggcatgtttgtctgaccatgtaattacactg

SEQ ID NO: 131103 - DNA, 514 bp, Cannabis sativa
aatcgtggtaccatcccggtgttgcttttttttgttgtatttcagatgcttccctcgtcggcagtttatctaggatcctcattgggttctcatttgtaatacctcctataatcgactttttactccatcggccaattattttgttcccttcttccttctacttctgtcggtgcttacttattgtctttgtcgttaagcgcttccttttcttttttgtctgtaatgtccccttagggctcaatacttgggccacaccgggttgggccttccctcgcgttctttctaattttgcgctttcatgcattcaacctgtgtgggctttttgacgttttcattttaatttactgggccttttgctttcgcgctcgatttgtacctcccaaacacatgtctgccaacacatctgccattttctcttcgtcggttttaggaagttcaactgcgagatgagaaaaagtctccccgtggaaataccaggggttgtacgaaagttggatcccgctgagaaataaat

SEQ ID NO: 131104 - DNA, 750 bp, Cannabis sativa
ctaaaccctcagtcgaggtgccaatagtggattttccctgggtggcagaggctgatcattgggatcaggcgggttgttagaatcgacctaaccaattgtgttggtcaagtttttttatgactgctgggttggtagggttggccacatccgttggattcgtggagatttcagcggtggctggaacatgaacgtcagaattaacagtcatgggatcttaaggaagactcgatgaggcaggagttgtagctagagttcttcttgttatagccatggtgatagaaatgatcaatcgacaacgctctcaatgaatgcaccaaattattgacttcagatttggccaaccgacagtggactagtcgtatttatgactgatatcaccacatgtatacaataagaacaagttaataaaaagggacacaatattttataaaagttcgacccccttagatagtaggtaatgacctgctccctttttagttgtatataccattcagatcacatgtgttgtggattctaaaatggctctcttaagattacaaatagtaagaatcaagaagaaaatcttaagtaggtgagatgagggacactttggtctcttctacactactaggggcatgtggaagagagagagagagctagggcttagagcttcagagcatagagagcttggaacttaagacttcagacttagagagattaggtttagtttagtgctctttatataggagagcttacaagagatgataggtt

SEQ ID NO: 131105 - DNA, 2229 bp, Cannabis sativa
aaaaccgtttataattttttttttttttaaaaaaaaaaaagtggagatcaattgtcttagatataaataaaaataagaccggatctataatataatgaataaaaacaaataacacgaaataactcgaaccggttatgaaatataaccggttctgtaacataatgaataaaaataaataatacaaaataactcaaactagttataattaaaataaaaccggttctagctataacaatgttataatgaataaaaataaataacacgaaataactcaaattggttataatttaaacaaaacattttacataatgaatacaaacaaataacacgtaataactcaaatcgagtataattaaaaaacaaagagcctttcatctttcaagctcccaaccttacagcctttattaacgatgtcaagactatctgaaatctcgaattcttccatctggtgaaaatactttagcgcttcatcaacatttccatgttctacaaatcagatcatactgtattgatcaaagcaaggttacaaaagactaaaaatagaaaattttcttcatcaaatattacaaaagacccatctttcaattcaagaaaaatcaacataattcagctcgaaacccaaaaattcaacatacccaactgaaaataaggtattcaaaatctataaacccaatacagatattaatagcctccaccaagctgtacaagagtaaaaaaaaaaaagaacacaaataaagcactgatcaatcagatatactttcacacttaaacgtaaaaagttgactagacagactttaaccgcagagcgactggggaggatcactgaactaacaattgcatactcaatttaaatataaaaactcaaaataatgtcattgttttagctctgcaataagaattagtgacttttaacttgccgtaaatattggaattccagaattaacaggtcctcttgatgatatgagataagagaatgaaaaatgatcttaaagcatttacagtaaagatgcatatcttacagtaagtatagaagctggaacagcgaggattgtgagaggaatgtatgcggtcgccctgcaatatttagaaaagtgaggaagcaagaaattctggcatttagctagatgccccaataagaaatcaaacccaaaaacttggccgctgttgcatttgtcaggcttattagaggtcaatggaagccctagtatgaagaaaacttacaagtaagctttaggctgttctgttatggagttttacaagtaagcttgtttggttcccgagaaaattgatggaaaatgattaattgtgatgatgcagagacctatagttgtttaaaacataatcatccatagagcatcaatggcttcttttaaaattccaggaccttcctccatctccagcgactcataatcagaccaccaccgcctcttccttccgttgtagcatccttcctcgtaatcttctccttcttcatcttcgtcttcatattcatctcttttgcctctaaaatcaaaaccaaatctttgagagcgtttggtctcggcattggaatcccatcgacagtagtgggtccggcatgaacggcgatagtggtagtaagaaacccaaggaagagctgctgattgctttgatataggggatttgtttgaaccattaacttcgttcaacacctcgatcgccggacttttatgtgtgaaaatgaaaaattaaaagctgaaaatttacaaagaaaaactaaaatatgggaattataaaatatattacaaaaatgtggcagaaataaaaccacaaaaatgtaaacattattaaaattacataagccgaatgcattaaaaaaatatgccataaaaaattaaagacttaaaattttcccataatttatgtaatttctacttataaaaattatatgaaattatgcatgcataactaaaaatatgtttaggtctttctcgattttcattatactagattaaagtacgtaatagagttgtatacttaattttttttagataatacattataattttaatggttctaatatatatgttattatatatttaattaaattaaatagttaaaataaaatataaaaaaaaatatgccatacaaaatttatatatataaagagtaatttgcggcataaatacttaagttttatgccgagtagtagatgttgtcgagtgaatttcgcaacaccaaaaagtattatttaattgatataaaagagaa

SEQ ID NO: 131106 - DNA, 2917 bp, Cannabis sativa
ttagcaagagtgtgtgttatcaccagtttgtactaaaagaatagtggttcaatgctacaacaactaaaaatttattaaattttgtagtaactacattaaggtaaaattaaagtcgaaagctattttagctaatgcacctagttaaaacttctataatagcgtatatttagttaatcaaagtaggaaaatattatatttttgatagaatatttttgattgattaactatatgtcacaaaagttataaatttgttattaaagagataacatttaatgtaggggggattgttatattactcatgaataatataatatataaattaaatatatgtaataaataaattatatgtaacatatgacaatatatactagttgttatcattttgtagcatgtggggagttagttgttgctattagtaacctccacacaggaccgatcttgaaatatagtgagtcataggaaaaaaaaataattttgagaccttattaagaaaaaaaaaatgtggtatttttcaaaattagtaaaaaaaatatataattttaaaagaggaaaaaaaattgggcctgtggactaggtgggccctacgcacaggtctagcccacctatgccagggccgggcttccctccataattatcactaatattaaaagtgtaaaaggtgttacacatcatagtttggaattcttaaaagttataggagttacagttgttggagaatgaattttatacttatttattgaatctataacctccatgggaggttatgagttagaattttaaatagtgatatcataaacattatataaagaggtctaagatgtttatattgagaagattgagttttcaatcaaaaatacattttgttggaaaatcctaaagcttgataattcctaaagttttttcctagggagttcccttagtgcttaaagatagagaaaataagattttagacaaaggtgataatacattattcaagtcatggtgatcctccctaatttacactcaaggttgtgagtgagtgtatatatattcttttcttgtaatatatatgtagtatataatacattttgttcatattcttcttcaatctttcttatatatatgtgtgtacatggtgtattgttgttgtaacatttttttaaatcaatctaatccttgtattatatttcaatagtgttgtaatatttgaattttcttccattataataaaatctctaacatcttcatcaaagatccactgtcgtccccaatcaaagatcctcctccgatctttcagcggcatgtgaatcgattcccatggtgagccaccataaacaccaaaaatagtctctccaacacgcatacaaccttgtacgccaatgtaaagaccacctaagttttatatgttagattattaaataattaggcttaatttatgagatttaattattaattatgatttgtatgtttgtggaaaattatttaattttaacatgtattaattatgctatatatgtgcattactcgttttctgtggttataatcggtagctgtggaaagcgacgttgggccattagagattcacgcttttatttggtttagaatgtttataatagtgggacatcattgttagacgttgggaatatggggatttttaaatgaccaaattacccttttatgttattagtttttgtccttttgtgaagggcaaaattggtactttgttagaaactcttctttttgtcccttgtgaatattagtggctgaataatgggatagaatttaattaaaaataaaagggtttatttcacttaggttggaaggaaagaatttagaaaaaaggaacatctttctctctcttcacaactctctttctctctttcgatccttcaaggcaacagttagggttggaattgtttgagtgatatcaaggatttctggtggaatttgtgttgtgtgattcaaggtatctctccctagcctttctttcctttattttccttaagcctaagctaggtttaatgtgggaacttgggttttatgttgttgtatgaattaaggtagcttgttttggtattctagtgttagattaggtttatttaacttgctttgagctgggttggttgttagttatggtgtttggttgagattggagttttggagctcaagctttgagctccaatggtgattttgtttttcggacagtttctagtgttttattacttgaatttggttcattatattatatacagttattctggagattattggaaagtttggggttgatttgtatttaggggtcgatttttgggtttccttgcactaaaccgattaaccggttttgtatgacttgagaaactggtaaaccagttttgtccctcaggaaacccaatgaaccggttaattggttggggtttttctaagaaccctagttttccccaaattgttgattttttagggtatggtcatgtctttcatcgatagggttattcatggtttgattttaaagtccttgagaattgttttaacgtgtctctcattggaatttggaatattgtggtataggtccctgtaatacgtcgagctactattccactcaggctgaccggtacacttgagcacggaagcaaggtaagattagcatagaacatattatatatccatgttgtgtttgtgattgcttatgttttgggtgatatcatagagccacaaccattgtgtcgattcgacagtacatgcatcatactggctaagagtgatattcgccccagagactattaattggcgctatcatagtggcacaaccattgtgtcctggttaagagtgatatcatggccaattctactcttgggtgctattgatgctatcatagtggtacaaacatagtggcagtcccgcagtacaatcatagtactggtagtggatgatatcatggtc

SEQ ID NO: 131107 - DNA, 1208 bp, Cannabis sativa
gtcccgttccttagtcctggtctggttttagttcaggttctagttttgggtcctaggtcctggtttgggtccggtcttggtctgggtactaagtctaaagtctgggtccgggttcgggtcttagttcgagtccagatccagacaccaactatgggtcctgtccatccctcacgtcccagatcccgggtccaaatccttatcccagtttggatcctgactctaagctgcgtcctaggtccgggtccggtttcagtcttgggtctcgagttccaatcctagttctcaggcttagtattcaatcccagttttggggctcagttcccgggtctgggtgcaccatccaagttaaggtcctatgtcctagtctaggtctagtttgggtttgggttcacgttttgggtcctagtttgcatctaggtctgggttcgggttagggttcaagtcttggtttgggtctgggtctgggttcaggtccgggtcctggtttgggtctcgttcttgatcctgagtctcgggtttagatcttgagtctcgtaacctaatctgagtttgggttcgggtcctgatccaggtccaggtccaagtatgaatttgggtcccagtctaggttcgagtcccaagtcttggtctaggtccaggtctgggttctagtctgggtttgcatttgggtttgggtccgggttcttgtcctgatcctggtctgattccacttccaattcaaattctaagtacgggtctcagtctcgggtttcgatcccagtcaaggtttgggtcccggtccctattcgtgtccgtgaccgagtctcatttatgttcgaattttgagtctagaaccgagtttcgatttggattgagggtttaggatttagggtataggatttagggttcaagaccctaaaccctaaaccctgaatcctaaaccctgaaccctaaaccttaaaccctaaaccctaaatcgtaaaccctaaaccctatacccgaaatcctaaaccctaatccctaaaccctaaaccctaagccctaaaccctaaacctaaaccataaacccaaaaccctaatgcctaaaccctaaatcctaaaccctaaacctgttatcccaatatttacgctctgacgtggcatcacatgatggtgacacgtggaatcaacttcgagtatctgctcggagaatatagaccgaacaagatgcctcatatgcatgcctgaag

SEQ ID NO: 131108 - DNA, 1408 bp, Cannabis sativa
tgtacaatttaaaaatatgaagtataaattaagtattattgataatacaaggtatcaaatatatttttcatgaaaacggaaaatactagatgagtatatttactttttttttttcaatattaatagaaaaagtttattgtttttttgaaaagttttttaagtaaataaaatataaattattacaaatgaggatcatttgtaattattattatactatattattattacgcgtatattgcacgcatatttttagtttttatttttgttatgtgtatttttgaaattttataaattaaaggaaactaattaattttttaattttgtttttttaaaaatatttaagttttaaaaatttgaggaaaataaatataaaatttaagaatattaaaattgaatatactcctaatattaaaaataacagtaaaaaataataatattacaaatgatatattaatttaaaattagtataaggataattaacctaaaacaaataatatttaaatttatatatttaaattaattgaaataaataatattaatatttatatatatttaaaaaattaaccctactaattacaccattaaagagaatatttttatattcttaaaatattccgttaaatcaacaaaaatcgttagataaacacattttatatataaaaaatatataaaaaagttattaaacattttataactattataaacaaaaaaaaattaattttgacgttttgattttttttattgttctcgagcagttaataaaatagtacatattttagctaaatatattgtaaacatatcaatttcaatatgatgacagacctataacaaaatttgaaacgaaacattttttttataaaaattaaaaataaatattaattaaattttaatacagtatcaatttatcaattttaattattttatctttacgtagtaaataattttttgtaacgtaactcgataaaataatatttaattattaaaaatatttctattgaagtgctatatattttagtacttttgaaagaaaaaaaataatgtgttaaaattatatatattttaatatatatataaattttaaaaaatacagaataaatgtatattttatttattattaatggtaccattaaaaaggcaggttaatattttcaaaataaaagaactttaatacaatttttttttgggacggttaatacaaatattagtattgtttccttacaaaaaaaattatttatttattaaatatttagtttatttattattatctttataaatagctaaacaataattgagggagagatcaaacccttaaccttatcatcttaaccttatcatcaagagaacagtccacataccctttgtgctatatatatttttcaggctaattagtaattttttcccccgaact

SEQ ID NO: 131109 - DNA, 1033 bp, Cannabis sativa
aatacaccaacctgcataatcagtcggccaccctttatatcccatccaattgaaaaccaaatcaagaaccctgctccacaacacacaagagaagaaaatatgctcatgggttattgatttttagcaaaatggaaatttttggcaagaaagaggcttattttctggtttcttctccctcatacccaaaccctctctctctttctctaacccatttcaaaatttaaaaattgcttggatttggcttggattggagctttgtaattgtggaattttgagcttgcctttggattgaatttgcggtggctttttatggctttaatctttgtaaatcttgctgagttttattgttgaaaagcatgatatgggttgtgtttatgttctggagatgcatgttgatgtttgttgggttgttcttgttgttttgagcaagctttgtgcttgaatcttttgagtttgttttgggttaggtttggacagaattttaaggattatacttttatttttattctgttattgagctctaaaaattagttgtttgaagcatgaattcttgacttgattgtgtaagaatttaagaaaggattatgtggaattttgctctttgtcggagctcaatctttatgttaattaatctgagttttgagagttttattgatggatttgatgcatgaaatttaactctctaatatttattggcaactcttctatgtgattatagagtttgattaagctttgagttgaattggttgggttttgggggctgaatttcgaaatttgcttgctggttttctggatttgaatcccaggtaccgcggcatgacttttgcatgccgtggcccgcccctatgaaggaaacctgtgagttggccccaggtgtcgcggcatagcttttgcatgccgcggctcgccctcgtgtttttgggcagattcgaatgcaaactttgatgaaagtacatattcgaactctgttttgggagttctatataccgttggaaagctcattttgagctctatgtgattatatgtattttaa

SEQ ID NO: 131110 - DNA, 1687 bp, Cannabis sativa
tgtataataaatgggagtctaaaactccgttggagctttaaataaatttgcttcgtgtcttaaatttcctaacggtcttgaagtcccacgtgtcgggcttagtggtggtcttttgttgctctggacacatgatgtggatgtaaccttactttcttataatataagttactttcactgttatattaaatttcctaattttattgcttttacttttactgctttttatggtgcgccaaaccctcaaaataagccgcactcatggcaattaattgatcgtctttgaactaactctcgattacaaccttggctcatcatgggtgattttaatgattacctttccctttctgacaaagtcgggggtgacatgtctcgtagtccatctactcaatttcaatccttcgttgatacccatgagcttcatcctatttatcctttgggtagtcccttcacttggactaaccgacaaaaatagccgtctcacacctaagagagacttgactggtgcctttctaatactgtttgggatgcaaattttcctaatcctcgtctttgtcatggagattttttttggctctgatcataagccattaatcctcactttgcataaccccgcagatcaaactaagctttccccaagattcatctttgataagctttggatgtccgagcctggttttgaggattgcctctgtgaatcttggacgttgaataaccagatcatcatactccattgcttggattcacagaaaaattgcataattgcttgtcccgtcttactcattggaagcaatctttaggacctcctcttgctactaaaattcgtgaaattcaatctcaactcaaacttgttcaatctctccctcggcccactaatgatcaattagaccagggaaggactcttgaaagagaattaaacagtttgttacagaaaaaggaagcatactggaaacaacggtcccgtgtcacatggcttcgactcggagataaaaatactcgatatttccatcgtatcgcttccatgaggcgtcaaactaacaaaattcattctctccaacactctgatggttccacggcaaatgatacaacctctattttgacaaccattgagcattattttcccacctgtttcaaagccaatcacccgatgacgatatcatcgattctgtactatcaggcattacagagtgtcttaccgaggcagaagttgagcttctccgggctaccttttctgctactgaaatcaagaaagctgcattccaacttgcaaatgacaaagcactggggctagatggtttcagtggttgtttctttcaaaataattggcatttgctggggaaagatatcattactgccgcccaaagctttctgaatggagatgcagacttagcgggtatcaacaagacgttaattgttcttatccctaaaaaaccaaaccctgagcagataacggactaccgtcctattagcctctgatccactttctacaaaatcatatctagggttctggttaaccgtctcaaaccaattcttagtcgcataatctcccctaaccaaagtgctttccttccaaactgtttaatctctgataacattatcattggtcaggaggtcatgcattccctatcccatcgtcaatcggggcgcctgggatggatggcactgaagcttgatatggccaaggcttttg

SEQ ID NO: 131111 - DNA, 880 bp, Cannabis sativa
tacttctttgtgtatgattttatgttgtttgtgtgttgtctttgttaagtcattgtgtgtcatttgtttatgtgtttacttgtgagttgtgtaaaattaattattagaatgacttatattgtacttgttcatacatcttagttgcactaaatatgtatcgtgcctaaccattgagtttatttgcctctaggcatgtttcggttgacttggtagctcaatgtgccagcaagtcagtgtcgcacgtcttatctacttgggagtgcccaaatagctagttcgtgagacctaacactactttaaggtagcgttttacaaattgttagcgatatgaattacaaacctctcacacattaaaagttttgagaagtaatttttttctagttcttagatttattaatttttctaattaataagtcttttccttaaattattgtatttgtggattttatttgtaagaattcactttgaattatagtaatagtaattgtaatttgtatgtatcttttttttctttttctttttttttttttttaacattccatttatttttatcattaagttggtacgcctaaaaaatttcaaattgtacaatattaacatcacatcagtattaagtaatacattaacaacattaacaagcagtttaaaaataataatcatcagaatgcaacaaaagaaatacatttgcagtgattgatataattccaaagaaatttttataacataacaaagttcaaaagtcaagaatccatgaaattataataaagatcttatttctccttgataataatttattgtgaaatcaagttattatgtataattatttatattaaatacttgtcaaaaagtggttttgaacttaggtggcgtttggttagag

SEQ ID NO: 131112 - DNA, 860 bp, Cannabis sativa
aattatgttgtaactgaagttgttgtaactgtctattctttgatcttgatcttggatttatgttataagttgtagttgtaagtagtgggtaaagttgtaattttggaacccaatcaatagtattttgatgcttaggctatataaaggaaactattccaacaatatttttataccttagaaaagtgggagtctagctaacatatagtgataacctaaatcagaccctgtaaacttcaacaaatctagcagcaaaatagatttgctaatttacttcgtttattattattttcagcattacaactaactcataggtcaatctttaatgttatcttactagaaacgagaataactttcccttcctaattctttagaataaacaatgaagagtcttgacagcctgcaatgcacaaagtgatcaaaacgatgagtcacatttgcttaagttaattaagaaaggtaaactaatattacttacgagaacactaaaataaaaagttaaatgaaattacacaatcttctggtaataagaaaagacaaatgattactgttcagtatgaaagaaaggggagacaatattcaaattcatacaataacctaaaaagggattacttcatggcgatggaagaacaagctagttggaccggcattaggaagcaaagctaagctcactacgctttgagaagcttcttcaactgtcagcaccccagaattgcaatttatgtctgtcttgacataaccaggacatatacaattgacgcagaagttgggatactttttggccactattcttgtgtaagcattcaaacaagctttcgagactacgtacgaagaaaaacaagttggccaacctttgctctcta

SEQ ID NO: 131113 - DNA, 706 bp, Cannabis sativa
aaaaacccatttaaactccaaattgacacataccctttgatagtgcacggaccaccgcaacccacccttgcctctatttgaatcgccattattgttgttgccgccgatgtcagccacaccaacaccagatctcgctaccaatgcaaaagagcaaacagagacccatctcacacaacttagaaagtctcgtgcctaacagattctttacagaccgaaaaagatgaaatggtttagtttatttgttcatgattgatctgggttgtagaagaagaaaagataaaggaagaaaaagagcggtgggttggtgaatgtgggttaaagatagggtttgattatttaggtttaattcatttactttttaatcttttattttattaattaatgttttttttatctgtttgaaaagttatgttttttttgaatgaaagcaatctttattagacagaaacatccgctaatacaatggactgaagaccaaggggaacatcgctctcagtaaaaagacgacctgaccaataacaagcaccatgtaccatacagtgcgcggctttgttagcagaccgtttaacatgaccaatagaaacattacttaaagaagataaaataaattgtcaatactgaacaaataaaccaaaaatagaaggcatagagaccgaactaagaatagcttgaacaactaaaatgcaatccgtctctaaaatgacat

SEQ ID NO: 131114 - DNA, 748 bp, Cannabis sativa
atataattatatatatatttatatgtgcaagtccgacaaaataaaaataacgtggttggactaagtatagatgtattaaatattatttcttgtcattgttgttaaaattaaaaagaatataattaaagtgttatcttatattttgtccttttgttgcattaactagaaatgttcaacattaattattatgatcatctcaaaataataataataataataataataataatgtgttcaatattgtttggggtcatgtgtcggactactagtgatatatgtgaatagtgtgaaataaagacctctaaaattaattaattaattattattggtataattaagtagtgagttttatataataattttttataaaatattgctactagacacctctatatgatgctaggcaccactagactatgctcattttaatgtccttgtaggtaatgctatatatatggattaagctttttgacacggtacgaaaccaacacgagcacgatccgacatgaaaaactatatgcttaggcacgacacgaaaaaaaaaatatagacttaaacacgatgcgatacgataagccttaaaacataacatataagtatgaataaattaatttgaaagcatgacacgttaaaaagttcaataatttgataaataataataataataaacttatttatcaattaaaatgatataaataattaaattatgtaacgtccccgcttcaagcctccattgggtccttacacc

SEQ ID NO: 131115 - DNA, 763 bp, Cannabis sativa
caacttatataattagtagttgacgtgatacttgaaaccacaatctcctcattccatagaagcattaaacccccacccctacctactctagacacttcatgaacattatcgaaacccaattacctctttattttataactcttaccttccaccaaccttgtttccattaagaagataacatttggcttgtattcttttagaagtaactttaaatgttgaattgcctcttctccatttaaacctcgaacattccaacttacgattgacatttcttctttaagtgtattgaaagacttacttcataaactcagcgtgcttttattttaataattctccttcagactctacatgtgttataatatattatcattacataataaaacaataccatctacaatccaatatcatgaaaacttttaaactgagatactccatttaaatttcttctcaaataaatcacctttaatatcagatattaggtggtcaacacaacatttccacaccaactcttatactaaattccttcaatcactcctaatacaaccactcaatttcgattgagttaaaatcaattgatttttcacaaacatcattaataataaaaatcgtgattgatataaaatgtattaaaattagattacctttattggtaccctttatattaggggtgttcgcagtacgggtggtgcggtttttgaccatttttcaaaccaacccgcacatgcggtttttccaatttcccaaatcgcacccgcaccgcgaa

SEQ ID NO: 131116 - DNA, 623 bp, Cannabis sativa
gtaatgggttttatttagggcacaaaacccaacacttccaaggagacttgatgtttatcactatgaaggtattcttagtggtgttctctcacggggttgtttaaactattagtggtaatctaatttcaccaaaaagagcgatgttggctctactaaaaccatacattagttgcttgcatggccctagattcttacagggacaaacctattctttctagggtgtgtttggataggatattctatgatgatttatcattaatcatcacattttccatcatcgtgttggtgactcaaagcttgctaatgagtgggtcgttcgttcattgatcaaagatgcgatcagtgcctaccgcagttaagaaccagacatactgcctgttatcgtaaggaactaaatagataggtggaatgttaaaataatggctcagaggttgccttagtcttgatttttttgcccccaccattgatgttatttgtcaaatttaccagcgagatagaccactgtcgaggtatagtgggttatgaattttgcacttgatgttcaagcatcaattcactttatcatcataagtgagatgaattattgtagaagagtagttcagaaaaacctgccaactcttttg

SEQ ID NO: 131117 - DNA, 1263 bp, Cannabis sativa
tgctcctgaccaagtgccggtaatcctagtcacaaattccaagatttacacatatagggttaatccctaattccacatttataaaatatatatacatggaattcaaaatacagataatctcatagagctcaaaacgagctttccaacgatatatagaactcccaaaacggagtttggatcacaaagttatgagtattcgaagtttttcggaatctgcccagaaataagggggcaggccgcggcactccccacatggggctgcggcacctggaaccaaaatcctaggtcacacacagaggcgggtcgcggcgcccataaagctgggccgcagcccctgggttcaaaactcagaaactcaaaaaccagcaacgatttttatgcacaaatctcacccaattcaacccaaactttaaccaaaacctaaaaccattccccaaaatataacttatcaatacaaagggtttaaaacataaatccatgcattaaaattccataatataactctcaaagttcagcttaaacatcacctaagctaagctccaaacaagagcaggattcaccaagaatctaacatcaagagctcaaattttttatcaataattcacagcttcaaacaatagcaaaatcacaattgtaaactcaactagaaacacaatagaaatccacaaatcacttcaagaatactagataagcatcctacaccaaattcctaattcaaacaagcatgagaaattaagattaaaccaataataacatccatgcattcaagaacacataaagcttaaaatcaccataaccatcttcaatttcagcaataataactaagattaaacctgtaaaaagatacctcaaattcaatctaaagccaagctcaaagatcctcaaataccaagcttcaatccaagcaaattctcaagcaatttttcaatttaggactaggttagagagagagagagagagagagagagggtttgggtttgaggggcaagaaactagaaaatacaatcctattttctttaaaattcttttcttttattgaagataatacaaaggtcaaaatgactaatttgcccctatggccaaaaagcatacacataaacacttaagggcattaaggtcattccatacacaaataaacttagataattttctgattcatcacacataattaaaatgccaataatttatccctgagttgtattttggcccgaactcagttcggcccgaaatacccggttgtgactataccacgccaacctgtca

SEQ ID NO: 131118 - DNA, 559 bp, Cannabis sativa
  modified_base (44)..(51): a, c, t, g, unknown or other
ttagagaattcatatttatgatgttaattcaacatacttgttannnnnnnnagatcctggtaaaatatttccaacataaccatctctgcaaaaaaaatgacaaagcaaaattagttaaatcagcagtagaattgactgggcacataaatatcaagataaaagaccccacatcaactactatctaaaatgttatttggggaagaatcatctcgagtaactataaactccctagagccaatgatttcacggatgtctaaggtattaattgggaatagatcccaaactaattttcgatagccatttgagctgtattggtatgaaataccataatacgagctgttactagtgacctcgacatgaaattagggatacaacctatcaaacatatggccaatgagatctatgtagttccaagtataaaagttatattggttgtcacaaaatttgacgagacatgtgttgggttttatgccctaaataaaactccatttaattgtaatccattttattcaatatcaataaagaaacagaagtatttttttcattcatttgtatgttt

SEQ ID NO: 131119 - DNA, 524 bp, Cannabis sativa
ttacaaattgtttaataaattttttaaaaacaaaaaaattacttttattttaggattaaaaaaattaaaaaataaaagtgttaccaaacgatacttattttttaaaattattattattattagtatttttttttttgttaaaataatttgattttaaaaaattataatattcatatttcatacttaaaaactttattgtctaaattaatattaaaaatttaaaataaggcaaataataattgaataaaatccaagctttaaataaaattcatttaaatattacaaatagttaattatgtaatatattgaacaatatataggcaaggttatattccaaaattattagcttaattatttaatattgaataatgatattgacacactcaaatacaatcaattggttactgatgtggttatcctaatagtacttgatttttctatatttttaactttttattggatttttcccattatcttttttttttttttttttgtaaaatagccatgtttttgtttataatttg

SEQ ID NO: 131120 - DNA, 595 bp, Cannabis sativa
tgatcggcctaaggcatgggccaagtggttgtcttgggcagagtactggtacaatactactttccactcctccttgggttgtactccattcaaggtgttgtatgggcgtgacccgccagccttaatctggtattcagagggatccacttcggtcttggccctagagcagtatctggaagagcgagatgggttcctggatgacctcaaaatgcacttgttgcgtgctcaacacaagatgaaggcagcagctgattattctcgtcgacatgtggaatttgcggtgggcgatcgagtctttctgaagctacgtccttaccgacagaagtccttagcccttcgcaagaatgagaagctcgctgtccgtttctatgggccctttactgttctgaaaaggattggcgcagtagcttatcatttggacctcccttcatcctccgcggttcaccccgtcttccatgtgtcccaactccgggcggcggttggtacgactcactcgtctcctaccattcctcctacattgactgctgatttggagttgttggtcgaacctgctgaacttttgaatgtgcgtcaaaggcctacacctacaggagct

SEQ ID NO: 131121 - DNA, 1421 bp, Cannabis sativa
aatgaacactttaaacagaataatgcaatatgttctatatcaggtatttttgttagctgacctggaatttttttccatctggttaaatatatcctgtaggatgataagcatacctgctctgctgtgattactgattagttactaaatcgaagatttggttgaagctcattctggtgatgcatgtagtacatactatgtttgaaatttttctttatttatgtgggaaaattacgaaaaatagtgtagaattaagaatgtcgaaactttaaacaatcaaaagattagcaatgacaagattatcaaatcaaaaataacaattggatgaaaagaagggcgaacaaagtaatggaaactagaaaacagtaaaggcaaaaattaaaaaaaattaggttaattaggatttttatcccctaaactttaacatgtaccaaatcatgttttctaaatttttgtggccgttaaaaatttcccgtgaactattgagattgttagatttagggacttttgtttaatttcattcaattttattatttcagtgattctttatgtactaaatcatgcttcccagactttgatatttactaaatcatacccctcgaactttaacatatactaaattatgtccttgaactttctttcatgttagacttttttttactaaaattagataaaagcctttatattctacaatcacaatagttcatggggcatttttaacgactttaaaagttcgggagcatgatttggtacatgtcaaagtttagggggtaaaaatcctaattagccaagaaattaacaccaagatatatcctagtttaagtcctatagattgatgtgatttatggctctactccagttctggaataccactgagatccttctttattgattaaacaataataggtacaatacagtcaagatgagattctttgttgagtcttcactaagtgtttcaactctcactcttacacacaagaatcttgttcatctaaaaaagattcttcttacgaaaccccaaacccaatctctctcttttctctgcacctctctatctctctcaacctctcaatcgtttctctctcaaactctcaatctcatctgaattgagttctaaatctcatctcttgaaataacaagtcaaggtggcatttataggcttaggatcaagatcttaaagtcggtggctggaagaaacgaggttgttaagttagttaggaattactaacttaaccaactcctctttgagcgaagtctccacgttagcctaagtattagagccttcaggaacatatacgagcttcaagactcacgaatcaaggacactcagtgatgatgcttctggataggaatgcgcctgctagagtcgactatccggaactaccattctaggagggacaacaagccaacaagaactccatccc

SEQ ID NO: 131122 - DNA, 610 bp, Cannabis sativa
gaccctggagacccgattggaggccaaaaatgtcgcaacagttttagttagaaatattgataggattattaggataagttaattttataaaaaccagagtatttttgagtactagaagttggtcgaatactcaaaaaatagaggtttctttgtggctaaaaaaaataagattactattaataataaagtttttattaatacttttcattcttgtttgtgtaacacgtggcaagcatcagatccatacgaccccgctattggctgattactatttaaggtcaacaaccttattctcgagggtacttagatgtttcttgtcaacacaatggttgtgaagatgagaaggggctaaggagtttactttctacaactctcaatgaaagaagcaaactgttgaccaagatttttacagttaaataactgtgcagaaaattttttatggaaactttagaaaatatgatataagagtttttacgtagtttgagtgttaagaaatcttagtccacaagtcaatattattaggggcatggtatgagcacatcaatagtagattctctctattcaatcactaatttttctaaagaactgaaaaaaaaaaaaaaaaaaaaaa

SEQ ID NO: 131123 - DNA, 672 bp, Cannabis sativa
aattaaaaaagaatgagattgaaaaaaatgaatataggattacaaatacataattcaaaacgtggttgaatatttatacatataaatatatataaatatttacgactacatacatatgtattttatatattttccaataaaaacagttgagactctatgatgtatagcaaacatacctaagatactgcatacatatttatccgagaaataagtcaatacccttatacatatattgtatccatcatatatataatgaaacaactaagagaaaggaaaaaacaaaaggcaaaaagtgaagaaaaaacaacgtgtttgaaaagatagaagaaaagtacgaagttgaaagaaatgaatagaaaattcctaaagcttaaagaccatacaaattcaagttatccccattaattttaatcctattcaagttaatgcaatatcacaaagggaaaacagaaaaagaacttcaaattattgctaaagtttatctacattcaataacctcattgcttaagaggtcaaataagctatgctactctacaaaatgtaaaatcctcgaaatttttgttcttttttatttacaacgatgaccaacccacttctataactcttccttctcatatatgttagataaattaacaattaacccaagatctatttgtatataacatagaacac

SEQ ID NO: 131124 - DNA, 778 bp, Cannabis sativa
ttgtctaattgtagtaaaaaaattctaacatgaatgaaagttcaaaggcataatttaatacatatcaaagtttgaggggcaaatcagatttcataagtatcaaaaagtttggagagcatagtttactacataaacaatcactgaaatagtaaaattaaatgaaattagacaaaagttcttaaatttaactatctcaataattcaagcaaaatttctaatggtcaaaaaaattcaagtatgatttggtacatataagaaaaaaaatctaattagcctttgtttaatgctaaaatttcacttatttaatgttagtgtgtaatacaactagtagatatattattgtagtatatgtttttatttaaagaaattttcaaataaaaaagtcgtactccatatttaacgcagcccttgacataggtcccctcgcatagtaaattacctggtaagcttctcacccaaccaatcaatacacacttaattgccactccatgtggagccacagtgtcagatgatccgccattttcgtttccattggcccttcacaaactctttcctcacagccttgtaaccttaacactctgcttcgtcttatatatgcatttttctttatctcactccaatttaattcgaagggcctccatttttgaaacagaagcttccacctctctcactcgtcactctttgattctctctctctctataaaagcttttccactgtcttcctttttcgttctcactctaaaacccttattttctttctcatcttcctcctcagcca

SEQ ID NO: 131125 - DNA, 703 bp, Cannabis sativa
taaatagaaaatatttaattttttttcacactaacttttttttagtgggagctatagcccccacactcttattactgtgtccgtcactgatctcgccccattacacattaaggtaggtaattcccgcccccattcagggtggtgggtacctatccctgcaagtgtatttgcttagaaagtagaaataaccattaagttgtactttatattgttgtaaatcaaccatatttttttcttcttggtggctacctttgcttcttttcttagactactaattactgttttagtttatcatgttgtcttaatgcctgcctatgaattgagtaatagtttgttaattataatgcttttaaattattgttgtctttttttttttaatgtatgtgatttacaggagtgatgatttccttaactatatatatgttgctttttctttaataatttaaatattttttttgacattttgtaggaaatagtgggatgtgaagaaaagttctaggtttgacttacattttcaaaaaatttcaattatatatgttgattttttttcaataattaaaatattttttagaaattttgtagaaagattgtggtaaattcaaactcatatatatatatatactaacaaaaagctacgtgcgaggcacatatactaaattttatgctagtttttttctatgttagttgaaagtgatacaattaa

SEQ ID NO: 131126 - DNA, 1051 bp, Cannabis sativa
gaaggcaggaagcttggatcatcaaaacggcacaaaaatctcgagaagaatgatgcttctgggttcagccacttagagaaaaggaagagttttttctaaaacaaatttctagtgacataaagtgaaaagtaaaaagtgagaagtgaaaaaaggttttcccccaaaagtcacttatgtaatacatgtaggccccttttcttcacttacctcacctacacatcataaaggcaactaagtagttatttctcaattgtaatgagatcagacagtcaagacaaagtgcatcaacttttattcagcaaaggctacaatagtcccgaccacatcaatattagttggtaaagtccctattcgtacagacgtccgcacaggggcttagggggcaaatgttatcacaatttttgttctcctgacatggcatgcttacatggacaaaatcaatgcggcgtgacaatacaactaaccaataggaaggccaagtcagcacctgagcaaacagagaccccatcactcaaacgagcatcaagtgacagaccagctccctcttaggagctggtcagccagccttgggactatacctggccggccagttggttgtgcacttctacacgtggacagcaactcatgggctgcgaattgggccctaaaagcccaacaaaatggccaaataatatctagattcaatggcattttagtcttttgtaattatctaacaaactatgcaaatatctagggatttaaactgtaatctaagatttaccttgtatttattcctaagggtgttatagcagatcccacctatagtgatccgtatagtattaaccctcgaaattaatataattaaaaaggaaataagtcattatccgctatcacaaagaagtcgaacttctataaccaatctgtgcatctattgttttttatttttattttgcaaacacgtagcaagcattatcaatgaaatatttgcaccaataactattattattaaattatttaagaatttacccttacctattttaatactcacaatttaggcatttcttttttatag

SEQ ID NO: 131127 - DNA, 1088 bp, Cannabis sativa
tatggtcaaatgggaggatctccacaacaacctatgtatggtcagattttcagtgcacaaagtcagcaacaacatcaacctactttggttcatccgcagactcaacaatttgtggagatcttacctacgcaacaatctagacaatcttattaccctaccccgctggctcctcaatctcgtgataatcacgaaggttcaagacttagctcgaatgtagatgattttatagaatttactaatctcaacaatgataattaggttttttaactaagtaaatttttatattttaaagtttattttaagacaattttataactttatttaagataataatatatattgttatggatattaatattaatgtttgatttcttaaaccctaatcaatattaatgtttggtttcttaaatttaaattctaattaataatatatttctataataattattatatataatatatgatattatagttattatatataattataattattaaaaattgaaaataaaaaaatttatataaaaatattaataccggcggaactcaccgttattaatctgccggtattaatattattaccggtggatatctattttggtagctaatattaatattagcgactaattattactgtggataattatcggcggattccgccgataatactcaataccagtagaatccttaattagtatcgggggacgtctccactcttgattgtagtgattatttgtgtgtattataaatatattatttaaatggtttagggaaaattaaaaaaaaaaaaaaaaattaatgtatggtataatataaatgtgtgaggtaaaatataaaaagcagaattttaattagttattttaaatgagtgctcatttttattgattatttttaatatgtaactgcaacatatataatatttgattagcttctgatttaattatattgcgactaataagaaggttctattttaatgtaatttattttggggtcttttcaatattatacctaaaattaattttatttataaaaatacctttaagaaaattatttgcacaaataccgattgccacgtcagcataaatacc

SEQ ID NO: 131128 - DNA, 625 bp, Cannabis sativa
actctcatgaccgtcattactcggttaaaccgagacaaatgatcgctggggtccgagtccctggtgtaagctgccatttcggccatcttaaaatttttgaggagctttgcctctagaatgtgtctagcgcatggctcccatcctcacagtcaaagttcgagttgtcccccttttgtctcctggagactcgggcaatgtccttgcacagtatggctagctcagccagaattccttccttcagcgttctttagagggataccgtatggggctaggctccctggacttatacttctgagtgcttggtgaggactcttccggtgtttcctcgagtcccgcagggatggctttagggtgtatgtggatccctgctgtctccatgactttttgcatggcgatcataacctcttgcatctttttgttttactctttttgggatgtgatctcagcttcgtgattagtagccttttgttttaagagcagcagctctatgtaactgcctttgttgtaggcgtcgtactcgtcaaagttttcctcgtactcgccaccattacaacatgataccatccaaaaacaaacaaacaatcattttaaagtccaaatttcatgtaagtaaatcaattaccat

SEQ ID NO: 131129 - DNA, 590 bp, Cannabis sativa
tgcttttcttactgagtctgtcgactcacagatattgtttagatgtgtaggtaagggcaaggctaaggtggagcagtcgtgagagtcagcagatgaagattatacatgtcggggcgattaagcctagagtgtatgatcttggggacagcatggcttattttgtgtagtcgcaaggtgacaaacttttataacttgcattttgaaacagctgtaaatattttataaaacaggatcccagtttaatataagtataatattttaatgtctatatttaattaagtaaaaatttaattaaccacaattttcaataaatttgttgattagcaacaagctgcacagttaagttaaaaataacgttaatatgcctaatctagtagggtgttgcaatttggtatcagagtcgccaggttgttttccaaagatcgtcacgacatgtacaatcttcatcagcgatcagcttgtctcacaattcagtaagcctttattgccttaatagtttattttaatagcatattttaagaaaagcctaataggaagcatgttagtagcctgatagttgaataggcgcatgttttaaatttccaaaataa

SEQ ID NO: 131130 - DNA, 1765 bp, Cannabis sativa
tagaaaatcatttccttaattagaaaataatttccataaataaaaatattctaatacgttatgccaatcctattatggttcgatagtaataccattcattatagattatatagttatcattataagttaatactgacactgggtgagaaacttaattatgttattccccacaaaatattctaacattctctcacttggactacataattccatatatatgcgttctcacaatgcaatagtgtcaacagacaaaaatatcaagaaacactaatgtttataaaaataataatgcaataaataatgagacatcagagattcatgaaacatgatgataactacttatctggattcactcaaacataacaccaagactaagccactagatcgcatcaacaagtgtgcacagacaacatcaaagagttatctagaatatgcatgtattcaacaaccaataacaattcttaacatgtctatcatacatgaaaataataactcccactaattaaatacatctttggttcctaacagtccaaaaaaaataacttagtacatactttcacgtaagccgtgtcaatgtagtaattgacatgttgtctataagtgcgtgatatggtactataatagaggaccccacaactttcttattacatatgtaacgtcatcaacattaatgagtagtaatactcctcaagttcacagggaaagataaaattgtaatatttatcacataagttcagtaagttcacaatagagtcaactactcttaacattgaaataaaatatcacaattgtaatgtacaatcaatgtcctcgtaacacaccacacgtacactcaacctttacaaacgaggaagctctaagtgtccacacacctaaccacaaaataactcctcttacaattatattacatgtacgagagaggaagttataggtgttcattattattagacatttaattaccaaatagctcatcctagaatcatgaatgcttataagtggattttagcatccatgcagcctttccaattgatattactaaaaccacaactatatgtcatgatgtttgttggtcgattgctaacacatccttggtaccataaggatgacaattcaagtaccaatccagcatgcatgcaacatatatcacgatagaaatgtgtatacttgactaagccctaggttgcctttcgattagcatatatatatatgtgtgtatatgagactgttgatctcgttttttgccaacaacagtgagtcaaattaaagagattaaggataaattaaatagtaagtaaataaaataaaataaagaaaatactaaattttatagaggttcgaccacttttggttggtaatagcctacttcccttttgttgtattaacttgtgagatgataaagaacaatgacttattctctctcgaaagctcttacactgatctctgagtaatttactcttggaccgagttttatctctatcttttgtgtacctaaatattgagatgagtccactatttatagctatcaattatatcaaattggtttccctaaatcaataataaatataatgagaaactagtttattttcataatgacaatgaagaaaacagaaaacttatgttgattgtctttattatctgaggataataactaatgtttttaactgtcttttgtattctgtagtcagttagttattttcagttagtttctttaactaacttctgttttgccttgtaatctttgagtataaataaagtgcttactgct

SEQ ID NO: 131131 - DNA, 1316 bp, Cannabis sativa
  modified_base (476)..(481): a, c, t, g, unknown or other
  modified_base (1140)..(1142): a, c, t, g, unknown or other
actttcagacaagcatctaaattcacccaatggttgaaagccgtggataacgaatttttggcactcaagaaaaacaaaacttggtctgttgtctccttaccaccaggctgtcgacccattgttaacaaattcagtagttggatcgaatgactttcttaacaaactctttaatagtttgataacaaaaattcgagacagattttagaattaattcatgctataaaatttgagctaaagtgtaacattaaccataaaagttaacaaagatttaaatttttaattaaagcatataaaaactttattagacttttaaataaaataggaaaataattaattatatggtaaatactattttggaccttttatttagcaaaagttaccaattgaatcaactgttttgttaaatgataaaatagacctgtattttctaaaatagtataaataggaccctaaattgattttttgtcaaaataaannnnnntaataatccgatctaaaggtgttatgacaaaactatttacattttttatatctgttcgtgttaggaattgtcttcaagttaacaatttttttaaaaaaaaagttgtcaaaaattaagttcagggttctatttttacaattttggaaaatataggatccattttgtcatttaacaaaacagagattagtaacttttgcaaaacacaaggtctaaaatgatatttactcttaatgtaattacgtggtaaaaaaataaataaaaaaataatatttattatagtgttcatatgatattttatgtccaatataatataatatttcccaaaatacatggccacagctgcgtatgacacgtggaccaaaaggatacctcacccaagaattagctgagtcgtatacagacgaacaagtgtagttcggggagtgagctcccggagaagtacaaaaagcatgtccttcccctctgggagctagaaatacaataaagtatctctgggaggaggtggacatattcgaacaatcacctcgcatttaatgcagcatggggaaagtgtctgggaacaaccataagaggacgtgtaagacaacgtaagtctcgtttacaacgattacacgctaatcaaatgggctagtgacggctccattatgaagaatcacatnnntcaaggaaggataaagattaatctcacctaatccctaagatacctacaacataggttatgtatgccctgttttgtatctcttgggaacttgtgctcatacattactggcactcaaaaacaagttatcccttttgaactatccctaccaatctctataaatacccctgaacaaaa

SEQ ID NO: 131132 - DNA, 833 bp, Cannabis sativa
tgaatacatcatcaaccaactaactaacagaattagttatgaacctaactaattataactaagaaaggcacactaataacaaacaatgtctaagagttactaaaatattatttgacattcatatttaaaagttattatatgatatttaattatttgttacacaaaattaagattatcaaaaatgtatcttaaataatattaagatatcataatataaatttaaaataattaacttatatttaaaattttcgctaataaattatgtgatttattttattttattgtaaaatattagttttttttaaatcggattaaagataacataaattttattactgaaaagagaagtaaaagtaacataatataaacaataaatgaacatataattttaaaagtaattaatctaaaaattaaaggttattttatatgagatatttttattttaaagttgatcattttattaaaagtaactaatttatattctatcaacatcataattattttggtctaaaaaatgtgctttgtaataattttgaaattatttgtcacttttttctttatttaataaatcagaataactatataatttatatttaaaagatataaataatttgtatgatatatattttataaatacaattttttttttatcaaaggagaaaattctcattaatcaacaagcaacagcctaacaaggctcgacaaccagccagaaaaaaacaaaccagtcttaagctagaattctattaattagcctttgactagtggtatctatcttcttttgcctatagctatacaatctgtattttgctatctttttaatctctttaaca

SEQ ID NO: 131133 - DNA, 515 bp, Cannabis sativa
ggggttgttcttaattttttttttaagttgatgtattgtcgagtcgggtaagccctgacccaaaaaaaatttaactggggcgggtcgatcggggcggggcaaagacccgattagagacccgattgttccagggtaggattgccccgacccgacctacgaaaaagcctcaattttccattcctagatgaaaccccataaatgattctcaacaatatcaaatcaagataacacgacgagaatataacccataccaacccgaacaaacatggccaacccaattaagagggttttttatataatagttttattatatatataatatatttatatataatataatttatatacatgatttaaaaaaaaaaaggccaacgattctatcttcatgtacttttgggggaatgacttccactcagtgacggacctactcttatcaatgtggggttatagccccccacaaacaaaaatattgccttttaaaaaattaaatgtatttttttaatttaataattata

SEQ ID NO: 131134 - DNA, 832 bp, Cannabis sativa
  modified_base (773)..(778): a, c, t, g, unknown or other
agagagacagagagagagctgttatgttttgttttttttttgttttactcttgattttacttcaagctaagaataaaaacaaactaatacaatcagcccaaaaatcaaattaaaacttatgataaatttagagaaaatcccaccaataactaaaagcctaaaacacaaaattatcctttaacttaacacttaagaaatctctaacttagggataatttagtcataagcaattaccctgaggtatcctgattgaaccaatactaaccaaacttatcgaaccacaaactagtaccattgtgacatttctggccaccgattgggtttccatagttgacaagcttaaaaatattttattttaccaatagtgttgacctcgcttttagccaacaacaatgagtctaataataagcgataaagaagtatggtctaggtataatataagcaataagtaaagaacacaaggtttaaagaggttcggtcccgtttatttcggtaatagcctactccccttgatttgtgttaactcaagaatgaagaacacagtgtttcccttcttaaagcttttacagtgaaatctctgagtatgctctcttagatctctccaaagtaattctctcaatcttcttactagtaagaatggatcactatatatttgtaattgttaaagaatatatattacatatttagaatacgcggattgtctttgcgatcaagaagaatatatattaaattttgtgccctaaataaaatccatttcaatataatcaaatttnnnnnntaataaagatcagaaatcgcttttatgttgtttggttcacatgatttatttcat

SEQ ID NO: 131135 - DNA, 1893 bp, Cannabis sativa
aacacccgtaagtgatcattgttgtgggtagatttttcaaatatgatccttttgatgcttttaaatttctttgtttaaaattaaaaattaaaaaatattgtaacattaagatagtatttgaattaggagtgatcatatgaaaaaaaaaattttaaatttttgtaaacctaatgatattttttatgaattttctactcttaaaactcaacaaaatgaacttgaattgatattagaatattctatattttctacaagatgggccttggaacaactggctcccaaatgctttgaaaaggaagctcgctctgttggccgaacagatcaggtgaaccactaaagggctggtcggccaaaggtgaaccaagtggggatcgatggttgttgaaccagagatccctggcgaccccctagccattagttgccagagtttggctgcttccgccactagatttgtatggcaggatgacttgtccaccttcgctcagggggaggtctgtcctagtccttgcagaacttggttggaccgtttgtctgtaaaccctactcgatttgtcgactagtctcccttagagaggatctctgatcagatcctgacctctcccaacagttctttcattggaccgccttatcaggcccctagcttctctgttacggcagtctagctccgcctgatgagattggaggatgtactcctggtcatctatccatctcaaaaatttgcgtctttgttatgcgaatacatcgcaaccaacaacgcgtggttcttcaatttggctgacttggcaaacaacctctctaagtctagccaatttgaatcttcttccaagtacataaggctcaccaatagttggctcgccaattcttagccccgtttccccagcataataccggggaccagattcacttctggtgcttggagattgctccatgttgcctaaaccctcagtccaaggtgccagaggctgatcattgggatcagccgggttgttagggtcgacttaaccaattgtgttggtcaagttttttgtgactgctgggttggtagggttggccacatctgttggattcgtggagatttcagcattggctggaacatgaacgtcaggattaacagtcatggggtcttgaggaagacccgatgaggcaggagttgtagccagagttctccttgttatagccatggtgatagaacaaatcaatcaatgctctcaatgaaagcactaaattattgacttcatatttggccaaccgacagtagagtcgtatttatgactgatatcaccacgtgtatacaataagaacaagttaataataaaaagagacacaatattttatagaagtttgacccccttagataacaggcaatgatctactcccattttagttgtatataccattcagatcacaggtgttgtagattctgaaatggctctcttaagattattaattacaatagtaagaatcaagaagtcaagtaggtgagatgagggagactttgtctcttttacactgctaggggcatgtagaagagagagagctacggcttagagcttcagagtagagagcttagaacttaaggcttcatacttagatagattaggtttagtttagtgctttttatataggaaagcttacaagagatgataggttgatatcccttaaaatgaagagatatcacctatttattatatattaaagtaataaatacataacatattaattagtccccaagaataggtaaataactgaagtttatctcttatatttgtgaatttttgaagcctcatacgtaactagaagtattgtccaggctgaaagctgtaaggtacaaaaagtgcttgccaagggaaaagctggccaacccttcctttgttggaggctggctggcctatg

SEQ ID NO: 131136 - DNA, 1514 bp, Cannabis sativa
cctcgcggtcattacaaaagataatatcaggcatagaggatagtggcaaagagtcaaacctctgatgggaaaaagcccacttggccacattgtgggtcataaagttacattgtctactaacaaattcaaacatacaaccaataaaaaaagggaggtgcttttacaaaaagagacatagttatcaatctcccaacgggactccttcccattaagagcgttgatcaccaccctcgaatcactttccagaataagaaacttaacaccacgagctttaacttcctttaggactagacagcacgtcgtcgcttccccacagagagcattagaaaattccagctttgaagtaacaaccgagatcactttgctgacgtgatcccttgcaactacagcagcacacatgctatccagccccactctgatgtcgctattcagtttcaaccaatcctgctggggggggagacgccaaacttctgtcggagacggtatggggcaagggagcaagtaagcatgatgatctgcaaaagaaaatcgaatggtgtcaatacatttaagaatatccactggacaattattatgtaccttttcattctgagtccgccagatcgtgtcaataatcagtgatgcataaagaaaagcttcctgctcattaatgcctttgtttcttaggtcccataagaatttaaccgagtcccacattcttataccagtgtcacagatgggaaagatcccccaaggagaggatcgacacaggtggaaggcgaaattacaagataggaaaagatgctccatagtttcatctcccgtaccacacaggggacagctctcgtcctctataggaaatctcctaccaatgaccgagtgaactggaagagctttggatagaatacaccaccaaagaaccttgagtctctctggaattttactattccaaagcttattccacatggagggggccacctctctaggactcactctattctcagacagggctctgtacgcagatttgcaggagaaacgaccattactttctaaagtccagaaccagttgtccttgccagtgcctgtaggagtaccccctttcaggatagcagcgacaatttcatgatcgaagaaactgttaagtttttggatgtcccacccgccattatccagcaggagctcagctaccttacattagaacatatgttctctttctaattagtgtccatccatgctactaattgcatttaaaaagataaatcatttcacatttttcttatttatttattaagtatttttacatcatatacttagatttttaacattttttcttttctaatatggggtaattttttttttaaataatgtgtattttttatactatgtattgtgttaagtttcatttattgttccactgttgtttttttaattttttcactgttatttttaattgttttgtttagtgttttacggttgttttataaaaagacagtatttttgtaaaaatttccgtaaaattataaatttttatccaa

SEQ ID NO: 131137 - DNA, 701 bp, Cannabis sativa
  modified_base (621)..(637): a, c, t, g, unknown or other
aatctcttttgtactctgaatacttataattcaatgaagtagctatttcattatcaaaaaaaaaaaaaaacaataaaagtaatttattatttagtaaatttaattaaaaaaacagataaaagcaaaaaaagcatctatatagaaattattattttagacaaactaattaaaatttattttaattagtttcatgtcatttatgaaatcttacataattttttattaatcatccatcttatagtagaaacctaattatttaagattatcccatgtgttcaaacatttattgctttagagaaaccaataacatgtaaactacttagtattaattagttataacttggttatgtaaaattaaccaaattatttaaaagagttttaaataaactttagaggaagtgatggtaaatttaattttaaataaaataggctcctctattataaatgaattagttacatccatcaaaggattaatatgtattaattctggaaattaaaaataaaactcattaatcctactaattctatttttgtcatatttaattgacaaaaatattttattatttattgtatatttcggctggtgtattttaatttgtgtatctaaacttggaaggaaannnnnnnnnnnnnnnnntttatggaaattgaggtaaaaatagtaagtttgattacataatttattcttatctaaccagttg

SEQ ID NO: 131138 - DNA, 1322 bp, Cannabis sativa
agacccagactcggaccaagacccagacccagacccaaacccgtaccccaaacctaggtcccagtccgagtctaggtttgagtcgagaactggaatctgacaggacacagacctagacccggaccgagatgcggacccgaataaaaactcagatcgggactcggggcacgtacccaaaccaagacacggacttggacccatactcgaacctaggacccaaacagggattagagactcagacctgaacccaggaccctgacctaaattgaggacccaaactaaaaattagaagtagaatcgagacctaataatgggactgggacccaagacccgacccagtctcggtcgcagacccgaacccggacaggaacacggactgtgacccaagatccgaattgaaatgagatcgagacccaagattgggatctagatcttgacccacgacccgggccttggacccaaccagtagtcggtgtctagatcttggacctgaacttggaacaatttctaggccaggacccaaacccagacttggacccgagacctaaaatacgaacaagaaccagaatcaagaccctagaacaggaattggacctgtcccaaaacaagatctaaatgcaaaaccaaacacggaactggacctagaccgggatcgatacccgcacccagacccagaattttgcgaggacctacgaccaagaacccagaacccaggactcgttacccaagacttggaccagaaccgagacccgtaccagaacccaaacccaaacccaaacccagaccaagacccataaccagacacagactgaaaccaggacccagacccagacctagacccagactcgtactagaactcggactcaaacacaggactcgaacacggaccgagattaggattgagacctagacccgaactaggatcgagacctaaacctggattgggacgagaactcggactaggacagagaccaggacccgggactgagagcgagacccaggaccgggacctaagaaacgaaccgagacccaaacccaaaccaggccaagacccgagacaagcatcagtaccgaacacagaccgagacctacacgcagactgggaccctaacctagacagggacctagggccatgacctgaatcaggaactcagacccatgactcaggatccaagacgcaaacttagacccaaacctagaccttagacctgaaccaagacccaagacatcagctagaaaatggaccatgatcttgatttggacctgggatgttgggttttatgccctaaataaaactgatttcatataatcagatttactta

SEQ ID NO: 131139 - DNA, 709 bp, Cannabis sativa
ctctctctctctctttttctctcagtctgtccaaatagtctaaatattgttttcagtagtattaattgacacgtgttaagaagggcatattatgaataattaattatgaaaaggacaactgtaccttagaaacagtgttccattaattagttacaagtctacgaaatgaaaatttgtataagtgagatactcacatgctaattaatggtactttgcacatacatatgcatgtgatgtgattgtgtattatgttgtatacagactgcagtgggctggattttcatatatccacagggattccgaaggcttttgctacatataaaggatcattacaacaatcctgaaatttacattaatgaaaatggttcgtacctatttaacatttcataaatactatactagtatatatccaatataataataataatattctccattgaatccaagtttatatctaattttttggtattgtaattgtttctcattaggactggctgatgcgaataacaactctttgcccattaaagaagctctcaaagatagcttgaggattaaatatcttcacggccatctctcatatcttttgaaagcaatagggtaagattatcaattattttgctttcctaaaataatttagtaccaaaaaataaaagaagaagaagaagaagagaagagggatttatcatttatttattattgtttagttttc

SEQ ID NO: 131140 - DNA, 718 bp, Cannabis sativa
aattataatattacataatactaatatttcataatataaatgatatttttgaattaatagtaggttttaaactgaaaaaaatcaattattacgaatttggcgtcggattttaagcttttaacgttggttattagtgcatatggcgtcaattatatttgtatataactgacgccatagggtacactttggcgttagttgttttcaaccctatataatgttgcctgaattagtgtcggtaacgaattttgtcaaaaccaatgctgaaaggtcataaaaaccgcttcttaagttcaaatttatagtagtgtgtgggcctcatatatatatatatatcaattttagtgcaataaagcttatatgctatatatatatatatattaaaatttgtataataatgagtagctcgagatgctgatactacttgctactattactgctatgtagaagaacatatgagtgtaatgatgatataaaagatagaaacttttcttgccgtactttgtggtcaagcgggtgctcgcttctatatggtccccacaagataccctatacggcgacatgaaacaatgggctgaaaggttttacctaagcatatgtacattaattgatcactaagattggacatgaactctattccacataatcacttaaaacttttttttatcttaatatataaattattattgatttaatatactatgggctcgtttggaacgcc

SEQ ID NO: 131141 - DNA, 692 bp, Cannabis sativa
  modified_base (344)..(355): a, c, t, g, unknown or other
taataaattttcaaaatgtataagttttttaaataattttttttgcacattttttataattattttatttttattgtacatttatgaaaagagccctaaattataatttctaaacctaattatctctcctctccttttcagaacaaaattttgataaagagattgaaataacagaaagttaacactctgtgtgggagaaaaaattactatatcccttcccatatatgtaaactagctagctaattctatattttttttattattatttttcaataatgaagtgtaattctagttgggttaggtaaagttaatcatgagcgttttttaataataataataataannnnnnnnnnnntaataataataataataatgtaactttctagctgtattcagaagaactatatatgtatacgtatagtgatctgactatttgttagttgttttattatttcaattttaatttcttaacatcacaatataagcaaaacattttaagcaactatatctattgaggagatttattatagggtgattctacaatgtaccttcttaaaagggatgtactgatatactcttaacttgtttcggtttcaagaaaatttttttagtctaattttttttttcttattcatgtacgttataactatttaagataatctacaaaattttgagaaatttcgaataattta

SEQ ID NO: 131142 - DNA, 550 bp, Cannabis sativa
tttctagtttttgttggccttgcgccttatcaactcatcccccaagcttatcgtctgctctcaggcttgtatattttttatgttgccaagaactgggctccacccagtccaggtgaggtcttttacttttatgaacttttgtccgtccccaaaaagggggacaaactaaaatgcagtttttacaaactccaggcccaccctgccaatgagggtccagtgccttctaacttttagaagaacatgaaggaataccatcactgatttttcttctccttcggtttcaaagctgtcgagcatccggagttgcttaccgaatgggtcagggttcctcccatatatcgtaccgctcccactcagctcttcttacaccacgcgaaagtttttgattgttacaataaggatgagatgaatgtcggggaccttgtcacgaccgtgttgggttttatgccctaaataaaaatccatttcaatgtaatctattttattcaacatcaataaagaaaaaaaaaagtatttttcattcatctgtgtatgtttcggttcactttat

SEQ ID NO: 131143 - DNA, 1239 bp, Cannabis sativa
attggatagtctaggtttcgatgtgaaacgaaagtatttacatagccttagtgataaaaagattattgcttaatactgatttcatgttggtttaattaattgcatactaagcatgcatagccatgcacttgtatgagagaggaggaacccgattgtgttcgagttagggtcgaaggccactaaaaggacacgtcggtctcgaggatggctggaggaggtcgactagacatgtgggctcgtggtcgacatcgacgactgacaggggcagaccatggtggtttgaggccgtcaaggtccttgattggagtaatcgaatcttctgtcccaattctagccaaaatggagcaagcctccatcctctctatctgacgctggtcaagcactaacgatccctcctcctccttccctagtggttgacgaccaccaccagccactgccaccaccatccacgaccacaaaggtcggcccctcaagtgtatatatataatattttatttattttaataattagatcattaattgatagaataaaataagaattcaatatgagatattttgtgatgtgcattatctttttattttaataagttaaaataattcttttttcaaaaagtggttttattattttttgggtatatatatatttatcattttttcaaatagaaaaatatgaagatattttattttttaaaatttattttattatgaaaaagaatatatataccatataaaataatattttattaaaaaatagttagtgatattttttaaaaatatattaaaataatattttttgaaatttttttataaacctataacatcttttaaataataatttattttgaatatctaggatattatttatatttatattattatataataaataactattttgcctaaaaactagttattggtggttataactgttgggaatattttactaggatctagatttattaacaagtatgtcgattaacatccttaatattagttctctaaaataacgaaataaacacataaggatttaagaaaatctcaccttaattgcagcgtaatataatgactccttgattcctttctgtagcagaggattatcaagatctaaacctagatctctttctctcctttgagttttgttaccattgtcttactcaatatgattgagtacttgacttgctatgtgttggcatgacactctatcactcaaggttcgaatagtgaagaacaataaaggag

SEQ ID NO: 131144 - DNA, 547 bp, Cannabis sativa
ttgacctgaacataatccttctgctaaattaacaaaagtctccctaaaattatatcactagagtaaaaattccaattaggaaaatttttacccatgatatcttttattttttttcatgttttgccttggtttcaagtaaggctccaaacccaattttattcaccctacaaacatcaagaatagccatttgcttttcttttttatcataccacgaacattccaacttatcatattacaagcatccatcatgtgaaatagtagagctagaaaccatcatctcatcaaccgaagctgcttgtaaaacaacatatccattgttactactgcctattttaggagcttccttgtttttggttgcttctatttgcttctgccctcttcttttgggggtaatccaagcatttccccccttttcttgttcctggttagcttggtactgctgctcctccttctaggcagcagtaacttgtctagtatctgccttgtcactctttgggtcttccttctttctttgatcttcaccctccctatcctgcttagcctcttt

SEQ ID NO: 131145 - DNA, 810 bp, Cannabis sativa
agagagaagggagagagagagagagagagagagagagagtcgtgggtggtgatcaccgaagttcgacgcacagttttggtgatggagtttggtgagaaccaaagaaagggaaagagagagcgagagggaaagagagataaacagaaagagtttggggaaatgattttgaaatgtgggggtaatttggggtttataaaaaagtggacacatattgtcaatttcacccaataccagtttacttaattaattttaccctcacatatgcatggaaaattaaattttgattatctaaccacactatgtttatagtttctaattaatgaatccactgccaaagaattttttaaaatatttttgtgtgcttttacaatgtaccaaaataaaaaaaaaaatacaccgctgtattttttactgttttgacatttaagaattttttttagtctaattttttcatagtcgtgtacattataattatttaagacattcaaattctgaataatttaaatataaaagtagtattcaaacaatctattttatatgcacatggcgtataaaataaaagagtcataaacaaactgtttaattttttctgaacatgtttaattttcgaatttctgttaattttgtaaaatgtattttattttttaaaacaatgaacattttcattgaaaaaaaaaagttatttgcggcaaaacctcctaaagtaggcaggtttttgtaactgaccccctaatctaaaattttggtggtaaaactacctaaaccactagtccgttagcaaatacactcccccgtctaactgaccccgtt

SEQ ID NO: 131146 - DNA, 650 bp, Cannabis sativa
  modified_base (620)..(624): a, c, t, g, unknown or other
agattgatgatgtattactcatactgccactaaacttctggggatacgtacttctagtgcctacttaaatttttaatgtagtacccttgaagagcataagtaatattctaatggaattatggaatgatgggacaaaacccagtttgaatgaaatatttatttccatatttggggttgtcctgctcatgttcttaaacccaagactgggaaacttgctccaagaactgaagtgtttatgtttgtaggatatttagatgaaactcgaggtgcctatttctatagtcttcaagacaaaaaagtatttgtatcaacaaatgttacttttctagaacatgactatataaaaagtcacaaaccacacagtcaagtggttatcaaggagatcagaaatgagcagatttttgaaccaataatttcatcagcattagttgaatgacggatagcagttaccacaattcctgaaaaggaaactccgctacatcgtcgtagtgggaggattgtgagataacctgtccactatggacacgaaccacatgttcttgtctctaacacacagaaggccgatccattgacttatagagaagaaatggttgaccctaatgttaggttttatgccctannnnnaactccatttcaatgtaatctatttt

SEQ ID NO: 131147 - DNA, 706 bp, Cannabis sativa
aatttttaacggccaaaaaagttgagggagcataatttagtacatgtcaaagttcgggagaaaaaattactatttagctaaaaataaaaatctaattaaaaaagtgttaccaaacgcatccataaagaagcatttgaattaaataaaaatactttaaaatagagaaatttacattatttgttggaacgtaattttgctccttttttcttaaaattttttaaaaaatctttattttaagagaggtattgggagtgctagtgtgtacttgagtttaaattctaagaatgatagtgagatattagttttcttttcatttctaaagaatgtattagtataattatttttaacaaatgttctaataaattgatgctcacttttttaattttgaattttggtatgttttaaaaaatatatttatagataattaaaaagtttacggtataaatacttattttatttactagataataaaaaagtttacggtataaatacttattttatttgtgacaaaaatacttattttcaaaaatatttgtatgaatatttctttaatattatatatataagaatatttgtaaaagttatgtatcaaatgtaaattattgggtaaatataattttagatcctgtatttcgcaaaagttattgattggactctttattttgttaagggtaaatggcggcaaaacctccaatactttcgtttt

SEQ ID NO: 131148 - DNA, 883 bp, Cannabis sativa
  modified_base (683)..(684): a, c, t, g, unknown or other
  modified_base (826)..(837): a, c, t, g, unknown or other
ggatccagagttcgggtccaggagtctgggtctaagtcggggtttgggtctgggtcaagggtcgggggttcgagtgtggggtctccgagtccggcttaatttatggccgaggtctgggttcgacaactgggtcgagggccagggtcggggtctgggtctgagttcgggtatgagtcgggattcaggtcggggtttgggtcaaggtccgggttcgagtctgagttccaagttttaggttggggtcgaagtctaaaatattgattaagaaaaaaattgtttaaaaatattttgaaagtgactttctttaaaaaaaaaaaattgatttttaattaaaaattgaaaagtaaaaacaattttgtagaatatgattttggaaaatatttaaactttactaatctaaaaaataaaaaactaattaaaaaagtgttacaaaacacaccctaaattagtcgataatcattctttttgtataaataaatttaaagccaagaatgaatatgatgtattattctagtatgtgaccagaaggaatgatatatatatatatataaataaatttcaatgtgaaatattcacattaaaaagtagataagatatgatgatattttttttttaagttcatccgagtaaagagtataaaaaaatttactgatcactgaaagtaaaaaaattgtgactaattnnaaattattatttttatgttgtgactaaaaagtttgtgactttttttttttatgaagaaaaaaggtttgtggtaaaagtatattagtcataaaaattacaatatgtagtgattaaaagtattatgactaaaactaaattagtnnnnnnnnnnnnctaaatactatgttttagtcagaagtaaatttttgctgtgactaaa

SEQ ID NO: 131149 - DNA, 1422 bp, Cannabis sativa
gaaagatcagggcctcttcgtgcgctgcccgagaaggaaaaataggagagagagaagactaaaactaaaattactttgttagggtttttcaaatattaaaatttaaatgcattaattttacatatatattactggagcttttgtgcggcgccagctttttctttttcttttttttttctaattaatgtgctgtctgtttttttatataattaaagtacttttttaatatattacttgatatagtgacacgccaagcgagcggggaatatttacgctgtcacgcttggcgcgtcactataagtaaatatttttttttaaaaaaaattagaaattatgaatggtactctttagtgacacttatatttttagtgacacgtattaaatgacattaacactgaatttttagagtcattttgtgtgtgtcactgaaactcatcccttatcttttagtgtgactaaagagtgtcactaaaacttaattttgtagtagtgtgattgcttttaatttcccaatgtttacttttgggggaaatcaaagcatctgaggattttgaattgattaccccttttcacaagttagcctataaatagggctgaaacttttcataagttacttttaccattttcttcacgaaataacctcagagcaaaaaaaggtgttttctttcaagtttatcgtgagatttatagctgaagtatccgaacaacttcatttgaaaaaagctttggcttcaaactgttagtaagttttcgatgtttttctcctttaactttatatctttaattttctaggtttccattgtagaaagtatggttgttcttgacttgttgttggagatacgtagaaaatctaggcttgaaattttgtaattttctctgttatagttcgtacgcctttgttacttacgacattttgtctttaatctcgctatgtttgattctcacctagctcattcaaagcttcgtgaaatttatcctttaacccaaaactttcaaactcctgggttataacttaatcttcacgtgttcttcgtctttttaatctatgagtagacctggtcggtatatttgcctttttttttttgatatcctggccaaatactcatcttgtgtattttcttttgtagatgaaccctggtgagttttggggagacgaacaccgtattgaccaggatctgcttcaacttctgtacgaggaccaaccttgtcttcgcgccagtccgtcctcttgtagtgatggactttctaacttgagtttcgaggattgggatgtgagtagcgaacgttctcctactccagaacccgaagtgtaacaccactcttactccgagcagattgcaagagaatgttacggtcactttttttgggaactaaagaagggttggagacgttatcttctgtctagctaaacgtatattgtcc

SEQ ID NO: 131150 - DNA, 633 bp, Cannabis sativa
cacaaatctaagtacaccatagcatgccctagaaaaaaagttcagaaaagtgaatttacaaatgaaagatattagcaccaaacactaataccaaagttacatgaatattagtcttaaaaggacataggtgtgttcaaggaggcaactctcgtattatttcgatagtcataaacacaatgagacagatagacaaggatactgtagtaatccactgaatcttgtttgaatatggcaaacacaaagtaggttagccacttctagacttcagcagtggaaatagaaaagagttagttttacatatttgggattgggggaggtaggtttaatcgtgcaaccacttcaagaaaatagccatattagctttaaaagctgacaaattaaagaaaaatgttggagttcccgaactctaagaactaaagagttcaaagaaaactaaaaactccgactaatttatatatgcattcatttggatcctcttactcattattttaggacaaggaattgtatcatgaatgctagtaataattatgtgtgtttaacttatgctttagttaccatagcactaaagaataaccatataagttttgaaaatgaaaatgttcgagttcccgaactctaagaactaaagagttc

SEQ ID NO: 131151 - DNA, 963 bp, Cannabis sativa
gtcatgacttggctccttcttcattaatttagtcccagtatttttgtgccacgtggtattattcttgacacgtcatcgtcgtcaaaatttgggtaaacaagtagcgagtatcatatatcttaagaaaataacttttaaggaatatcgctaactaatcgtcggacatcacttatagaaaatgataggcattattaatacctaataagagtgctattatgataaaatcccctaaaaaaatttagaaacatattcttgactccactaatagtgagagccgacccttattaatcaataaacatctacttgaaaaggagagtgaatcctaagagcatcattaatggtattgctattgagattgttagaatagtgagaccaaatacaattaaaaaaataatacatttcactaaacagacaagaaattttcaaatttattttctttatttattagttagtttaattgaagaaaaaaaatgataaaaaagtttaagcggggtcaatgccaacttggctcaagcatggatgacacaccattaactaatgaaaaagaaaaagaaagaatatatttatataaagtagggaatcacattcatgacaacttacctaattttctagttttattaaagaagatactaggaatgctggtcttaacttcaaaattttcatattattctttattaatgaccatgactagtgtttatgtcgtagttgacctcacaagactcaaattctacccatatccataaccaattaattattgagtattgttattgcatactaatgatatcccgtaccttttataagagtaatgtcttacgattggctagtgatattacttaaaaaagtattttttttaaaagagatatattaaagggtaccagtggtgcctaataccctcctatatgtcaatatcgctattggtccaattaagtatcgcgtccgatataatttaatatagggtaaata

SEQ ID NO: 131152 - DNA, 561 bp, Cannabis sativa
ctccacgtttcatatatctacacaaaggtgggaacagtttatacttttcaattgaaatggataaccattattctatgatctagatcgtcatcatatttttactgagctggctcaagatgacattttgcttccttggagaatatggtgatggacaaatgaatactgaacacagacttctttgcaaattattgggattcaaaagatattattaggattgagaatatagaatcttcttagtgatcgctcacagtgaggtttaaatgaataattcttctctttgtaagtaagctttttcaagttgtatctcttgtacaaactaaatagaaaacaattacttttgcactaagtttggttattcaaaaaaaagtttgatctgctcctcgaaagtaatacctttcttacgatatgcaagatgtttgttacaaaagacataagcgtctcgcgtataacatttgtcttgttgataatttttgagaaaggctccatacactttgttttgaggaaaatatttaagggaaatttgcggcataaatgctcattttgtttattttgttgctaata

SEQ ID NO: 131153 - DNA, 1151 bp, Cannabis sativa
ccaaaatcattaatatataactatgaaatttacattaaatattaatttttttctaaattttatatttatactttgataaaaaaaataacttctctacttaatatttatattctttctacttaatttttttttacatttttagtcaaagtctttggaacaaaacaaaagtatgattaaatttatgatgagatttcaattcaatactcttattaaatttttggggccttgggagcgaaaactcccttttcgcgagaaatttataccaaatattaattttttttttttttcaaattttatatttatactttcacaagaaaaattttacatttatatttttttttacttaatttttttttaccattttttacttattaaagcatcataaaagctttttttttcctctttatttttaaaattagttttgagtgactctattttttaagtcagttgatgaccttcttctctctctctttctctctttattttttttttctcaattttttttatcttttgtatgtatacaaatatatatatatatataaatgtatattttcatttctcgtttttaactctcttcctctcttacaaaattacttagtcttcgaaaattgtccatgaaaaaaaaaagaatgtaatagtgaaaaaagataaatcaattgttgtcaaaactaagtaaaacaaaattcgtaatacaaaaacatattgatgaattgatataatttttcttattgcaattaggtcaatattttgttgtttttctgttgctttgtagttatatttttgttgttttataattatgatcatgttgttcattaagttgttttaggattatttttttagttatttttgagtttttttttttttaattttacttaaacatattatttttgtaattttaaaattttaaacatagtatttttgtaaagttggttagtacagtaaaaatgtaaaaaaaaactccatgtcatagtatttttgtaattttattttatagtatttttgttaattcccctataactttctacaaagaaagaaatgctaagattgtaagtacaaacagtgacggactcaggatttatgttgagggggggcgacactttttttttttataagtgaaggggtgcgccctttttttttttttttttacattg

SEQ ID NO: 131154 - DNA, 1871 bp, Cannabis sativa
attaaagccaattttgatttgttattttggtacaaaaatataagaaaaaggtgtacctatggttatgtttttgtaccacattgaatgtactgagttttttttccaaacacataaacttataatatactaatatattttgagtttttttcatattgtttgtcattaaaaataaaattggaatgatagaaaaataattatttattaaaattattatagtgtcctcttcaaaaagattattcaatttttaagaagggtattaggacatttatatactttcttttattattttctctttttctttcattttcggaaagattggattggattttgtagaaggaggtatcctttcatctttttcatctttcctttctttctgtctttcctccctaccaaaaatatttccttccacccaaaaatctttcctgccgtgtaaataaaaaaaatgataaactctaattataaaaatttattgtctagtaaaaaaaatgaaaatttgaactaacaatttaatatccttatatttttaataatacttatttaatattttatattttatttaaatataaaattagttttataataaactcaaatttatgaaaataaatttataaacataaacaaactgtccacattaattctgtgggtttcaaattaaaatttatttagtttatatttaagtgatgtcataattataattaaattgatattttgtttactaaatttgcatctaggatactaaatatagaaagtttaactaattattaaataaacattagtaaaaagagagtataatatatttattttattatagatttttttaataatttaataataatatttttaaaagtttaataatttcatttctataattttgcatatacaagaagtacgatgcatatattatttattctatttacatgtcatttttttttcttaatctaattatttttttttcatatatttacagatttttcaataatggcaatttgttcttcaaacatttactacccttctcaatctcttgggcggggagtcttgacactcgtttgtttttaaaaatataaaaataaataaatttgttgattttattaattgtaaaaattaaaattaaaagaaaaattaattattattattttttacagacacatgaaaataatatttataaactaatttcatacttactatatatgggaaaaactatggggcgatgttggaattgcgtaagtaatttttttgtatatatttaaaaaaattaaaaattaaaaattatgatataaaatgttataatatattttaatatataaaaatgttattgaaatgcagaatgcaaatataacaatttctggatatgatcacaaccaatatattggtaatttgggagacttgatgactagtcaatttgaaaatattattgaaactttaactgctcgaccaacttctaagggcttaatattcataaggtataaataatattttctattgtactatttttatattctcttcttaaattatttaggggtttttacaccacatactgaagtttttaacttttttacttttttattgtgggacagaatttttttaaaaataatgtaaaaaaaatttactgtgtactctgttaagttttcattgttgttcggttgttttttagttgttctaatgttgttttaattattcaattttgttgttttacgattgttttataaaaagagaatatttttgtaagaaattctatgtatttcagagtaaaattataattttttatccaaaatcctatatttttgtaaaaatcttattatttatctaattagtaattgcacactagaaaatttaagagcatttatggcataaatatataatattttaggttt

SEQ ID NO: 131155 - DNA, 532 bp, Cannabis sativa
gtctgatatatggtttgatgatgccactgaggtaacattttgctatttttaaaacttaatggctggttcgatgcatgtccgatgttggtccaatgcttgctcgatgggtgcaataattttcatcataaccccatgcaagggtcggagaaccatcaaactcacatcgaactaacatcgggcctgtgctttttttacaggaaaaaatgttgaaattgttgctattttgttatgaaaacctgctcatgccacaaatactaatgttcaacgaagtccaacaagatttcaacaataatatggaacactacaatacataacaatatgattattaaaattcaatagttattttaacatatgtaggtgcaaaactttctgttgtgccccttgccaccacactttatgcaggtttgttttatcacgatcctttcaccattacaagcagttttgtttgacttaattcttctaacctttggtgtaacgccctgaataattaggcacgctacccaaaaaggcttatgaaaccctaatcccctaa

SEQ ID NO: 131156 - DNA, 726 bp, Cannabis sativa
  modified_base (73)..(78): a, c, t, g, unknown or other
ttatatatgtttattttcattgttttagaatttatattaggttgttaataaacatacttggtagtaaatctannnnnnggtaaaataatttccaacactataggcctacgatctcgactttgagtcctttcggatgctcgctcgtcgctcattttcctaacaggtgatttctccgtgtcagtcagtgatcctatggatcaacgtttttgagtctaagtcctttcggactctcgctcgtaatccacttccttatggggagttttagtgtctgctacttgctaagtaatggcgtgggtaccatgagtggtatgttgctttgcatgttcatggttggttgctttcttaaacttttgaattctttgaaaaacaaagttctcggtagaataagtcaagctgtagatgagaaactcaaattgtggctctcaatgaaagcaccataatattgacgctaaaaaacttgattggtctgtgccttgatggagagaattggtcatagaatatgttcttgagaatctccgaggaatcaatagatcccggggagagcttgagataccactattatgctttttctaatagcgtggctggaaagactcaacaacgagaatcgtctcgaaagtcttgaaagtcaatttgtactttgaacttgtgtatgtgggaaaaagggtcttctttgccagtgtatggatgccacactagatttttaactttaaggggatctccaaagcc

SEQ ID NO: 131157 - DNA, 772 bp, Cannabis sativa
  modified_base (396)..(400): a, c, t, g, unknown or other
aataaaggggtttgaaaattggaaaaaatcggaatttgggaaaaaatcccatgaaaatttgaaattgtgggttggctgccagtgggctgcacctgcagcgcaggagaggctgccaacaacccttacgcccacggacgaaggagctttgcagggtgtcccgccgagaaaacttggtgcctgcagggtcttcgtgggcgtgcatcagccaagcgagagacgtgtcagcgcttcagacaagattttgtctgaagatgcgcgcgcgtgtagggtgtcttgtccgagcgcctggtgcacccgatgcaccaactcaaaccaattttcaaaacttcatatctttttcaatttttattggaattgagttccgtaaaaatgaaaattgcttaatttttcacaagnnnnncaaataaaatattttcagaaacagaaaaaatatttttcatggaaaaatttcgtccaacacgtacatttatcaagtaaaacataaaccaacatgaaaccatccaaatcaacacataacattgttttaattcatatttcatgaaagtaaattattgcccttaatttttcccaaaatacgtgggccaatgcgaccgcgaaacgtggatttgaggaatatggtttcgagataatttaactaagtctttttagatcaagattatcaacaaagaaaatacctcccagagaagagatgagaggtccacgtactcccggagagcagagctatagcaaagcacctctaggaagccccaaactccatttgaacagtcacctc

SEQ ID NO: 131158 - DNA, 1953 bp, Cannabis sativa
ccacatcgaattatatgaggggagaatcgatccatgagcacatctagccaaatacaacaagatgatgcaagtcactcgccttagcgatgatgctaagtgtttatgattttccttgactctaaccaagtccacgaaagactggtggaaatggttggctccaagatcgattgatagctgaaaggatttacagtcgacattctacgagtattttatcgctgtgcatgagaaggacatggaagtcggttccgtaaccaatgtcaagcaacaacctaacgaaggtctgaaggctttcattcaaagaatgatggaggcagccaccaaaatcaaggccagtgatgatcttaagctaatggccctccaatcgggactagttgtaggttccttgttatgggggcagatgcagagaaagagagccaagatgctaagtaaattcatggctaaggcacatggcataattaacctttaggaggcctacattcaagacttcggagtccctcctgcacaaactctaactacagctgcaccaagttttgcatcccaaactcgtgccccatctttgtcttttctaggactgcagttctcttttattgtctatgaacctactgtgtccggtgtcgtccctacgcagactaatttctctaggtacgggcgacaaagattaggtacagcgtggctcctggacaatctaaagttgagatcttggattctagtgcggggcagtgcgggttaagaggggaggtaagaatcataatcataatgattcaataaagaaaccaagaaaggagtatgatccaaagtacattgagtacacaagtctgatagatactcactagaatgtttataaggcgacatgtaacataatttattattggaagcccctgtgcatgtcaaatggcgggaggaacaagcgagatcagaacaaacaatgcgagtatcatggagaaaagggccacaccgcaaatgaatgtgaatatttgaaagatgagattgaaatgttggtctgagtggggcatctagggcagtgggtccgcattctaattatttatcccgaacagggggtagtccaagggcacatgatgcttcccagacagtagggtgccataaatccccagtagggacttgggcgccctcaagctcctagaacatcgttacttgctctccctgctccgccagccccggctggggtggctattcttgctccaggaccagaaactccatatcctcctacaattgctccgccacctgtagacgggcatgtagcaacaattttaggtggaccccacctatttggaagtacccgtaacgcacaaaaaagatatctagaggtggaggagggagaagtgtgtgcactagtacaatctctcgcacaacgtccaaggatgatgaatctcttgatcactttcacagaggaagatgctaagaatgtgcgttcccctcacaatgaccctttagtaattgatgcatagatcgccaacaagcgagtttccagagtcttggttgacaacgaaagttctgttaacattttgttcaagttcgtattccaagcgatcaaacttactgaagcagatttaacttcatgtcctatccaattgcaaggtttaaatggtgatgatctaacgcccatgggtaaaatccaattgccaatcaccctcaagggagataacaaagcaagtgcgtctaaacatttgaccttcatggtagttgactgtcccacagcctataatgccatactaggtcagttgactttagtggactttggtgccgtgacttccattcgaaatttgtgcatgaagttcccatgtgacaacgggtgcatcgatgccattaaaggtgatcagcggagcacgaggaatcgctataatgtgtttgtaatatcccgaaaaatatattgatattttaattggacatattttattaaatatgtaattatgtgggtattagagtaggattata

SEQ ID NO: 131159 - DNA, 939 bp, Cannabis sativa
caaccgaaattaataagaaataataaaatatttttgtcaattaaatatgcccaaaatggaattaacaattttaaataactactttatatattgtcatgtaaaaaaaattaaattataactattcagacatcgaaaacatgaaagatgtgtattagtgctcctatttctaagaaatatattgtagaagcacttgtcaatatatcattaaaaaaaaattcaatccttttaatgaacaaaattatcaaatatgataactaatttaaaaaatctattaagagaattatattttttaataaccctaaataatttatataaaatatattaaatatttttttttctaaaaacttagggggcatgaccactccacaaatacacatagttccacccttgtatataatggtaataaaattatatgcttataataaaatagaagctaaatattatctaaaataaataatatatcatataattaaaatagataaagtcaacatttaaatatatgtagaatactaataaaattatatatttaaattgaaatgtatgtgttatactaacaaaatatataaaattatatataacaaaataaaaaaaaaattatcatctaagaatgataatatattatacaataaaaataaatatattgtataataaaatatatatactaactaacaacccacaataacccataatatttagatggcatggttctaattctttaatctttaaaaaatatatatagaaataaaaaaaaatataaattgaacattaaaaaaatataaaaatcatgaaaacttgaaatgctaaaagaatttaagtaacggtaaaaaatactattttcaacaaattttaagtaaagatatttttttttgacaaagtgattaaaatcactcatgaatttatgacgcccacgtccgccaccggcgctggaacctcctcgaa

SEQ ID NO: 131160 - DNA, 722 bp, Cannabis sativa
ggatctcaggctcaacaacaacccactctatccatcatgtggtcggccaaccaccagcagaagtccccattgccggccaaactcctctagaagtactcatggccgaccaaacacctctagaagtccctatggccggccaaagaagagcattccctctccaaggggagcgagtcacccaaagattaattgttaactgacaaggactgggagcgggtggaaacacccaaaacaacaatttgagaagtgaaattaatcactttagatagttggatccaccacactccagtaattggtgtgatctgccccatgttaacacacaaactccaccagtcaggcagagaagtatgggcgaccaggccctgcccaacttagggttgctagccatgtacaagcaccagatctaaggttggctggccttgagtataccctctcccaaggtatgcccagccaggctctagccaattcgaggctgcagctcaatcaaagaaggaaaatcaaccaggccaatgcagcaacagatccttctgtgtaagcgtagttggatcaaatttgagacatccttaagggcctaactggtccaaaaccttcagaacttgagctagacaggtcaaggggatcaccactcttgacatacattaatgccttgcccttgcctgagttcaagatgccgacttggaagatgtacacaggaaaagaagatcccctagtacacctgaagtact

SEQ ID NO: 131161 - DNA, 719 bp, Cannabis sativa
aaaaaataaaaactataatatttatttattttctttttcttttattaaaattaaaaaaaaattatctaaaaaaataaaacaaaatcctataatttatccccaaatcccacccaccctgatcctcttcttcttcaaacaatttatcaatgttccaggaaaaaaaaatctaattaattaaaaaaacctaatatagtacatcacttactggaccaagttcatatatttcccaatgtttgatgaacaaagctataactgatttatagctacagttatatgttgcaccatactctttaaactcattcagagccggtgatgccaaaattcagttgttgggtttttcttataaatgcatatgttgtgaatctgtaatggcattatcaagaaaatccatcaatgtagtacatcacttactggtttggtacatgaaacctcagtgtttcatcagccatttcccacatattgaaatgctcaaaataaaaatggggttttcttgttcatcacttaatgggtcccttcgatttcacaaggttgttaggctccggtcaacgaccacaaaaatcaacccagaaccggttcattggccttcaaatctcgacctcccagcgaaaagttctggaatgatatcggcgtggtcccgatctcaaatctgagcatggtgtgggtgagaattttttttgttcttgttgtgggaaaactgtaggagaagaaataaaatgggg

SEQ ID NO: 131162 - DNA, 1690 bp, Cannabis sativa
  modified_base (1651)..(1663): a, c, t, g, unknown or other
aaataaaacagtataagtgaagcctttaataaagagctgacctgtgactaccgaagaactgatagcagcatctgcctgagtgatagcaagtacttgtgctggggtaggcctagcttctggattaggttcctcccttttcaactgaggacaatctttcttgaggtgtccaactgatccacactgaaaataagttctcggttacacaccccagggtgatgcttcttgcaacgcgaacactcagggtaggagtaagtctgacgtctccctttgccctgatttccacaaaatttcttgctttgacccaaacttccattaattggaaaagttctcttcttctactcgattgtagaatcaccacccttcttactagaaccaaaaaacagggagggtagtggtcccaccagcaccacgggcctcttgggtttcttgcagaaattttaccgctccttctgctcaaagagccttgtcaaccatctcagcataagttgtagtgtcattggtagtaataactagatcatgcctgatcttggcattcaaccctgcaaaatacttttcctttttgctaaaatttataggcattatctcggaagccagcttggccaagcgatcaaattaggtcgtgtattcagtcactgacatattatctccctgaaccaactcaacaaactctttccactttgcactacgaatcacctcgttgtaatacttggcattaaacgaatcccagaattattcccaggtattctggtgacgtcccgagtgagggacaccatcttccaccacacaagagcatcctcctggaattgaaatatggcacacaccaccctgtcatttcctctctcaataaccgtcaaccactgttctgctttaaagacatcaagaccccaaaaaaatactagaggtgcctgcttctggagttgctcatacaaaagcttcgtacggttgccagctacagattgttctgatgacattgcaggaaccacaatagctggtggttgcatgggaggctcaacaggagcatcccgctgtctaagccttcgaatctcttcctcttgctgagtgatttgggcttgcatctgtgcaaacctctgctcccaatcaaaaagagcatggggtggattctcttggccacctctttgagcatgaccgcgacctctgtcgcatccacggggttttgggggtttctaccaccccgatcacctccggtctcaattatttcaccttattctttaacattttgttgggcgtccatattctaagacttagcctgcgaacccacaaggcatgtaggttaaacagtggtcaatatatttccaagaccgcatttaggattgaaacaacatttcacacataattacaatataacttaaacattttgttaaaaggtaaaagcttctagaaccgtgagttgagctcgacactagtgtagattgtacatatcttgacagtctttagtgaacaacccggtggctctgataccaaaatttaacgcccgtacttgacaattaattaaattgaaatttaaatatattttattatattagtcgggatcctgagtttaaaaccgttgtttaaacataccatatatatgttagagattattttaccaggatctagatatactactatgtatattgtttaacatcctaannnnnnnnnnnnnaaacaatggaatttaaacacatataaa

SEQ ID NO: 131163 - DNA, 569 bp, Cannabis sativa
tgactgtgcaagcagtccgtagttcaataaatatgagatcagtttttggacttcttgttgatgattgtcgttgcttgttacaagctatgccttatgttagtttatgttttgttgaacgttctgcgaatcgagttgcttactatgttgctaggcaatctcgatcttatgctgaacgcagaatccttagctcaaatgtctctgcaactatgcaggatttattgtatcaggattcttgctattaataaaagttttgaatttaatttcaaaaaaaaaaaaactattatttaggttatatacgatcttatatataaaaatatatatgcttaaattaattatttgtttcacttgagattgtatgaccatatatattcctaaatggccatttaaacacacacatgatattgatacatagagaatatatataagtatagatgtcctaacatgaaaaaatataatgaagttgtgaatataaaggagtaaaactcaacgttgtaactctaaaaaaaaaaaaatggatgtccatacaaattaatatagggaaatttgattttctatacttagaaaatcaa

SEQ ID NO: 131164 - DNA, 1039 bp, Cannabis sativa
  modified_base (26)..(44): a, c, t, g, unknown or other
aagttcttatttaggatgttaataannnnnnnnnnnnnnnnnnntaagatcctggtaaaataaaatcctacaataacaatcatcatgagaaaattttataaataagtcttgctcacaaagttgagttacactatttaaattagccataagttcattaataaaaggaatatttttcagcattggtagtccctcataatttagagtaccactaccaagtacctcaccaaaatgcaatctctaaatttgacttcaccattttttaaaggtttgaagtctatgagtatgtgatcatcatctatcatgtgtctagaatacccactatcaaaagaccaattattagaaatacgagtgttatgataagtaaaattagcaagtcattagattcatttttcttaatccaaatcttcgtgaatttcgatatatttttcctatcaaatattgttttccataatgattgaaatttttattttttaagacatttatcatggtaaatatttaggttgaatgtgacctttaactccacaaaagtgacaaattagtatgaatttttgagtcttactaaaagattgagaactcttacctaaagctggagagtctgttccaccaagaaccttttttgtacctacagaaacttacaatgcagggtaaaaattgataacggatgaactttcaactttctaaaaatgaatttttcataaatggttgggattcaacaagtcccatcgtagcatgacatccttgtccaaaattttggacatcgccaaaaattgaagaaccttgatcgtgcattctcacattcctctttaaaccatcaagatattttaaaaggctaatattttcttattttttttttcaaaatcaagattgtttactcaaaaactgatcctggtgatgtggacataaatatttgacacgtggcaagaagaaaaatatttacggagttgagtagtcccgagtcatagtagtcaacctgtgagggaactttagccctacgcccaagatgactccaagaactctaaaatgggtgtttggatcctgc

SEQ ID NO: 131165 - DNA, 1324 bp, Cannabis sativa
agtttctgaagcgtgcgagtgagaacaaagcgtgcgatttaattaattagtatgtaaatattattatttttagccaccacgtcaccgtttcatacttctctttatatattgattgattgatttatttgtattaaaagaataataatgatacgagatattatagttttgattaataattacataattaaattatcaaaagttagaataaattttaattaaaaattagaaaaaatgagaaaaaagaataagtattttaaagtgattttaaattatgtcatcgtctcatacttctctattatatatatattgattgattgattatataattgaaattttttgatctctatataatatattttttaatattgtatttagacctttttttatatgatagaattttaattattttttattgtttaattgaattaaagttcaatttaaaacgagatttaaatttgtatttgatgttttcttcttgttgtggaaatcttatttatctataataggtttacttgaaaataacattatgtagattttgatatgtagatgaaaaaatcagctacaatcaacacatttttttaagagagaaaataatgaagtttcaaaatataatgtgtcacctatagatattgatcatgtaaattttgaaaaccactctctaaaatctttaaaacttgacattagagaaggatttgatatcaattcattagagcgtgatcctggactacgccccaccaaaataataatatccactcaagatgcgtgacgaagttcgtagagcttatattaaagctagtccatatcagattatactttctagctatcaacaatcagagaaagcacattcatgtagtttttagtcatcctggtttaagctatttccatcgtggttggaatactctcataatgtaaatgttttattttgtttactgttaacctggcatggaaacttttcctggtgatatgaacatcaatatttgacacatagcaagaaggatgacatcatagagttgagtagacccgagtcataaaagtcgacctgggaggggaccctagccctgcgcccagattgcttcgggatctctaagatggaagttcaaacttcgataatttggatataactaactatctataagtactctgtaccatgaagacatgtagtaacctaatccaagcttcgagagctgaaattacacgaacctgcaaaacatcccagtcgaagtgcccatcatagacggccgagatgcccatcgccagctgcctagataagatccacctcacaaccgccctcatcattcacaatagtctctctctctctctctct

SEQ ID NO: 131166 - DNA, 538 bp, Cannabis sativa
cgaagaatagaagcattttcattctaatatatctcattctccactacttgtcttggttagaagtaataaaatgaaactgaatgggaaataaataatttttattttatttttttgtttggttgcatattttattggaatatcattctaatagaataatatttctattattttagtagaatatcaattttattttgaaatggaagaaaaagtcattccgatgagaaaaaatttaataattttttttatgtattttacattttattctattccattcttattctcattttcatttttatttctattcttatgtttttattcttcctaactaaacgccacctaaattcatttcatttcttttttttctaataccacattatattttgaagacaaataataacatataattcacaaacttaacagtatattaagatacttttaacaagttaaatcctttaagggtcgtcttaaatattttgggggccctgttctaatttaaaatttgggcccctacaaaaaaatataatttataaataatatt

SEQ ID NO: 131167 - DNA, 526 bp, Cannabis sativa
gtattagagcggaaaaataatgctttccattgatcctaattctttatctctcatcgccgtgttctcttctctggcgacgttcttctctcagcatcgagatctcgatactgcttcaaaggattcttttcatctttgattcgactattcagaatctcttcccatctttaaacttctctacgatctgtgatgtcttcaaaagatcaaggttctcgtactggagatggagttacagctcagacattaatcgacaaccctcctgatccagttctataaggcaattagggaatacaagttgtaagaaccaaaaatacacttaaagatcctacaaatctgtacaaccttcaccatgaaaataatccaggaaacgttttggtgtcacaacctcttataggacaagacaattacattgcatggagtagagcaatgcagttggccatctttgttaagaacaaactcaggttcttggacagttctattcctaaaccttccttgtaacgcccgtattttatatttactaaacccgaaa

SEQ ID NO: 131168 - DNA, 1164 bp, Cannabis sativa
  modified_base (943)..(945): a, c, t, g, unknown or other
ttcaacatattctaccagtgagtatccgttctgtgttgccaaagaaagttagatattgatccaatttccttagggtctaatcttttgcaatcgttcatgaagcttagacattctccacgtttcatatataggcacatgagattataataaataaccgcataactactctttgttgttatttataaatggctatgttgactgtgctttgttgttttcgtcattcaattaatatttttcttaaacatctccatggaataatatctaagtgtataatcatagtacagcttgcactcttccttaaatactaagtgaagtatattcgagacgcttacttcaacgcgtcaagagcgagatgaataatattaaagttgtccttattctggttacatgctcacgggtatgtgggtcaatgggctgcaaaactcattatctatccttccaaacaatttcataatgtattatgtttatcccgagatggacttgttcacctcgttggtctcatcagtcggtagcttttgtctccccataatctatgtgatggcaagttcgagtatttctatcaactgtatttctcaaggcaagtcatctgaatgcatttattgatgcataatttaagctggttcatattctagctttgttacacatgtcagcttcatattgttgctcgaaacatgggtataacactaataaattaaggaacttttattggcctattttgttgcaccggtaaaagtcaataatgcgacaataaaacgtttttttatttaacctaaaatgaaatactgcattttgaaacacttttattgacgcatatttgcgctggaaaatgtcttccccaccaaccgattccccacgcgggaattttccctcttttgttttcggcggcttttgtcggtgtattgttgggttttgtgctctaaataaaaccaatttcaatataatnnnatttactaattaataaaagataaaaaattattttatgtttcatggttcacataatttatttcatgattatatatatttaatgtataaattctattaagtccagtttatatagttatttatgattagagtaatgtgaccacactggaatataatcatgattatatgttttaaagtttaagtcccatgatttgttaatacactggacttagactgacatga

SEQ ID NO: 131169 - DNA, 1752 bp, Cannabis sativa
tactcgatttatcactttattacttgttacgattgcgtgcacttgcgtatacaatttttcaaaacagcttatcagataagacgaaggaagggaacaacccatcttctatgtctcaaagactcttttagatggagaaacaagatacaaccaacttgagaaactggcactagcacttatcacaacagaatgtaaactcagaccatattttcaatgtcaccctattattgtgttgacacaatatccacttcgtagcatcctacacaagccaaagctttcaggaagactcaccatgtgagcagtagaactcagtgaatataacatcacattccaaccaaggacaacgatcaaatctcaggtattagctgactttattgctgacttttccagtgacatgcatgtataagtgaaaaaagagttgttgtgcttgaaagagaaatttgactctaagtggaggttgtccgtagatggctcaagcaacagtagaggatgtgacttaggcattgttctcacctcaccccaaggagatgtcattcaatgagcaatcaagtgttatttcaagggaacaaataatgaaactaagtacgaagtgctccttgctgggctcgaccacgctaaagagatgaatatcaaagctcttgagatcacgtcagattcccaactcatagtgtaacgccctagctcttagtcatgtcacgacaactgattatgaaatcctaataccctgaacttggattactagaaaggtaaccacaggaaaatttaaactttatttacaatagtatgaaaactaaacttgcaataaattttacctttacaaataaacaaaaaatacattttttgggatcccgtaaatattttcacaaaatattacaagttcatttcataagccgtcctaagcggcaaaaaaggacacaacaagtatactatataatatctgattgtgactataccgcgatgacttgtcagaatacacctgaaaaaaggacacaacaagtatactatataataatatagtccataagcacgtcacaacactaaaattacaattttacccttctcgggtcaaaatggcaaaaatgcccccggctcaccaacggggtcttaacatgtcatttctcaatttaattcacatataaatacacaattaactagttagggtttgctaatccattttcttaatcttaggatattacaattatcccctccttatagaaattttgtcctgaaatttacctgaccaactctagatatttctgctgcatatccatctcaagttcccagattgcctcttccaagactttttctcttctatcaagtacttgcactggtttttccacatatgatagatctggctgaagttgcaatgctttatgggtctgggatatatttttaaagcatcaaaacgtgaaacacatcatgtacagctgccagcgctaggggcataaccaacttgtacgctacttgccctatcctcttaaggatctcaaaaggtccgatgaacctcgggctaagatttcctttcttaccaaagtgcttgatgcctttcataggtgatacttggagaaataccatatccccgatctgaaaattaatatctcgacgatttggatcagcataactcttctgtctactctgagctgcgagcatacgcattttgattttatcaactgcctcacttgttctttgaacaacttcgggacctaggaactatctttcacccacttcatcccagtgaataggtgatctgcattt

SEQ ID NO: 131170 - DNA, 1494 bp, Cannabis sativa
tattatattgagtattcactcctcttgttatcctaaattttacacaaggtgatgcggtatcattctgggtgacacgtgaagagaatcctgagacctggatggacaatttcactcgcaatgtgttgtacagagagattcaattctcaagtcatgatagaagtcggggatatccgagcagagtatgcgacaacactcaacaaactttcattgtgcaggcaactcgcatacactgaccaaagaatgggagctgtatgttttcaaggatatatcccatatattcacaagcttgcaagttacaacaatacccctaaaattatgagatagattcgtagtagcaagaaagaaagaaaatctacttagtttctcattttatttattgtaattatagaaagtaagcagtttcctattttatttcttattagttttggaaaactaattggttgtaatgcctccctatagatagaggaggcatctcacttgttgacctcgcttttagtcattgacagtgggtcttaattaaagcgataagaataattaaataacagaaagtaaagagcataaaataaaataaaaaataccagattttatagaggttctgccccttatgattggtaatagcctactctcatttttattgtattgacttgtgagaagggagagcaagaatgctctaatctctctcgaaagttcttaatatgatctctaagcaattcaatcttagttcaaggtttcactcttgagtgctttctctcttaattatttttgtgtctctggatagtgagattaaaccactatttataggagttaattacatgaataatggtttctcttaatatataagaaataaaaagagaaactagtttgtttccataactacaataaggagattggaaaatctaggttgattgcctttatttttttggagatacgaattaatcccacaaatatagggatttgttctcgtgtcatgcaagcttggaaataacgatgtatatttctaaaatttataactcgcaccccatggtcgatgcatgcaagttacctacgtgatcaagcaggtcagatgtccaccactaatcttgccctaacatcctaccattcatgtatgactttgagtttcatatcaatttgcatagctttttaggagtagaatcatccatccaggttatgaaatattatacgcgtgtcacctactcggatgccacgtcatagtgcaaatattaagataatatcactattcgagggagattaaggctttctttcttctctactcataagtcaataaaaactaaaggggagtagactattaccaccatcaagggactgaaattctataaaaaactctggtgttttctttatttaatctttatctgttatcattatttaattgttcttaatcactttaatttgactcactgtagttggcaaaaagtaaggtcaatattttagtgttttcattgagagcaaagaaactaggggtgagcataaaatcca

SEQ ID NO: 131171 - DNA, 602 bp, Cannabis sativa
  modified_base (397)..(401): a, c, t, g, unknown or other
ttgaccacgccggcctacgtgccgaattgccatgagttgttttaggttgtatcagttgtgtattttgaattttttatcgtataaagtcctttttggtaaaactttcatacagggatcttcggaacaaagttttagtgtttttataatgtccgtttttagagttttagtttagtgaagtttttaatatcatcacagattttaataattaattaatctattattactaaactaatttataaaataatacatgtgacgtgcctttagattataacattacaacttggtattagagcacccatgattttaaaggacccgaagtctggtcgaatatatacatttgctgtgaagacgagtcgactcatggtatagtaagtatttatattatttgctattggannnnnttattataaagtatgttgggaaaataacatagagatgattgtgataagaatatgtgtgtgagacatatgcatattggtattgtgatatttgttgaattctgaatggttggtagttttggatcacgggtacattagatcatgcagcggcgatttggtcgtgtgaaccgcgagctggggctcggggtaggtggtgaggaagag

SEQ ID NO: 131172 - DNA, 1167 bp, Cannabis sativa
  modified_base (960)..(983): a, c, t, g, unknown or other
  modified_base (1116)..(1123): a, c, t, g, unknown or other
catttaattctgatgtacctcgaagccacacaactgccaaaataaaaggacatgcatcttttcaaaaaagaagaacatgacgaaattaccctttgtaatcattaaaaatctctttttattgaaaaagaactttttaagaggcaattgttatacccaaaattcagtgagcatattagaggtagacacgtgtcgaactaggaagaacgaaggactcaaacacgcaatcgtaagtacacttggcatggaagaacttgttagaaacacaatttgcataatatctttataactcggctgattgaacaatcttctatgagacagaaaagtaccaactgataacttatgtatcgacgagaaaccatgtgactgcaagtgtgcatgacgaggcttcaacctcgtcgcatggaagagaaacaataacgctaaaaacacttagcgtatattgcataatatacaaactaagtgtaaacaatttggtgaatcaagatgacagacaacaaggcatctatcttgctgaaagatagcatgcatgtgagaaagatcctctcgacaccaaaaaatttagttatcagaattaaagcaatattaatttcgggaagtcatatgatgagccacagctcaccaccaaagttaactccgctccattcctagcgaggcatccccatgagataaagcttaccgtatatccttaaatatgcgttcatctaggccaaataaaagcgggtactcatagctgtgtggattataaataaaagttgcatttacttagcccaatttgtaatcaaatataatgatttgagggaataattgttgtaaagattattgtcaacttttgtaatttattgcccactatgtaattataaatagtggcagccagataagatgaaaaaggggatgaaaaactcatacaggagaggccgtaaaaaaaacacacaatccgaaatctgaataagattgactcgnnnnnnnnnnnnnnnnnnnnnnnnaaaaccacgtaaaaaaccctatgttcatatattattttttctgtgtgaaattactattgtgaggcacaaatttagttaatgaaaatcagcgttaacagtaaggttttctaaactgttaattccatttttggcnnnnnnnnttgacaaaaatattttattattctttgtatatttcggctggcat

SEQ ID NO: 131173 - DNA, 672 bp, Cannabis sativa
ttcgtatttgagttaaactctcggttgttaagccacttcctcgaggttgaatgataagcctcccaaagattacaaatgagtttttgatatgagcgtctatcgaagttctgtttgaatgtagtttacttggccatccttttgaaaagtgcattagtttcctggagcgcatggatagtggtaatgataatgatttcctctacagaccttggatgaaaggagccaaacttcctacaataggttatgacaagtgtagaactgatttttccacgggaaatacttgtccacttttgactcgttttgctcaaaccaccctcaattcaaccattccccgattaaacactactgccaaacctcagccttgagttttactacgtggagaatcatcctcgtgttgtgttttgcgccctaaataaaactctatttcaatgtaatcttgaacattcatttatcaataaagaaacagatttatttacttacttgtttaatgtgttatttggttcatgtaatcacttatttgatttataagacaggcttcctatcttaagccactcctcaacacgtggaaatcatgcgtgcagcatggtctgccgaggtttctcggcatggctttcccaccagcacacgcggatagtatgtagtgcataccatctgcaccaaatccatttttttttt

SEQ ID NO: 131174 - DNA, 736 bp, Cannabis sativa
tttcactgttgttctactggtgttttttagttgttttactgttgttttgagttattctgtttgtgttctactagtgttttataaaaacatagtatttttgaaaagtgttccgtgtgacagtatttttgtaaaaattaacccaaatttcagaatttttgtaagtttccctatacatatcataaacttacaattttgcgccatagaaatatgtatttgtatttatgtctgttttgattgatgctcattgatataattagaatgccaaaaaaatgcatataatcaatatttatttaattaatttaatttttttatagtaaagtttaacagtatataagtcttgtcttttgacatggtttgagttgttcatgtttcttgtttgtgtgtgagtgtgcttgttgtttgatccggtgggttgtcaagttctctcagtatagaagaaagcgatggaaatgttatgatacatggtattccaatgggaaaactggtgtatgatgatgaggataaagatttatcagatagatgatagatggtgcctcattggaaggttccttaccaaatgcagtattgattttcaggcgatgcaaaaaaagatggttcctttttggcaactgggtaggggtgtttatgttaaagtgattagtcccaaccattatatttttcaattctaccatgaggtggatattgaacgcgttgtagaggggagcccgtggacctttgtgttggaaatattttacca

SEQ ID NO: 131175 - DNA, 536 bp, Cannabis sativa
taaatgctcttatctattctcttgctaaattttctctttctttaaatacttctagaatttggtagcagggtcttccgcctaacttactttaaatagttaaagaggccctttaacttcgtatcttttttaatagaattatttatttttgtaaaaaaaaagataatctttgaaatacatcaaataaatgtacattcacataaaaaaaattaatgaatgtcctaaaattataatattattaggcttttaacatgagggccacttgagaaccatctaatctaactctacaaattggatgaaataatttgtgcatgcaccacttgacatctgttttgtgtggctcctttgaacttgcggactttgaattgtccctatcttacaaataaaaaaataattaatattttttacacttgacttttttatactactaaatcatatttttataatactggactctttaataatactatttttcttttaagggtaaatactattttggaccctttgttttacaaaagttaccaattggaccctgtgtt

SEQ ID NO: 131176 - DNA, 1612 bp, Cannabis sativa
gtaaccaataataacacctcagccaaaattaataagaaataataaatatttttgtcaattaaatatgctaaaaatggaattaacataatcaattataattctaaaattagagttggtcttatgtatgaatttttactaagtaaggacttaattatgaagaaaagaggttttggggtttatttgttaattaagagactttgtatggcctaattaataaataagttaaatgacaattttatttggtaattaattataattattaaataaataattttgacatttatatgattaaaattggaaaatatggtattattgaaagaaagataaattgttaaaataaagaggcaaaattataactagtgacgcccacataatggccgaccatttagtgtgaatttttgcccattattttatttttttaatccatataattaaatcctaaatcctagttgaaatactttcaaaggaacatgatgctcccatctcatcctcaacactttcaacctaacaaatctagttttctaactctgtcagacaactagtagatgagagactcttttctatagtgatttcgcacattattcttgttcttcatgaattcaagccatagtgatagagtattatgcccacacatagcaagtcaagtactcaatcatagcactgaagaaggtggttaaccaaattgaaggagagaaggagattcaggctcaaatttgttattatctgcgacaaagatgaacaagatttagagatctgagtggaaggagtcatatgattctgctgccatcaatgtaaggttttctcaactcttatgtgtttaatttcatcgtattagagaattcatatttagggtgttaatgaaacatacatgttggtaaatctagatcctagtaaaataaattccaacaagtacacactgtgatagcataatccatcccttagtttaatcttaatagcccccacttgtcttgtagtgttgaggattgatcgagaaaatactagtgtgtatttttcacgagttcaattatttttggatagataatcgttgataaatatgaaatgatacaagaataccctgataggcttatagttcaaataagttttatctaaaatatttttctaaaaattgcttccaccttctaatatgatttgaaccataaaaatcaacagaatgtacaaatatttcggtaagaagttgtaagatcttttacgtttctttgtagttcatttagtggccttccctactacatcatgcattcatgtagttcatctttataccctatctgtcattttcaagtcaccttttatattaacctgagtgcattttgttctgaagttgaggaacttggttttatgtggtctcctaccaattaggggtgttcataaaatagccaatccaaactaatctagacgatctaatctaatccaaatgcaaagtttagatatccgaacttatgcgaattagatgttgattggcatgtaaaagtaacttattcaatccaatctacacatgtttacataattttttaaaagttatatatataattaatatttgggtaaatacctttttggaccctttgttttacaaaagttaccaattggaccctgtgtt

SEQ ID NO: 131177 - DNA, 751 bp, Cannabis sativa
aaagtttctagtgaggaacatcattttgatttttatgtaagtatgtctagttaaatcacaaattaatgcacccctacaccgataaacttcttatttatttcgatatttaagaaaaaaatttagtataaattttttataattgtttgtgttattattatttaagacattctgtaaaattttgagaaatttaaaatactttataatagagaaaatcgtattcgaatagtttattcagtataaaataaaagagccacgtatgtagcagactgtttgaactttatttttaatgtgttaaatttttttaaaattttttaaaatttattaaaatattctaattacaacgtacataactatatataaaaaaaataaataaactaatactttttgtgaataccaatataaataagcgcatgaatacacccttttaaaatagtgcattgtaaaattttctatacacatattacatatatatggtatataagccaattgcttgcttcacgcatttaaaaatataattacaagtttctagtgaggaacatcattttgattttgtttttattataaggtatttcctactttttatggtaactacgtctagttaaatcacagattaattagaaaagtttagataaattactattctttttttaaattttgtacactttaaaaagattttttaatatatatttttacggtatttataaaaataatataaaaataacaaaaaaatcacataaaaataataaaaaaa

SEQ ID NO: 131178 - DNA, 1032 bp, Cannabis sativa
tactgccaaagtcctaccctgtttcttttaatcattctctctcatcaattaaacgcgatgaacacaatattaccctccagggcaatatcaagttctagccttcatcaaaggaagtagacttcagaaatacctcgatcctgatagagctccaccaaagtacctcagtgtttctgatgaaagatctcacactgtcaatcaattgaattcgacgatttggaatagcaggacaatctcctagtctcttggcttctatcgtccatgtttgagaagaccacgaatcgaatgataagctgtgacaccactactcagatcgagcaagctctcaacgagtattatacaactcttaatgcagcaaatataggactgtacaagactcaactttgaaacagcaagatgacaagttctctcaatgattatttgctaaagaacaaagggattgttgatcttcttgccacgattggtcaaaaacagatgcctcgagatcatattgaagctattttcaatggattgctagctgagtatgatgtgtttgtcacctctattactacaaggaaagatgtctgcactatagcagagatcaaagctttattaatggctcaattgggtcttattgacaaacacacaaagaatcttgatatttcgaaagctgaagccaatctttctcactcaagattctatggtttcagtagtccatataatcgtccaccgtactcaactccagctattccacttggattcagtcgtggtggtccccattgcactgatggttttacagggtatcctatgtcccgaggtggtcctactccaaacaaaagtggtcccttggtaaatatggtggctattcaaactttggacgtggccaaaatcaccaactgaattaaaaagctcaatgtcaattacactactaaaaaaatgagttttctcgacgtttttaaatagtcgtttaaagtattcccgtcggtttctataattgtcgcccatacgaccctcgtaaaacgggcataataggcgacggttcaaaaccgtcgctaa

SEQ ID NO: 131179 - DNA, 535 bp, Cannabis sativa
tcttatttgaggttgttgtatttctaatactttatctattttttaagctaaagcgatcgcattgttgatgggattaagataagcataagatattgtattgcaagtaaaaaaaaaattctctaattatttgtctctggtgttagctttgaataataacaacatgtattttctaataataataatatctccatgtattttaatgagttaggtattttactttcagacattaaagtcttgctgtcaaattttcatggagcatctctttcatgttagtagtaactctagtatttgcagttaatggattggctaaatatacttcatggatagacgatgacttttttttggatgaaagagatctctcctcctatttgtattaaggctcttaaccaggcctgaccttgagctaaggcaggctagacccgtatctagggtccatccaaacccaaggtctaaaatttttagggttaatttcacaaatgcacaaaaataacaaaaaaaacaacaaaaatacagtttcacgaaattttaaacattt

SEQ ID NO: 131180 - DNA, 581 bp, Cannabis sativa
tacatacattgagattgaccccaaaagtaacatatatatatatatatatatatatgatatgaaatgatttttttttttgtttcaaaaaatatatataatagtatcaattaagtaattgatagagttatttcaaatatgagataaaattcaattaaaaaataaataaaaagtaattgattcaacaatcatctatatataataacaaaaacttatggaattgttgactctttaattgttttatctctctactttgatctttcttttagaaaccctaattaagtagaattttttttttcaattcttgatgtcgtctggaatagaacacactactttacgctacgatattctaaacttattggttcggtttagaacatcgttacttacaataactataaaccctaaagtttagattatgttggcatatttttatttaaaaataaaacttgtttcagttgcttatcacgcgtataagaaaaaaatagttactcgtgcaaaatattttaatcttatttttaattttgtaaattatttagaattttctaaaaatttacagataattttaaataaggctaattaggatt

SEQ ID NO: 131181 - DNA, 513 bp, Cannabis sativa
cgatcttgacaaaagtcatttttaccagcgcacttttgcgttgataattttttttaagggaaactgcttatagggcttgctatatgcccgtgcaaatatgagctgccctggtaaaaatatgttttgccagcataaatatgcgttgataaaactatgacctttttaccatcacagattgcgaaatgcactgtgaaaattgactttttgccagcacagttatgacctgcgctgataaaagtaatatttcttgtatagtatttactaataagttagtgaatgaaaaataataatattgaattttggtacctcttacaatatacaaatcaacatctatcctctacaaatataagatattatattatttgaatggaagtagtactcactacaaaaaagcaactatttttagtaatcaagaaagaaaaaaataacaactatttttagtgataattatttttattagtcataacataaattttttgtgacttttttttttttttgaataatgatgaattt

SEQ ID NO: 131182 - DNA, 1182 bp, Cannabis sativa
catcactccattgtttattcacaacatcatgaataaccataccatatggggaaaaaataatatgttaaatatgttgagttgagaaaaaaaaaaatatgaagaaagaaagagggattactacagacagaaaacgatgaaaaaagggaagacaaattgacatcattagtcaaaggacgtgtgtgtgtgaacatattatttgtaatatttcataaattattataaatggaatgtatacatatcaatatatcatttaagtgcatttattaatatgatctttgactatatgtcctctacaattttatatggttatagaatacatttactccttctgttcaatccttcaaatcacaatttgtactcatgatgtggcagtgtaacttaggatagaatatattttttttgtaaggaacaaagaataaaatattaatttcacttctttcttgaaggaaaccaccctactttaataatcaaaatggtattatttagacgatctccaattatcatattaattaagggtagaatttacactaatttaatataatttttattttactttttaatggaacagttccaataattcacaccaaatatcacattaaatatattctatcaaataaatatattttacttaaaccatctcactttatattatttacattaataatcaaaaatagctaatttatgaaataattagtaaaaaataaggtaaatactattttggaccttatgttttataaaagttattgattggaccctcaattttattaaatgataaaatagactatgtattttctaaaactgtaaaaataggacattgaactcaatttttaacaatttttattttaatataactaacataaagacaatttttaatataaacagatacagaaaatataactagttttgtcataacacttctagatcggtttattattaattttttaaataaaaaatcgattcaagattctatttataccattttagaaagggataattgcggcaaaaattcccaaaaaacttagagttgatgcaaattagttaccaacctaaaaaattgacggtaatagtaaggtcacattttttgtaagtctgttggtccctaacttaactgatcgttaaacctaaatcaaatgccacgtgtcaattttttattagtccaaataataattttaattaaaaaaa

SEQ ID NO: 131183 - DNA, 803 bp, Cannabis sativa
tagtaaaaatacatttataaattccaaaactcaatatatgatttgaaaactattatcattcttgtatcttatttataattaccaatatattcaaagtggttataaacgaaataactaaattactggcatcaattttttcaaaaaaaaaaaaaactaaagaattattaattaagatatgaagaagaaaaagaaaagaacactatattataaataaagtataaaagcttaataattacttcaatatgactttggctccatgtgtaaaagctacaaataagttttatttttttaaaataaattttaaaaaaatctttgatagtaatcaattattaatctaatgcggtatataacaacaattaaataagaaattgttacaccaacaaaaaaaaaatctttaatagtttttttttactttaaaaatataccagaccatattgttaccaaaatatataaaaattttgtgaaaatattgtatatttttattttaaaaaattaataaccaaattgttagttttttagtaattttgtatgacttttgaaactatatctatattttaaaataaataaattgtaggttagttatgatatgtatttatgttttataaaagagattagttattaaggaattatttgccatacatgattagtactttgaagtgatttttttatttacatatagaataataatattagaaattaaaaaaaaaagaataaatcaaaaattagaaaattgaaggaaaagaatctcagactttaggagctttttcatttttacgcttcaaaaccgtttttttttttttttt

SEQ ID NO: 131184 - DNA, 741 bp, Cannabis sativa
tttgaaaattacatgaggaagaatcgttttgaaacgagcaaccaatattttagaacaaaacttgtacatgacattacataagctattattggacgaaaatctttcatagttttggacttcttaacctttggaaccaaggtaatgagagtttttttaaaagcagcaggattggcccccttattcagtactgataaaaccactttagttaccagaggtcccacaatattttaattatgttggtaaaacatggccgacataccatctaaattcgaactactatcaactgccatattttttaaagcatcattaacttcatttgaaataaaatctcttagcagataatcattatgttccggagtaatggtagtaggaatggtggataaaacatgtgaaagagcccaataatcctcttgagatgctgtaaaaagttttgaaaataattgaacacaatctcgaaaataccatcttttgaagtagtaatattaccatcatcatcttggagagagcgaattttgttgttagactttcgagcagaagttttagcatggaagaatttagtattttaatcaatcaatcctaaatcgttgctttcagtatttttcttcctttgtttaaagttcatccaataaagtctcgaccaggcccggccctgaaatatagtgggctatagggtaaaaattattttttgggcccttatttagaaaaaaaaatggtatttttcaaaatcagcaaaaaaattgt

SEQ ID NO: 131185 - DNA, 530 bp, Cannabis sativa
gagtaaagtttaattaacctcaatctttaaaacaacactttcaacgactatgctaaacctttttttgatatatatttctcattatttaacattttatctatatactaataaattaatattttttttttcacaattttaggatctgaatatttggaagtccaagacgcaagccttgctcgcctcacctcaagtcagccctatccccttcataggtccacctatgccttaatggatgtctcatattgttgttattaacattattaagttagttctacaaaatttaatttaatttaaatataaacatgtaaaatttaatatttatttactggtattagaaattttaaggttcttttaacatttctcttaacttaatggtagtattacctttactcacaaggattagatcccaaatttaaatctaagttgaaaccatagaaaaaaacttaaaaaatttgtgtttcctttcagaaatctttcaatgaactaaggtagtatttagttggaggtaatgaaatggaatagaatgaaaa

SEQ ID NO: 131186 - DNA, 560 bp, Cannabis sativa
ttaattatattaattgtgattattaatttttttttttatacacataatattaaaaatattcaaatctcatattcaatatcatagaattagatatatcgtttatcttattgattcatataatctgacatgagtttaagatttatgtgtattttcgatctattttttaacaagtagtattagagtcccactctatgttagattatttaggttaattatattaattgtgattattaagtgtttttaatacacataatattgaaaatattcatactgatttagaattttgaataatattgtgtgttgtattattagtcataattatatgattgttgaataaataaagatgataatatatatatggagaaggttttaatggttacattaaacatgttactatcatagttacattttttagccattagattactattgaatggttgtgattaatttaaaaatcaaataaaaataaataataattaacttataacctaacaatcactttataatttatttccttataaaactttaatgaagattaattatattttaaaattaaatta

SEQ ID NO: 131187 - DNA, 782 bp, Cannabis sativa
agataaattaattaacaaggctatcattttcaattttcagaaaaaaggttataattctttatgcttttctattttcgtagatgcttttgattaaaaaaaagaatgtttaaaaatgtttctatattagaaaatatatattatagacacttgcatgcacattttgttttcttctatattaacaaacatttttttaccttaacaattaacaaaaaaattaataacagacatttataaaatgtatataaataatacttgatatgattttaaattattaagatgttgtatagttttaaactagaaatgtttataatctattaaatgtgattatctaataaaaattttatgaaaaattataagtttaataattttttttttcctcaacagttaaaactaacactattaaaaaaattaattaattatttaattttttaaataaaatctaaattttaattttatttattaaaatataacttagataattatttagaagaattgtttatcaagttttttgaaaactaaatatgttaagagcttaaaaaagataaatgataataaataataaacaaatagttttatacgtaattcaggttttaatgatccttagtctacgagtctatattattggcctctttgggcaaatgttttcaagactacaagacattacaatgaaggttgctctgcttctcttgagagagaggtttcttagaagggcaatttgcggcataacctctttaagtggccaggtttttgcaactaatcctcaattctaaaattttggtggt

SEQ ID NO: 131188 - DNA, 1095 bp, Cannabis sativa
caacatgtagtataagcatactaattttacaataaataaaacgttagatttatattaaaatcagttgcgatgcctcatttagtttactcaaagatgagatgttttatttatttgtaaatccttgatttacagagatcgtaactaatttacaaagaaatcaaatgtagtcagtccgagtcttgggtccaaagtccgactctgagtttaagacggggtctaaggaaacatctacgttgagaaggaaaatgcttatctaggacccccaaccttggaccttgtctcaaactcgggacttggacttggaacccactcggactgactacaacctaaaaagaactggtcctagattagcattttctttctcatcgtagaagtttccttggaccccttcttaaacttgaactcgagctggggacccctcatagctcttattaaatgatctttcatgatcctcattgccatggcttagatatgatcctcatcagaattactaagaaatcaaacgtttgacatattagtccattatttacatagggatcaaacattggattttttgtaaatcagttgcgagcttcgtaaatcaaggcaacattcagaataagcatactcaaagatgaaacattttatttatttgtaaatccttgatttgtagagatcgtaactaagttacaaagaaatcaattgtagtcagtccgagtcttgggtccaaagtccgactccgagtttaagacagggtctaaggcaacatctatgttgagaaagaaaatgcttatctaagaccccaaccttgaaccctgtctcaaactcaagacttggacttggaatccactcggactaactacagcctcaaaagaacaggtcccaaataagcattccccttcttaaactcggactcagattagggacccctcattgctcttaataaatgatccttcatgatcctcattgccatggcttagataagatcctcatcagaattactaagaaatcaagcgtttgacatttcaaggatttacatagggatcagacgttggatttattataaatcagttgtgagcttcgtaaatcaaggcaacatgtagtataagcatacta

SEQ ID NO: 131189 - DNA, 1003 bp, Cannabis sativa
  modified_base (35)..(56): a, c, t, g, unknown or other
tttaacaaaacacatggtccaatctgtaacttttnnnnnnnnnnnnnnnnnnnnnngtatttacccttaatttaattataaaatattcaaaataatgtttttcttttaatatttataaatattaataccggcggaccccaccgctattaatcatccggtattaatattattaccggcggaagaccatttttgtcgctaatagtcacttatagcgaccaattaataccagcgaattctaccggtattaattattaccgacggtctggtttattaatattggcggatgtctccgccggtaatactgaaatttgttgtagtgattccaaacacacaagctttcgggcttggtattattcttgcatatagacctttgggctttgagcctaggttttatttatgaatgtctgtgattatttttgatcgcatacacggacattctatgtgttgacaactaataacatgtgaattcttgacgagtcatcgaacacattagtcatttggaccatacttatgtaaagaaacggtcttcacttgtcgcaggggagatttacttgctcatcgcatataatcgatatgcgcggtgagtattaacttctctcgatctcgcttatcttttgaccataccaaacatagttatgttactagacccttatcacgatcgcatcctctcacaagtttgaatcatgcaaggttggctctacaagggccatatatattgtcacgtcatccttttccatcaagaattgaatccacatgttcacttctcacgagactgtactcgtatttcaagacaaaaaattcgcactataacattaacaaatttattttctgtgcaatttaacaaggggtatatataaattcttagttgaataatgatgttgttttaaaattagtcttagggtcagtttggcataactgtgctgtgggaaaaagcagctgtagcaaaactgtagaaaaaagctgagctgagtgttttgtgaattataaattttaaagtactatg

SEQ ID NO: 131190 - DNA, 640 bp, Cannabis sativa
tagcaagtgagaggataacacaaatggtgaaggacttaacaataggactgaatgtttcaaggaaatcgattccgagttgttggaatcctttagccacaagacaagctttgaagcgactgatggacccaacaacattgtatttgatatgatacacccatttatttgaaatgatatgcatgtgaggttggcgtcgaacaagaatccatgtgttattctttttaagggcagtgttttcatcatccatggcagcaaaccattgaggagaacgaagtgcttgatcaaggaaaatgggtatattgtcaactggtagggaagatgcattggtgagaaagagtttgggtttgtaaataccagctttggagtggatgatcatgaggtgtcaagaggagttggagggtgcaagaatgggtgaagaagacagagaaggtgagctatgctgggaaattagtgaggtagaaataggtaggacaatttaaagtgggagagtggagtatgagtgtgctgagttaagagttttagcttgattattggaggatgctgagccagaggatgatgatggagaagatagcaagggaattgcggaatcatggtgtgacagttagtagtcccgtgatctgtaagggaaaacaccgggtaagct

SEQ ID NO: 131191 - DNA, 823 bp, Cannabis sativa
tatttatagtgattcacactctttgacaattactaataaacccctatactatttcataatgtaacataaatatgttataataataatactaatagtggaattgattttaaactttaatgtcatttaagaatgaatatcatgtttaatggatgatttaaatttgtctgaacataatattttaatcattttctttttcatgcatgaatctcatatttaagaagaatatcatgttgatgatgaaatgggtatcgtgtacttaaagttggaatggtagtgaaggagtttattattgggaagagaatgaaataatgggtatgatgtgagagccaccatggctggttatttcagagataaattataacatagtattacagagcttgatgttactagagtctctcaatctacgatcgttcagcaaacgaaacgcactgatactaaatgaaggtgtgaccttagattattatttcatggtcaaccggttgtctttagtacctttgccggaaaaggggagtgtttcttctatctctttttgattattccagtctttattgatttgagtttatgatttggttgttggtcatagtttcagtttattcctgctccaaattatacttctatttatctatattcaaatgattttttttttaattaagattttcattatcaaggtgccagaattttttctcttttttaactttctttaatcttttgtgtataatatatatatatattgttataaaataatataaagtagatgagaggaaagaagaagaagatgaagagagaaatagaaagtgaatgagaatttatgagttgtttattc

SEQ ID NO: 131192 - DNA, 697 bp, Cannabis sativa
agaaactgctccctcaaatgcttctcctgtgccttcaaaattgcctcctggtgttgcaactgcttcaactccaagggattcatcgcctcctcggtgtgaatcaaagaatatggttgtcaagaaagcttctacttccactcccacttccagaaaatgggctcccaaacccgtggttcgaaaatcagtgagacctgtccgattgcccaaattgtctaggtctgattcgaagtcttcatcttcaactgataaggcttctccttctcaaggcactgaatctcctcctgctgaaactggtgttgcttctgtcgcatcaactccaaagggtccttcctctcggacccgtgcccaataagcttctcttgagaaggaagctcgcaccaaaatacgccatgacaggccaattcctgctgtcaaaaagctcaagatgtatcctccttcggcctcctcgagttctgatggagaaaaagagcccatggatgtgtcctctgacgactctgagaccaaaactgttgggttttatgccctaaaaaagaaattccagaagatcctattgtctcctctgacagtgaggaaactgattgagcctgagccacccttgccaaaatctacagcaagcacttctcgttctacttctacagccaaagcttctacagctgccaagggtaaacaacccatgaagagcaccattcctggtaat

SEQ ID NO: 131193 - DNA, 517 bp, Cannabis sativa
cctaccggtagggaacttttgctaagtcctaccataatcttgtcctataaatatatattaaaaaaggctaatacaactaaggcaatcaataattatagtaaaaaagttatcaacgaccttaattagaaaggtaacagttaccttaaaacctaaataaaccccaaccccatatacaaaaagaaacaaaaatcaaagaataattgtttacttaacaatgaaacaaaacaaatagataaaagagaaaaaaaataaaaacgaaggtacgtaaccggttacctaaacaaaataaacgaaaaatctctatatctaaagaacaaactataaaatagagctagttacttctgaacaaacaataaaattctaaataagaaaagtaactgattacctttaagaatttttaacacaaaataaatcaaatactaagggcaactcgaatggagaaactcaaatttagtgttaaatcaagggttaattttacaaatgcacaaaaacaacaaaaaaacaacaaaaatacggt

SEQ ID NO: 131194 - DNA, 1492 bp, Cannabis sativa
acactgtaaacaacaatggattaccaatcttacctttgtgatttgggatccagctttgtatatctctgatcttgaagatccaatagtggaaacgaggcaagctcgaagaggacgtacccagatttcattggggaacctctataaaatttctggtgcacactttccatttttctttctacatttaatcatgtgtttgattgttgtgtctgttttctggggtttaaactgatttgggaagggttgatttgttttctgggtttggtgcagccttcgtgttctttagagaagaaacacgaagcctgctctgctagggtttcgttgtgccgtatgtgtgtatgaacaaataaaagaatttaagaaagttttggggggttattagggttaagagttaaacgacttggagtccaggttaaacggactgtcgtttggggttttgattcttgggagtcaactgagctttgactcagtgggaaaggtgtaatttgacgttggaatattgattagtttctttgttgggtgtagggcaaaataggtaaaatccctacagtggcattagagccaaacaaggcaaggaatctgcagcaaagaataatcaagaaaggatcaagaaaccaattcagaacaacaagaattcaatacacataactcagttcacaaagatcaacatcaagatcattctaaactcatttttctctacagtttcttgaaataattacatatatataattatgagttcaatgaaggttaatattggcaggtttgatggttcaagtgattatcgaatctagaggaagaagattatggctctattagctcaaaataaattgttgagggttcttaatgaccccgtggaatgaccagctgatacacttaaggctcaacagaaagagttgctagaaacagcaactagaatgatcattttcaacctatctgattctataatcaaattggttgacaaagaagacacacctgccaaaatttggaacaagttagaggagcaatttcaaaagaaatcactgatcaacaagatttacttgaaggagaggatctttagatttaaaatgagttaatctaaatctctagaacaaaacttggatgagttcttgagattgcacattgagttagcaaactcaggggaaaatgaggccttaagtgatgagaatcaagtaattatcattctcaattcactgcctaaatcctacagggaagtcaaaacaaccattaagtatgagagaactgagatcactcttgaagaagtaatctcagctttgaaatcaaaagatttggagttagaggttgaaagacctgggcatactaatggggatgcaaacctaagcaggggaaggcctacacaaaagaaaccatggcaaaacaggggcagaagcactaataggggttcacaaaaggaaaataatcaccacaacaaagggagatcaaaatcaaaaggcactaaagatcctaatgggtgttatcatgttgggttttgtgccct

SEQ ID NO: 131195 - DNA, 774 bp, Cannabis sativa
cgtgacacatgttacttaacagaagtggtcattggtcagatttgagagatcttttacccgttcaatcttacagattaacaaatctaactaaacaaaaattagtattcatcgtctaaattccaaataatgattttaatagtcaattttttttttaaacgtctattaatcaaaacggagatctaatggtaaatgcaaaatactgactcgggatgaaacctctacaaatcgatccaaatccttagtttgaactttcaatagggacatttaatattaaatgtaactgtggagacattaagagctgattgaatagtttaaagatcaaatttaaaaagaaaagctacatttcttctcatgtccaatttatttaaaatttaaagtatgatgataatatttttcttattaaataatatataaataaaaataaaaatttaatgaccaaaaaaagatgatcggtcatttgatcgatctataaatcaacgagtcaagaataaaatgtgtgcaattttattcaatcatgcgattgataacaaagatatcactacgtaatgaatataaaaataaaaaatataaaaaaacgcctgtgtttggtaataattttttaattattattttttattttttaattaaaaaagtaaaaatgttaatagaaaatatattttataaaactgtttttgtttttcaattttgtaattgagaatgaaaaattttaaaattttaaatataaaaaaaaatcatttttaaaatttttttaaaataattttttttcttaattaa

SEQ ID NO: 131196 - DNA, 1010 bp, Cannabis sativa
  modified_base (567)..(569): a, c, t, g, unknown or other
tctattaactgatgggttttgtcctttgtgtgggttagaagaagagactactcatcatgctctttgggaggtgttcttcgttgttacattgcagaaaactctgtgagtctgtgttaggagatctgcttgtttattatgtagatttttttgactttattcatagattttttgatatccttttggagaaaatgattgaattgctttttggtgattttgtagaggatctggtttagacgtaataaaatggtccatattgaattgcctcttgtgctcactgtgcattgggcctgtgattaccttgggatattttgcaataaacagactttgccagtgtctctttccacctgtcagccggtggtggacgtctctgctaatgggttggtgcttcagatactcccttttcaagtggttccaaaatggaaatctccctgtgtaatatcccagaaacctaagaataattatgatttattatatattatagattaattagttagtaatgagtaggattatgatcctactaacttaatttagcataaattataaattttgctataagtggataaatannngtaatttattaattacaaagatttatttgattatgtggatataatgtaagttatttgtgaaataaaaattatttcagattcggtaaccctggagatccgattggaggccaaaaatgtcacaacaattttagttagtaatattgatgagatttattgagataaactgattttagaaataccagatattttggggtattcagagttgacccaatattctacaattaaatttttttagtgactaatagaaatgataggataactattaataaaagtgattagtttaatatatattatgttttaaaaatataaaatgtacgaaacgaaaacctctctttcagtgcgacggaactctcatttcccttaatttattttctttaattttcaatctgaaacctagtaattcaagatcggaagagcggttcagcaggaatgccgagaccg

SEQ ID NO: 131197 - DNA, 580 bp, Cannabis sativa
aggcctttgtctaagactgacccctcccccgttatatatagacctatcaatcttataacatgcgtgtataagattattgctgaggactttgcttcaaggttacaaattgttttggggaatacgatttcgaagacccaattagtttttgtagaggggaaacaaattttggattctgtgctagttgctaatgaggttgttgaagactatagatgtcgaggtaagagtggtttggtgttcaagattgacttcgagaaagcatatgatcgagtggaatgggatttcttggacttggtcatgataaaaaaggggtttgggaaaacttggaggaaatggattagagggtgttttttgactacaacattctctatcttcatcaatgggagaacaaggagaaacttcaaaggatctcgaggtcttagacaaggagatccactctcacatttcctttatacgttaatggcagatgtccttggaaggatggtagacaaagcagtggagtcaagcactttctcagggtttatagtgggaaagataagattcaagtcagtcatttgcaattcgcggacgatacacttctttt

SEQ ID NO: 131198 - DNA, 1362 bp, Cannabis sativa
gggcataaaacccaacagagaattgtaagcacgaggtattctactaacaattatcttttttaatttgtgtaataacttacaagtgtaggaaagttatttggccaaattccctcctctagccagatattctccgttgacttggcaaactacgatttgcgagtcgctgaatgcttcgaggtattcaactttcatttcgagagcaagctttaaccttgtgatcaaggcttcatattcggcttcgttatttgatgcaagaaattcaaacctcagagcagcgtgcaccttaaatttattagggcttataagaaatattcgaccacctgatccctcgctattggatgccccatcaacttacaaagtccaaccttcgcctggtggtacatcggggtcgacttgctcttttgtaattattgccacctcgtcacttgcaaactcgagaataaaatcagtgagggcttgtccctggattgccgatctttgcttgtatctaatgtcaaattaacttagttctactgaccatttgagtaaccttcttgatgcttctggttttgctaacacttgttgcaaaggatagtttgttaatacctcaatgttgtgtgctttaaaataaggttgtaactttcgggatgcaaccacaagtggaaatgctaaacgatccacttgtagataacaggtttcggtaggagtgtacgtcggtcggtttagtcagtttatgctatattttattcaacccaatgtaaagatcgggttataaaaatctatgtgcaaccctcccaattaagaaaaaagaaaatagcaacttgcccaataaaatttgtcggtttggtcgggttaacccgtccaaacagacaactatttttttttttttacatacaattattatattttagttaattgtagtaatcagacaaataaatatagattgaatttaatgttcaaatcaaccaccataaaaaaaaaatatattagtttgaaatttatatttttaatataatcatataaattatacagtatataaatatatataaaaaaaccctcttaattgggttggtcggtttagttcgggttaattgagcgggttaatattattttcaaccagcccaatataaagattgggcgggttatattttcatcgggttttttagtttatatttttcgtcgggttatctcaatttggtttgggttggttatttgggttgggcggtttacaaaaatttatgtacatccctaggtttcggaatccaaaaggttcttgctcatgtagtatactgggtgttgtctaccttggtcttcgctgattagtactgaactaatcacgtattctgacactgctaggtagattgacaaaacttctccaagcat

SEQ ID NO: 131199 - DNA, 899 bp, Cannabis sativa
gcagatcaaagcttatgtaggtttgaagctcaagaatcaatggcgggaggtatttcgatccttaagttatataatgtatatatttgtttattcagcacttttatatacacatttatatatttcaatttatacttataaattgtctaagagatagtaagcaaacaaaactttattgtcgtaagcaaagtataaaaaagtagaatatgcaattaatgtctattactgccaggtggaactttacgaaagaaggtttgttatttttgttggatgagtgaggtggtggtccagtttggccgcccagccaatgcgaataacgtgagttggttagtttattaggtgagtcaacaaagtggggtcaaattccaactacagtcttcatatatctatgcactcccactttttttacttttatattattttatagtgtttttttttttttttcgataaggatattattttatagtgttgagtgcccataaagtgttattctcatttacccgttgcattcaccggggtggtccttcttttcatctttatattataacatcctacttatttttttctttaccttttatttatttatcttttggagattctactatgcacactatgttattcataaactttgaaaataaaccgtgtgcttcgtattcggctgaattttgtttaaaatataatttttttttaaataataaaaattaaaaaattctcataaatttaaagaaatacgattattgataaatttatataaaaaaattatcttataattttaaaaccgttatatatatttttttttttttgagaaaaagtattgttatattaatcattcaaacaaaatgtaatacaacagataaaattgaaagtagacaatccttcaataaaaaaaatctctatccacc

SEQ ID NO: 131200 - DNA, 807 bp, Cannabis sativa
ttattcttttataaaatttaaaagaataattgcgtctgccgggagtcgaacccgggtctattgcttggaaggcaattatcctaaccgttggactacaaacgctggttttgttaacaaattttttaaaaaaatataaatcttttaatataattaacatatttattaactgttcttgttaatcacttcttcacagctaacaccaaaacaaaattcactggtcttctcctcaacatcctcccaactcgagcttaagaagacaaagatatataccattcaggattaccccagttgaattatccattgagattaacaattatatgtacttatatagctaaatactgagtaataagatcattaattgtgcattatgctaaagatggtcatggcatattactattagcatgtatatatatgccatctttattaatagtatttttcttataatatttatttagagcttcaatttaattatatattttgatccatgagtaatttgtaatgattatatatacttaagttaaattttatgaaaagggtattatggttaaaaatttaacttatatattaccttaaataagagcccagtaaaatattttaattacagatgaaatactacacaagttgataaaaagatgaaataagtgcaactggtttggtaggttaattcttagcctaagacttcctcaagtttgatggaactcacaatacaacttaaaaaatgtattggagaatattatcccacatgaaataaatataaaaatattaagtcatatataaaatatgggttactctactcattgccaattg

SEQ ID NO: 131201 - DNA, 673 bp, Cannabis sativa
atcttgggcagcctgcggcgggttgacatctccccaaccgcgtgccctacctcttgggcctccgcctcggtagcgaacattcgagactaaactccctgaccgccactggattcgaccgaattaccctggcttcttgtgttccgtatggcgtccattccaatagaactgtctgcaaaatagtgagctagcctggtcagattgcgattaagaataaatttctaactaccgcttacttgagatattgaaacatgcgcctatttatctatcaggctactaaaatacttcctatcagacttttcttataacatactaataaaataaaatactaaagaaataaaagcttactgaaccatgagtcgagcttatctctgatgatgattgtatatattgtgatgatctttggaagataacatagcggctctgacactaaattggaaaacgtgattaattaaaatttcacataattaaactttaaattagaataaataagctttacataaattgggatcctgttgtttaaatttacaattattttacaaaataagaaactacaaaagtggtcgcctaacgaatgtcaaaataatgcctgctaccctgaagatcgaacactctgggtctaactaccctgatatgtacattcttgatctgctcgcactcactgctgctcatcctt

SEQ ID NO: 131202 - DNA, 867 bp, Cannabis sativa
aaaaaaaagaaaaagaaaaagtgattaaatagtgtatagctgtatataataaaattttacttaaatgttagaaagttcaatctttttctctcccatttctctccgtttgggaaccataggattcacacaagaatggtgacaatagtaactatgggctgagtattacgatcgtaacataggcattcatggtaagttcatggatttgaaaaattattacggctagttgtgaagatggacagatttgtattctctgaattggttgcaactgctctgcatgtgttggcaccattttgtcgaaattgatggctaaatcttactatttattatctatagcactgttcattatctctaacacttacaagtaaccttatatattattataattataaatactcatatatatatatatatatttgtatatatttatatattaaaatatcttttattatttatattgtaatttatccattagaagatctggtctattttttttggaaaatactttcttttaataaatagcttatataaacatagcactaattctcgaaagccatggcaagcaaatgtggaggtaatgccaatgtcaagtttggttggtaccaaccgtcttctaaagatgaaatctcgaagatcttctcacatggcttccctcaattccacaattttcgacataactatggattgtacgattgcggtctctatctttctctaaatgattctccattcaaaagaaagaaaaaattaaaaaaaaaaattcttgctcatcaagtttattgcgcggttctatgttctctatgttagactttttatttgggcttacattaagttttattagttttattaaaacttgggttgattggatagttc

SEQ ID NO: 131203 - DNA, 824 bp, Cannabis sativa
  modified_base (38)..(43): a, c, t, g, unknown or other
agcttaaaggtcctgagttcgaacccatgacctctccnnnnnncccatccctccctcaccactaaactagccttagtggcttgagatagtacgatatttatacatatgtttctcgtttggtgaatatttgtatgatgttgaatgtcatatgtttatttttgcttatgtactaagcaaacttgtggatataaaagtgagctagatattcatatttacatgtttaatttgtcatttgcatagcaagcttagatctatgacatttcacatcaaaattaggtcttgcaatctcctagacattaataaagtacttagcagacgagaacaaattgcacagtctctgtgcacaaaaaatattatagaagttaaactaaaaatcattactagaaaatgaaatgcaatttaattaaaaacaaaaggaacacacctaaagtcctatacaactcaattcatccaaaactatttccaaaggaacactatgatttcctatcataagatgcaattgagaaaagtgtatatggcgacgttcataaatccaagcatggaaataaataagaaggcaatagcgcacaaaatgactatttctaccaatacaacaagatccttatttcttacggtcacatgtcaatgtattataaacacgaaacaatttagctttgaagaataatatatagcacgcagtcaatgttttttccttcttaagatacgaaaaagcacaaattcttacgttatgccaattaggggtgttcatcaaatccaatccgcactattttgctcatagtgcatccaatccgcactaagtgcggatttcatattttggatccaat

SEQ ID NO: 131204 - DNA, 1122 bp, Cannabis sativa
  modified_base (74)..(90): a, c, t, g, unknown or other
gagctattgtgcggattggattggatccaaaaaatgaaatccgcacttactgcggattggatgttgtttgaccnnnnnnnnnnnnnnnnnatcggatgaacaaccctagtataattgacattggtgtttattggaaaatgttatctattgtaaatgtaggtttggagaacgtatgttttattttagtttttagtttttttttaatatcataattttaaaattaataatattcaatgtagtgataattattgaaatttgaaagcataatagtaatttaaataaaaacagaaattactattatactttgtaatagtaattaaaaaaaaattattattcgtcctaaatttatctttgcaattaatgaaaatgttcatctggttaaattatcaaacattcaaatttaattattaattgtaacacttttacgtgacaacacttttacgtgacaacatctaataatttgttttttgtttttattttaaaaaaagaagtcacccaataatttctcataaaccaattatataggcacattttatatagaatacatataaatgagaagtatgagacggtgatgtagcactctaaaatctatagcattatttgttctctccttaattttcttattttttaaattttctattagctttataaatattaaattttatttattttctccgtaatactctctatttattatatttggtttgtttttttttttttttaaaaaaaaaaaattaagatatcacatcacatatatcacgttcatagttgatattttcttttttaaatttgtataatatatttttctataatgttctacatatatataatcatacatataataaaaattaaaatctctaaactaaacataggcttattaatgttcggtttcaacatttttttttcttcgtatgtggatgatgatgaaattaatagagcaatacactcaaactatttctcccatgcaactatgtttgtaagtttcaatatgcattattttttacattaaatttgtatgtatgcatataactaggtgaatgtacgtgccgagccacgtattgctaatttcatttaaaattttagtctttttaagattttaaatatattttatttttaaagatt

SEQ ID NO: 131205 - DNA, 878 bp, Cannabis sativa
  modified_base (223)..(236): a, c, t, g, unknown or other
  modified_base (839)..(840): a, c, t, g, unknown or other
ataaaacagtcagcaacatattaaagttatggaatttttaatcaatagttgctagtacggttcactgaagcccgttcttcaatgtaaataatcttggttcggattactaatatagtatgacatctaagtgaaagtattgtatataatagagattatatatgataacgaccgatatggataaagctgtctttatcaaacttatcgtttactataaagacctaannnnnnnnnnnnnnatgatcaatagtagatcggtctaaatcttaagtaatcacgaactcatgttcatgttattagtttctttgattcactcgttaaaatttctcaaagaagatgattcttacaactattttaggaatctaataatatggatggctgggaacatgatctataattatgaaatcatgacttttccaacgaatcaaatgttggttccttttatgtgttaattctagtactggaaggttgcacgcaaatttaaatgggatatgaattatactaccactagtagattaatggtataaaaaagggttttgagtttttaaaatacttgaacccgaacctaaacccctatttttaaacccgtttttttgggtttttcgggtgggtgggttttcgggtgtaaatgtgatgtcctaatttagtgggatatttagtataaatcattaaagttgttgcaccaaaagtagacaattctacaccaattaagtgtaacccttggagatggtctaagtactattgttatgtttggttgggaaaatgaaagcataagtataggaaaaggaatgggaataagaataggaatgtgatagaataaaattgagtaatttgcggcatanntacctaagtttaactcccagttgcaaataaatacctaa

SEQ ID NO: 131206 - DNA, 1343 bp, Cannabis sativa
  modified_base (1298)..(1308): a, c, t, g, unknown or other
tttaatttttttcataatttttaaaaaaattatatttttgcacaaattatatcaaaattaatgtgtaattaagttttaaatgcttttattctttattgaatattactaactatttaagtaatgattgtttaattaattttatttttttatatgagaatgtacaacgtagttatttaaatcattttacatattttttgaaatttaatgtgtcaaaaataaagtttatacagtttattacacgtgtacctattttgtcttatacgtgcgtgaagtgcttattttgttttacacgtatgtgaagtgtcaattttattttatacacgtgcaaaataaactatttatataaactttatttttatattgtaaaatattttaaatttttcaaaactttatataatttattaaataagtacaatatatattatcatagaaaaaaaattatttaaatattaaaaataggaataagtgcatcatcgtacttatttttggagtacattataaaagcatccaatcccaatcatatttaacgtcaattatgtcttgtaacattgatttttttttatcaaatattgaatcttcttttcaaaataaataaataatgagatacaccgttgacatacaagtaaaaattaaatttacttagtactgtatatctctagttgcacatcattcttgtatttcaaaattaataatcatccttatagttattctacttgaaaatagagaaacaaaaatcaaaattatctaaaactggaggattattaagtcaaagctccactacttcattaagatttgttgagttgaacattttgttagtttctttattaagttaaacgcaaatgattaaaatggttaaacttacaatatttgctgcattaaacaaaaaaaatatatatttgttgcatgcatataaacatttttcatgtacgtgaagaaagattttccagttggagattaaatcaaaacctattattattaataaaaataattgcgacatataatttcaaaaaaattgtatttgtagtcgacataaatttaatgattttttaatagtatctaatactttgtaaaattgtaatttttatttagttttatcaatacaaattttattttgaatttattaaaagaaaatataaatgtaactcatattatatgttttagtgcagacctaatattttaaaggctaattatgatttttgttacctgaactttgacatgtaccaaatcatatccctaaacttttaaggtcagttaaaaatgcccataaactattaagattgttggatttaaggactttnnnnnnnnnnnattcaattttactatttcagtgattgtttatgtac

SEQ ID NO: 131207 - DNA, 671 bp, Cannabis sativa
cactctttccctacacgacgctcttccgatcttattgaaatgagttttatttagggcataaaacccaacagaatctgcattgggccacagcggattcgaacctgtggaaaagtatatggaacagtggtatctagtttagactctcgttcatcatgtggagagctatttcgggatgccttccaactcgagatcgattgagcttcgtagccgagaagatgtgtccactgtgtgacttggaatttgaaacagctctacacatcttttgggagtgtcactgtgcgcgtgcactctggtttggcagccccttttcttgggctatggggagtgttcctggtagtgctaatactgtcaaaggaaggattgagtggatgctctcaagccttccatcggatcttacaagtcattacctgaagttcacaggttgtcttttcgatgaagtgtggaaagctagaaatgaggttttatttaagagtaaactgatcatcatcactgaaatcagttgctccattatgaggaggtttttcgaagctatagtggaagtggaggcagatgggcaggtctgtaaaatccaagatacaagaagggctgggggaaaaattgatgctgcaacggaggtgttatgtgtttcagacgcctcttggaaggacggtgaggcaggtttagctgtgggg

SEQ ID NO: 131208 - DNA, 1191 bp, Cannabis sativa
  modified_base (414)..(433): a, c, t, g, unknown or other
agaaaataattgtattttttaataaataataacaaaaataaaaaaaaatagtaattttaaaattcaaattgaagaattttttattaaaagatttattggagcaggaggtttcgggtgtcagccctaactgccccacctttaggtcggccctacatcaaggatacatgaaagaaacaatccaacaatagtaaaattatgtcattgcaagtataaaatcatcaacaacacaatcaattaagttatatttcaacgattcagctcatcataacattataaaattatcaatacaaaatcaacttgtcaaacatatacaaaatatattatatactattattgaccctaattatatatctgttaaattagcataaaataatattaataaaaacacagcagcaataataataataataatannnnnnnnnnnnnnnnnnnnaataataataataatcaaattaaacagtctttattaagaagaaatagtcttaatctataactaacataacacaaaatataagagtaattaataattattgataagtaattgtaaaaagaatagatttgatttgcttactttgatgctttggtcgatggaagaacctgtttttagtattttatatattttgatagaattgggaatttttctaattatattgcaatgaaaacattacatatatataggcctaaccaagatacgaaaatcccaaaaatacccctacataaagtagttggcctacattattatgatgcacttatattttatatctgatattcacctttaaaaaaatagttatagtatctattctataacttttataaaattaattatgaataatttaagatgttaaaaaatagcttggttagcaaactatacaaaactcggtatttccctttggataattttcttgatgctagtctaggggataatccaagctttatttggagaagcatttgggaggccaagaatctgcttactactgggatgagatgggcaattggttcaagtgatatatagtgttagcattttagggcagccttagttgtttgatgatgcaaatccttttattactttagattcattatcactgattggtaataaagtttcatctctaataaaaagtaatgagcgagcttgggatatggaaatcataactgatttgtttaatactcgagatcaagcttgtattctcaaca

SEQ ID NO: 131209 - DNA, 577 bp, Cannabis sativa
cacgatggggattcaaggcaaacaggtaggtggacgccgccggtggtgggtgggtttatgtcgactgacgcattagtggtggcggggagggggtttgtgggacttgggggaggtattcatgatggtgaaggagtggtttgggtctcttgggttgtggatattatgggtgactttaatgtcaatgtgacagaacttcttgctatcagaatggggttgatttatgcttataggtttggtttcaacatctctaataaccaaagtaattctacagtggttttgcatttcataatcctagttcgaacatagttattaattctatttttttatattaatttttttagtagctgttgttggtatggtggttcttatgatgctattttgcgctcaatgaatggtattgctcatacactgactaattctattactaatatagaagagtgtcttttaacccatacttatcctcctttgattttttttttttttgaatgaaaataatctttattagacagaaacatccgctaaaataatagactgaagagcaaggggaacatcgctctcagtaaaacgacgacctgac

SEQ ID NO: 131210 - DNA, 903 bp, Cannabis sativa
ttttttcaaatttacagtttggatcgctccagtagttttaatgtaagttgctatatgcattttggttgcgatttagattgctgatcaattaattgttatatgagtgatatgtggattttcgtaaaaatataaaaaaaactgttttgaagtgtaaaaataaaaaaatatcaacgttattttagtattttaataagtcataaatgagttataaacgtgttaaatatgtcataaacgtgttattcattgacatgtttaaacaaaatatgtttataaataggttacacgggtcgtgttgtgtcaatccgtttataaatggatcgtgttcaaatcgagcatatacttattatacatggatctcgatacgagacaaatatgacctgcgaagatgaattgccagttgggacataaggtttgcgttggggctaggagccaaggtctgagtccaaagtctggttacaagtgccagggtccatgtccaggtcagtaagatcgggtccaaagtccaaagtccaatttagcttgtgatgctttagcaaaatgggctagagaaaatagccaatgtaatggctacatttttacggagggatcccctattgtgattctcgactatttattgtaatgaacttctcttagttctttcaaacaaaaaaaaaagtttaatatagctgggtgctaatagtttgtaaatcttatttgtgcaatataatgtccttatcaaaaaaaaaaaaaaaatcttgagaaaagtctattttttttaaaaataaaaatatgtttaaataaatttttaaaaataattaatttttgtttttaaaattcaaattctcattttaaaaaaaatgataactgaaaacagttttaacaaatatcatcatctttatttaaaaaaaaaaatatcatcatctt

SEQ ID NO: 131211 - DNA, 887 bp, Cannabis sativa
tattggagccaacttttgctactgccgaagaaggtgatccaaagaatagaagctatatgcaggaattatctatggaaaggccatgccatgtaccaaggaccgggccttgtggcttgggaagctatttgccaacctaagtctactggtgggttgggatttaggaatgtttcagcatggaataaagctgcaatggggaagtacctttgggctatagccaataaggaggatagcttatggttgagatggataaatagtgtatatttgcataatggagattggtgggatcacatcccaccaagtcaatcgagttggtactggattagcttgatgaggcttaaggagcaattcaagattgctctaaatgggaatttggtactgcaaaaatacactgttgactatggttacaaacttctgaacccagttcaagagaaggtgttttggaacaagcaaatatggggtaggctaaacacaccaaagcacagttttgttgcatggttagctatccaacacagactcaaaacaagggatagactatgcaagatggggatctttgctgatcatggatgtttgttgtgtaaagaacagcctgaaacatcaatgcatctgttttttgagtgcgctgtttcccggaagtgcctgcaacaagtaaaggagtggctgcaatggaagccgcaatcagttagcctctcgggtctaattcgatggcttggtaggtcgaagttgagcaatttcagaaagcttgtaataactgctgttgttgcaagcttgatttaccatatatggaagatgtgaaatctgtcctattgggatgatgaaactcaagatgacatgagaatgtgtaaagagttaaaggctggtgtgactcaaagagtggaattattttggcc

SEQ ID NO: 131212 - DNA, 953 bp, Cannabis sativa
aattaattttttattacattaataagatacttgttccttttacaatctttaaagggacccttgcaaagaatcctaagctgaactattttctttttctccaagctcaagcaactaggagtggcacaacaaagattaaatatacatttattcctatttttccaaagaaagtacaaggtgggagccaagatagcgttccatatgcgaaaaaccagaccgtgcttcatattgcagcagctataaagcatctcagcagtcgaacttggccaatggaagtcccccaaccaagttttaatagctgcaaaaatgcgtaaagagtagatgcaattgaaaaatagatgatcgtgagttttcatttcagcttcacaaactggacagagatgactaggaatcgccataatccgatgtaagtaatcccgagtgagcagttgggaattagcaatctgctagaaaataaacatgtgcctaggcaaaacaagtttatcccaaattgcaccagtaaagtcaaccttaatcccctccacaagcagattatagtatcttttagcactgaatttatttcccctcacagcctaatttagactcacttcattcatgttgtcccttatgttcaggattttcttgaagtactaacttgcatcaaccttcttcaggaaattccatatatcatagtctttcaagtaaatagaattaatccatttgacccaaagacaatatgccttgctagcaagagcccaaagatacttagccaagagagccttgttccactttttcccttcccgaaaaccatcacctccaaggtttttagggaggcaaaccttatcccaagaaacctggtgaagcttacttctattccctaaaactccccataagaagtccggacagctcttgtcaattgctgtcgtaatcttggaagggaggatgaagatactcatccaataattccttatcccaag

SEQ ID NO: 131213 - DNA, 525 bp, Cannabis sativa
gagggggagcagattttttttttctaaggccgatacagcctgctctcagcaagttgacaagctaatctctttggggcagtcagcaggacttacggcatggaaggccagagcttgattgatggacatttctatctctaccaaggaggaagttgtggttgaagatgagggtttcacaatttttgtgccagttggtggtgtgacccttgtggaggaggatggtgtccctcctccacaagagccatgacaagagttggttagaactgtagagggttggggtagacctctatagttctagaattaaaagccctaatttggtcgtgctctccttactttagcttcattaccaagttgaaagtggatgccacctttttcgtacgttctctaaagaacttacatttttattttaatgttattatttctcttgtggataatgcagggggtattattcttgcttggaaagctggttttacttttgagactgtctgtatctccaaaaaccatatttctggtattgtgtactcggat

SEQ ID NO: 131214 - DNA, 1294 bp, Cannabis sativa
caatatatacactttaaaaaaaataatggtgtttggttccaaaaaaaataatacataaaaaaaaaatctaaattaatgttgtatatcccaataagttccaatgcttatttactttttttctaaaaataaataaataaataaatattttattcaaaataaataaataaataaatatacaaatatcaacccttatctctttcccctccctctcttaaacacagaaaaaaaaaacctaaagtttctaacaaccaacatctcagcctctctctgtttttgcaccacagccacgacctctcaccctctctctattttctcaacggagccatgaccccggccttctctcttgctcgacttctcaccatctctttatttttgcacagaagccacagatccattttcctccattccaaaatgccccgaccttctctctccctcatctttcacactctctctctgtcagttttgctcagtttgacgggctacctccgccatcgtgaacccaaacagggaggcgcagctcccggacgtggttctaccgccaaacagggaagttggaaagagcggcagccttgaggaatacgtgcattcgtatccagttttgtcgaaagccagcacgttttcatctattggtgatgatgtcgatgctagcgtggatgttggttctacttcaacatttcccctattgattttgcggtagtgtcgattccatgattgtgaaatatgaacaagtaaaagaaattgttatcattttgatattttatttaattttatattggtatgaaatgtgaagagttttattaatttaaattattagtcatcctctgttctatgtttctgtgtgtgtatgcaggtggacgaaaaaagttttgggtgatctagaccttcgacagggcttcgcatttaacggggatttagattgggctcgtgttcgatctagactattcatgtttattaggaaatgagtaattttttttttcagaaatgtattttgtatctgggtttgagttgtaactttaattttatttattattttttgtgtttgaagtgttgatataagtgttattttggttgggttcatacagtacatttggattctttgtatgaaaaaagattagtattggtaaaaaaattgttcatttgtaagctctggtgattttggaaaaatgattaatataaaatattatttacttaattaaaattattattattattatatttaattgtatttgtatataattaatataaattattatctataatatataaaatttaaattaaaataattaaatattat

SEQ ID NO: 131215 - DNA, 825 bp, Cannabis sativa
ttttatattcaattgacaagttgaaacaaatagtttataatctcgtaagacttataaactcaatcaatctaaaaactctctatatttatatgacaaagcttaatcacaaaaaaaggaataaacatatcaactcaatttaatcaaacaaataatctaaatattttcatgctaaatcggtttgtatctaaaataatcatatcataatcaaatctcacttttgagaattttaaatcagattcatagataataattataaatgaccactaaataattgcacaattaaaaatgattgtatggaatttgagagaagatgaagaaaaaaataaaaaaactacattaatacataaaagaggttcaagcgagtcacataacacccttaaaactgaaattagcacgtaatattcactctaaacatccaaagacttaattaaaaacataaaagataaagatagataaaaaaaacacaattcagggactccaatgatattctctctcttccagccacctcatccaaaatcactctccaaagttgaatccccttcaaaaaaacctagttgtcattcattttatagacaaaattaggaagtttccctttttcataagagttgcgacattggatagagagtcacgactctatagcaattttagataatagtgaaatttgagaattctttgagtgccatggaattaagtcaaaggtcgcgactctatagcaattttccagaacagttgcaattctaaaatcttattgcgatgaccaattgtattttggtcataatgttaagttattttagtattaattttagattaagtttagtatatttt

SEQ ID NO: 131216 - DNA, 1207 bp, Cannabis sativa
ctgcaaatagggctgcccatagtattgttagggggtcttgttttttgtcaggttgtacgtttaatgagcttaatgctccttctactttgtgtgacattgttatggcaaatcccaattcataatgaaatcattcatttttcaaaaaaaaaaatatctaagaaatgataacacaaaactcataatagctccttaatgaagttattttttaaaatggagaaaaaaaaaatagaaaaagtgtttaaatcattctccatcatagtgtttttccacatatagaaaaatactatattcttctgtcaaaaatattaaataatatttaagttatattttatacccaatttttgttaatttgtattatatacatatatactaaaaagtatattaattatatgatgtgaagaagatgtagagaaattaatgtatgaagttagatataaatttgatataaaatgagagagtgagactaaagaagagtagttgatgagagtgctatagtaataatacaaataatgcaagtgacaaatatatggtagtcaaaatgggtgagctgcaggcctcaattggtactagactactagtatagtactcgtataattattttgtttggtacaaatattagaatggtagctttaatataatatttggttctcaaccaaagtagaaaaactgtatctatatcatgaaataaattaagtggctcttagaattgtttaatttcattattgtaaaaaaattcagaaaatattttcatatatgtgagtactggtggggttaaatgcaacaactaaatttgtaaagggttcaaaatccggttaagagattttcgaaaaattaagataaagtaatgtttagttaagtattttattggtatctatggaatgtctctcaaaatacttagtcattcctaagagaaatggagtaagagtggtttatttgtggttcttagagagagctaaaaatagagattgaatggtataaaggaagagagagagggagaaagagatatgaataattatgtgtaaatgaccatatcctccatatttataagggaacaaatttgggctccagagtgttctatgaagtgatgaagtgtgagtgaggaggaaagataaatttacacggtatattaacttttgtcattttttttacaaaaatactgtcaggtggtattttttacttttttactgtattttttataagtttcata

SEQ ID NO: 131217 - DNA, 545 bp, Cannabis sativa
aataataatctactaaaaaattaaatattattaatataaaattgatatttaagttcaaatatattaaaaataatattttattttgatttttatggtttgaaattgagaaaattcaaaaaaattgtaaaaatcccacataaatatggttttggggtgttgttgccaggatgctacacgtgcagcaaaaagaggctgcaaacatggcttacgcgtgcacttagggaggggatgcatggtcatcagccgaggtttcttggcatcttgcagggccaactggcgtgtgtcgtttctgaaatgtggggtgaccgagccttcagacagcacctgtctgatgcatccacacgtgctgcgttgccttgtccgagggtcaactgtgtacccgtggacaatccaccatgtcacttaacggatgaaaatggatggaaaagctcaattgctaacagaacacgggttttaggggtttggccaccaaaatattaattttgagggtgtgggttttgtcgcaattaactctaactcgaaatacctgttggaaattattttac

SEQ ID NO: 131218 - DNA, 1808 bp, Cannabis sativa
  modified_base (948)..(953): a, c, t, g, unknown or other
gggcataaaacccaacattgagaactcaaagcttgacctctaatgttgtgtttggattttgagttaattgttgagttcttttggttggtttgggtctatttcagtgtttttaggtatactggagagctttgcaaagttttgcttggttttgaggtcatggggtcaatttttgggttcccagcacagaattggtcgaccgattggtacccaggaaccggacttccggttaggaaccggacttccggttgggaaccggtctgccggttgggtcattttcctagaccctagttttccccctttttgtgttgtttaaggtgttagtatcctttttatcgatagggttatccttaatcttaattttaaattcccgttaagtattttagcgtgtctctcattgagttttgaacgttatggtttagggccctgtaaaacgtcaagctgtgtttccactcaggatgaccggcacacttgagcacggaacgaggtaagatagcataataatatatatgtaaatgtatgcatgagttaaatttttacactactaacactaacggttatgtgattttaagggtgttagtatagtgtaggacgtcaggatggttacagtgttaccaacacgagtaccagagggtacgtcgtgcatgtggtacaacacttagtaacttctgggggtacaataatggctctaccaacacgagtacagatttggtactttagtgcatttggtacagtggtcgtacttcccttaagaacgttcttacccatttggtgaactcggttgttgagctcagggcggcttaagcataaagccggtctagcattgcctatatatatgtattgcatatcttactgagtctgttgactcatcggtttgctaccttgtgtaggtaaagggaaaagctaagctggaggaacagtgagctggagctcggcagtgattgtacatannnnnncagtgcaacctggagggtttcagtctttcaatgttttgtgttgtattttgtggttgcctgttatttgtgaaaacaaaaaaaaatgtgtgttcaggggatttttgtataagcaattgtggttttcaatgtgttttgtaaatcgggatcccgacttttataaataattaattataatattttaaagttaacttttaagtttagtaaattttaaatgcgagcgttacagtttggtattagagccatcaggttgttcattgaagaccatcaagatatgtacaatcaaggccagtgtcgagctcaactcacggttctataagctttactttttgcaaactgttttaagatatattgcatatatgagtaaattgaagtcttttaaaccctaaatgcggttttgaaattactttaaccactgtctaacctacatggcttgtgggttcgcaggctaagtcctaactaatggacgcccaacgaaatgtcagaaggcagggagaattggtttagaccggaggtggtcggggtggtagaaatccccaaaacccctgtggacgcgatagaggctgcggtcgtgctccgagaggtggctaagaggatccacctcaggcttcggctgattgggagcaaaggttttctgagatgcaagccagaattgcgcaacaagaagatgagattcagagactcaggcgacgggatgctcctgttaagcttcccccgcaaccgcttgctgtggttcctgcagctcatgcggtgccagcagaatagcatgttgctggtaatcgtatggagcctttatatgagagattcaaaaagtaagcacctcaagtgtttctgggaggccctgatgtacttaaggct

SEQ ID NO: 131219 - DNA, 765 bp, Cannabis sativa
tactcattttcacctaggtttcaagagagaaatgttaaaagttaccggtagtgccaagtattctcctacgtgttaatatcgttattagtttaattaaatattaagtcccatatagtttaatataataacttttagagaatatcgctagccaaacgcaagacgacacgtcttaaggtactcaatagcaatgctcgttgcaaaaattacaactatattgttattaggtactattagtacttaatatctctacacatgttaccttatgattagttaacgatactcccttaaaaattattatattaaattatatgtgatataatacttaattagaacaataataatatttacacataaaaaagtgttacataacattaatattttttaacatttttatatttttttttggttgagaatatctaacacaatatttgattgaaattattgaataaatataaattatgacacatattagattttgcttcctattttctttttggtaataaattcttcttgaattatgaaaataattaattttttttttgtcacattttaattattttgataatttattaatatgatttcaaaactactcatataattatagtatgagtttcttttaactaattaagttagttgaaactaaatataataacctaatatttaaatattaattctaaaattaatagggaaacttacaaaaatattggaatttaggttaacttttacaaaaatactgtcacgtggaaatttttacaaaaatactgt

SEQ ID NO: 131220 - DNA, 766 bp, Cannabis sativa
tgtaacatcgatttaaaatcgtataaccatcttttttggctagtaaagaagtcaacagagagttgtttgtttggacatagattatgatcagaaatccaagtcttgataccattaaattggataaatagattttcaaagttcaggagaatttatttttagctattgtaaatgcaactgtttacaaaatttgggaagctaggaatattgcactttgggaggctaagatgtataaagtttctataactgtaaatagagttaaaagagaaatttgtgatagattttctcttattaaaaaagaaaaaatcagtgaaaaagatttagattggtttgataagttgagaattctcaactaatttgtacaggttgaattgttttgtaagcttatttttgtggtataaatttactcatttaccaaaaacatgatatgtgatgttatagaatattgttgggcaccataagataccttataacattatagtactctttgatctcatatatatttataatattaccttcgaactgttgcaacaacatcttggtctgtcatattttccatggcttctattgcagttagataatcgcttatctacaaaattatttcaatttaaaagatcagataacaagatatatattattctttcctctcaaattattataaattcatttatttttactttagtcataattttaatatctagcacaaaacttaacctaattaagagcttcaaggctcgtttggtatgccgtataagggttgtattgtatt

SEQ ID NO: 131221 - DNA, 521 bp, Cannabis sativa
ggctcgatgattacttgactggtacgagaaccaagccacaagaactcatactagtcccaggaatcgatggacaaccaggttttggttttgtaactaatcctgagtttgaacagtgggttgtccatgaccaactattgatgggttggttgtatggatctatgactgggagtatagccacaaaagttatgggcttttcttcatctgttgaagtttggagagctctagaatctctctttagtgctcactccaaagccaaaatggatgagtataggacaaagattcagacagtgagaaaaggggccataacaatgccatattatctcagacaaaagagacaatgggttgatgttttagctctggctggtgatccatatccagaagctctacttttgtcgaatgttctgtcaggactcgatatcgagtacatgcccattattttataggttgaagcaagagaaagaatatcttggcagactctacaagagatacttctaagctttgatagtaagcttgacaggcta

SEQ ID NO: 131222 - DNA, 617 bp, Cannabis sativa
ctctctctctctctctcactcatctcagtcttccccgttctctcctccacgtgccatcattccaccaacccaagccacctccacccttatctcactctctccttcgacgtcgaagcccacaccgccatcgctccctcctccttcattcttcccccacaccggtgagacatatatatttcgattcaagtttctatcttttaatcatgggttagtgctaattcttattcttgtttgaactttaacatagcttaaagaaaaaaatatttctaaattatcttgtttttttgttggttttttcagatgatgataacaagggtttttcagaatcgaattattattgaaggcaaaaatttggtgcaatatagccgagaagaagatacaaattttttattttaaactacaggctatactatggtttaaaactgtcgctataacactatagcttatagtttaaaatcatcagctataacattatagtatatggtttaaaaccgtcaactataatatacttaaaattcaagttgatctatatcattgtgatatgataaactcttttcatggtaaacaacaagtttgataaaaaatatttattacatatcggtccagtcatgcataat

SEQ ID NO: 131223 - DNA, 1078 bp, Cannabis sativa
  modified_base (1003)..(1019): a, c, t, g, unknown or other
cccggagccgtcgggcggctcggcttcaccgccgcggcgagtctcggcttcggttcctttccagtgggaagaagcgcctgggaagccgagagccgagccgagtcgtcaaggtggtgcagatcaagaggaggaagaaagaagtttaatgatgaaatcgttggagcttcctccaaggttgttgggtgaggttaaatttacgaatatgacctcgtcatcgcctactacggttctttatgggcctgaagtgggccggtctctttcgttcacgttctcgtttcgaagcccaactggtgatcagaaactgagcagagatagagttgggtattttgggtcttcaaggtggggaagttttagaaagaataataataataacaataaggtaccacctgtagtcgttgggggtagtttcgacatttcacctaaggagttttatcatcatcatgatcatcaacatggtattactactacttctagtaataatactaatcatgattataatggaaaagtcaagattagtagaattagaagaagaggcagcctttcgagtttttctaacgcaaagtcacatttgttggtaagtaacgaaaacgacactactttatttacacaattttcacaacattttttcaaaaaattataaaaaatttatattcattttttaccaataactaacagatttatttaagtttcattactatattactatagagagcattaatattgcatggatctatataaaccattatatttatacctagctatacgtactagcacatatataataataataacattatagaatatggtattattattataacatatacaactcatgaattacaaaaaggtcacatgttatatgcattatgttatatatattgccatgttgtatctcgtttattattagctaatttaatttgcctaactatactaattaagctttttctgcaaaaaagaatcaaccagtgaaacagaatttttattatatatatatatatgggtnnnnnnnnnnnnnnnnnatttttattgtaaccatatggtaatagcaggttactaatagggagactttcctttttta

SEQ ID NO: 131224 - DNA, 713 bp, Cannabis sativa
ttcccgagcccacgacagttctaaaatagtgtcttcattggtggctgggagacttttctgggcaagtctccacagccccaaagcaaaaaaccggtttcttcgtgccatcagtatccacgtgctcatttgatactactgataaatctctgattgtacaacttgaagaaggtttggatagtctatcgactatgacaaagtggttgtccaagtcgacagtgagatcaaaaagtttgttatcccagtgcgcactaatgcgttgttgttgtttttgagcttttttcctagcattgcgtttgaatgatgttggctggacactatagcttgagctcgccttggctggccatcctcttcttcggggttgaggtttagtcactgaaggagagttgttgatgctcaggcttgtgggggctggctttgcagcgggcggcctacccctctttctcttagtcgagccagcgtttccagacccaggagagaagctttgcgatttctgggtgagttgggggggatccacttcagaactaggaacgagatatggagtggaagaggtctgtagagtattagttgactcttgactcataatccccagtaggttctgtccagatgactttggaccaatctttctctcatcaaattgaatgtgactcttgactcataatccccagtaggttttatcattaaatttggatctttctctcatcaaattgaatgtg

SEQ ID NO: 131225 - DNA, 842 bp, Cannabis sativa
catccaagtgttgggagagtctacaacgagcaatgggtaccaagttaaaattcaatataacctttcatcttcagaataatagtcaatagacatgctacgggcatgtgtattagactttgaggattcttaggataagtatctccctctgattgagttctcatacaataatagttattagagtagtattggtgtagcaccatacaaaatgctttacgaaagaaaatgtcgttcacccattcattgggatgaagttggtgaacggaggtaccttggacctaatgcagttcaaggaacgagtgaggctaggaaagattcgagttcgtgtgtttactttacagagtagacaaaagaactacgctaatccaaatcatagaatattgaattccaggttgggaatttcgtctttcttcgggtgttcccagtgaaaggagctcataaattggaaagaaaaaagagttaagtcccatatttaccagtccgtttgagtttttggaaagggtaggtcaagtagcttatcgattatccatacccctgctttatctagagtgcacaatatgtatttcaatgtttcagaggtatgagtcaaatacgatccatacgagtcaaatacgatccatatactgagttacgaggatattaaacttgaaacagacttgtcatatgaggaacaatcaatccaaattttttaacagctaagagaaagtgttgcagattaagactattttgctagttaaggagctgtggaggaacaacaagattgaaaaggcgacttgggagttagggtcgtagatgggggagatgtgtaacgtccccgcgtcaagcctccattgggtccttacacc

SEQ ID NO: 131226 - DNA, 1030 bp, Cannabis sativa
gttcccagacgctttccccatgctgcattaaatgcgaggtgactgttcgaataggcccctctcgtcccggagatgccttactatatctcaactcccggagaagaaggtgtgccttttgcactggtccgggagcttactctcctcgaaccacacttcttctcttctatacgatttttaactaattttcaggtgaggtgtcctcttggtccatgtgtcatacatagctgtggccatgtattttgggaaaaaaattggggcaacaagcttttatatagaaagcaaggagaagagaagttagttacaataggaagttagttacaaataagaattagacagctcacaataacagaaaaataacaaactatagtaactaacgggcaaattgtgaagaaaaaaatttggggggctaattgctaataattgtatataatattttttttcttacatatctttatttttatatataaaaagtggctatctaactatttttgttggtttaacaaaatatactttaaaaataaaagaatatttcattaaatttaacagatgctattagtactgtttactttataaatattaatattattttatttaagtttttttttaatttatctttacgatatgaattatataagactaatattttaatttgattttattatttaattttaattaattcaaataatatattttttttaaatttgataaaataaatttttctttgagctgatattattaaaataaatttaattaaaaattagagatttactaccattaaaaggtggattaatttgtgacccaaataataacaagtacaaaataatactagtattttatcatatatatatatagtagctttaatatacttttgacatgtaaattgtacctttcattgtaacttatgtattatttataatattatttaatcattataacattttaaaaaagtatatatataacctgttataacactaaacattaacattatctagtttaaaatatatatatatatatgaaaaaaaaaaaaaaa

SEQ ID NO: 131227 - DNA, 696 bp, Cannabis sativa
aacagaagcatacagaaacacctcgtccgggtttacacctttatgctaaagattccagatgaacttaacctaatcccaaactctaatcccgctgtcagatataggaaagattccccatggggatgagcgccacatatgataagtaaaattacaatgcagaaataagtgctaagatgattcctgatcagcatcacaaatagggcaacgagtgtcctcaatactgaaccttttacaaagagccgacctggtcgggagcgcatctgaaagaatgcaccaccacaaaaccttgtgacgctcgagaatcttgctattccaaagcttgttccaaagaactagagccacattacagcaggggatttcttttgagggcttggataagataggccgacttacaagagaattggccattaccttcctttgtctagatccaataatcttttccttgtcccgtcggactaccacctttcaagatggccccaattgtttcattataaaacaggttatgcagtttctggaggtcccagtttcccctatctgtcaacagattagccactttttcagacaaaggaattggcccatcggagctttaggaaaaaagtgttggtattatatttatccaggatcttagatctatttgcaagtatgttgatttaacaacctaatattgaacttctaaaacgatgaactaaacacata

SEQ ID NO: 131228 - DNA, 1584 bp, Cannabis sativa
  modified_base (68)..(68): a, c, t, g, unknown or other
aatctgattatattgaaatgagtgttatttagggcataaaacccaacagattgtacatgtcggggcgnttaggcctggagcgtacgatttttaggacagttgggaatcttttgtatagttcactaggcgacaacttttgtaccatacactgtaaaacttttgtaaatattttgttaacgggatcccagtttaatataagtaaattattttgggtatttataaattgttaaataaagttttaattattcacgatttttaataaactcattgattcacaataagttgcacaattaagttaaaaatcacgttaacacgcctaaactagtaaggtgttacatgaaataagtaaaaaataaaattggatatagtagatccagaaataataatctaaggggataattattctctaaaacacatgagtttttcacaaagatagaaataccttgtttctttgcaaaaaaattaggacaatatatacatatacaatacttaaaatatatacaatataattacaatatttttataaatacattacaactacaaaatacacacaatacttattcaatataaaacacaaaatacatacatatatactattaaagtttaaattttaactttattaccgcaattcggcgactaacaccaataaaaatgtggccaccatgcacaattaatagaattaaatcgatgtacattactaaaataaaaaaataaatttctaaaattaatagaaatcatatttataccttaatggacgagatttaacgttttctccactaaaattggtggttggagttataaccaccacaattacttcttggcttcgatttacacttaaaataagataaaaatctaaaaaaaattgggagtataggtttaggcatggaaaatagaaggattttaaaaaaaaaatgggctcaaatggtgaaaaaatggtgaagatatcggtggtggtcgtggtggttggtgagggtttggctcttttctttggagctttgtctggtttgagatactggcgagggtttgggtgaatgaggaagacaaagggttggatgttgtataaaagccctatggcgttggttatttgaaaataaccgacgacataggctacaagtgtcaaaaataaatgacacctatggcgtcagtgattttcaaataactgataccatagggcgtgtttttacaattttttatttctgattagaaatcgaaggcaaaggattttaataaatgttatagctatggtttttataaaataaatgcctctaaatgtcaattttcaacaggcaagtatttttacatgctttagcttctatttttataaaagttatggaaaaaaacagcctctaagaagttgttttgtagtagtgactactcagctccgtaaatatttttcttcttgtcacatgttaaacattgatgttcatgtcattagggctagtttttgtgtaagcataaaataaaactaaaatgactttaataccccattttctaaataaataaaaaaaaattaaaataattagcgattttgctccttgaaatttcgacaatactctccatgtgactctcttatgtcagggtatt

SEQ ID NO: 131229 - DNA, 645 bp, Cannabis sativa
tttctcttcaaaataaaactgtcaagctcaaattgtcctttcacctgtaaaaaagtgaaaagaagcgttgttgttgttaggtcttctggtgtgagctctagctgcaactgtgactgtgaaagagacaggtcgagagagggttgcttcagctgctgtgagactaagagatgatagactaacggtgggtgtcgtccctgtgcggtggtcggcgccactagaagaagcttgacgatcaagagaggggacaattggacttttagggattaaaggatttagtcgatacaataaagaaattgggaatggtttattttagggatttatggtttttttttttttaatatttgaaatcgggtggggtcgggcagggcccgaaataatatgtgtcgggtcgggccgggccgggccgtgagcccgataaaaacccgaatcaatcgagctaaagttgtcccgccgggccgagggcccagcccgcaaaaaaagcccaaattgccattcctactaagcaagatctcttgaagtcatttccaaacttccaagatctctcattacttattaagggggctgtggtattattcattaaaccccccaaccaagattcgattagttagttagttatttattaactaacttaactgtcaaatatga

SEQ ID NO: 131230 - DNA, 519 bp, Cannabis sativa
caaggaatcttatactcttccacatcatctcttcatctccccgttttttctagatttagattgggcaacttgtcctatcactcgtcgctcaactactggatattgcattttcattggagattgccttatctcatggaagacaaagaaacagcccactgtttctaaaagttctgctgaaacagaataccgtgctttggcctccaccacaagtgagatcacttggatccaatatctactacaagatctccatatagaccaacctacaccggcattcatctactgcaataaccaatcagcaatccacatcgccaataatccaaccttccacgaacgcaccaagcacatcgaattggattgccacttcattcgcaaaaaaatcacaaagtctgccatccgactcattcctgttagcagcacactacaactcgctgacgcctttactaaacctcttccctccaccatccttacttcacatttgtccaagatggccatccatgatatctatggtccatcttgagg

SEQ ID NO: 131231 - DNA, 554 bp, Cannabis sativa
tgtctagacttttcacacacaaagagtaattaatagtcttcaaattgaatgtttttttttacctaaatatttttcactacttttattattgttgttgcttttgtgatgcttgtttattctttcacattttccttatctttcaatctggattcctcttcaatttggatatatttttggatctcttcctaaagcccttctaagttaatggtaactttgccacaattacaccaacttgaaatgctttaaaaagctaagaatctttaacttgttcacaatgatttgtaacttatggatttgaagaagaagatttttataaaatcactaaaataaaattcaaaataataagaaattaaaaaatttcttgtactttccccctcgtcttgtattttgcttccaaattaagcatcccaaatctccttcgcgaatttggtatcaatgtagatatcatttaacctatcggacaatattgtggacattgttccatatagaataaatggtagagaattgagtcatatataagaacatgagctactccactcattgccaattagttt

SEQ ID NO: 131232 - DNA, 837 bp, Cannabis sativa
attagttaacgatatttcttaaaagttttttttcttaagttatatgagacctgataattaattacaccaataacgatatgacaccgagaataatgctaaaaactagtagtaccttttagcatttctctaacaaagagtgtgttatatatatatcatttattaattttttgtgccatatttagcacattgtttacctcatgcattagtgttagcacccttatagtaacatcctacaaatagttagcaatatatttttattaaattacactgataatgatatgataatgacatttcataaaaatgttggccattataagtgctctttatatttctccacaaaatatatatcaaaatattatagttagtgatgtgacaatatttagtaaattataagatccacaatttgaaattgccaggtacaatccatattagtaataagttttttttttttttttcataaattactctaaatataatatttaatttaattactaaaattttatcatatgattaagaggtagttattaaatgtaatataaatatcatacattattcaaatatgagtaatgtgagacaaacatgcacaatttttttttaaatcacaccaaacataatatatattaataattattagagttggtctcatattattaatgtgtagaaataaaatactatatataagaagaatggactactcctcccagtgtcattaactttattctaaattttaacatgatatcagagccgtttgtgatccgttgtaagcccaaagtgccaccggtccaaaaagacgagtcaaactaaaaacttctgttgtttcctcttgaacctctattt

SEQ ID NO: 131233 - DNA, 586 bp, Cannabis sativa
  modified_base (35)..(51): a, c, t, g, unknown or other
ttgattagcaatgagctgcacagcatgtttaaaannnnnnnnnnnnnnnnntgctagttagggtgttacactgctggatcatctcatcctcctcctccactagagcttgcacaagctgggtagcccatgataaatgatccactttctaggagggaacgacctatgggccagaattcctggaggctcgaccgaggagtagactcagctgtagggtaaagggctatggaggcatcccatatatgcatagagagagagacagagagagattttccttgcatggatgaggagctcaaggagcttggtggtggcaagtcagacaagctcaactccattggccttcaggatcattctttggtaatttgtaattttagctttgttcatctttctagcacttctgtaagctggctggccaagggatataaggcatggagctagttgttaggctacattttggggtcattttttatagtttttttccatctttattattctttttggaatagaattacgcttgttttctttggtttcaagtttcaatcttggaatatatcaattgatcaaattcaaaaaacaacaatctatagaa

SEQ ID NO: 131234 - DNA, 798 bp, Cannabis sativa
tttattttgtttcattgttagttcatcttctttattctttgatgactctccatcaaatcgttgtcagttaaaaataacaagttctttacagttgaaggggttattagtcgtctaattacgtacgttgctcaatagttgagtgctcaagctataaggttgaatgaacctactgcaatagttcaaactattttataatctgattgatggatgaaattgaagaagtgttcttaaggttaactgtgatgctgtaattttttttatctaattttattttagtattttttgtcaaacgatttaagaatcagacaacccattaatttgctcggtttttttaatgcaaaatatatcaattctgatcaatttgtaatcttcccaaatgattctactgactcccactaccaccatcttcagtttaaaattaaaataatacataaagaaaaacaaaaagcaaaccacaaactattcttaattttagtattattgaaagaccatataaggaccaccccaccttttttataataataaccattgaaaacatcaaaagaaaaaaggattcatggtaactttacataaaattattcaaatttattacatgtatagtggtaatatttattgaaaaagaaaaagaagaagacatctttgcatagatatattcaaaccagcatgtgcatcagtagaaatcgagaaaataaattatatttaatttaataccattgcagtgagtggataatattagagaaaatacttacatagagtttgttacaattcatttactgaagaaagaagaaaaagaagaag

SEQ ID NO: 131235 - DNA, 683 bp, Cannabis sativa
  modified_base (163)..(169): a, c, t, g, unknown or other
tcgtaagtactaggccgttaagtgtcaagttaatgactacatgacaatcattgattagtccaagttaataatttttttaaatataaatatactaatagaaataacacgtggataataacttaacaatcaggtacttacgtaagtttcagaaatataacttaannnnnnntactgtcaaaaattaaacttaagtatttatttacaatcgaaaattaaatttaagtatttgtgcaattactcttttatatatagatttggttcaatacaactctcgaattcagctaacctatttttatacggactcaaatttgtactccacttttttatttcttattttttacaacgagctaaccactaaactataggtatttttaacatgtcgtgtttttggagtagatctatttgtacttgtgtattacatctttgagcttgtcgtgttgtgttgtgttccatttaatcttttagtttcaccctagtttgccaaatttctttccctactaattttgtatctcttggaatctttagtaggtgtaataataataagaagaaaaaaagtgctagttttttattcaagaagaaaaaaattagggccctagtttcctaaggcttattccttcgggataagttgaaaactacccttttttattacacattaaccaaatataactctaaaataattttaa

SEQ ID NO: 131236 - DNA, 803 bp, Cannabis sativa
  modified_base (745)..(748): a, c, t, g, unknown or other
gactaaatttgtacaaattaagggagggtataaattttgatatagcttgtattattaaggccaaaaagtgaaatttccctttgcaaaagggtgtggaaatgtatgtagaaaatcatttggtaaatgattatcataaagacactagtgtgtgtacacaaaatgtacaaaaccttctctctctctctctctctctctctctctctttaacgaaacatctactcaatgtcattgatcgttttggaaaaaattgtggaaaaaaactgaatagtgtgttagttttttttagatgatgagaattatgttatttgcagaggactgagcattcttgagaaaacttgctttcataagaaattttgatgagatactggtaacacttaagtaacacacacaatcctttcaaaaaaaaaaaaagtaacacacaaaaaaaaattaaatataaattaaataaagaaattattaaatttatgttgtcacttattttaagtataaggcacgattttaaaccatcgcatataagcgacgattttaaaccataccttatagtacatgttacgtgtctttactttaaatagttcttttcaacgatgattttttttcaatcgttacattggaaaaataaagagaaaatgcaaatttttaggtattttttttcctgcattaattttaatttttttttttttacaaatatgtatagtcacaataactaaactaacactaatatgattttgtcccgtgatgtactttnnnngaatgtattccgtggtacattagaggggtctcagggtacattaaatgagtgtcag

SEQ ID NO: 131237 - DNA, 883 bp, Cannabis sativa
  modified_base (703)..(706): a, c, t, g, unknown or other
gtggatctgcaccacccttgaacacagacaaactctgctttctgaatcgcttgtacaaaggctccagataatttccacatcctgtggcactaccagaagtgccagaggatcatgattgagacttgaagaaggttgagctcgctactccctcaattctcaaatttattcaccttacttccgaaaggcctcttgcatcgtggcatacctttcttcctaatttagtggtggtggaggattcacaccttcactgccaaccccaagcccggaaaacttgcaattacctttaccaaactacctcaggtgcatgacctaatacacctccagccctaactttccaccgtctagtacatctcaaattatgagcaatgctaataagcatttccatatatacacatactctttaacccttactgtgatttttcaataactagcataattcaaattagcggataattatcaaataatctaacaattagcacttacagaatcatgagtcaaatgagtcttcgcaatcaatgtacatatcaaactagtcttcaggatctttaaaccttggtcgctctgataccatgttgtaacgtcttgatccacagggacgccacgtatgtacttttacaaactaattcttagttaatctattagtttagaaaaagtgcagcttaattaaaaactttcagaataaactaaaacgtaacttttattnnnnagattactaagttttggggatcccctgctcaagaacctttacaatttagttcaaaattagattctcaaaataaggttacatctccataaaatagtcaaaagggtggatcctatcccctgaaaactgagacaacacggttgatatgtacattgctgggagacctctgactcgtggcca

SEQ ID NO: 131238 - DNA, 760 bp, Cannabis sativa
gaaacggaagagcctgtgaaatcgattgatgaggaagcaatccaagcagaaaatcacaactcctggctctgcttttggtcgatatattcagtcaccacctatatatatatttctgcgtacataaacgagtatcatataaaatggcaattatggagtggcactaaatttttggtggggctaatcaatcaatataaaattgaggttacctttgtagaaagtacaaagtagaggtagaggaagaagaattgcaatagagaatcaaagatagaggtagaagaatcctcaattaaagcagatgtaggcttcaataaaaccatcgttcaatcacgaaagctcaaaccttcaatttacgattgaatgttaactttatattttagggtttaatttatattgaatgttaacgttattttatggtttaatttatattgggattaaaagttcacagaagagttaacatcttataaattattgtatcatctcctggagtcaccactaaacgtggtaaggtagttgtggtaacgtgttattaaagtttaagatagtcgtggatcatctcataaatgggaatcaaatattaatgggatttgttgaagccacacttgacataaaatttcaatccataaattttgttgttaatgcgtttggatttgttttatttttatgccacagttgacataaaaatccaattcataaattttgttgttactgcgtttgctaatcaaatattaatgggatttgttttatttttattttattattt

SEQ ID NO: 131239 - DNA, 2357 bp, Cannabis sativa
tcccgagccagtttttaacaagtttatctcttttcgagcttcctcctttcaaacaaacacctgagccctctcattgaactcattgatattcttcactggaagaccctataagtcatcccataattcgcccccaatggtggatagatcggtagtgatccttgtctgaagggccgtaagttgtgtactaccatccaaatatcatgaatactcatttttcccagggatttaaaaactctctcaatgaaagcaccaaactgttaacgcagatttttgttaactagatttgagcctatatggtgataaacttgtgcagaaaaattaaaacagtaaagaaaaagtaagaacatgaaggttttttacgttttgtagttaaaaatttgcgtagtccacgagtcaatcttattagatttctaatacagttctagggccttttctcttatgaatttttagtcctctttttagagtaacatgcctctatttataattacatagttaggcagctaattaattacatagttgactgatatcttcacaacaattaccccctgaaattgtggggtttgattacataccacgtaaaataaatgcggttaatatttgaaaatcacacagctgtgataggtccgcttttaccgggtcaaggtaaccgtgtattaaacatgttgtaaatcgtaacgtttggggatgcctcgatgggaacacgctatcaataaccttgatagcgagctagagattttcccacatcttcttcgaggtgaatagtgttagccttgtcgtttctgtgagcttggcaacaaggtgaacttcaacagccaacgtcatttgaatgtcagcttctgtccgagagaactgactcattgatattatgaatctcatttaaagatgtctgaagctgattataccagaagtgtgattaatttcctatagcgagatggacgtctcactatccgtcacttaggttcttctagttgttgtacttagttagtataatgtgtattatacgctaagtatcttaacaatcatcatatctcgccttcgtctcttcatgcgtaatgaggttgatgcctcgccttacacatccaatggcatatgacttcgattctcgttaacgtatgagacaaaaattaatatatctttatctcgcgtaagatgttatagtcaggaagttatatatatactctattatttcctcattaatgagttattccatttttaaatgtaattatcgttacactcattgattcatattcttcccaatttgacacgtgtcttcctttgaaatgatagccacatttcgagtataataattgccccttaaaaagttctttttaataaaaaaaagcttttaaaatgatcacagagggtacatttgtcattatcccttcttcaagatcacgcatgtccttgattttgatggcttcatggtttcgagggtcattattagcatcaataagctgccctttccatttcttcactcccagctgttagatctcccatctcttggccttcccattactgggctcaaagtataaaatgatagttcatgttagccatattccataaactcctggtttggtgaatttcgtctagaaaatggattgtcattctcttgcagagatgtcccatcctgactcagaaatttatcctccaacatttgtagcaccggaatatactaaatgcctatcctccccatatatccctaaaaacttcaaagctcaattaaaattggaaatgtatgattccaagactgaagattgtctgattaatcgaaaccaagaagaaactatcaaccgttataggcgattcttacaagaggtttccaaaagtaagcattgtcctttgtaaatgttggcctagtctgaatccattttttatatctacaaacccaatgtttttattcaacaccaccactgcttaattcattgatcttttgcctttgtctccacaggaatggacgtagattttgagagtatgttcaaagatatccctcaagccgacaagagatctaggaagaagatagtccaagctgatgaagtctcgagttccactaaagaacccaattggcccaagaccaaagcttacacgcagaaattttcgagccagcctatgattgatgttgataaattttctgaggctgggaatgaggtctcggctgcaggtaatgaggtctctactgcaagggttatcgaagtgcatctcatcgggtcatcgcactaggtcgagttctccgattcttgtccaaagatggttttcctcgcgcgtttctgtcccctataatgagtcttgtattttttgttttaggaaaatggcctaatggtttgccccttgtggaattttgtagaaacaagtttgtaaag

SEQ ID NO: 131240 - DNA, 1044 bp, Cannabis sativa
caaaatcaaaacattatgagctaaaagtctcttcttaacaaaggcaccttggtttccatgaataagctcaggcaaaacttccgagagtcttgtacaaatcatctttgaaatgcatttgtatgttgtggtgcaacaggctataggtttgtagtcggaagctccttgaggattgtcaattttgggaattagagatatggaagtagcactcacttcctgaggaagctttccagattgaaaaagacccaacactgcgcaagagaaatcatccccgatatcattccaaagctctttgaaaaaagacgctccaaatccatcagggcccgggcttttggacaaatgaatgctaaataaagcttctttaacatccttcttgctgaacggccgaataagactcaattgatgttcaacagtaagcttattcccatactcaaggcagtcctcttccaatcgtcttgaagccgaactttgtctccccatgaaattgcggaaatggtttacaaagtgctccaccactttgtcatactcatcaacgaccatcccattgtcagtgaacgaacacactctgtttgcagctctcctctttttcatgatagcatggaaatagcttgtgttttcatcaccaagttttaaccaacaagctttagaattttggtgaaggtagctaaagtactgttttcgggcatcttggtagttagcacgactcattttttcagttaaaacagctgaatgactattcggattgttagccaaggcttcttgggcttttatgaacttgtctcggacttcattgtactagccagtgatatcctctttcttctaaacatagcaggttttcaaagtgtgtttcaccctaaacagttgctggtgaagcgaattcagatctgtgaccttgtgcttcttccacgtagagagaacattatctttgaaatcctctttaaatacccagtaattgcaaaaccgaaaaggtttaattctacgattaccaaccttgatgtgtttgactaggcagtaactgtgatccgagagggccccccatctgaagct

SEQ ID NO: 131241 - DNA, 1080 bp, Cannabis sativa
gaataaaagagagaaagaaaaaattaattaattagaagatgttagaaataattaattaattatttaaataattattatttaatttaaaaatattattaaaaaattttataaatatatattattaactatttatatacaattttttttttcgaaaaaattacacttctatcaatttttagaaaaaattacagcatttacaattaactacaaatatacggattgtaatacagtataccaaacaaacttttacagatcttcccctggcctggccttcccctgtaccggatttttcactacacaatcgattggaaaaccagttttgaagagggttgttttgaattttgattggacatcaattaagggattcagattccgtattttgaatccgatttacagagtttgcatcaccagattttgttcaaacactcgacttttgtctccttcgaattcccttgcccaaaaccctttgccttgaagaagatgacgatgatatacactatattctgtgactgagattcttacaagttcaacagaaggaatgctagtcatcttattgcttcaatattcataagtcttccttactgttttcactcttttccttgtttttaattgtttcaaaactacttttactcttgagggatgtaaattatataataaattttgatggaattattaatcatctccagtccaatatcatatcttatacttctactttaaatttttgaacaattcttaatttgttcatttgagattatttgcgcatttgtcatgttcaattcattgttggatttggctttgcattttccatattaacttttttttttttttgtaaaatataactactaatagtgttttttttttgttggggtaatcgacaaaggttaagataacgacggtaacaaaagttacacagaaagagggagatttcttccatccaagaaagttcattgtctatcctaagggcatgcttagtccaatatgtgagcctcaacattaaagttgcggctaacatgagaaagagatgtcccaggaaaactagacaataggactttaatatcagaaaagataacccccagttca

SEQ ID NO: 131242 - DNA, 855 bp, Cannabis sativa
  modified_base (578)..(587): a, c, t, g, unknown or other
aaatataatttaaaataaaattaaatatttcttgataaatataattttttttctttctttgaatttattatttgttaattttatttatttgttttaatttgttgtcggagacaatacaaaaattatttattttattttgttattagttatgtgaaatttaaaataatcgattcaaactgtactcttgcaaattagtagattgaatttgaattattctatggattgattgaattcaaaatatgaaatttacaattattgcagatcgaatatattataaacaaaatagtacagattgaattgaatggacacctataattttttaaaaccatgtgccagttttaagaggttcatatagtttgaataaaaacagaacaggttatgggcgttggggcggaaaatctctacttggatgttgggagcgaggcgaaaaatctctagtggagcgttgggatggataatactcgtggaagactcatttatttaaaaattataaaaaatgataaatgataaattgcataaaacataaaatattatactagatgccgtttgaaaatatttttgttttctaattttttaannnnnnnnnnaaagtaaaatttttgtttttgaaaaataaaaatgcgttctatagccacttttattttttaattttaaaaacagaaaacaaaatgtgttatgtaaagttcactcttatttttattttttaattttatttaagttcggtctaggtccagggtcagattcgggttcgggtcagagggtgagttcaacgccagagccgtagtggggatttggattcgggtttaatcagaatctaaaatattgattaagaaaaaaaaaaacggtttaaaaaaa

SEQ ID NO: 131243 - DNA, 672 bp, Cannabis sativa
  modified_base (627)..(630): a, c, t, g, unknown or other
atctgcacttttgcgaattgaatttgagctattgtgcggattggattggatcaaaaaaatgaaatctacacttagtgcgaatcgaatgcactataaacaaaatagtactgattaaattagatgaacaccctatctaccaacactttgtaaaagctaatcctaaagttggtcagccttttggttttgggccaaccaatgggctcttgtttgctacataaaaaggaatttacataatacacctaaaacagaaaaaaaaaataataaaaaaaaaatctacatttttaagaaatatttatttattatatttttataattttatgttatttcaatattattttcacattatcccaaagttatattgtatttctgcaatgtgtaaacaatgattttttcttagaacaaagcgtaaacaacgatttgtaaaaaaatctgaaaaaattttaaaaaaaaaatgtcaaaattcaaaaaaaaaacataaaattttagctatttttgagtatttctgaaataatccccaaaattaatgtattgaacataattttgcattgagctgcataaatatgttcaagtgtatttaaatttaggggaattactccatacactggttttttaacttttttttttttnnnnaatttacggtttgagtttttaaagtggttgcagtgctagttg

SEQ ID NO: 131244 - DNA, 686 bp, Cannabis sativa
  modified_base (534)..(542): a, c, t, g, unknown or other
acgctcttccttttggtttattaatcgatgtttgttcagacagtatctcgatcgaatgtgtgtgtgtgtttttttttattatttttaagtatgtgtcggtacagaaccgacagaaaaaggtataaaaatactattcccgtcggttataaaggaacacgatattttgaaattgactgtccaaaatcgacgcagaaaaatacctttttgtaaattggcctttttgtaatagtgttgggatcgatgaagattttaaaaaatgatcattgcacaaagtatataagaaagatatagttcaaaataatatatgtcaactacaaattaatattattcaaagttgatttaaaatgtatccaaaaatgctagaagcgtaaatgaacaatgtagaaattattaataaatattcgtttgatttgtcatgaagatattaaatctagtggcactcatagagataccttaatgttataaagtattgataacttaaaaataataaccgtgaaggaaacagtaccctagaagagactcccaagagaagtnnnnnnnnncatatttgatcataattgaacccttgtagtggttttatataaatacctataaataatatacatagttgaaaaaaaaaatataatttaaagagatatctataagttatgtcaatattggaggaaattatcatataataaaatttt

SEQ ID NO: 131245 - DNA, 1001 bp, Cannabis sativa
gtaaaataatttccaacacagggtgcatcagttcgggatgcaccttcaacccgcgaaagtttagtccgcgcatgccaggctacgggcccactggccacacctttttcctgtgtacggtgtcagagtttgtctcccatgccacactaccatgcagagcacgctcgtccttgcgtaccatatgctaagtaatccaagggctacggacgagagaaattcaaaagagaatggccctgagacgacatgcgtccgaagccccgccggtgtagccagtacaatctgacatcggtaaagaccacatggaaaacatgccacctaccaatccaacgatgggggttcatccctatgaagatccattcaagatgatctgcaccatggaatcgacctataaatactccaatgagtgcacaagagaagggatccagacccatcctttggactctcacaaagaagatccaagactttcccttcacacaaaaaggaaacatattgttttgtaaccctattgttaactccaaaatatttctaataagctttttcttctttaagaggaacacgggggaataggagcaaagtccatcattttgtatttgtataaataatctccagcgaaagaccctaataaaatggactcgtgaacttaggatagttaacgcctgaaccacgtaaaaatcttttgcctgttgtcgtattattcatacctttattactttcttaagctctaaaattattcggtttccgaaaaactcgataaacacctatgtacctataaataggagcagaattcatggaaaatgagggaaacaagattattattcaaatattgctatttgtacttgatatctaaaaaatatccctaataaggactcatttaactacaaaattacgcaaaatatctagtgttatttttttatttattaattatttatttttatagaaaatttattgcaaaaaaaaaaaaaaacttattaataggggtgctcatccgatccaatccgcacttt

SEQ ID NO: 131246 - DNA, 781 bp, Cannabis sativa
aatacgcttattttcaaaaaaagaaatagtttgaaagttgttaaaaatttacaggtgattgtaaataactgcaaaataaataaaaatgaactaaacactcttttaatgtccaaacagataaaaaaggataagggataaattatagacttaccctatctcattttgcctctaattcttatctcattgtgcacaaagtcattactcagaatcgacaactgcaccaaaagaggagaagagtgtgtttttatatgaagttgttttaaggaaatgttttctagtggaagacttatcttcctttttgtcttttgtgggtggcattgtattgaaattgtttatggaatcaaataatcaatagtttcaaatccccaaaaataataagagtatagtatattaccaaaaggggcggcaaacaaatgcaatttttactatatacactaaactcatagaacaattttcaatttaagccctcctaaagatataaattaaccttaaagaaagttatgaaattataattactatccttggttacaatgtgaaaatatgattgagaaagtagaatgagaacactatagtaaaaatttgatgttttatctcaaaattaattggtgataaataaaatacttatagtattgttagtagtagtagattttcacgcattattaaagtaagattttctaacattcttcttaaaatggtacttggtttttattcatcaaccttatgcggctcgatcataatgattattttttttttttgtttaatatcctcgaattatgagtga

SEQ ID NO: 131247 - DNA, 900 bp, Cannabis sativa
acagagtatacaacaaagtttgatagacttgccaagctagctttgggtatagtgcccacacactttagtaagaaaaagaaatacttggtgggtctaaatgccaagatcagacatgatttggttatcactaatgacaccaccacttatgccaagatggttcagaaggctctttgagtcgaaggtgcagttgggtttcttcaagagccccaagggacttcaagtgttggtgcgacaaccttttttcctactcctgattatggtagggatggtggtgattccaatattgattagaagaggaagacttttctgacatcaggtggtttgggttagaataaaaggttccgtgggaaccgaggtagaggtggacgttaggtttattcctattttgagtgtcattgttgtaggaagcatcatcccagtgaatgtaatcgaaagacattatctagtgagaattagttgggtacttcaagaaagacttcctatagttgaatgactcctattatactatactgtttgactctggagcaacacattcatatgtgcgtcaagagtaattaataaaatgggtaggccctgtgattttattgataaagggttgagaaccctactacctagtggagaattggttatcttaaaaaggtgacttaggtctatgccaattagaattgagaatagggagttaagtgctaacctagtggagttggagttaattgagtttgatattatacttgggatggactttcagtccaagcatttggccagcattgattgtaaatgaaagatggtaactttcagccaaagggtgacgaaccatttgtttatgtcgggtctatttagggttcaggaattttgattatttctattttaaaggctaaggatttattgcacagtggatgtgta

SEQ ID NO: 131248 - DNA, 568 bp, Cannabis sativa
tttaaatattttaaatttaaatttgaagtcaattatatatttaattttcaatatcaatctaatttaaggttttttaaaaataaattaatcatatattgttttataaaataataaagaaaaaaattaaaataataattagaatcactgaaattgcaatgtatatgtctaccattagtgcaagactctctttaaactaagatagcttattgtctaaccaaaaaacatgcttatcaaaccataaactgctataatctcaacgcgaatcatatgagataaaactgcttcaaaaaatttagataataaaactataatatcttttaaacagcacacccaacatattaaaatacacattctcattattaataattgttgtcagaactaataaatctaaacaatagacatataaaatatcgcaacaccaaatcaaaaaataaaattatattaaaatacaatctttacaatcttcaaaataaaaattaatatacaaaaacatttaaagtttcaaacactagtaatagtaacccatttcttaagtttaagatagtaccctcttctctttcactccttt

SEQ ID NO: 131249 - DNA, 1703 bp, Cannabis sativa
ctcctcgtcaccactcctctggagaaccggctgccaccccaactcccaccgctggcgcccgccgtcgaatcggcattgctgttgatctctcagccgagagcgcttacgctgttcagtgggctgtcaaccactacatcttccctgtagacgctgtaattctcctccacattagccctacctccgtcctcttcggcgtcgattgggggtccatcgacatccgcccaggggttttggggctgtgcgacgtgttaacgatggaaggcttgggagtgtcagggttgggagggttcaggatccggtggtgagacgagagagagaaagagggtgatacgagagagagaaagagggtgggagggttatgtagaaaaagaagaagaaataagaaagaagaagaagaagaagaaagaaagaagaaagaagaagaagaaagaaagaagaaagaagaagaagaagaagaagaaaaaaaaaagtaaaaaaaaattaattttttaatttttttttaaattaaaaaaaagtaaaaaagaaaaaaaaattctgattttttaattttttttaaatatttctaattattttttaaaactaatattacgtggaccactaaaaaattaccatgtgtacaagtgtgtactgtgattttagatggaggtgtgcagagcaaaacggaaccagggtttaggtagtttagccgtcaaaaattcagtttttgtgattaagtgttacaaaccgtaaagttcaggtggtttagccgccaatatctttttttttttttaatgttttgtagttaattcagagttgatttatgaatgatttgcaaattttaatgaggttgatatcttagtatttttctgttgatttgtatttgtctttttgttgttttatataataaaacctctatctaagaatactctattcaattagaataacatataatttattataaaaaatcaagtaccaatttgaatcagttataaataagaataacctctgtattgtaattggttatacatttttttaagtcctgtattaagaaagtatgtctctatataagaataattatatataaataaaatatatacatatagtttacaaatttatttatgtaaaattaatattttattccaaattgtaataaagatataaatattatatttactcaaaaataattttattatgatataatattaaggagtgtttattattattgttgttaaattgatatttttggtgttttgattttttttttttctagtataactccatttagttataacttctctattagaataaaattttcttggtgccaagtgtattcttagataaatgttctactgtagttatttttatgttgttatttaggtgttctattgttgttttatagttgttttgtattttttatgcatttttttattgtacaattgttgtttagcttatgtgcaatttttatggtatatatttttagtttattccagaattgtttttagctgtatatatgtacatttgttttgttatttttgtgtcattttttgttgtttttaagtggtttcaaaatatttttttgctaaacagttttttttattcatccgtattttttattgtgtatatttttagtttattcatgccattttttttattgttgtatgtgtgttgctttgtaaatgtggatacatatatttagtttatttttttgatactttttttttaaa

SEQ ID NO: 131250 - DNA, 1838 bp, Cannabis sativa
  modified_base (40)..(47): a, c, t, g, unknown or other
  modified_base (792)..(798): a, c, t, g, unknown or other
  modified_base (909)..(916): a, c, t, g, unknown or other
  modified_base (1811)..(1812): a, c, t, g, unknown or other
taatatttacgtggatcgccacgtaactctcatctagtannnnnnnntatatatatatatatatagcatagcaactttttttttgaacattaagcaatccaatagttacaaaaggataggctagtcctccactatagcgaggcagccattggaggaactcatccatcctagaaacaagaagttttacaacataaaatattcttagctattaaatgtgttgcattattcgccaatcttggttgaaaaaagacacctaaaataccattctcagccattaacttgtaaatatcacagaccattaaatcctactccccacacagctctggcggcctaccaagcatcgccactgccatgttgcaatcacgaacaatactacaccgctccagagacagcaacctagccaataaattattatgtatataagatgaatgaggtttcatctcaaaactaattggctatggaaggagtagctcattcatcttatatatcacaatttattttcacacattaacaatgtgggactaactcttaatacaccctcctcacgacatttaagagaccataggaccgaacgtgacatttgaaagaatctcacaatgccaaatttgtggatttttgaaacaggtcaaagacccaacactggaaactggcacattcgtcgaaaggtcccaaatggaggttaacggggagacagcggaagtatctgtttgaactggtggcacttttggctcacaacggataacaaccggctttttggaccggtggcaatttgggctcacaacggatcacaannnnnnntgataccatgttagaatttgaggataagatggatggtgttccatctcaaaaccaattggccatgggaggagtagctcattcatctaatatatcacaatttatttccacacnnnnnnnntgtgggactaactcttaatagtataaagataaatgcaataaaaaaactttaaaattgtattttttttttcctttttttcttttttcttaaaaaaaaaatactaaaattaataataaaaggaatctcaactgatttttttttttacagaaactaaagcagtagtactaaaataattttagtaagacgataatttaataaactaattaattctatataattaaaaattgattttttaaccaaaaaaaaaaataagttagaaataccaaaacttatatataaattttatatgttttaccaccaacccactatcaaaactaaactaacacaagaccataattaaaaccaattacaaatttatcagaagctttaatattcaaccatcaacccactacacaatacagttactatctactaaaacaaaatattaaccgaaataaaagtagaaaaaatagaatgagaatattcgacagaatttctatcatcgtcagaaaagttgtcgttaccgaaaaattaccgtagttagagattgaaattgtcaatgatcaatgttggatgttggagttgtcgccgaagttagatcttataatttgacaaagagaaatcactaatatttattagctagttaaaagaataaaacctaataacaatttatgtaaattaactaaattaaaaactaaatcttagagccagttaagtataacaacaaacaataatttaatccataaaccaatctcatattacaaactaaaatctaaacaaacatatgacgcctaaagtaatgaaatgatacatcaattacaaaaatcaattatttaaaaaagaaaaaaaaatacacaccataaaagaaattctaaacaatgacctataaatgttactgttgcccctgattttgccnnatatacgtggaccaaccagacaagga

SEQ ID NO: 131251 - DNA, 537 bp, Cannabis sativa
ttttttttatgttcaatatcagggaaatattatggttggtttgacaagttaaaaaaaaaaggaacaagtgactcttactgtccttagcaaataaatagaagcaaaaatataatgaaagactatagaatggagatggggaaggtggacaatgtacttcaacagctcctttatgcatttgaacaaccttcctaatgttaggagcaaacaagggaatgctaaggaacccaattatgtttctataagcatctatctcattcctaggatatgattttgtgtgtgtgtgtgtgtatattcctttatccagatgaatagtgaagagtaaagggccaagtagttgtttggacttggatggggtctagtaatgagctggttcattatatatgtttcacagttgtttttctttgttgcaaatcttatagcacaagtgggctttattgctgttttatctcttggtaatggttagatagatcacatgtataaatttctcaattacagctgaacttttatgtatgacttggaagacaaagccatgtgaac

SEQ ID NO: 131252 - DNA, 565 bp, Cannabis sativa
tggaaatcctcttataagctcaagttatttacaatagttctaaataaattacaagtatgtccgaaggtcaaaaccaacaaaagactctcaactactttcacttacaacaaaaacaaaataacagaaccaagaacaagagcaagaaaatacagctcaacaatccaaggtcctaactatgctaactacttctactgcttatacaaacccagatcagagctggagaggactacctgaagcatttacttcctttgtgagttgtgtttagagtaaaagagagtagagagaaaagctcatccgagctccattgtaatcacatacatacagtgagataaaaaagaaaatcagagagaaaaaaaaaagattatcaaccaaaaaatgttgtgttttgaaatctgagaaaacacttgtaattacgtgctattgtagtagagatcaaactagtttgaggggagcttggcggagacatagccctattctaataatatatatttatatatatatatataggggcacgattttgtcccgtgatgtacttttacggaatgtattccgtggtatattagat

SEQ ID NO: 131253 - DNA, 603 bp, Cannabis sativa
aataagctttggctttcataataaataaagaagaagctttagcacattatttttttcaagtgcaaagaaaaaatatttagcacatcattctttaattatataagtacagttatattatcatataataattttgagtctcaaagtttagaaattgatagattattactattatgaattactctgtaagattattagtttaagacacatgcatatcagtagataactattagaatgaaaaattttgaatcaaaacaaaaatcaagtagaaaagattgaaaattgcgtaccttcatatttgcaaaagctcttaaacttaaaaactgacatccactttaaagaaaaatatgctcaagcaattagaaaaagaagtattaataagatttagttttaattatatatatgataaaaataaaaatttagatttacatgtacgatcagtgttgttaattttaaataataggaatttaaaaaatgataccacgtaatataatttaataaataacaatcatgaatattaaaagcgtgcattataatatattataattaacaataatatatttacacactactagaaaattagattttagtgacacacattgagta

SEQ ID NO: 131254 - DNA, 1187 bp, Cannabis sativa
  modified_base (1119)..(1119): a, c, t, g, unknown or other
tgtcaaacaaacactagagaggtcatttacaactccaaacactcttaattttctctctaaaccctttgaatttctatgttgaacatacacaagtgtgaaacatctttttataggcactcggttagcacacataactaacataactgtcaagtaagttaagttggttggaagagtatgctaactgtcaaaattgatggtaagaccaagttcaagaggtcaaacctcaacaataattattatatattgttggaaaagttctatgaaaaacaaaagtaaaacaaagttaccgaatgaaagttgggtgatctagaattgtgtgtctcactgtattgtagagaaccatcaaacactgcaccacacaacactacaacaattttcctatttaattatattgattaaacgataacacttcaaaaagtacggttactaaaatatattaaaaaataacgaatttgatagccctactaattaattcaatttctaatttcataaaaatacaaacaagtctcatctctccctctctctgttgatcccttcaatttttggattgcttctgttgctcccttcaatttttggattactatcactcttttcaatttcttgccagcaacatcactctctttcaagttctactcggcataggtaagtacgtacatcccaaaaccttatttatgcaatgtctattcatctaattctcgaactgtaatactaaccctcattgcatttgattttccttttttatagttttattcattgattcattgattcattgatgcatatatggatcatttttctttgttaatccactactacaaaactaggcattcccgccagtcctcaaaacgttttattttagataccgtcgttaataaatttaaataagtgttctaaactattagaaaaaattgggtattcccgacgatttatgaaaattcgtgacggttttaagtaaatacgcgaattttcaatgtaaaataatatttattttaatcttaataaaataagagattaatgaaaattaatcaattattatttgctgcaaaataaataataaatcttatttgtaacaaaattgataaatcaattttggctttaaaataaggattatttcacaaatanacaaaaataacaaaaaaaaattacaaaaatatggtttcacggaatttgaaatatttttacgatttttt

SEQ ID NO: 131255 - DNA, 1114 bp, Cannabis sativa
cgctcttccgatcttttctcttttagctgctgttggtggtggttcttgttatatatgccatttcgcgtgatacgaatggtgtagcccacgcactagctaagtctgttactagttctataggggttcatttgtggacaaatgcgtgtcctagatttataattagtgctcctgtaacagctgatttgaattgatttaataacatactttctttcaaaaaaaaatattatatatataaatatagaaagagaagcagaagcatatactatagaggaataaaatgtgaatttcttgtaaatatattgtcttctttggctttagtttgttacttgttagtccggaaaatcacagtaatggggcatttcggtacggttgtttgattcttggaaatgagaatgtaaaaattatatctatgtttggtataattttagtggaagatttatgagaaagtggatctcacttataagtttattttggtgtaaaatacttagatttgagatttccttaatctcaaccactattaaattttacaccaaattaatacaccatatataagagaggagtgaattaaattttagaatttttttataaacattaaagctgaactaccactactacgtagtcatccatgaccatcaaatctagtcatgaaattcttaaacacattcctttcatattaggacataatattataatagtcattaaaaagtaacttttattgctgtccaatattgttggacgtgataatggtatctaccaacatacttgtttgacgtccaatttctatagaattattatattttatgtctagaatttttatctttttaagaaataaataataaataactaaaatttaataatccatcaataacacaaacaaaaacagtatgagagtatataattaccatgacaaaaaaaaattactagatgagcacaaaaaaactaaataaaaaactatattaataaaaaaaaatacaaaatttatattcatggacgttaattgtaatttatttacatcaatcttgtagtacaatttaatatataataccattttgttatatatatactatttaaattttaattatttttccatgtaatttcttggattttcaaaatg

SEQ ID NO: 131256 - DNA, 561 bp, Cannabis sativa
aaaccacattaaacattgccaaaaattccatttacagccatggccggaggagccctgaacttcgcaccacctcccattttctcccccttttcgcgtcgtacgataacacctaaaaccgtacgattcgcaatcagagcatcgtcgcagagtcccgatgcttcggcttcggtgaagagcaaagaggaagaagagaagcagcaggggtctttaacattcgctcctccgccaaatttcaaggcgccggagcctaagaggttcggagtccgaccagataaggctttggacattctcggggcttctctcgctctcttctttcgtttcggcacaggcgttttcgcttctgggtatgcaattttttcttttttttacctttccttcttatagtttcaaaatctatctgagacatctttgattgcttggatttcaaatttccaaagtacggaaatgaatttactactaattcgaattcaaattcaaattcgaggtggaattttctttggaatattgtcgttttgaagttgatgtcgttgttgttaggataataatgtagtttttaatgtg

SEQ ID NO: 131257 - DNA, 611 bp, Cannabis sativa
accaatctccttacttgggagtgaccagccaaggccaacgactcagtaaagggttgaccgacctccaccatacactttcctagagtatggctgacctacccctacaacattcagagtagcagtctctccaaggaggaccagtcatccaagtccctacaacaatagatgcttctgcgtaagcacagttggaccaaatatgggagatgatcaagggcctagcatgtcttaaaccttcagaccttgaacttgacaggtcaaggggatcaccattctcggcatacatagattccatgcccttacccgagttcaagattctgttatggaagatgtataccgagcgagaagacccattgacacacatcaagtacttcgagatgcagctcgatctttaaaagatcactagtgatgtgcagtgtcatatattccacacaactttgtcagaaacaactcagcaacggtaattcaagcttgccctaggatgattcaattctttgaatgagttttctcaagaattctacacacaattctcctccttaaggcttataccatcacaactaaaagaccttgttaaggtcaaacaacaacaaggagaacctttaaaggattacatc

SEQ ID NO: 131258 - DNA, 1072 bp, Cannabis sativa
attcacctttagcgacatatggttcttctcgctaatacactaagtggcgctttgtacattgattcctcgcctaagatcttacaattggcgggttacaaatatactttgataattacgtaattaatgagttattccataaaaaaatattgcactgattcatattccctttatcttgaaacatgtcctccagccgaatttcggctataacagaagtcattatgcataaagtagggttgccattctccgctgaagcaattaacaacctgtttaagttggaacaggtcacctgtagtttcactcccctaaaaggtcaggtggacaatgagttactagccgatattatgcctaaacttgccaagccaaattcagaatgggacttagatgattttggaaacctttggtttgggcatactgacctggagcatgacatgaagtgtggatgttgtattgttttgaaaaagggatgcctattgatgtagggatagtcttggcccaagaaatttttgattgtgcacatcaggaagaaaggaaactatttttgccagccactatcattgctctttgtcgagatgcaggcattccaatgtggtctgaggagggaacattgcatcttaaggggcctataagctttggcccatcccaagctcgtaaaaaatctcatggctcgacttcaaccttagtgactgagccttccatggagcgctttgctcactttgagcaagtgcagcaacaaatgcatcaaaaggaagaagaaatgtgtagccgcttgcaaaccatgtgggcttatgagcagcagcgagatgcgattatggagcgcacattcaagtagataactctgcgagtttttcccaagtaccgacaatttccgcagtagattctcaatccatggatagcttcatcaacatcaaatatggatgtaacacacggcgactctaagtaggggagtttcctattccataagctattttatattttctattgtgtgttgttttgtgtttgttgttggaaattattttaccaggatctcagatctactcacaagtatgttgattaacacccgaaatatgaactt

SEQ ID NO: 131259 - DNA, 934 bp, Cannabis sativa
aatacgcctaagttagttagggtgttacaataacagtgttataataatgaataaaaataaataacacgaaataattcaaactgattataactaaaatagaaccaattatataacataacgaataaaaataagtaacacgcaatatcttaaatcgattacaattaaaaaataaagaggaaatcaattcccaaaatatcgaaatataaattaaaaacaaaactagttcaacaataaaatatgaacattgttttataatttaaatatgaatgtgtaagatgaaaagtttgatattacatccctttttttgttgaaatttgttttttttttccaaatttttattcttcacaacttttgcttatcctctgttcttgtctatccttgttgctggatcttcttttgttgattttttgtaattctttgtgtgtaattgcagtgatggactaacagtcgctatttcgtgcaaggtttaaggtctggtaagttatcatcaatggaagttttttgacaaagaagtttctctgcaattagtggaatacttttctgatgttttttttttttttgattgttttattatgttctgattgaggtaatgaaccaatggttgctattttgttgaaggttaagctcagaagatctcatcaatggagtttgtcgataatagagtatctgcgattgacaatagagaattgcaattgtcaaagattttttaggttttttttttttgtttgaataaactttagatcaattttattaaaattttatgaatttatagattcgttttagtttgtgaatcacgcgggtgattcctggtttataggattatcactttattgatggaagttttggttcacgtcaagaagataatgatgtgtcacgataagttgttgcttgtttttttttttttttttttttaaatactttttttttttttttt

SEQ ID NO: 131260 - DNA, 954 bp, Cannabis sativa
  modified_base (371)..(375): a, c, t, g, unknown or other
gtaaaataaattccaacacacatttacttacttcattacatatttgtctttgttcgcgatattatgtgaaaatttttgtttagtttagtggaaagaatgaggctttactaataggagcacttgttacgattgcatgattctcttttatcaatcacgattagcattaataagctatatctatttgtatcttgtattttctccctttgtgttctctctttgattataatatccagcctatatgattacatgacttttgagtaaaataattaagtgtgtagccactaagggatagctcaagtggttgggtgtgtgagtgtgtgggagatgtatagcggggtgggttgaaattcccattataacatttgaataannnnntgtatattataggtttatatacacaattatgacattcttaaaaaatttactttcataaaacatatcgtttataaaataatttacaattagttacataattcttaaataaaaactactagaacttatatgaaactaatatttacgtggcttgccacttaactttcatctagttataaattatatatgcatattactcttaaggttagaagaataagttcatcgacactaaagtttggacttcctctgtgaactctacatactatcggacctacaaaaattaagaaaataaagagaaaataagcctgaagtccttacccctaatacacacactattatatgaaaaaaaaattggcagcaacaaagtgattgacaaaaaaaataaaggatataatttttattttaataagggatacaggttttaaaagacatatactaaacaatttgacaaaataaaatatttaaaacttaattttttttaatttgcaaaaaaaaaaaaagttgatatgtaataggtgatatatttagagtttgaattattttaccaggatctagatctactaacaagtatgttattaacat

SEQ ID NO: 131261 - DNA, 1421 bp, Cannabis sativa
  modified_base (374)..(375): a, c, t, g, unknown or other
ctatactcggtacactagtcatacactagctgtacagatgtgatactgtcaagtagtacggtactatcgaccataatatcagcctatactcggtacaccagttgtactctaaatgtaccaatgtgataatgtcgaatagtacaaaagccaacatacatttctaatgcaatttaacaggctcaactaacatgcacagtaaacatataaatacatatgcatatcattatactaatcttaccttgttaccaaatttaggtgtgccggccaacctgagtggagcagctgctcgacgaattacagtcccctaaatcacattattcgtaaaactggtgagtgacacgctaagtcacttttcagggacttaaacttgaaannaaaagtttccctatcaataaataatatggcaataccttaatatcgtaaaaaggggaaaaactagggtttccataacttccccaaccggtagaccagttccccaactagaattctagttttcctagggaccaaccagaattttcattcttacaggtcccagtgaaccggtcgaccggttcagtgctagaaagtttataaaattcataactcattcaaatcaaccccaatttaatttaaaccttccagacctgttatttagactataaagaacatatccaaagctataaaacactataagatgctgagaaacaaattccacccttaaagagccaagcttgagttctaaactcaaagcttgctcaaacctaataacaaccacaaaaaatagctcaaaacaacacatctaaccataatctaactccagaaaataacatcatacaacaacaacaactacaacaccttcacttacaaatcatgtataatttcttaacttaaaacccaagaaactaaagagagagatgctaggagcttaccttgagcttgaatctacttagaacttgctagaaatcactggatttggtgaagaaaaaccaaaaccctagctggttctataggattcaaaagagagagagagagagagagagagtttggctagggagagagagagagagtgttctttctttttctcaaattttgattttttgtaaaataaaaggataaaaatatttttattaaattaataacagatatttaaaaataagatcacaaaaccataaatctctcactaaaagacaaaaataaacctttggcaaaaggaacaatttgcccttcacttagccaaaaagtcataaaaccacctaggggtatttttgtcaaatataaaatttcgactaatcccgacattctcaatgtctaactatattgccccgcaatactaaaaatagtaagatgtgattctaataggcaaatgccgcgttccaatgttactgggcacaaaacatgcaaaaatatgaaattccatatatgacatataaaatgcattctga

SEQ ID NO: 131262 - DNA, 656 bp, Cannabis sativa
cttcactttgtctccttctctttgtctctagagaggacccacggcccccttgtccaccacgtggcattaatggaccatttttttattttattgttagttatgggaaaatagtttatattttaaaatattcaaaaatcatcaaggatctaaaactgcaagattggattagataattaccccctctttgttttactttgttggacaataaaatagttgtgtaagattatgaatgaaccatagaatttcttattgttttgcaaaaagtcattatgatttttttagtaaaagatatagttgcagtgtaaattcaatattgttattttcctaattttgacatgaaaagttttgctaatttaacattttgatgttaatttaccaaatttccccacaattcttcctttaataaataaattaatacataacaattcttaaaacgagtttaatttaatctatcgacctagaagataagagtcgacagcataaccaaactattgacacgctttagttcaagattttatcaaaacacttatgaaaaatcagtgagtgattagttccgctattgacaaaaaagtttgtgttaagtaatattagttaggctaattaggatttttgacttctaaactttgacgtgtatcaaatcatgtcctctgaacttt

SEQ ID NO: 131263 - DNA, 1277 bp, Cannabis sativa
cctggacgttgtgtgaatgaaaaaccgctccggagttgtatttttttgtgcctaagtgatgtgttgacattaatttttttccaatttctttgttttggtgaattcgttcatgagtgtttagagatgtcgctttttcgcgaaattgatagacttgaaacatcccaatttgtgactcatttgttgatattccactttgtcgaaaatgtgaaatatcaaagtatgaatttgacttgtcacaaaccgcaccactcgtttactataaagaaatattcagatgctcgagatgcaaccagaatcggataaacaaaacccaacgtactaggccatatgtcaacctgggcgctaagtgcttcttagggaccttcctcaggatcactttgataattctacaacattctagattacaaacaaggtctcctaccttgcttttaaccaaaataagaagaattcatgaagcaaaatttatgtttgaggagaaaaaacatacggactagtttgtatgtcaatctgggcacaggcccaacacccgtgtcaatctaggcactgaggccctattttgactctcaaaggatctcctttgatctcgagagaatttatagttcgttattctgaaaacaaaaaagatgcacgtatcatttttatggagagaacacttggaattgacctaggttgacaaaatgtcaacctaggcgctgggtcccagttttacccactagattcttcatttgattcccaaaaacactcgtatctcaattactagtaaaaatggagaatatgctcggaaaaattctcgagagaaatgtttaaaaatgacctagttgacaatttgtcaacttgggtgcttggtcctagcaccaggtcaacctaggcgctgggtcctagttctgactccttgatggcttcctttattccccaaaagcacccatatcataattgttgatgaaaatagagaataagcccaaaagaatttatctgaatcgttgttggaaacggcctaggttgacaacatgtcaacctaggcgctgggacctaccaccaggtcaacctaggcgctgggacctaccaccaggtcaacgtaggcactgtgccccagtttttgcctccaagttaatttgtttctttcccaaaaatacctgattcctcgttttagatggagactaatgaaattattgggataattccataatatttttattggaagtaccccaagttgacaatatgtcaacctgggtgctaggatgctctaaccttatgggtacttttctaaatgtgaaaaa

SEQ ID NO: 131264 - DNA, 632 bp, Cannabis sativa
attggatccgctattttatgaacacccctagactactacccctttctcttttattatatattaatctactaccttcttttcttttaatatatacaaatatgctattttttcttcatctttttgaaaggacaaatctactacttactacagttctctaattatcaaggggtttttacaccacatattagaattttcaaattttttattgttttactatggagcggaaattttttaaaaatagtgtgttttatttattaaaaatactgtataagttttatactgtgtcctgtgttaaatttttacggttgttttttagttgttccattatttttttaattgttctgttttattattttacagttgttttataaaaagatagtatttttgtaaaaaaaaattgtttgataataaaattataaatttttgcctaaaattcagtaatttttataaaaaccccaattatgaatgaatcaaagcccaataagatcagaataatacaagacctgatttagccgcctattgtaacccaaactagtttgcagcttagcatgataaccatggaccaaagcccaatattttgattaggtttagagcatgagattcctttatttatagggctatttacaaaaata

SEQ ID NO: 131265 - DNA, 586 bp, Cannabis sativa
  modified_base (450)..(456): a, c, t, g, unknown or other
gatacgacatatagcccgtttactaccgcgaccgcagtgtaactaattgggcgacatcatatggccacatggctaaaattttctcgttcaagaagaaaactgcagaaggcaatgcagctacatcaaatgtagaaaagacaaacaatgaagaatgggacacaaaagcatcattcgcatgggaggaagaagaattagctttgaaagcttctgtttagaaaaagattaactaccataatgattagatagttgactctggctgctcaaatcttatgacatgagatgaagagaagttgtaagacatgacaaaatacaaaggtagatgcatagtggtgacagccaacaactcaagattaccgatcactcacataagtaaaacaataatcacactgagattgaagtttcactccaagatatctaccatgtacctagtgttgggaatattttaccagnnnnnnnatttactaacaagtatgttgaattcacatcctaaatgtcaattgtctaaaacaatgaaagaaacacataagggcttaagaaaaccttacattagttgcagtgtaatataatgactacttccgttcaagat

SEQ ID NO: 131266 - DNA, 823 bp, Cannabis sativa
tcatatggacatctaaaaagaaaggaaattttaattcaaaatcaaaaaactcaccacgcaatcaaggattcggtccaaaccaatagaggatttgatatatacttcttcttgacccacatctgaacatcaccgccgtcttcataagcggcctaaatacataaacagattaaaaaactcaaaatacataatgaaaaacataaagcaattaaaaaagagaaaaggaaatcaatataacagatgaaaccaaatcaaaaccaaaaaagtaagaagactttgcaaaatagaaattgggtgagaaaaatcaaaactaggatccagtttcgtttctattttggtctcggccggacccccattgattttgcaagaagacgaaggagatgaagaaaggaagaagaagaaggaatgggttctaatgaacactacttgagtgatctcaatctcaaattctgaggctggaatctaatattaaattataataacaactatatatcacttttgtaatacttgacatattaaggtgctccttaacctttttcataataatactatgagatttgatttatttatatctcaaattatcagctccagctccaatgaaaatgatcttttaaaagtaaataaataaataggtggtgaaaataaataaataaataataacccctttcattatttaattattttaaaagaaaaattaaatttgaatcacgtgttgattatgtactgttgactcgcttttagccaacgacaatgagtctaataataagcgataaagaatatgacttaggtataatataagcaaataaataaagaacacaaggttttt

SEQ ID NO: 131267 - DNA, 1186 bp, Cannabis sativa
gccatgtcggaaatgcaaaattatgaaaattcactatatgatatatttgatatgttaaggtacatcccaacttttgttattatgtacaaaatctattgaccaatcatatgtttcttccatggttggttgttgtgttaggatttatgtcttgaaaagtctataaaaatatttatgattataaataagagttgaacattttcatatacactagtttgttaaattattaatatttaatattgaataatttattacataaagatcaaaaattacttattcatatatgagattgtgacttgtagttgtacagaaaattaagatcacttagtcatgaataaaacagtcagcatcatattaaagtttaggaatttttaatcaatagttgctagtacagttcactgatgctcgttatttgggacaagtaatctcgattcaaattattgatgtagtatgacatctaagtgaaggtttaatatataatagagattatatatgacaatgatcgatataagtaatattatctttatcaaacatgtcatttaccataaaaacctaattcatatcatcaatagtagatcggcttaaatactgagtaatcatgaacttctgttcatgttattagctgttgattttatggtactaaatcagatacgcagcgataaagtttaattctgattatcattgtatcccaagatcactatatatattaaattaaaaataaatagatgaaaagaatatttacctattgatgtgtttcagagtattcttgattctttttgtatgttgtatccttttgggttgattggaaattcacactgttccaaatcgatccatgatcacacacaagaagttagtgtgagctacaaggagtaggcgcctacgctagtgtagggtgtccctattagttgtctttttgtcgtaattaattaattaattagttaattcaattatataaatattttaatttgacaaagtttgccctttggttagacaatgaactatccagattcaatgagattcttgcactgtttgtggatatttacatcgtaacttcataagtgatttttagtaattacggtaaaaaaaaaaattaaaattaaggataaatataagtatctaatatatgtaattgtaattagaagtgtttatgtatttatttaaaatctatatctatatctattctatataa

SEQ ID NO: 131268 - DNA, 535 bp, Cannabis sativa
atgaatataagatgaatattgaatattatatacataaaccctccaaaagtgtcctcacttgtttttatttttcttctttgtagctactgcaaaagaggaagttcaaacacaacactactcaatgcaaatgtacaaattacaatcataaaatgcaattagcaccaacttgtataataataaataactaactaacctttgtcatatttttcatctaaagtctcactctgttcagatggcttatcattggaatttgcagcctctaaagtcccattctattgagatgggacatttgggtccaactttttctttgccaccagcaaaaaaaacctaaatagaatgcacaaaataatcatcaaatgagaaagatcatgaaaaggacaagagtaatagactagatgaaagtacaatgttaaacataaaatgatcttatcaatgaacagaaaactgaaaagagaaactcacagtgggcaacagagagcagagaggaagaatagtgttggcagcgagtggcgtgagtaggctgctgctatggtcc

SEQ ID NO: 131269 - DNA, 1015 bp, Cannabis sativa
gaatgaaaatctgactggtatttctaatccaatcattgctactaataattttaaaccatatcatgctttaatcaatatggtgcagcaaaatcaatttggtgagttggctattaaagattccaatattcatctagctaaatttttagaggtatgtgctaatgtgaagattaatggtgttactgatgacgtcataagactacgtctctttcctttctctttaaaggataaagcaagaagctggttgcaatctttgcagccaggatctattacttcataggatgacatggctaaaaagttcatggtaaaatagtttgcacaattgagaagtgagattaagaaatttagacagtttgattctaaacaactttatgacgcatggagcgattcaaagacttattatgtcgttgcccacaacatgattataaaaaatggatgcaagtttcaattttctacaatgagttgaatggtccaactaggactattattgatgatgatggtggaggagcgttattgtctaaacttgtaattgaagccattaatctactggaagagatggtcactaataactattattggcctaatgaaagaaatactccaagaaatgtggcttgtttacgtgaaattgatcctatgacaaacatagcaaccctaaatttttgttttaaatcaagtggctgctcaaaaggatacatcaattgcagagaatgttgctgttgcatctacatcacaagagcctgagatgagtatagaacaagcacactatatagccaatagaccttataataacaactattgggatgctctagtgcctaactactaccaatctaggttgagaaaccatgagaatttttcttatggtaacactaaaaatgtcttgcaaccgcctcctgagtttaatgcacaaccacaagaaaagaagaagtccttagaagacattctaggtactttcatgatagagaccaacaagggatttaacaagaatgaaataaggttggataacatggagactcaatag

SEQ ID NO: 131270 - DNA, 608 bp, Cannabis sativa
tttaggatgttaataacatacttgctagtaaatctagatcttggtaaaataattccaacaccttgttactgctaaaaggatactccaatatataaagtcaagccaggacaaggcatatgactttctgcaacttttaaaatacagccgagagcattaacggatgctgactaggctgttagtgtcgacaccaaaaggtctacaatagggttttacatctttcttggagattctataatatcttggaagagcaaaaagcaacacactgcgtcgagatctttagctgaagatgagtatcgagtgatggcaaacacaacaagtgagttgatttggttattgtcattgctcaaagagctgaggatagagcacaaaggacctgccttaatgtactgtggcagcaaagctgctcaacacattgcagccaatcttgtgtttcacgagagaacaaaacacattgaaatttactccaatcttagaagggaaaaggttcaagaatgattgatcaaaaccatacatgtttccactaaagaacaactagctgccatcatgactaaagtcttatttcctaatcagtttaatgctcttaaagacaagatgggattggtagacat

SEQ ID NO: 131271 - DNA, 708 bp, Cannabis sativa
gataatcataagaaattattcacaataatgagaatctccttcactctacctccattgatgaagacattgaagttcttcaggtagatggtgatgaatagtggattttttaatttgaataaaaattagggatttgagtgtggttttgaaagaaaaagatggattgatgatagaaatagggtttttaaagtgaatggagatgaatgattaagaaataatggaagaaaaatggtttttggtgagatgagattgaagattttttggtaatggggaagggatttcagagtgggtggtttagagttaagaatgggtgaatgtatgttgaaaaaaatcgcaaccccctttttatttccgtctgggcactctctcggcggccatagatggcctcgccacggtgagatggcatccacaatcaccccttttttcctagactatttcgccgcggccaatttgcagtgcctagaaaactttctttttttttcactacacataaaaaaaaacaataaactaatattcagtttacaaattcaatgaacataaaccaacaaaaaaaaaaaagaaaaacaataagaaagttcaactaaaaacaccattaaaacttgggttgcctcccaagagtgctgtctttatcgtcatatggtcggacattgattgttttcttcaaagaggtgccagaatcatggtggacttggcttggtcaaaatgacctcc

SEQ ID NO: 131272 - DNA, 1114 bp, Cannabis sativa
taagaaacgaagtggaagatctcctctggttttggattgtggaagcgaagtaagttctcgaacgtttgttagaaaagctatcttaccatctctagcacaagccaaccatgtcccccctgctagtccatctttcccacccaagatttcgtctccattccaccatgccagtggctcagtcggccttcaaaaacaaaaacccaattcagaaaaattgatatatcgaatggtctgatcagaaaagctcaaatcaaatatacttaacttaccgggtgtgatattcatctctgttgagcaagagaaaaaaggggtagagtggatgggtctgccatagaaacgccgctatacacatcttagcttcgccgattcgattatgccaaccaacacaatcatcataatcatataatcatatgctctctatagttttttttcttttttttttaataccaataaaataatattcttggttttttttttctcttttttatactaataaaataatattagatgcaattttcactttgtattgacattgttgtggttgtaggcattctattattgaattttttctgccttagaagagaaatctaaaagttaaaactaaacttatgacactatattcaggaagttttgaaagataaattttcttgattaattataattttgtcataaaaggaaaatagttggttatttctctatataaatcttctaaacatttcatttgtttagtgtgctaatcaattttctatttattttgtaggtttataaaaattgttcatttagattaggtgtcttatttgggatagtttcaagtagttttgttcaaatttttgaggtaatttggttatatataagtcgctttgttttgtagcgattcatattctgactttgtatacattttggctagacaattggcttgttggctgaaagtctctttgcgtcaacctttgttttttcgtaatttaaatcacttattcaaaaaaaaataataattatattagatgcttctacaatgtatcatgtttatgagtttgaatataagatacaaggttaattaggatttttgccctcgaactttaacatgtaccaaattataccccctaaacttttaaggtcg

SEQ ID NO: 131273 - DNA, 1204 bp, Cannabis sativa
aaaactattttttattctcatttctaaaaacaattttttaaaacaaaaaacagaaaacaataccaaacatactctaaccctcaacgtgttgggatttcaaagctacgaaatggatcggaacttttggttacatcaaaaaaaataaggttgtaataatgaaaaaggcgcaaagagccttcgctgcccaaaaaatgcctaccgagttgcaacattcattgggcaatgttgcggcccactacacttaaatgggcaagagattttggattttgcagacacgggccgcgatacgcattagccaatttcgtggcccgctaaggcagttaggcacttatttatgaggggttttaaaccctaattttgaaggaagaagggacttttggatttttagactttcgagatacgaaattggaggcaaaaagtgactggagagactactaccattgtttatcaacgagttttttttttcttcttttaattatatgtttctaattaatttaattcaattgttcagatgacaatgaggagttaaacttttaattaaggtgttaatgaagattgtttgatatttttttatggtttaatgcaatttttagttctttccaatttctcatgtgcattgtttttatttgtgcttaattttaatagttgtttgatcaacaattatatcatatgtttataattttaatgcaaaatttaaaaaagtgagtgttgattattctatagtaaaatagacatagatttcgatattggacgaaagtacctgtatggtctatatagcaattagggatttttatggttaatataaattatgtgtaatttaccacaaaagtgtagaatttttacatataatttggattttatatatcctaataagaatataaattgaaatagttaatccgctatcacgtgaaattgaaatatgaattaatctaatgattttttttttttacatttttacggtttctataaaaacaacacaaaaacaattaaaaaactacataaaaataacatcaaaacaacaacaaaaattaatatacaaataacaaaaaaattaacatgagtacaacataaaaagattatattttctgtagataaaattgtaaaaatatttaaaattccgtaaaattatatttttgtaattttttttattatttttgtatatttatgaaataatcccattaataaatggggtaagttgaaaaat

SEQ ID NO: 131274 - DNA, 1120 bp, Cannabis sativa
ttctgttctcaaaaggttattcaaacccacaattcatgtgttaaaacacatcaacaaaacttagttgtagatagaaaataccaacacatcttaaatgttgcaagggcattaacttttcaatcttcccttgcattggcatactgaccttatttcattaacactgatgtatacctaattaacaagactcccacgcctctattacaacataaaacttcttatgaattgctttataataaacaacctacttatgatcatcttaggacctacagttgcttggcctatgcctcttccttaaccagcaagaggcacaaattttctcctagggcatatgcttgcatattcataggttactccaatggtatgaaatcttataccttatgatgagcgcgcatttgtacactcattcttagtcaattattagtcaaattagcatttatttcctaaattttgtataaatttgatgtgttttctatagtgtgcagtattatgcataaagtgatgaaattctgataaattagaagtgaattgtagatatttgagcgaagtaccaaaatcaagaatcaactgagtcgagaaacaagctaaagttcaaaaaattggtgcttggcgctataccgtagggtttaggtgctatagcgcagctttggaaaaaaaataatgtgcaaagaaaaaaagataatttcagcacgtggttattttgagatatttttcatggcgctatagtgcaggatgtaggcactatagtgcaacacttatctttttttaaaaagaaatcttaattctaaggggattcatctatctttgttggcctatataatgaaggatgtaaattggattggggtatgactgaagagataaaacaagaaactttgagattagaaaacacattgaagagtaagagagaagagattcgaagcaatcatcatcaactttcatctttagagttctttcttcttcttcttctttattattttgtttagttatttaattatgaacatgattattatggttattatacttgtgattatgaactaaacactcaatctagtgttgatggaactattttagattataaatttaagcttttagattatttccatatttgttcctgctatttgtt

SEQ ID NO: 131275 - DNA, 531 bp, Cannabis sativa
cgtcctcttctgtgaaggtgataggcagactcattatccgaggacgttgggcaggagattgtactaacgtgcatttttctccttccccatctagctctcttaagtaccttttctaagagttcctagtgcttcttacgaggtgcgatccacctgaaatcgttgctacatgtccgtaaactggtggtggagctagccctagaggatatgggttctggagccacaatagttaccgcagtccgtaaataatgtcaagaagatgacaaatgttaaggaatgacttagcacccagttcaaaatgaaagacttgggtgaagctaattatgttctcgggatccaaattattagagaccacaagaatagatcacttgttctctcataagcagcttacattgataaggtgttagaacatttctcaatgaccaatgtcaaaggggcaattgtgccttctagacatggtttgcgactatctaaggaacagtctcctactaatcctcaagagatagaagatatgagaaaaattccttatgcttc

SEQ ID NO: 131276 - DNA, 834 bp, Cannabis sativa
atggtatttaccctttttaaaattatagtctaatacacttacacaagtacaaatgtaaaatttaatgtttaattaatgtttttattaaaaatatagaaattaataattttattatgtaaaataataaaaaaaaatgtaaaaatttataatttaatgtaataactaaatttaattaaaaatattaaaaatgacataaaaaaaaatttgaaaataacatatttattgttgtaaaatttacatcctgttatagtgatccaaatttaaattaatttttgttattagcacaccatttggagcaaatattttcaatgcatctctaaggcgctctttatatttttagtaatattgtaatatgtgtacatataaattacacaaacttaatacacacttatgtagtaagttaattttaacaagtagtatccattttttttaagaaataagtagttaaaattacttgccacataacctcgaatattagcaagactatgttccgagattagtcaagcaaagtgtgccattaactaagtttcatcattaagcttagtgttgagtctaaaactcgaatgccattcaaccaaaccagttacaatgattatgaatcaataataggaatattggtctttattaatggtgtctaattcttacacaataactcgaattatgtcttagtttcaagtgaaaaaacaaggactttatataagttagtccaataggtattgacactttgaaactaactacacctaaccaactgaaaccaacaaactagagctaacataaaacactaactgtcttaactgtactaacggtcataactaactacaatttccaccttga

SEQ ID NO: 131277 - DNA, 590 bp, Cannabis sativa
tgaagaagaatttagaacacttatccccctccttgatccaggacacccgtgaccttttttgccagtatagagctttttgtctcagagcttcgtttagggactttttgatttccaactcctcggcccaaacccttgacccataaggaagaccctgaatggagttcagttggccttccaaatgagcaatgcggttatccagctttccaaattgctctcgactccacttactaagcgctaagcgtgtggctcccaccttcttgaaaaccctagttggggcccaacaatgagccacagagccccaggcatgttctactatcagcttgctacgggggtctctcgtccaccaggcctcaaacctgaacggcttagtggccttagtttcttggttaagggtactgatacacaggggtcggtggtccgagttgcaagtgtggtaagaccggacaaccgcttttgggaaaagcctaagccaatccccattagccaaagccttgtcgagagctgatttgacatgagcctcaccatcacgatggttatcccacgttagaaaatcgcctttaacaggcaaatcaattaatcccgaactattg

SEQ ID NO: 131278 - DNA, 539 bp, Cannabis sativa
tctctctctctctctcagtctttacttgttttttggttcataccaattcttgttagcttgctaagcttccacatggtagtagaagtctcccatggagtcatcgattccatctcccaatcctacaccttccactgttactgctactcaccctgccatgtctgcaaattcttccaattccagcacccctgtttggaatccattttctagttctttatcaactgcttctttcatggcttcgatcctccatgactgaaggagttcttgcctcggtcgctaatcaccacacatcgtttgctgtctggcgtgccttggagcaaagatttgctaatcaatctcgtgctcgactgcttcaattgaaaggtcagttctctaatgttcataaaggcaatctctccatagctgattacgtggataaatttcagatgcttgctgattctttgactattgctgggtctaacattagtgattgattcgtgttcaaaaatgtcattttattgatcttaaagtgcaaaatgaattgagtttaaattaatattttc

SEQ ID NO: 131279 - DNA, 516 bp, Cannabis sativa
ctctaaaattaccacagataataatatcatcttattgtttgattctgagacatgtgctatcaaggacaagattacaggccaagttcttcttcggggccatcttaagcaaggcctgtatcacctcgatctgtcaaaggccaaacttccctcaacacagttcactcgaggattctctgttactcctgttgcatttaattgtgtaaagaataccactcatggacccttccctgaggcacaaatttggcatcatcggcttggccacgcctccccaagaatattaaaaacagtactctctactgttaattccaaaaccagatgaacttttcttcctttttgtcaagcttgccaatatggcaaacttcatagcattcattttggtagttcggtacttaagacaacatcttgttttgatttagtgcacacggatgtatggggaccatcattttacaattcaatagaaggatatagtgtaacaccctaatctatagggacgccacgtgtgtgattttataaact

SEQ ID NO: 131280 - DNA, 710 bp, Cannabis sativa
atatgatccctaacatcatctccttcaattatcttcaactcatataattgtttcttcaaatataatctatttgttaggaattttgacatatagagtttttctaacatttttcataacccagaaaaaattgttttattcaatatactttactttaattcaagagttaaacttaagtgaatagtgcttaccgcttttgcctacaatactcccaaacttcatcaatcatactctcaggcttctttccctacagtgccttcaggagtcattgttgtattaacacatctttcattgtgctctgccataaactgaaatcgttctttctatcaaaaagctcaatctcaaattttttgaaagtcatctttgacatttttggtgtagatttgaaccttagctcttgataccacatgttggaaaaaaataataaacttcaagcgtaatgatataataaagaaacaaagtgaagaaattttactcaatttggtaaagtaccaaatccacaaatagagatataatcacttataacttcaaaattacatacactcatatctcaatctctccattaaattccaatacactatttgctttttactcactcactttctctcactcacttcatcacatcttgctcttcttctcacatacacacacctctcacaaatacaaaaaaaaaaaacatatttaaatagtctcagatcttgggcacaaagaca

SEQ ID NO: 131281 - DNA, 925 bp, Cannabis sativa
aaatcgttgaatctcaatgtccatgtataaatttttactattattaatttgttttttaaaaataccatattttgtatttttactaatatctattaaaaaaaattaactattttctaaaaaaatatctatttttttaagatactacaattaatattttactaagaaaaaaaatataatcatattttcaaaattcatataaaaaaagttcaattaaattttttggcccaaggcttccaaatagcttaagacggcatcagacagaatactgactattaaaatatattttacacatggtaaactgttcagaatggtttagaaatagcgaaaaaaaaaatagctattataactataatatacattgtgatttaataaaactaatgaaaataaaaaaaaaattcttacgaaagaaataaaagtggtgtctctacctaaattttttgagataagatacattatgaacttacaaatccaaagcctcctaaaattggcattgtagctatttatgtgctgaaaatatgatagcccaatacgtacactcagtttttgttagagcatattgctatgggacattaatgtacctagcactgctatgagataagtgtgacctaatattaaattgcatcaatagcgatattacacctcataaaaatattaggcaccataagtgctatttcactttttattatattagtccatggttaatctaatgacaaacattgttgtgtagttgcttgagattttccaatcttgattttaagtattgaagcttgtgcagtttcaaatataagtttttaaaattttgatttttacaaatcaaatcataagtttctctgtttagcctttcattagtagacccttaaacttaagtaattttctcaaaatgaactcaaaatttaaagtgaataattttttttttttttgtaag

SEQ ID NO: 131282 - DNA, 1154 bp, Cannabis sativa
tccaacattaccttataatatgtctttaaatattctggctcaagtttatccatacaatttatgtcccacctaacaaatacatttataaatatatttataatatgctagctatattataacaagtataactagaaaatactagctagtagcaaaatataaacagataaatattaaaataagcgtataaagtattaaattgaaaactatacactaaataaataataaaaagagaattttatacttatctttgatctaattgtcaaaaataatttggtcatgtatcaaataacatttttatttatttaagtatgttttaatactctcatttatacatctctctctcttaaaaaaaatataattgaaatctactagatcttcaatgtcatgaacatttcaaaatgtgagaagtatatattttttcgttattttcaggaaaaaaaaaaaccattccgttattaatatagtgattaattactgttttataatttttttttaaatcttaattagttagcattaattttggaattatgttaattgaattatattatattacatgataattaattagctttcaaaataacaaaaaagtatataaaatggtagctagcttgttatattaaattacaactcattagtttcgaaaataatttttaaagttagctaaatgtgctttaaattataatcaaccataatgtaccttaaaaataatgaactaattgttaagatatatataaataagtattatatataaaaataaatttttttataggtaactaattggatttttatcaacactattagtaaccaaaaagttacttttaaaaatgcaagaaaataaataaaaaaaatcgaaaaacgtcagatgcgtcaaatttggctgacgtagtaatagtaataatgttattattgtaaattagatgcaaaaaatatatattattgtaaacttttctaaaagaacacattcaagtgtcatgcattaactccaagctaggcctaccttgtgctaaggtgaggtaggcctgcgcttagggcccactcagctcaggagtctctaataaaatttcctttaaaaagtatacaattttattgggaaatttacatggtatactaatttttgcaacttttttacaaaaatactgtcaagcggtattttt

SEQ ID NO: 131283 - DNA, 1904 bp, Cannabis sativa
  modified_base (1819)..(1826): a, c, t, g, unknown or other
aagaaaagaatgttgaaaaccctctgaaaagtgcctccagtattgaattcaatctcaaaaattcgtactcagttgaatgcttttgatttccttctgaattgcttgcccataaaatccactaaagttcacttcttatatagccaatgaggaataaaaaagatagcataagatagcacatgcagaaaacctattcagctttgaatattagataggacagatgagccaacgctgaaaagtcctatttctctttaaattagggggggcgggcgacggcatgctcatcttgtgccacgacccgtgtatgaaatttctcacacgcttcagcttctcacgaacacaggccgtggcatgcttctactcatgttgcggcatggtccccatctgcacacttatccttttatgtgatcttttatctttttttctcatctttttcctttgatattttctaatattcttctattttaaatctgcaaaaataaaatataaaaagcgtaaaattgctccaaacacaagtaaaactaaattaaaaatacactaaaattaatctaaaaataatactaaaaataacctaacatgtgtctgatttgcttgaaatttaatgaaacgactcttcatgctctttagttgtgcccttctctcaaaggaatttggaaagggtggggaattcaaggtttggataaggttggagtgcctgcatctttttatgatcttattgttggttgtatgacatttttttgtaaacaagaagtagaagaattacttataatttgttggaggataaggcatcgttagaatactatggttcatgagcatcatcttctgaaggatgaaatggtagggccttgggctttagatcatcttatgcggtatcagtaggcctaatctcatggtcttaatagtgatttgacatcgactattgtgccttcagggatggtgttgcctgtagaaatccaattgggacaattcaatccattcgtggatgctggtgttagaacagaagcgagagcgatgggacttggggcagtgctgtctaatgttgctggatctattttgttctcgacagctgctcttttggttttctattttgaaccccttatttctaaagcggctgctttactccatggtctccgactttgtcttcaaatgggttattttcatgtgaagatattctcagattgtcttcgtttagtgcaaagtgtgggttgtaaagaaatttttttttcttgagtttcgtattgtgcttcatgatatttttcgtgtgtgggattctttttcttttattatatcatctcgttgtaagtagactaataatgctaatgctcattagcttgcacaattagctttttctcttgagtcactgcgtgtttggtggtcggggttccctaattgtttagcatgatgtcccgtcttttgtttagtagttttcttggcgatgtgccttataatattgatgaactttctttcaaaaaaattattattagtttttagagttaaaataatgagatttttttagttttaacaaaaaaaaggtaatattacaaaaaaaaattcagccggccaaataaacaaatatacaaacctgataaaaaaaattacacaaatacctcttacacacaccttcaacccacgatccacacttcttgggattgaaacatttgtgtgatgcaacattcgatcaaccacccagcaacccaacacaaccaaaacaaaatctaaccagaaagagaaccaccattaattctgactacttcacctgagaagacgaccggaatcaataaaaataggagctattttgaattcataaaaaaaagtgcagaannnnnnnnacgaaactaaaattcaaccagaaatctaatttaattcgcataaaactaatgtcttgaatttaatttttagatccatgg

SEQ ID NO: 131284 - DNA, 1342 bp, Cannabis sativa
aatagacaagaaagctgacctgtcaccacagaaggactggctgcagttgggtgatagtaaacacccgagcaggtataggtttttcctctggcttcgactcttctttctttacccgagggcaatctttcttgaaatgccccaccatgccgcattgaaagcatgtcttccggttgcactctcccagatgatgtttcttacaacgtgggcactcagggtaagagtaaccatggcgtccacctctaccttggttcccacaaaattgcttgctctgccccgaaccaccagatgccggggtaactttcctcttttgatcagtggtggaatcaccaccatccctaccatatgtaggagtaggaaaagtgggggttccaccaactttcggagtcacttggggctcctgaaggaattttaccgcaccctcagctcatagggccttttcaaccatttctaaatatgatgttgcttcgttagtagtgatcacaagatcatgtctaatcttcacattcgaactggccaagtacttttctttcttactaaaatctgttggcacaatacccacggcgagctcggccaatcgatcgaactttgtggtatacttagtgactaacatcccctgagtctgtactaactcagtgaactctttccgcttagcactgcggacgacttcattgtaatacttagcgttgaataactccctgaattcttcacaggtcataacagtgacatcccgggtgagggtcacgaattcccaccacactagggcatcttcttggaactgaaatgtggcgcagttcacccgatcattaccaaccacccccataaaattcagaattcgctcaatcacagtgagtcactgctcagccttcatcacatcaggacctcttagaaacactggaggtacttgcttacgaaatctttcgtataacggctccatacggttaccagtaataggttgttctgctggctccgttggagctacaacgacctaagcttgatgcggaggcacggcaggaggactctgctgccttaacctcgtaatttcttcttcttgttggcagatttgatcttgcatttccgtaaacctctactcccaatccagaggagcttgtggtggatttataggtcgaccaccctaagctctgccacgaccacgaccgcgactaccgggattttggggaacttgatttccctgaccgcctccagtctcaaccatattaccctaacttcttgtatatcgctaggcgtgcatttatagaacttagcctgcgaacccataagccaggctggttagatagcgatcataaaactcaataccgcttttatggacttaaaggcaacacac

SEQ ID NO: 131285 - DNA, 595 bp, Cannabis sativa
  modified_base (307)..(307): a, c, t, g, unknown or other
taaaataaattccaacagatttgtgcataaagtcaaaatggtataaaaaccccatggaataaatcctattcgcccactgccatatgaaaatggtagtgctctctgatttttagagagcactgccacaaggtaatagcagtgctctctgatttttggagagcattgccacaagaaaatggcagtggtcgtcacatacaaagcaccaaggggaaattgttcaaatgttttccctcaacacccaggattgcaacacaagtcaaagaagccatttcccaccaaggcacaagcctagccgaccactgccatntttgtggcacaatgagtggcagtggttggccatgaagatagggaatgagatttcttgcgaaaaaagcattttcaccaataatatgtcaaaaccaagtgaaagaagccactaagtggtgtggaaaccacttggctgaccactgccacacttttgggacaattggtggcagtggtcgaccatcacttaggatgaggagtttcattggccaaattttatttccaacatctatgtatcaaatacaagtgagaaaagtcacccaaggcttcataaaccccttatgcaaccact

SEQ ID NO: 131286 - DNA, 578 bp, Cannabis sativa
actcttgactaaaacttatatatatttcgttttctaacttgtaagtttaaaaaaataaaaaaaaaatcaaaacaaaaataaatttgtgaatttcttataaatgagttttatgtgaattaagaagaataaatgaaatatatatatatatatatattggaaaaaaaaaagactattggtacagacgtacagttaataaatattttttgtttactattttactaccattcctcttatatgtaatatattactgaggtttaggtttcattcttctaataagaaagaaaaatgtttttttagagataaaagaataataaagtataaatatatatatatgtatatatatagagagagagagagaataaatttaacaaaaaaagttgtgtaaagtaaaataatattatctattaaaaaagtaaaataattatcattaaaatattaggagatatggtaacttatattaagctaagtggtgtcctatatatatatactaggtaggagttacgtgccaaggcacgtaatgattagttttaggtaaagtttagtttttttttttctttatttcttcttatttagattgt

SEQ ID NO: 131287 - DNA, 1274 bp, Cannabis sativa
tttgtcactcctagagatatattatagttattggacctatttaccttgaaaaaaaattagattgtatacttattttttatattttttattattttttaatttatacttaatctttttttgataagttctgtcagattatattttttttacttaaattataaaataaaattattttataattatatttaattaatgcacaataaaaaaaaaaaagtagttttcaacttaaaatatatatagctatagtattaattctatagcttttagaaaattaattataaataatctacaatgttaaaaaataaaatttagacaattaattgtatgtttgtctattttttttcttttttctttttgtataattaattattttaattatatttttgacaccagaaattatttaggattttttgaaatcttatgtcataaagtctaagatttatgaggaaattataatgtatatttttattttctattttaatttttaattttttttattattcttaatttatatccaattttataggtcatatcctcattatgtgcattaagaattctaattttgataaattatgtgaagtttattgtagatattgtcacacattaaataaatggtaaagtattgagtcatatataagaacataggctactcaactcattaccaattagttttgagatggaaccgcaaattatcaatatgatatcagagtcatatcccgtacggacaagtgatcctatctgatccgcacctatacagataatgatcatgtccattctggtatggtccaagattggtgaacaaaaaaaaaatagtcaccatcttgagggagaatattgtggacattgtcccacattgaataaatggtaaagtattaagccatatataaaaacatgggttactccactcattaccaattggttttgagatggaacctcataattttcaataaggttatattagacattttaattataaaaaatatttattaattaaattatttaataattatatttagttaatgtataataaaaaaaaaagtatttttcaaattatcccaaaatttattaggtaatttttaaaagaaaatgtaattttttttttcaaaaaaaggaaatatgtgtacgcaggcctaacctgtcttgggcctcgcatgtgataaatattggaaaacttataaacatattagaattttggttaatttttataaaaatacagtcacatataattttttttcaaaaatattatgtttttataaaacaacagtagaatacaa

SEQ ID NO: 131288 - DNA, 723 bp, Cannabis sativa
  modified_base (674)..(679): a, c, t, g, unknown or other
tcgacccacaacccgaagccaccactgcccaatcgactcaccaacaagctcgaaccaccaactctgcatccttcaccattccgtgagtcaccatcactcgtccatccatcaacaagctcgacctcgccttcatcaactcatcattaccaccgagcctccatttcgcacacctccgagcatcacttcgctcctgcacaaccacgaaccagccaccgtcacaagctccagcaagcgcattcgaccgaggtattcaccatcgagtgctattcacgcgcatcatctcagcagcaagaaattgaagcccgcacattttagccaagcaaaagtaattccgggtttgtgaatttaaattgaaaagctatttggttggaaggttcaattggagagcattgtggtttgtgttagtatattgctctgagttttttctgaatctgtgaagtgcaattgtgtgagtttggactattgttgaaaaagaattggtgttgctgaatttcattaagcaggggtcaacatgccgaaaattaagaggtgtgctcacaagcctccaaaaaaggatgctccgagaggctaaaaaatttgtttcataagctgctgaaaagaaataccttgattcagttcgccataaagaattttatgtcgagcgaggaatgatagtagtgttgggttttatgccnnnnnnaaaactctatttcaatgtaatctagattattcaatatcaataaa

SEQ ID NO: 131289 - DNA, 930 bp, Cannabis sativa
tgtgagtagatctgagatcctagtaaaataatttccaacattaagcgcaataacaacaactcaagaagaaatattgggaaaaaggggaagtacaacacttcttccacgccacgaaaccagaaagataaggaggataagtacacttgcttcaccgtcctaacagagaaacttgagaaaatctacatggccactcagggcactatctcgtacaagcctcccatcgaaagggagatgagtaagagggacatgtcaaagttttgttgatatcacaacaacttcggccatgacaccaatgagtgtcaaaacttaagaagggaaatttaattccttataaggaggaacaatccccacttgcatcattatgtgcagaacgaccaacctcaagcacaagctgcctagaacgaagaccgtatgccattccttggcgggtcacttaggggttatcgttggcagacccactttgcaggaaaaactagcaaggctacggagcactatgcttggacactctgtcacgatcctaaaagcgatatcttggctgccaaaaagaagggcttcaatacacccaagcttagagagcccaccatctcttttatagaggaagacgcttcccaagtcaacttcccaaataatgaccccatggtcattactacacaaattgggaacatgacagtcacaaggtgcatggtaaacaatggggcctcctccaacattcttttcaggtcaacatataaaaatatggagcttcagctaactaacttggcaccctacacacaagtaatgtacgacttctttggccaaggcattgtgcccataggttatattcaactacccctgatggttggagagaattcaacaacaagaacattgatggcacagttcgtcataatcgacatgccatcagccttgaacaccatgataggttgtccatct

SEQ ID NO: 131290 - DNA, 582 bp, Cannabis sativa
catgctcactcaacagctgcaaccatccacatctacccctgaaaccaatgctactgttactaatttctctggtaatgtcagcccctttccctataattttggatcattgatagtggggcaatgcaccatgtatgttgtgatattagatgtttttccttttttgttaataaaccacatgctgcagcagttaccttacctaatggacaatctgtgaaaatcaaaaaagttggtactgtcatactcaattctaagctgatattaaccaatgtcttgtttgtaccccaattttatttcaatctttttttagttagttcctttcttaatgcaaataatcatgttctacaattcacatctaacaattgcattctccaggaactatcttaaacattgaacattgggactgctagcagatttggtaatctctattacatccagcaagaaactactcccaatccacattgccatgctgccactttcactaaacagatgcacaccaataaatggcactctcgtctaggccatccatctgtcatcatcacaaataaactcaataaaatgctcaattgtaattctactttacct

SEQ ID NO: 131291 - DNA, 605 bp, Cannabis sativa
atataaatcttgtaaccttatagatacttatttacactcaaactcacacaagtacgttttcgtgtacgatttttaggttttattacctgggaaaacgtataagggaaaacttcacaaactgacataattatatttatacatatatattgatcagttatacaagttaaaatcataattatagcttcatttctcaaggagttgaatataagatatttttattatcgtaattactttttttaacataataatcttaattaatttgattccttagaattatttatcttattcttgtattatatatatatatttatatataaaagagcattcttataagtaggctcagcacattttataagtaccactttacaattgattaacgatattttttaaaattatataaaacggctatttaaatacacccataacaatataaaaagagtatatttttaacaattttatatatatatgccatcatggaaattagaccatttcattatggcatgttgggaatcaattgtataggattcattcccattcatttgtttactaaattttggaatgggagaaattagtgggccccacacaaattaaggagaaaacaaagg

SEQ ID NO: 131292 - DNA, 703 bp, Cannabis sativa
atagacaatgaactattatagatggatgaaaatcctcctctgattgcgtaactttgttacctttgtttaacctgtatcggttttccttaaaaaaaaaaatcggtattgatgtattgttgtaattttttgttttattatataaatttttctaaaaaagaaaactgtggacccgtacaaataaaaactttttatttatttatgaaataaattggtaatatcacaagggtatcacattactttcttgttcctagtttttatatgattttggacataccaaattatttttagggtacttatatagttatatatccttgtcatgttttagttttcaaatgaatttgaaagtaccatatactatttttttattattattattattttcatggagagattacttttactttatttgaataaataagatggtgcaggtattttaatttaatcaaatttaatatcgagtaaaaatgaaaatatttttctttgaaaaaaaaaacataaaattacacatgattaaactcagtatttctttttatattggggagtagtattcgaacttagaaccttttcataaggaaatatatttatatattgcacacaattgattgtttgaattaagatatattgataatctaaatataatgtgagatttattatcagttattattaattttaaaatattcaaaactcagtgtatatatatata

SEQ ID NO: 131293 - DNA, 601 bp, Cannabis sativa
tagtgttacttactgactaacacaaaagtagttgctaaaaagtaaagaatccaatatccctagaggagtagacatatagagacactactagaaaaactcctttttaagtccatcaatattggactagataaatttttggagtccattttgtgttggacatagtagcctgggacataaaatgtgtacttttctaatccatcactattggactcgaaaaacatttctagtctaccaatgttggactagaaaaatatttttttttctagtccaatattattggacttaaaaagcagattctagtcaaatattattgaacataaaaaacagtttctagtccagcgttaagctcaatgtcaaatatattgcttgtttggctcattgggaagcagtggtggctagatctaagatgtaaaatcttagctccagcgaatctcggacttcggcgtgtacaatggcatgagtgagatttaccagaaagcacgagatttggcgttttagagactgttgagaccataggtggtctctgttcgggctcacgccggccggaggtggcctatttaagcttgccgagaggaatgacagagagagagagagagaaaga

SEQ ID NO: 131294 - DNA, 692 bp, Cannabis sativa
  modified_base (653)..(653): a, c, t, g, unknown or other
tggccccggacatgaggtgggtttcgctcaagcttcgaaccccccatagttgtgcgtgggcgtttctttgtcccgaggcaagtggtgcacaaccctggacgaagacggcttgatgtctgccagcgtcacaatcttctcgagctgatgagcacaaaccagactagaacggagctcatctgcttcccaaccattggcacgagaattatagttctcttgggcaacaagtcccttcatgacctcctccaaagtagctagggtgttcgcccccttcttagaaggtttagtcctggagacaggggtagacattttgctgtagaaagaagaaatccagcagttaggccccaaacaaaaccctaatgtttaaaaagggaatgggggtcccctaaccgttggaaagaggccccctccggatccttgtcaaataaggaaaccccaaaagaatttccttaacaagcatcgggtgcaaaaatcccaaaggcaatgacagtggagaaaaagaaaaatgccaaggaaacaagaatcgtcctttgccctaaaagcactatttcaacaaaagagacgtttccaaaaagaaatggaaataaagagaaacagcaagtgtaacaccctaactaacataggcgtattacatgatttttaaacatactgtgcanctcgttgctaatcaacgagatttatggaaaaacgtgatt

SEQ ID NO: 131295 - DNA, 717 bp, Cannabis sativa
attgtactttttgtagtagtgataagtgactccactaataattactagccaataatttatatataaaataagacaatgaaataataaccaaccaagctcataaaccctaaactagagaacaagataccacaaaataatgaatcaatagatagagcactgctatgggacatcaaggtatttaacactattaggtatttaacactattatgaagtggtgcctccaatattaaattggactaataatgttattacacttcacaaaggtgctaggcactataagcgctctttaaaatttcttcaatagatatcgaggttgttttcaaatctagtagttaagcgtgcttgacttattttctggtaacctatctcgaaagaactccacagctaagtgtacttgacttggaacaatttcaggatgggtgacctcttaggaagttttcttaagaagcgtgcgagtgaggacaaaacacgctggaaacactcgtgttggtttgtaaggtcaattatcattccatgaagcagccaaagtggcgtacgcgtgtataaaaactatcttaccataagtgtaagggcccaatagaggcttgaagcagggacgttacaggcacgcacgcacgaccaaagcacacaggtccggccctatgcataggcaggctaggcctgtgccttgggcccacccagcccaggggcccaaaatttttttttctcttttaaaat

SEQ ID NO: 131296 - DNA, 1034 bp, Cannabis sativa
aaaatatataagtttttaattttaaaatatttttttttttgcacattttttgtaattatattgtttttgttgtacatttatgaaaaaagcccttaaaataattcaaccatttaaccaaaattgcatactcaagtgaatattaaacctcatctagctcaaatcaagctaaagagcccctatctctaaccaattcaatctaaaacatgctcaaaaacaaaactaaaaacatattctaacctcgattaaacttcacatcccctaatttctaaaaccctaatcaaaacttaacctaaatcttgaaaaatccaaagaaaagggatgtaaaacttacacctaagattgagcaacacttagatcttgctaaccagttaaagatttgcttgaatttggtattatctcccctggtttctattgagttccaagagcttctaaggagagagaaaaatgtagaaaaagctatttttgtgttattgtttcttaagttaataaaatccctattaatctaatactaaataaacttaataacttaattctttttagcccacaatctaatataagataaacaaatccttttacaccaaatgaacctttttctcctttaaatctttaagaataaagtcaactcctaagggtagtttagtcctttctaaccgattctacccaatcgctaacttaaaattctaacctagtctggtatacctccaacttaatttatcttatgttgttatgatatttcccgacctttctgtcctgtatccaatgtcgccgagcccgaaaacattttatttcagaaatggtatctatgatacccacataatctaatataatttttgtaattaataaattacgctttatttaaccatttattaaattcacactaattaacctatgtgagatcatgatcttacttcattaccaaaataagtacatattaaataaaatatgcccaattaaataccatattattttttgagatattacaactatcccctccttatagaaattttgtactcgaaatttacttgaaaagctcg

SEQ ID NO: 131297 - DNA, 1421 bp, Cannabis sativa
acagtcagtagtcctgtgatccataaggaaaaatattgggtaagatgtaatatcccacacatcgtctggggaaggtcaagtgggatgattctgaaactgtgtaggtatgagactacacagttgaagaaggcttaaataaattgattgatactacttatatcaacaaggtgcatcttgttttgtagtagcccatcacaaaagaattctacggttaagcgtgcttgacttgggataatttcaggatgagtgacctcttgagttttcctagaaagcgtgcgagtgaggtcaacgcatgctagaaatatttgtgttaatctgtagggtcagtcatcaatccaggaggcagccagagtagcatactcgtgcataagagtcagggcccaatggagacttaaagcggggacattacagtacataagtagtctatggtgcagttaactggatgatactttaaatttgctaactgttcgataatttggaagattttactgtcaaaatttaagttttgaatgattaagtgtaagtgtaatgatagtttgaaagatttagccactaaaaactcgataaaaaaatcttgaatttacaaaaataaaaattgatatataagaaccaaattcaaatatcgaaaacgttttttttaagggcatcttttggcattaatgaaaaaagaaatctccattaatgtctagctaatataacgttataattaatgtaaaaacaaagtgagaatatataaaagaggtcaatttcgtaagactatatatatatatatatatcaacattgatttttcaaataagttaattaatattaatatacactcagacataaactaacaaaaccttatcttattataggaccactttgtttttacatttttcacccagataaaaaatcaataataataattataaaataaaaatcttgaaacgaatatatgcatatatatacaaaaaaattaaacaccaatttatgaattattgtttctaattaaaattgtaatttttccaaatttaattcctataaataacattatacatcacaaataatatcttatcgttttagacttgcagttaaaaaaaaaattctgttttaatgggcgtacgtacatgcatgcatgcatgaataagttattattaaatacaagatacgtacgtcagtacgtggaatcctatatagtggcggataaagggataaaagtacttaaaaaaaaatacatttggtgggatttgaagtattcttctatcaaatctgcaaggaaaatttacacgctatactaacttttgacatttttttacaaatatactgccaggcggtatttgttaattttttactgtgtttgtttataagtttcatactgcagtatactgtgttaagttttactggtgttctactggtgttttactagtgttctactgttgtt

SEQ ID NO: 131298 - DNA, 1548 bp, Cannabis sativa
  modified_base (327)..(332): a, c, t, g, unknown or other
ccacgtacacttccatattttgtccgatctggtctttgaacattttgtttaccaatctttggtatgtagctctggcattcttgagaccaaatggcatgacttaataatagtacagacccatatctgttgggaaacttgtatgttcatgatctggtggatgcatcttgatttgattgtaccacgagtaggcgtccatgaagcttaatatctcgtgtcccgctgttggatccactagttgatctattcttggaagtggaaagcagtcttttgagcacgccttgttgaggttggtgaaatcaatacatactcgccatttcttgttcggcnnnnnnactagtacgggattagcaacccaggctgggtagaaagcttcaattatgaaattatggttgcgcagcttctccagttcttcttttagcgcaatggctcgttctttatctaacaatcttcttttttgttgaacaggcaagaaattaggatcaatattcaggacctgtgaaattatagaaggatcgattccaacatgtcctcatgtgaccatggaaaaatgtcaaggtttgctcttagaaattttatcaatgttgatttttacttccagcaggaaatctttcctaattttgagtttcttggtcggaacattcaggtcgatttcaatttcttctaattcttccactggacaaccattaatgcaaaatatgggattttgtttgtttggatggaaataaactaaaggaaaagaaaagaaaagaatttgaaaggggtactcaattgtttgtgcacgcccaccattaattttttttttttctatatttttttgttgatggttttatgtgtcagatattaatggggttgtttggtaacttaggttgaagccttttttttagttgtaatggtctattttttttgggctatatttcatgttctaaatattgtgtctgtaaaaaaaataaattgggttaatatatattttggtattaacctaatttattttagtagtgtttgttgaattagtgagctctataacataataacataaatattatgttctgaaaaaaaaaattgggttaatattttgtttattaatagatatgagttttattggaattatgataatggtataattttttttttgtaaattaaaattgttattgttatatttaattgtaattgtatataattaatataaattgttatttataatatagaaaaatttgaattaaaataattaaatattatattttttaaaataatatttaattggacttttattttacattttagtatcaaaacaaaatatagtggcactttttgtgtgtcactatatctctaaaaatattaataaaaaataaaaaataaaagaaaaataggatatagtgacacttcatttgtgtgactattatttttttagtctgacaaaacctgacactatacgcctatagtgacgcgcaaaaaatgactgtaaaaggtttcagtgacacgtgtgaagtgtcactagaaactatctttccagtcaccctcattagtgacgcgcattgaagtgtcactata

SEQ ID NO: 131299 - DNA, 3330 bp, Cannabis sativa
ctgtacaaagcatttggtaaaaaataaaacaaacacaattgcatgatgattataaaaagagaatgaaattcattaaagataacaaaagcatgcaaacctaggattaaaggctgtccggtcagctagttgtttgaaaaatgaaaaaataattccaagtttaaagactgcttggtcggtcactttgtcttaaaaaaggccttatggctaaatagataaaaaaaagagatagaataagaaagcattcaaacagttggagtcctaggctctttgtacgggtcaactgggtcagctggagctggaggatcatttgtcttagcgggggcactttaacactttggttagttggagaggtggaagtggttgcctcagattccccataggccgcctgagcagtgtagtactcgagaaacatgtctttggaatcgcccaagtaatctaagtttgcccggggattggccttccagaagtcataaaaaatctcgagaccagctgtctctagggaattcactttccctcagagcctctccatttaagatttctgctgctcggcctctgatttatacttctcaacctcggctctaagctcctcctccttggcttttttcttttcttccaacctgcgaaaaagagtccgcagagtctccctttcttcttgaaggctagccacttccttagataaggaggcaatgtcggcttcgagctgttcagtggatggcatggcttgtagatcctgactcagttcggccacctttttctcagcagcaagaagcttcttattgacctctcctatctctattcggacagccccaaggtgaacccgagcctcctcggtgtccttcctagccaagtccacttctgcccgcatagtgttggaaagggcagcattcttagaggcagccgacttagctcaggaataagcataagccatctttagactggtctgtacagagaagaatattaaaatctgaactaattgaagaaggacaaaaagaaactatcagaaaggacttatccttgaaagctccatcagaactcctcccatcaccagctccttgaaagttcgttgtctgcccaagccaaatgctcgttcacctcaggaatcgaccgagtcacatactgagtaagcatttctgtgcgtctttcggtctctgggtacagtacgggaggtggagcaggggccttggtctgttcagacccgcttctgaccagctcagatctacccctcatctgctctggcctgcccgagctacctcctcgagaatccttggacttagtcatttttgagatgggagggtccacaacagtttgttccttggagagatcaatgactaattcagctggtgccttctctctggacggggttatctcatcgcccttcgacttcttggccagaacagataagccccagcttcctcccactctcttcttcagggcctcaagcattttctgagacatctctgcacgaaataaaagtaacatggttagaaaaagcataagaaatatgaaggcatgataattaaggaagttaaaaacaagatgaagtaccctgcactttggcaggggcatttgcccgaacaagtactgatgggacatcgtcatctgacaagtcctcttgttcctccaggatggctttcccctttccttctacaggagtggatggttgagcaggtagaccggactccctgatctggatcgtatgttcgataggcctgtgcctggtcgaaagtttcttcttccttttgagcggtctttcctgctctttctcagcctcatcctcctactcagagtattcttgagcatgttattcagctccgactcctccctccaacctaacctagcctctcgctcgagttgaatgagctccttctcctgctcagaatactcctaagcatactgcttggctcttgcacctctcttcaacttagcctcacacttaagttgaatgagctccttctcttgctcagctcccttacccggccagcactggacttcctcttcctctccttcacaagctgaggtacaaaatctgttggatagagcccgtactccacaaagttggcctctgaggtcaacaaagtgatattctgagcatcatccggcagttgaacaatcctctgagctctgtccctaagagccagtgtgaggggtggacggtaatatatagggatctgctaaaactgagtataagtggtgcccatgccttccacaaagtaatattcatcaaaaaaattcccaatcttgctcacgaccttattcgcgatgcctgtcaaccagttgaagtctggctgagagaagtagaagtaccccgacctacttttcttgggggtagacatcaggtcaaaaaaccaattgacctcgtgtggagaaggcacacccctcttctgggtggcgtagaggacgcatagggcagataaatacttcatgcccttgggagtaaactgggttggacaaaggcggaagtaatctgccaccttcctgaactacggatgaaaaggtagcattcccccttgtttggtgtgggcacccgaccaggcacacatccccttttgtgggtttgtggcacgatgatttgaggcagggacgtaacattcaagtctgcccagatagacagacctctccaaatctctcatacatgccacaatgatcttagacggaggactcacccatctggcacctaaggaaccttgcctcttgtgaggaactgcttcagtgagctcctcggcgacgtagtctactccttcaaccaagacttcaccctctgcagatgccagctgcccgacctcattgtatcctccaaagtttggaggttcaacctcctcatcctcctcaacctcggaggggctgccaggatggacatcatcctacttttcaatctcttggaccttgatgtcccctttgtgatccctctcctcctgaacgggcggatcctatttggtgctaggtagtgtggcgagctgggccacgtgaggatcggatggtgttgacctttcgcatcgtttgctttgtttgagccgtcatcctgttgctagacggatactggggtgaatgccgagcaaccgtgatagtaggaacagtaatcggaataccaaagtttcccaaacttggatggccaacatgcaaagtgtcagtaacacctggccagacaacatatgtccagttggacggcaaatagtgcctccaccctttattcaattcctaaatgaagcagccatacccctctccagcgatctacttggagtagtggtggtgttgcacttcgggttctggagtagaagagcattcactactcatctcccagtcttcaaagcttgaattggaaagtccgtcact

SEQ ID NO: 131300 - DNA, 669 bp, Cannabis sativa
  modified_base (43)..(60): a, c, t, g, unknown or other
aatgttatttctgatctttatgaataagtaaatctgattatannnnnnnnnnnnnnnnnnagggcacaaaacccaacaccactaggcagctcagaagaaattcttgctgggcataatgcccaaactcttaacggtcaaccgtcaagtccccggtcacaggttttatctgtgggccaagtagtaggcggctaaaccttatctaaaaattcattaggtggagttatacctaataacttcgtccaaattagtggttctggccagctgaccggctaaaccaaccaatcactgagacagccttgtgtctcagtattcaacagattgggaacaactcatgatctcagacatgatttgaatagaaggaaaggtctagatgaacaatatgttcaatcggccactcagcctggtatccgcatccaggatccaactctaagagatcctagcgtgacacagatcggccaagaggctgaactagttcacttatctatgcaagcatagttggatgaattgaaaaatatattccaaggcctggccgaccaaaaactcattgatctcgagttggaccgagcacgcaaataacttttcactcctgagatcaatgttctagagctacccctcaagttcaaaatgccgacctggaaaatgtacacagggaaagaagatcctttatca

SEQ ID NO: 131301 - DNA, 1202 bp, Cannabis sativa
  modified_base (515)..(518): a, c, t, g, unknown or other
  modified_base (732)..(740): a, c, t, g, unknown or other
taaataaaatgcaaactgttggtagtaccttgacttttttaattttaaaaaatcatgtttcagtgttgaaggaaaactaataaatttagacaaaggactgttaccaaaagttacaagttatggtacgtcaaatatttggggcaaaggattattatcaaactagatgtaatatacttttaattaagtatgtaatattaatggtttgtaactccttaattttgtaactccaagctgccacctagatgtaatatacttttaatcaatagaaataaaaaatttagaaaatcagataatgatcaacaaagctcatttagcatgacattaatcaaaataaaaataaattaaaatcaaagaatgatctacaaagttcaattagcatggcatgacatgtcatcacccatcacccttaacaaatggattatattaatatataaagttcaattagcatagcatgacatgtcaaaggattatattgatatatatagatgggtaaatctatataaatatatatatannnntatatatatatatataaataggaaaatcatcatgtggcattctatttttctaattttttcattttttttttattttcaacaatttttgtaaatttagtttttttgaaaaagttgaaggtagtttagaatttatattcagttatatggaacataaagagaaatgttaaaggacactagtagtgcctagtatattattggtccaactaagtatcgnnnnnnnnntaatttaatataatagtttttaagaagtatcgctagccaattgcaacgcgacatgtcgagttaggcaccactggtgcctaatagcaatctcttattctaaatggttaaaatatatggatctaatattaaatgaaagtaataattatatgggtatgattttgtctcgttattatactttcacggattgtaatccgtgatgtacgacaatcgtcagaagagggagttatttgatctgacagctgagattgatctaagggtaattagggttaaaaagtaaaaacgtaccctgacactcatttaatgtaccttgagacccatctaatgtaccacagaatacattccgtgaaagcaatcacgagataaaatcatatcccaataattatatacatatcatgtcgtcaattgcgtgtaatgctacgttattaattaaaaattgttataaatattaataattatgtggat

SEQ ID NO: 131302 - DNA, 703 bp, Cannabis sativa
tcaactcctcactattcgacaccaccacatcacagccaccatgggacaccgtcacacggcagcagcggcggaagctacggtaccccaccaacgacaccatccaactgcccaaccccatcaacaaaatctcctccttcttcgggccacggcggcggatactatccttcccctccttctaccccaacagatccaaacactccaactccaaccgttccttacactccaactccaactccaactccaactactccctacactcccaccccaaccactccatacactcccactccaaccactccttacactccatcccctgatattcccactccaacctctcccaccactcctagtacccctccttatctccctgaccccaactcacctcccttcacctgcaagtaagtacattatatatacatattaaccctaccatacatatatgtttcaatattagctacaagtatagtgaatttttattaccaaaaacgttactggtaactttttagttgcaacaaaaattttttgtgactaaatatcactttattagaaaaaaattatttatcattaaaaaataatataaataaagttatcactaatttatttttagtaggaatttcattgtagtggctataaacacatttaatactgataatacatttattttttaatgataacataaaattataatttatgtttaattagt

SEQ ID NO: 131303 - DNA, 726 bp, Cannabis sativa
aaaaaaaaaaaaaaaactagtaagtaatacacgggaaaaacacgtcagcaatgcactgaatgcatataatttttcctgataaaaaaacaattaaaataataacaataataatttttaaaaaggacttatacttatttattgctcacacaagttacactttctttgttactcaattttttttctttgctttctttagtcactaaatcatcaaagaaaagctttaacctttttcactaattgatcggagcagaagaattccagagttgtcgaactcggcttcactcaaaggtattttttttttttgtggtaagaattgtttggcttttgatgaacaatgggtgtttaattactgtagtttgtcatatattaaggtgttgtttcgtaatatttttattttttttattttttaatcacaaaataaaagtaaaattcttgtttttaaaaattttatttttgaaaaacaaaaatattttctgtaactatttttgttttttaattttaaaaactgaaaaataaaaatgtgttctgtaaagtttattttcatttttattttttaattttatttaagtctggtctaagtccgggattgaattcaggttcaggtcagaggccgagtttagtgctagggccctagggggatttgggtcgggtctggttggagtccaaaatattgattgagagattccactaattctatgagttttatttaaagagaatcatattgct

SEQ ID NO: 131304 - DNA, 878 bp, Cannabis sativa
tcgaagatcgacctctgtgcaccttgttccccttggggaggaagtgatgtactttggctggacatgggtactcctgttggtggttggccggccagtggttgcacaatggggggttctgctgagccaaagatccctaccgatggtcactaggatctagctgttctcaccatttgacctttgaggaaatatctgtcctccctctagcagaggaagatctgccctagttttcgaggaacttggccgcagtcttccttggagtggatctttaaggagatcctggcctcttctgtcaattctctgattgaaccatcttattagatcgctggcctttaaaatatattttatatattatgtccaaacatatattttaaaaaataatgatagtgatgatacattcttaatttgtagttaggagagtagttataatatagtgtaaaattattagaagcatatatatatcattaatcatttttaaaacaaaaactttgttgtgcaattaagatttaaatatatagatgtgattatatgtatatataatttttatttttaatatataaaatatctacataatttttattttaaatacatataataatattataaaattaataaaaaatattatattaagaaattgagatattctgttaaacttaaagtagaaaatcagaaaatgttcttaaactaagaattttgttgtatatccacattttatatagaatagatatgactaattaggatttttaccccctaaactttaacatgtactaaatcatacctgctaaacttttctagttgctaaaaatttccagtgaactattgagattattagatttaaggacttttgtttattttcattcaattttactatttcagtgatt

SEQ ID NO: 131305 - DNA, 1112 bp, Cannabis sativa
  modified_base (28)..(29): a, c, t, g, unknown or other
  modified_base (983)..(984): a, c, t, g, unknown or other
gaaaaaatttccgtgtgacagtattttnntaaaagttaacccaaattccagtaattttataaattttcctaactcggtatttagttataacttgtcaattagaatataatgtacttaatttcaaatgtattcttagatagaagttctactatatagagaaagtataagaaacatttttacattttataattgaatgaaaccttctcctccaattaacgaagaaatttcattaccggattacccgaatctcattactccatgagaggtgtattctaattatagggaatattgtaggaaaacaattatgtttggttgtgtacaattatatttaatcagatttttgttaatggaaggacattatttagtaagataattttatatattattttaaaattttaaaataaattaaaaaatgattttttattaatgtattttaagttaattatacatcaaaataaaataattaaaataaatacaaaatacaaaatatcattgtatttttactaattaaaataaatatttatatattttaaaataaatatttatatataaatataaaataattttttattaatgtattttaagttaagtaaatacaaaatatcattgtatttttattaattaaaataaatatttatatataaaatatttatatattttttttgacaaagtgattaaaatcactaatgaatttgcaagacgtaaactttttttaagatatctgattgtctagccaaaaaatatgcttagtcaaatcgaagaccaaaaaaaaaaaaagattgcgaaccatcatttgacagaactatcctcgaaaaatttagacaatacacttataacaacaacatcttatccaagttcaatatcggtccaggccgatgtatactccatacatccagtccaagcttactttaccaatgtcctggaaatgacaaagcatttatccaaggtgcaagtaaattacattgttgattatcatatcaatnnaaatcttgtgtactgataaatcgcaggactttatttaataacataatcttgattacttttcactatgtagacaacacagtaatcaggaataccaatgtgataagaatttagatgaatttataaatcaa

SEQ ID NO: 131306 - DNA, 1141 bp, Cannabis sativa
tatttatcccataataatatatgtacatataaatgaaattactttggttttatgcctctggctcttagaggctaagcaaagtttgtctttttgctccagaaattacttttgtgattgtggaagtgactcccaactagatttttagatgggaaatttataataattatattcattgtaaaagaatttctcaggggttttttcaattttgttgcctataatatagtgaagtggatttttgctcacaacttaaatagtgttggagttatctagcattctgaaaattttataattaataattgagaggtctaattttcttttttatttaatgaaatctgtttttcttttaaacaaataaaataaaaaaaatctttttcattatttccgtttcatattcatacacaagctgtattagatgatgattaataaaattcctaaacttacggtggaaaatccttaataatactcaaaatcttttttattttattatgattcaattgatttagttatgaaattacgtttgaaaaagtcaaaaaaaaataaacttagtaatgtggtattcttaattaacaacaacaactagaagaatcattaacaacattaaagaagaaaaaaaaatcaccgaaagaaaaaagataaggagaaacactgaaataaataagggtgagaggtaagtttatcccgcgtggggcccatagaagcttgggctgggtcaaatctagtgggccctttgaatataatgagcccatgtttactcaacacacactaaagctcagagttgcctttactggatattattaattgtccaatccaccaattgatagtgggcccactccatagcatcaccttattaatacctgaaaactacccaaaatctgatatttttccacaggagggatccacacaatgttagagcagtgatttagggctagtttggcacagctgtactgtgggaaaaagtagctgtaccgtgagaaaaaatagttacagcagaattgtagaaaaaaattaagctaagcgtttaataaattataaatttcaaagtagtgaattgttaagatttattataataataatgaatttgttataatttaatttattataatcacaaatatataaaaatttatattatataatattttat

SEQ ID NO: 131307 - DNA, 843 bp, Cannabis sativa
ttttttttttcaaatagttaatgaaaaaaaagatttttgtgctggttaagttttgtgtttaattttcagcaaaaaaaaaagttttgtgtttaatttctttaagggtaaatattaattgagttcatacttatatggtaccttgtgatttgtaagaatacatatttactaccttctattttagataatgattaattactactctctatttacaaaagttacatacttttataccctggttgggtttaaatttataaaattcctaaatttaccctaattttaatatttttttttgtattatattgttttattattagataaaaaataataagataaaattaaataatacattttttttgtaagaattaagtaatacagctaaaaaaaattaaaaaaaatatgaatttaaagttatcttcaacctctcatatgcttatctccatcccttcacttaccttcccggtgttggatcaacctcaaagccttaaaatttggaagctcccatcgtacttgtatcagacactatcagatcgacttagaaaaaaaccacaaaatacagagaatgtcttcattcatgttctctctatttgggatctgcgttcgtactctttattagtggcagtagtctcttcgttcacggttgaggaagggattagcaaggtatcggccgaattgaaatggagtctgtaagtgtcgttattttgtgacagattattttagtacaatgtctagtcatatctggagtttcagtttgttatatctgcacttgcgtactgttaagttggtgtgagtctgttatgacttatcgttaggtgttagttagtgccaggtggactgttttgttgg

SEQ ID NO: 131308 - DNA, 3016 bp, Cannabis sativa
  modified_base (1898)..(1902): a, c, t, g, unknown or other
tggcacttagtgtattaacgagaaaccatacatcgctaaatgcgaatagtgaggcatcgaagaaagtgacacataccaactataaaaatccttagcctgtgataagcaagctaagtgaaaaagacggatcgactcaaagaacaaataagcaaggtaaccatctcgctatgagaagacttcctatagcttcatccagctaatgggagcgaggcttacaaccctggcgggttagaagaactctttgtaaataaccgcgatcgacacaagacatacatcgtcgacctcagaaggaagaatggccccaggtcgctattgggatcactataatcaagtttccgtcgagatatctccagatacaacaatcaaagacgtgtttaatacatgatattttttgaccaagtgaaagcgagaaaatcacagttgtatgattttcaaatcataaaccgcatttactctacatattatgtaatcaaatcccacaattttagggatgattgctgtaaaagtattttggccaggtttgtaagtaactgtccacagtgtaattataaatagtggcagataagctcaaaaaagggacgaaaaaaaactcatatgaaagaggccctgaaaaatacaatcagaaatttgaataagattgactcgtagactatacagaattttaactgcaaaaccacgtaaaaaaccctgtgttcagatattattttttctatagcttttattttttctgtgtggaattattaccgtgaggctcaaatttggttaactaaaatctgtgttaacagtttggtgcttttattgagagcctctgtgaaaaagctcaaaaaaatccttccttctttcgaagaaagacaatctcctacatggctgaaaatccaaaaaatgttaacaccccacatgaggaagccaaccatcgttctggaaaagagcccatgggctccagaagatctaccaatccgcagtccagaaggaccacccgttctagtagggctcaacctgagggtggccccagtgcacggaccacacgttcctggagaactcgacctgacgttgatcctagtacgtggacaacacgctcgaggagaacttagcgtggaaatggtcagaaccctggggcgagggatgaagagctcaattgtggaggtgcccaatctgtgggaaaaagaacttatgaaacgggaagtcgtcacctaagacgccgtctggaagaggtacaacgtaggaacgctgagttagaacgtgaagcaacctcggccaggatggcgcaggggatgaacgctcaaaatcaacctgaacctggagtgagaagaccacgaggtagaccttgtagttcacgaaccaggagacaggaaaaggcccgggagaacgacccggggaaaatgagacaccccttgagaatgaggatgaacagccagatgggagacaaccgaaaactgatgaacgagaaatccctcataaaaatgaagaggatcttgggactcaaccgagagaatggagatcacttgctaggaatcaccaacgttcttcccaaacccatagagcaaggactcgcacataccctgataggggaaatacgacaaaccgctctcaggaggaaagaacagagcgtgaagaagcaagtgtgacttcgagacgatccagaacccatagtcgatcaacttgaagaggagaaagtactcaacgagataatgaccgagaaagtatgggaaccagtaaatccacgagccactcaaagacaaggtcaatgagtaagacgcgatttatgagtaagacaagatctgccagcaattactcccagccggatttgtgagagcacttgaatcagaagaaacctgatctttgctaatagaaaatccaattcaattgcggacaaacgagctggaggacaagttcaggannnnncaagtgggggaattagggaaactatctggataggactctgacgaggagcttgagccgtatcacccaaatattatgaatacccattttccttcgggattcaaaaacccgcatgtcttgtcctatgacaaaaccatagatccagtcacgcatttgaataattttaacatgataatgcgagcgagtaatgtgacgaacaatttacgctatattttattccccacctcacttgttggggcagcgagaagctggtttaacaagtttacttgtcattcaataacttcctgggagtagctgtccaaggatttcaagaagaaattttaggccgctagggataggcggcctcgctaaccaataaaagcaacagcctggcaaaatacttaaggcatacttaagtcattttagcacggctgtcgctagggttagaaattcggatgacagcacgcaacttatagcccttcaggcggggatcaccactgatccattatccgcaaggggcgagttgtgggattatttacaaggacgtcaagtaagaagcatcactgagttcaatgagagggctcagttatttgtccggaaggaagaagcccaaaaggaaatgaaattgttgaaaacaagcttaggaggtaaacccatcaatgtttcaacaggaactgcttccacgagaattgataactcgggggcttctggtccgaaaagaaaggacgaaattaaggaaccatcgaaggatagaaagaaacagaagaagcatgataaatacgtgcccgtgtatactatttatactgagcttaatgaaactcgggagaatatttacctcgcacatgagcagaaggtagccttcggcaaacgtgagcctatgaggaattcaaggagcaaaagagatcctaactaatattgtaaattccataaggaaattgggcataggaccgatgaatgctgtcaattgaaagatgaaatagaaaatctcatcgaccgaggctattttaagcagtatgtgaagagacagggccagggatacaaccagcccaattttcccaatgacccaaataactaggggttacaacctattcctttggaaggagaggacatcctggttatttcgggaggaccacatatc

SEQ ID NO: 131309 - DNA, 1038 bp, Cannabis sativa
  modified_base (27)..(33): a, c, t, g, unknown or other
  modified_base (936)..(948): a, c, t, g, unknown or other
aaaatagattacattgaaatggagttnnnnnnngggcataaaacccaacagtaggactgtcaattagcattaaatgagccaaaattgaaaagacccctggtcagggtcacgtcagttcgtcattcaatgcctaagagacacatcacccattcggacaagacttcaagctgagtgaagtccacatgtgaccaagaaggtcccgcgcagatttgggtggcaaatgttattcaattttttttaccttgacgtggcaataggattaaatgacacgtgtcccatatttctagtatctggacagaggaaaatatcctaacaccctgcacatgactagttagcatctataatagtcggttattcgagtagggttgtggaaaagatatctgaccaggtagaagcatgtttgtgccgagcgacgtacaagagatggcgacttcagagaataatcgcattgtgcccaaacgggaagacaatccctataatcgtgggattgagttagaggaaaatggcaatctgtcctagtttcctattttacatattgtaattatagaattattgtaatttcctattttgtccattgtaagagaaagggaaaccatccgtcatatattaagctcttataaaagtgacctagcctcactatgaaagagatcaaaagaattgcctcagagagatattctagtgagaaaagagtgatctaagagtgaaacacactcagagataaatagtaagagctttctagaggaagaacactttgttccttctcttatgtcaatacaatacaaggggagtaggctattaccacacttatggggctgaacttctttaaaatttggtgttcactttactttattgtttttgttctcttttaatcacatgaggatttcttagattggaacgagtttgtgttgggttttgcgccctaaataaaatccattnnnnnnnnnnnnnatttactaattaataaagataaaaaaaatcgcttttaagtagcatggttcacatgatttatttcatgattgtttaatgtataaattctat

SEQ ID NO: 131310 - DNA, 1529 bp, Cannabis sativa
gcgttccaaacgagccctatataatttaatttataaaatataggtgtgattatgtaactctcattaaactagcatataactaacttgtttgtaacaccctatttatttagggacatcgtattggaatttaacaaatagcttatcataataagtttggaatttagactttaaaattatggttaaatcaaaactttcataaaataaagaaagttatataaagcttttaacttttaaacatttacaagtattgggatctccatttaaaatatttgtacaattaattttgtgttcaaaaactagtaaggctattgcctattgggatttgaactctaaacttcttagttgttaattaatcaaattatcactaagctacaacacatatttaatattaaaagtattattatttattttattactaactatattttaatttattttttttttcgaaatggggccttgagcggtggggggcctaaggcggccgcctctttcgtcttagctcaaggtcagccctattcatcattccactacataggtttacaaaatagtgctagtcttgttaagcaagactatttttaatcaacatgtgtcttataaattgaaattagtgataaattactctttgccactcgatcaagagcatgattgcctcaactctttaatctccttcaattcacaaaaaaaatgatctttgtcgatcgaagaatacattctcaaaatgaaacagtatgttcattccctttctgcaattgacaacccttaactaatgatgatctagttctgtatattcttaacagccttgaatctgaatatgaagttgtagtagttaatctcacttgtaggccttaagtccattctgtaggccgaatgtaataagatacgcgaacaaaaatgcacataaatgagaaatgttaaaggacacttatggtgtttagtactagagctacacactggtcagattttcgggtttccaggtagtcgagttcgggttttcggatgtcgggtgtttaaattgtgtaactgtgaacccgatttttgggtggtcgggtctagcaggtttcgaatcaggtacatcgggttctgtcttggcgggttcggattgtaatggaccaagtcctaataaaagatctttaggcccaaatgaaattttgtttttaaaaataccattttttttttctatttttaacaattaacagtaagggtcttgtgtcttgacttttctcgtctcaatcagtcgatgatgaacaaaaatgggtaagggtcctgtgtcttcattgagaaataaatgtatgaattttcgaataacaaacaaatactattaatagcattatagtaatatattgatattacagtacaactgcagagaaagagaagtaacgaaatcaaaattgaaaaatatacactatttaaatcatatttataatatatataatgtatacattatgggctcgtttagaacgtcgtattaggtcgtattgtattgtattgtattgtattattaaattgaattatatatcatatttttatat

SEQ ID NO: 131311 - DNA, 568 bp, Cannabis sativa
tacaccggcaatcacaaactcatcttggaacccattttcgaattccctcacatcatccctgaccattaaactcgatcgaacaaactatctagcctggaaatcgcaagtcgtacaaacagtcattggacatgatcttgatgagatcttgttcagcaatgttcatccgcctgccactctaatcactggagaaacaaaccccaatttcaaacaatggaagaaacgtgatcaactcttgttgtcatggttgagatcctcaatgagcgaaggtattctcggatccgtggctgcttactccacatccttcgaagtctggaaatctcttgagcaaaagttttcaggtcaatcgaaggctcggttgctgcagttaaagagtcaattaacaaacattcggaaaggtaatatgtctatctcagactatgttgacaaaataaaatccatctgtgataatcttgctatagctgggtgtatagttaatgagcaagacattgagttacaacttctcaatggtcttggacctgaatatgactcagtcgtttctggtattacctcaacaaatgaatcaaaaagt

SEQ ID NO: 131312 - DNA, 724 bp, Cannabis sativa
  modified_base (50)..(77): a, c, t, g, unknown or other
gtgtttaatttcatcgttttagaaggttcatatttaggatgttaatcaannnnnnnnnnnnnnnnnnnnnnnnnnnngtaaaataatttccaacatatgtttcatgttcaacttagttgcaatagttcctgctttagaattgtcgagctatacggtactaatttggatagggtgagccatctggattcaaattgggattttatctccaataaacccctatgacatatatatgatcacaggctctagggagtttagtatttattatagtccttcttcctcattgtctgataactatggtaaatttctctaagtgggagtttattccccacctttttattgtttatttttgaataagtgttgattcattttcttttctggatatggattttgagagccttcttaatacctcagggcctctgagacttcatcgggagcgaatctagaacccgtgaagagattaaggaaaaccattgcaaacaaaaaacgtgccacgcaacaaatagttatcgagccaaccgatgatcaggttaactctccaagcaaaaccacggagggcactgaagagcaagtcttgggatctattcaccaagtcaaattctcgagttcagaacccgagatggtctttttaaagccttccggccccttgccccgagatgtaggaattattggctcgtaagtctgctcgcagtatgccacctcaagttggcatcatttaaaatccttc

SEQ ID NO: 131313 - DNA, 653 bp, Cannabis sativa
cttcagttggaggcgcctgtggagggtcctcccttggaggcaagggcccaacacttagatctaccgggatgcctatatcattctggcaattatagagccctgccaagtaatcttagttgtccatagacctacaggggaggtctggctgcccaaggtctgcaggacctggcaggtcaaggcctgcaggacctggtaggtcactatacctctaccaaaaggaggctagactcgtggcacttaatgtggtggcatgactcatcacatctgcagtgttcatggggattccagttgtgactgtgacctaagtatctggataagcaatttgtgggtcttgaaggagacccgaagatacagatggtgtgacaggagttgtaatgccctgaatattaggcacgttacccaagataattaagaaaccttaatgccctagactggattactaaacagaaaagcacgggaaatttaaacgttaaacaataatagaataaaaataaaaacttgtaataactttaaatttataaccaaaattacatgtttcgggatcccaaaaatattttacaaaatgttattacaagtcttttcacaagagccgacctaagtggcaaaatagagttacagaaaatcatcactggtagactcaaacccgcttggtc

SEQ ID NO: 131314 - DNA, 1008 bp, Cannabis sativa
aaaagaaaatttcaagttaattaaaaaggcgaggaaaatttcccaaaaatttaaaataattaccccattaaatcaattacagctcattatgaaacgtggaaattattttgggtaactggttccataacatctaagttcgaacaacttagtcacaagctcaaaaattgtaaacttgaggggcaattgtaagtgatcaaaataatcttgaaggtaaaaaagtataatcgaaaaagaactaatgaaataaagcgacaggaatgttactgaaacacactatctcactcaaaaaaagggcagaacatgaaagatagagcttaaccagcttggaaagctaagcaaagctcaaggaaattagaggcagagcttgaggggctcgaagagcagaagtggataggaaagcacgcaaagacaagcgaagaataagtccacatggaccaatccgaacgaaggaaaggaagggaaccaatagttcatagaaaattacatcgttcaaaagggagacgaattcttgttcacaccaaactagttaaaattctatcggaatatatcctcaaaacattttgagctcaaaaaataggagaacaggagagtgattagaggaactgagagaaaattgtgtgaactgacaaagcaaatgtatctcaattagattcaaatttagagtaaagaatttaatgtcataatataaatttgttgatgaactaatttttagcatcaacattatagagcaatattttcttttaaagaattactaacttatataatttaaaaaaaataaataaataaccgatctaaaatgttttatctaatccacactattaggaattacaaatttgaccgattgtatgaatttaaagggaattttgacattttatgctaaaaaacacacatggtgtttaattataccaccctcccaaaaaaaattcaactatgctaatcttttagtgttaaccccaaaatgcccctctcctcaaatccaaaaagtcagcctcctctctctctctctct

SEQ ID NO: 131315 - DNA, 759 bp, Cannabis sativa
  modified_base (688)..(699): a, c, t, g, unknown or other
accaacaacaaactgatcaacaagaaatgagtgtcaactgtccaaattctgttataattaattctagtttgttgagtcagttatatgttggttgtatgatccctttataatgacatgtctataaataagattctgcctcaacaagattagttgagcatctttttcatttcatcttcttcttccttttctctctcattatttcactctgttatactatgcacctagtctcattcacttgtgtgtgactaaaagtgaatcataaacaacttgtatatgaatactatattttggtcgcaagtaacttttcgttgtgactaaaatattatcactaaaaagagctattttttgtagtgttataattggttagcgattttttataatatttattaaagtaaaacaagtggggacctgatgttgaattacactaataaaaatatttcatctgacaagagtgttaaggaattctctaatgggacactaaaatcctaaaaatagtggagtttgaacacaaaattactccaatggaacactaaatgttatcctatatatgagagagtctatagtgtcccactatttctagtgagacactatagactacaccaaattttctttttttttttaacattaaaataatatgcttatgattaaattttaggctaattaggatttttttttcccccgaactttnnnnnnnnnnnnatcatgccccctaaacttttaaggtcgttaaaaatacccccttaactattgagattgtta

SEQ ID NO: 131316 - DNA, 825 bp, Cannabis sativa
aattattgtgtcgtttgaaaagaatttagatatatgcatatgttgaggttgtagattagattgtacataattttgataagcgtcttttgtggcaaaggtctcggcgaggaaaaggattgttggtatgccttttcgacatgtggaataaatagataccataccataccatattcttacatgaaattaaattaaatattaattttatataattcatatcataaagataaattaaaaaaataaataaataaaataatattaatatttataaattaattagtactaaccacttctgttaaatttaaatatttacttaaagatatatatttagaagaaaaacaaaaaatctaacaaattgaaattgtcataataaaataaggtggcgaaaatgggataatttccatttatttttataatatggtacttaattaatccttaggttagatcgattaaaatagttggagatgtagattttacatgttataggttaaccctagtcaaagacacgactaaggaaatattccatcgccgacctcatcacatgatcatttcttatccaaatatatatatggttggtataaatttatggtctacgtttgtaaatttgccaaatcttagacgtagatacaaattggatttgtttgataattaaaatataattctatataaaagatgcaatatatatgtaaatatttgttcgaagtattgttccctctaatctataggatgtactagttgccctttcaagccatttgttatctaccagatcaaacacattaatgatcgaccaatatatgtctatatataaaatatgtaatatatatatat

SEQ ID NO: 131317 - DNA, 1230 bp, Cannabis sativa
taagtagtgaaaaagatgtaaaatattggagtcaattagtggggcccggcccgacccgaggaagaggagcatatgattcaaacccatgatatggtccccggatgaagatgaccatgaccatgcatgctttcagaatcaaaactggtatattccttttcaattcaacgtctttgcggcacatcattcccaccaacttttactaattccaaatcaaatcaatatatatagtacttataataatttatcaaactagaattacaggacttaaattgatttattaattagtactagatatatcaataaggtgtattttattttttggtagtcatctcacaaaagaactctaagttttctcaagagacttgaagcggtgacgttatgttaactttctattataattttttagtcgatttttgtgctaaaaaatatattcaagaatatatttgttttcaattttctttttatgacaatgtttgtaaaagttacaacactgtctttataaatttttgaaatttttaaaattttttgaatagtttttagtatcgaaaatatatttaaagttttttaaacacacgtgataaattgatatatgatcaagagttttgttttcggcattataaactattcagaatttttttaaaaaattataaagatgatattgtaactataaggaataccgtaaaaaataaatatttctacatgcgatttcaagcacaaaaatttactaaaaattgtaatagaatgtttttttttttaataaaagatgtaaatttattaaatcatctcttgagcaattacatcaagaatgctacttaaaatagacgtcatcgagtacctagtacctacagttagcatgtaaccatgaaactctagctaagccatgagcaacaagattagcaaactgtttaataaaaaattgtaatagaaaattttaattagtacttctctttgtaaatacatattgctttaataaatagatatattggaaaaagacaatgtgtgtgaaagctaattaggaaatcttgccaaaccaaaacaaataaaattcttataccaatttcaccttcttcacgcaacttttttcttaagctgctgttttttgttcgaggaaaattatttctgaagtgattaaaatacggttaaatattattttggattttgtattttacaaaagttactaatttgattatttattttgttaaatgacaaaataaaccttatattttctaa

SEQ ID NO: 131318 - DNA, 585 bp, Cannabis sativa
atctaagccaaacatatacaaacaagtatatgtatttaacagccacttaacagagtaaataataatagatatacactaactaacagagtactaacagagtaatatagtagtcttgttacttgcactcctattcgcaaagtttgtctcagtccttttttattttattttttttgtaaaaattttgaaacttttcatatgggtattcattatataagtttggggagaaattggatttttttatgtaaaagaaaattttggagaagttaagagtatttttgattataaagactcatgtttttgatttcttatatgtttttggtggtggtagtgttgatctcttgtggtgaagagaaaatattagattgtgattttaggtggtggtggtgatggtggttgcggtgattttgggtttttttccctaattttagggttgaagtggggtgatggtggtagttgatgatgtgtgctatatttttcaagtggtggtgactgtggtggtatgttgtgatggtggtgtttgtcgttggtgttggtattatatttatccaggatcttagatctatttgcaagtatgttgatttaaca

SEQ ID NO: 131319 - DNA, 944 bp, Cannabis sativa
gccatatggagccagctcttgtagaagcaatcggtattcgagagattcttagttgggtaaagagacgcagtgggcaaatgtctttattgaaactgaatctctgtgtgcggtgcaagctattcaaagctcaattaaaatgattttcttttttggtatggtcattcaagattgtaaagatttacttgcaaatacgaataatgttgttatttcttttgttaagcgatcaactaatgtagtggctcacacgtttactagagctgctagattatatcctagttgccattttagtttagagtctgttctaagtgacttgctaccttgcttagtcacagattttcaagtctaataaaaattaaaatttccagtaaaaaaaatctggttcatttttactttatattatttatattttattattttattattcttaatgattttaatttgactcattgttgttggcaaaagcgaggtcaatattatgaattatgacaagttggtgtcaaattaatagttatatttaaagtttcaatttatagttattaagaattgaaatataataaatttaatactgaaaaatcaagaaataaataagaataaaataaaaaattattttgccaaatacaaaaatagattttttagtactcatacataatatattttccatttcaaaataaccattcttaaatgtttacccaatatctaatgacgagtgctaattacaacctcctattacaacctcttagtcaacttctacgtccgaaattatatgtcgaaatatttttttcatagcggcatttgttatagttacgatatcattcctgtaaatttttgaaaaattcttaatagtttacaataccgaaaacagagttcttgttattacagtttaccacgcacgttcaaaaaacttcaaacgtatttttgacaatgtaaactattcgaaaattttc

SEQ ID NO: 131320 - DNA, 747 bp, Cannabis sativa
cctttgtgcgagtcgtagagcatttgtgcgagctgtcaagcatttgtgcgagccatagagtatttttgcgagtcgtggagaattttgcgagccatggagcatttgtgtgagccaaggagcctttgtgcgagtggtggagaatttatgcgagttgtggtgcatgcgacatttctgtacgagtcgtggtacatgcaagtcattgtgggagatcaacgtgtgagtcgttgtgcgagacatctgtgcgagcagtggtgcatgcaagacgtccgtgcaagctgtggtacgtgcgagacgttcgtgtgacacttggtgaaagacctctgtgcgagtcgtggtgcatgcgagaagtccatgcgagtcgtggtgtgagacatccgtgcaagtagtgatgcgagacgtccgtgcaagatgtgagagtgatgagtgtgtgagaatttggctaagtgttggagcgaaggtcattaggagaggaatccaaggacgatgcatgcatgcagaagggtacgaaaatggagtatggccacgcctttagcgtgacctagagatgagggggtacaagtaatggaggcaattcctccatagcccttgacgtcccaacaacaggtatcctgcgaccactactcctgcaactcaggaccacccgacacccaatgatggtacaaggcgcaagaccacttgttgcacctgcaactcacaaccacataaggtcaacttgtcccttgaggaccacaagtgtatctcaggcca

SEQ ID NO: 131321 - DNA, 625 bp, Cannabis sativa
  modified_base (560)..(569): a, c, t, g, unknown or other
acaagaaatctgatcaaatattttaagaaacttactaaggatcagatgtacacagttggatagatatatagatattggttgaatcattaaacttactatttatgacttacttttcataaatagaaaaggtagtcatatttcctaccatatataatttaattaatataaacacaaaattatggaaacaaaataaccaactcacgcgaaaataaataattaatttataaaatatttttatcaatttaaatatgttaaaaattgaattaacaatctctctctttggcattttgatttaaaaaattattttataagaagagaacttgtatgaagtgttagaaacaaaacaataaagtataaaaaacagtccccatgcatgaaaacatactaacacataaaaataaagcaactttttcaatagaaaagttcacaaaccacaaacaaaacaactcctccaaaaacaaggggtctagagttgtagccaaaaaataaaatattactccatctttttgtctatcaataagcaaaaaattgttggaatatattttaccacgatctagatnnnnnnnnnngtatgtttttaacatcctaaatattaaattctaaaacaacaaaacttaaacacata

SEQ ID NO: 131322 - DNA, 1040 bp, Cannabis sativa
ggattgaaataatcttctgtcctagttttctggatcctgcatgttcctccaatcaaaacaacttcaattaataaattaaatgagattttgttttatatgtatttgattaattttcataattaaaaaattattgttttaagtgacgtggctagttttaatttgagagatacataaactcttctagctgcaaataatttaatactattggctattattttccttaattaattgtacatgcacatgtaattaaaaaaccaaatacataattaatgtttgttttgaaagtgaactaataacatgtattaatatttaatgaatgaattttaatttatcttatgatctatatatgtgacagccgaacgaaatggtgttcccattggtccaaaggtgtgtacattttctaatttgttcttgaattatacttaatttaaaattcaataattatgtctttctgttttagtaattgaaataattttgaatcaaattttttttcatgggtatgtatgttatagttatttaagatattttgtaaaattgtaagaaattcagaaaaatttaacatgacaaaaatatagttcaaaaattgcattgcatgcataactgttttattttatacgcatataaaattaataaactatttgaacactactttctatattataaattattccgaatctattaaattaattttataaaatattttaaataagtataacgtacataaatataaaataaaaattataaattaatttttttctgaatgcaaaaacaaataattaaatagtgcataattgaatctattatagaagcaccccttaatatatatacgtattaaatatagaatattatatatgtgttatatatatgataatattttttcacttaatgatatttgatatgatttatttaattatttacaggctgcttcaccttggctaagtgtttacccagttggaatttataacattttacaatacaccaagaaaaactacaacaatccattgatttacatcactgagaatggtaagtaatatttatta

SEQ ID NO: 131323 - DNA, 892 bp, Cannabis sativa
ttggatgtcttgggagcggatgtgtcataacaaagataacggaggtcttggtttccgtaatcttcgcgattttatcttagctcttttgggaaaacaaggttggcgcttcattacaagacccgagtctcttgtgactcgtattttcaaggctcaatattttccaaatgggaattatttctcggctacccttggtaacaacccaagttttgtgtggcgtagcatttgggaagctcaatctcttatccgtgcggggacttgttggaaggttggtaacggcaccttaatcaacatcttgaatgagccgtggctgccagaccaaaaccagccatttgtaacttcttcacacccgactcttcattctgctaaggtttgcaatctgttgaaaatgaatgaattatcttgggatgaagaaattttgcaagacctttttgatgatagggaacagatgttgatcaaacggattcctctcattccaaaccagcctttggatttcttctactggtgcaatgaggcgactggtgactattcggtgaagagtgcatatcatcttcttcagactttgaaaggtttatgcaatggaaatgatgcctcagttttttggaagtccttgtggtctttgaagctcccaccaaaaataaaaaatttaatgtggagggccggttctaattgcctccctactctatcacaacttccttcaaaatttgttccagtcaacataaaatgccctttatgcgaggaggttgatgaaacaatttctcacattctgcttacttgtagaattatcaaacaagtgtgggaaagggttggcattggcactttgggggtctcggctggtagcaattttctggactggtgtgtagcagatttttcatttttgacagcagaaaaacaa

SEQ ID NO: 131324 - DNA, 781 bp, Cannabis sativa
acacacttgtacacgtggcaaatttttagtggtccacgtaatattaacttttaaaaataatttaaaaattaaaaaaaatcaatttataaaattaaaaaaatcaactttacaattaaagctgctatttatagtagtagcaactatgaacagagaaggaaagagccaaaatagaatataacaacttgcataactaactaacacttaacagaaaaactaccactaactacctaactaatttctattattcaaacagtatactcaacagttatatataattgtacattaatattttgagtatatggggtacaatcttattttactcagatttggtgagaaagcttttaccaaaagtagaacatctgatgaaccaaggcgatgaggagggatgtactcctctgcaccatgctgcaactattcaatattctactggtaaaactattacagagatgttggttgaaaatgatgaaagtagtgcctacatcaaaaataaacatggtatgacacctctccacatggcaattgccaatgacaattggaatgtaatgaatgtaattatgtggagatgtccagatagctgtcaggttgttgataacaagggcagaaatgctctacattatgctgtcacaactcaagatgttgatacagtaaaagtattcttggaacattcttcacttgttggcaatgatcactggtttttgaatggaaaagatatagagggagatactcccttgcttcatatggctgctacttcatcatggcatgtcgaaattttagatgcttt

SEQ ID NO: 131325 - DNA, 767 bp, Cannabis sativa
aaaaaaaaaaaaaacgtaactttttgggtgtataggtttaggtatcgaaaatataagatttaaaaataaaattagcttaaatagtgtaaaaatattggagatatatgatttttggaaggtggttggcgagggtttttttcgtgaattatggtggttgctggttgttgtattttcatgttgaggaagaagattgaacaaagtttatttatataatcctatggcatgggttatttgaaaacaaccaatgccatatggtaaaaaccaaacatgtatttcaatatgatatggcatcggttatttttaaataactgataccatagagggctcttcataacactatcaaaatctgattctaaaactgtctctaaatagtattaacaaatgatatagttacgcttttaattgtcaattttaaactaagcaggtatgtttacactttttaacttcactttttataaaaaaaaaaaaaaaaaaaaagatggaaaaaacagtctctaaaatctttttttgcagtagtgacactaaataaataaaaattaaaaaaaatatattataaatttttaaacaatgcatttttatgttacggcttaatatttgtttttaattattttcattagtaaattacttaacatgaatcataattaataatatactaggtgaatgtacgtgccgagccacgtattgctagttttatttaagattttggtctttttaagattttgaatgtattttatttttaaagattacaaattttttatttgaaaaaa

SEQ ID NO: 131326 - DNA, 994 bp, Cannabis sativa
  modified_base (953)..(968): a, c, t, g, unknown or other
taacggtttcaactgtcttcaacaggcaaacactacttcgaaactaaaataccctaaattacgattaaaattgtagaaaactaattctcctaatatcaattcttagattcataaaatgcatatctcttataaatagatctagagtttccaatcaatccaaatcaggtatgatccgaaaaaaatgcaaaaaatactaaaacaaatgtttatctcgttgcattgacgttgttttacaaattcacaatgtaaatttgatcatatcaaatcacgattggtatagaaaattcacatacatctatagacacatacatcaaaaaattgttttggtatgttaagtttctgaagagctgcattacagtttcattacagttttgctaaccctctgaaacttgacatatcattaattacaaattgataatgctacaatggtacttatcataattgcatgtgactcatattgacagatcaagacaattttttttaaagaaagttatataacatgattagttatatgaatatattgaattggtttacagatgcctaatagttgcttttccaaatattgctattattgaacaattgattgttgttaaacggtaaaaaaaaatagacaaaaagtttcttaaagacgcctatttacaaaaacttggttgcatttcagttgaataatagttgagctacaacaatgatattaattacacggctcggaatttgcaatacatgagttgaacagagcaaagtcgaagtaagtttcttttctattgcatacggagtattaattttattagtttttatgttagttggctcgcaacatttataatagttgcattacagtttcattatagtttctacaagatgactaacaataatttaacttttatcctcttaggaaaaagacgtaattccatttctcgtcttttgcaacagacagttttgtgacagtcagtagtccnnnnnnnnnnnnnnnnaaataccgggtaagctgtgcaatccc

SEQ ID NO: 131327 - DNA, 597 bp, Cannabis sativa
acactaaaacaaataaaaaaaaacaaaagaaaaaaagaattaaaaaaaaaactaatcatcttctgcacaaccgcacaccagattgcaatagatgttaaatttgtaagcctagttttgaaaaatcagaataaaaaataacactcttatttttctcaaaaacgtgattaaaatttttaaaaattaaagaaaaaatgaaaacaagatgaagaagaagaagaactcgacaaagaaatcaaataaagaaaacatatatattaatgaagagaaagagagagtttttttatgaagaagagagtgatagattatgacaaaacgaccgtaaaacaacactaaaataaatcaaaaaaaaaaaaacaaaagaaaaaaaataaaaaaaaaataatcatcttttatacaacctcacaccagatgcaatagatgttaaatttgcaagcacaattctgaaaaattagaataaaaaataacactttcatttttctcaaaaatgtgactgcaaatttaaaaattaaagaaaaaaaataaaaacaagatgaagaagaagaactggacaaagaaatcaaataaaaaaaatacatacgttaatggagagagagagag

SEQ ID NO: 131328 - DNA, 3359 bp, Cannabis sativa
  modified_base (250)..(250): a, c, t, g, unknown or other
tatgatctcattccactagttcattagcttgataaaataatttctgactattcttatgagtttgatttttttcatcagggacaaagacaagcgaacatttggtactttttgttggcaaaaatgtcaaggttattttattttttctttttttaaacaaaaaaaatatgtgtgacggacattgtcaattgagctttcttaaaaattcttgttatttctcttgtaatgtttcattattttcttagacactatntttgctctaaagtgttgattggtgctttatgtattttttgtgtgttgtcttgttcattctttgcaaataaaaatgggggcttattttgaaaaaattcaagaaaaagaggggcataattttttcagttttttgggctatttttttcttttattttttcatttatggaaacatgtttttattgcattttatttattatatttcttttatttttgttggggatttgctcttatttttttgtagtgttttaggaaacttgtttttatttaattaattattttgttggtttcctttttggtggtattttcggatttggttgatgtatttaatttttagattttgtggggatatgttgtttcctttttccatttttggtaacctttgactaatttttgaaatatcctttttggtatccttattcctctcctcatgtggtgaccaaggtaaggaagttactttccatttttttttgggtatttgtgttcaagtgttatatatgctcaactacccaccttcccacgatcaccactattcacctctctatctatttttttttcaaaagtctaaccttcttcaagtttgagagtgtgtttgctttctagggtttcaaagaaaaatggccaagaccaaaaatgctcaactttccaagaggcattctcgtggttctgcctttgcttctccaatcaccccacttgcgccacatgttccagtgaccggagttcctgggtcttcatctgctctgacaaaaaactgccaagaagtcaaaatcccaagctcgaaagttaacttacaatctcagttctcctctgatcattgcctctccgattgctaccccaactcttgggcttggtgatcatgatgaatctcattcattcgatcactcattgtcgaagttttcatcttcgaatggtgctccaaatgttgagaaagaaattgtgcctatgcctaccgtgagctctcgaactaggtccaaggtgtccaaaccaaggaaacccgaagtatttctacccaaagaagtctccaaaggtaaaaaggtggtatcctcatcttcaaaggccaaaagtctcaaagaaaatcccccttccgtttcatcatcggattcagaacctgaagaagagaccgatgaggatcaagaatcagaggatgtgtctgattcaagtgaagagtttgtgcccaaagaacaaccctctactgataattctgagtctgaaagtgaagtgcctgaagctgaacctgtcagtgcagaaccaattgatgtccctggtgcagttccaaagaaggacgaaggaaaacgacccattgtttctccaagccctattcttcctcaaaaaagaaagatgccctctagtattactcttgaaaacttcaagccacattctcattatttttgttataatgataatgctagagatatgaaattttatgagaataagaatcttactgttgagaagaatttcaatgtcattgctcataagccatctagggtttataacatgttgatagaaagacaatgggtggatactttgattagctttgatggctatgtgaatcaaattgtcaaggaattttatgctaatattactgatgagtgcctcgatgaggactcttttatgtttggcaaagtttttgtcaggggacactggtattccttcactgtgaaggatgtggctgatgctctcaatttgcctgtgggaattgagacaactgatgtagagtttgatcgtcaaaaggtgtttgggtatctcactagtgataatgatatggaactctccggccaatgcacacgtctcaacttacctatcaccgtgttgctcttatgaggtttgccctatccaattggtttccttgctcgaatctgataaatgtttcaaattaacttgccttcttttgtataaagtttctatttgtgctcaaattgatttggctgacatgatttgggagcaaattgtttcttttagaaagggcaaccttgactcatcttatttttcctcacttgatttatatgattttatctaaccaagaggagttgattcttgagaatgaaaccatagaaatgcatgctgttggtaccactttcaaagttcagagagacctcctcaaggaaaatttgctaagaaaaggcttggtctgtttcccctggtgctactgatgaacctactgctacatctgcctccacttctgcttctacaaaaatgactgaattcaacttgcgtttgggaagaatggagacaagtcaagccttacatcttagaaggatggacaacatcatgaaattcttccgatccaatgatgatgaataagtggtccatttttttatcttttgtctttttatttatgtgttttgaactattatgaccttgttcatatttttttattctctttggctccttgatagacaaaaagggggaatagtatttagtattttttttttggattgtttgttacaactctgaactcttattttaggagaagttgttttatttatggtttgtgcacttttcagtttaaaaagtcgctttgtttgtggtttgtgcactgtttcgtttaaaaagttgctttggttgtggtttgtgaacttttcaatttaaaaagttgtcgtgtttgtggtttggaaacttttccgtataaaaagttattttgttttatgtgttagagtgctttcatgcaggggggctattctctatactcttttgtttttgtttctaacacttgatgtaggttttctccaaataaaatattttgtcaatcaaagtgttaaagagagagattgttaattccaattttgacataattaattgacaaaaatattttattatctactctataatttcagcttgagtatttaaattggtgtccgtattttgtgtatctaaatttagaaagaaagttgtctagctttcttatttatagaaattgaagtaaaaatggtaagtttgattgcacaatttattcttatctaaccacctggtatattttgatcttgtgtgagtttctcattttgttaggttagatttcttgaggagaaaatcggagctaaactttccttttctataaaaggaaagttgcacttactgtccacgattctgtagtacaaaaatagaaatttctgggc

SEQ ID NO: 131329 - DNA, 1118 bp, Cannabis sativa
aatttttttcctaaatttcggtagagatatacatatataaggtatttttgttttattcggtaactataatattaatttgttaatttggtatattagtaaaaattacactaaagtaaagcatgacctaaattaatccactcattaaacacataataaagatatgctattatttcacataaagtcaaaaataccactttcatttcaatttctccattctttctcatcttcctttcattctctctattatccctctcatgaaagactagctaaactcaccacagtgcaccacacacaacaccgtgctttgctcaccaccacacacctttcattctcttgctctctatttgggtgattcctaaaatatatgtatatagtttgtttttaacagatctacacattggtttttgtgtttcgttcattttttacctagaaattgaattttgaattttctacgtttttttttagtttttttcacgatatttagcgatgtatttgcaatgatagactcaatctgaggttaaagataaagtttagtgacattttagagatgttttatgtatttagcgatgtttagcaatatatttgcaatatgatactaaaaaatgcaaaatacatattgctaaacatcgctaatcattatgaaaatttgagtgtgatttagcgacaattaacgatgtgttgagcaatgtgatttagcaacatcgcaaaaaactagaaaactagaagaaataaaatgcagaaaatgagcgatgggttgagaattccgacgatgggtggagatttcgggggttgcggagtgattgagccagtggatattttggggcttcgaagtggagatggtgaaacttagagagagaccgtgagagaaggcagtggcaggagcttatgactgtggttctgggtctggtttcgacgatagggaatctaggtgaaggttcaatgtcggagagtgagatagtagagtgagagaattagagagagtttttttttttaaatgtgagggtgtttttaaaaggaaaaaaatactaaaaaatataatatttttttttatatatatataatattatttttaattaggtggtatattaaaaaagagatttttcatttttacactttaa

SEQ ID NO: 131330 - DNA, 3388 bp, Cannabis sativa
  modified_base (48)..(55): a, c, t, g, unknown or other
  modified_base (3348)..(3363): a, c, t, g, unknown or other
aactgagtctgcaagcagtattatttcaactagtgaggggaccatggnnnnnnnnaaccgagctttcaataagtagatgtagaatttaccaagtactgccttgcgccactatagatttagaattgtatttcactctcaattatatagaacgctctatatgtaccgaagtagaattaataacttctcgcaaaccataagcatgacagataataaactgctcgcgcatatagtagattactaactacttaaatatcatcaaaggaaaatatgagcaatggaaatgctaaaagtattttgcatttgatcaaaatataattgtttaaattgtgaacgaaaatgcaagaaaatacatatatattaagttcaaatataaaatatgaagaattcaataaagataagataaaaagtaaagttggccatccaaccttacaaatatgtctttacaaaaaatgtcacgaggggaaaactattgtctcggccttagggccatcaacctagatataattaaaaaccaagcctacatagtaggagaatgggatagttctgcttctttggctgcctcctcatcatcttcttcctttttggtcttctcgcagaaagcaagaatttcctcctcaaattcctgcaagaaacttgtatccatatttggatttgccatccaagctcggtaaatggtacggaggccaacgacattgcatcgttctttggtttcagcctctttcccataaagagtcaccttggctgcagcaagttcccctttgagcttctcgcattcttcggtcttgtcctttgcctccttctcggcagccacaagctgggcctcaagattcttcttcaccttctcaatattcttagttaggcgagtgttctccgacttggcatcatgccattttttggtgaaagtctagcactgacttgcccaattttgaacctcaccttccaagcatttcagtttttccataccacgtcgttgggtgacaaaggaaaggaaagtttgctgaagacaaataaagaatgcgtaagtaagtctgaaaagttagaaggaaaagtaaggggataaagaaaaaagagtttaccaagattccatgagaaacactcctctcaagcatattctccaagtccccattattaatcaaatcccattcatgggggaggaaagccttgatgtgatgccagtaggctgcgccaaattctccagtatactttgagccaggactgttagcatcgataggaagatcctcgagggcttggcttgaagaagtagaagttggttcgcattgggaaggggcttgtcggtgtttgcggagatcggagcaggaatcggatcctgggtttcagactcagagaccttgagattaacggattaggaagctcgcttcttgttagctgtggtcttcctctgccttttgaggggctccacctcgacatcagaaggagcctccgaggtagtcactctcttctttcttttcttgtggacgagaccctcgaagttcatttctgcgagacaagataaattgttaccatttattgaaagacaagtaaaaagaggagattggggataatttcctgcctaaggaatttaccataataactagaagacgaggtatcactagaagacggggtagaaggaccataatatccactaacattcctacaacccgtgattctgaatatatcataggaattgattagttctaagttccagctcgcgtctaaatgactcgccctatcaatcatagtcctatactactcggttgttccgtagtacgagtcagtacagctaatttggacatggactctgggataccaactatcaaacctatgtgtaaagcgatctacgaggaggggatgccaagtataaaagttaatgcggctatctcaaaatgtaactagagtgttaggctcagccataagcagtgtgggtgatcaaccacattgattaccttgggatgctccttcactggcttcctgaggggcaatattctgaaggtattgtgtcggagctacacaatctcgagctttctcctcatctgggacaggaacctactgcaaagaagaatacttgagatatttgtaatcacaagtaaactccttgtcagttaggagatccacagacctcaggttgaccttgattagaagaaagtcacaggacctaagaccgtaggggagagttagcaggagcctatgtcactcgatcatctcaggagtaggagtaggtcttttcgagaaagctgtcaaaaataaagcaaagttgcaatcagttaaattcgaataaaatgcatggattaattaaaccaagtcttgttcaaataaacacttacggattatatggaaactggttgtgccaattggggagaggctgattgtccaaaagaaatcatccttaaaggaagttttgtttggcaaatcgacaataatcttacgatcaccagtgtgaatcccaagatagtagaaaccccctgttgcattcttcctcgctggaacgaccttgacggagtagagatactctatttccacgggagtggggcactcccaattcaagattttgtacagaaccctcaaacttgcaaggattctatacgaaatgggattaagttggaacggggcaagcccgaggtggttaatgaagtccttgaaataatcttgcaaggggattattgctccagccttgatgtgttcaaggctccaagcaccaatcccaatcgagcctcttgtactggtgtcgccactggtccccttagaggtttcgcgtgtaagtcgcgctggtgggtaacaactaaactcgcctgctactaccgatctaaccctgcagtctcgcctatactcgatacgacaagtcctcaatgtatcacctacataacctgcgatggctcgcaccttcgactctattaactttgcctcaaagtgactttatggtccagggaagtccgtgatttacgtggctttgaagacatgatttcaaaattcaagtcacctggttcaaaagaaattgtgatcttgggtaaaaacataggcttagccaaaggaatagaagacaaacgggggttcaggccaagcagcatctcgcaagaaatggtgcatgccttcagtaatttctagcaagaagcgtctgtggcgactagcaatgtcttgttggtgaattttcactaagtgttctctaattctcacatcattgacctctaatttggatttaggtcctggattctgggtttatatgggatggaaagttcagtaggacactctatttctaattcttctggatgataaactcttgaaccagattgggacactgctgcaaggaaaatgcaatcccaattcttggaggaaattgttggaaatattttaccnnnnnnnnnnnnnnnnaccaagtatgttttattaacatcct

SEQ ID NO: 131331 - DNA, 634 bp, Cannabis sativa
ttggggattttgaaaattaggattaattttctttactgttaccgcaatttttgggttccagattaattgattatatcaaagttccaatatatatattttttgaatgtcgttgatgtgactgttgtattttacttggcttcagcttcaattataccgcctctattatctgttagaattctggattcaggcctaacattatatagaattggcgatatggttgattctcggttatataattttgaatatatatgaatgaatataattatatatataatttgtttattcttgagttggctggtcaaaatgttattaatataacagtgcatgtttttttttttattcttttcttaaagaaatcaagcagccaattttatttatttacttttccgaagcaaattttatgtataacatgttatgtggcctttcagtttgaccgtaggttatatatacattatatataatttttgttttatacgctaaatgttatatacattataagatttcagttgggtttactcttatatatgccacggtaaagttattttaattaagatattttggaaacaattaaatttaaattttggtgttggtttatgactaatattttgactaaattaattgaaacaatatgtcg

SEQ ID NO: 131332 - DNA, 2237 bp, Cannabis sativa
tttaaggataaaatacactgaagggtgtaacggtaaattaatcctgttgaccgaggttttcagcaaccaattaagtaatatatatgaaaaactataggaagtttaatgcatgagatttttacgtggttggggcattaaagagccttagtccacgagtctttgttattaattagagtatttattacagagaatgttcttggtgaatttctctcctattttctctctttgattcctttttcacccagaatcctccacccccgtctatgtgtgtttgtggggtatttatagtgtttttctgcggtgatccctaggaatgaatcacttgtctttctatgcaggcttaataggggcacatattccaagcagatacaaaataggaaatacatgacctataccgtaggtatcttaggggttaggtggatataatattttatcccctttgaattgatatgattcctcataaagtagccatcactagccttcttaatcatagcgtaataactgaaaaaatggggggttacaccatccgtcatatcgtttatggtggtttcaatacgtcttcccccatgcagcattaaatgtgaggtgattgttcaatagagttcagtacctcccggaatcgccttagtatgtccttggcctccgggagcgtaaagatccttctcatgtctcctccgagagacaccttcacagaggcactcctctattgtctaagacttagttgattactttaaaagttggtcctctcagctccacgtgtcatccttatccaggcccacgtattttgggcaaaatcaagggcaacatttaccccccaagccttgtttggtggagaataaacgaggcttgtttggtgcctccgggaggctcttcagtttagcggcacgtgcttcaagcgcgtgggctgtatttatgacagccatcattaacatttatttccttttgtaggcaacgattctcttctcgtccattaatgatcaggcgcatttaatcggtgtcagaaaaggtactcaaacgtttttaacagccctggtgagcattcatcccaaccgttgaatttgcagaatacaaatcgattacgattcccaccatacgatggcgcctgatcacagctgccttgcacctctcctggtctataaaaaccaatattcttccttcactgggttactttcacaactttgccatttcatcccaagaatactttcgagagaaaattctagaaaccatagattttttattgctatttctctgtcgctgtcaatctgcgttctaccgtcgatcaacaccaacccccagttttcaaccttcatgtaagtcttctgggtactttctgtttttgtcgttcatttgcatgttagggtagaacttttggttaagtgcttgatttctggaaaatagctttggcgaaaatggtcgcatggtgcatataccctcttcttatttgtgttctattacttctctttcttctatttttgcaatcgacccctctgtcgaaagattacttaggatatacgacagtttttgttcccacgttctgtgtttttcattctccctctgctttcgttacttttgagatatttgcacctgatgtttacctaggaaaatccctagaatttccatatttggcaaacatccggagggggcctctttccagcagttaaaggaccccccattcccttttttaacactagggtttggtttgggggctaactccttcatttttccttctacagaactaaatgtctacttctgcgtctggaaccaaatcttcccgcaaggggggagttactcttgctaccctggaggaagtgatgaagggccctgtcgttcaggagaactacacctgtcgatcgaatggttgtgaggtggacgaacttcgctcgacctttacttgtgcctaccagttggaaaagatcgtgaccgttgctggtatcaagccatctgcttcttgagtttttcatcgcctgcctcgagaggaagagacacccaaccacaactatggtggtttcggagcttggagccagacccacctcatgtcctgagccattctcccgcttcaagattacttaataaactttttaggttttgttgcccttgcgccttaccaactcattccccaagcgtaccgcctacttttaggcttatttagtttttatgtagctcaaggctgggcttcatctagcccgcctaaaattttatatttttacgaactcgtgtctgtgttgggttttatgccc

SEQ ID NO: 131333 - DNA, 514 bp, Cannabis sativa
  modified_base (133)..(143): a, c, t, g, unknown or other
aaaatataagcttaaacattaaacggtacgataagcctctatacataacacaaacataaactataactataaacaaattactaattcaaaaatacaacacattaaaaaactcgataataataataataataannnnnnnnnnnataataataataataaatatatttgtctaactatatataattaaaataataataaaactcaaacataacataaaatatttatattttataattaaaaaaaatataaaactaaaactatatactaatttactttaagatttttaaaacaaaaaattaatatttattatatcattctagtctaatgtaaatcatatacattcgatataagtcaactttagacataccactttgtcttagtgtaagtagactacataatcgattatcacgactatataaattcggtgtactgataaatctcgagactaaataaatttaaagcatataatcataattatttttcactgtgatgatatcactataattgtaaataa

SEQ ID NO: 131334 - DNA, 904 bp, Cannabis sativa
  modified_base (850)..(872): a, c, t, g, unknown or other
tcttagactcatttcataagaaatgatggctcatgtacttcagtgccaattatctcgtgatttgtgggttttactagagaatttgttcaccacccagtctcgtgctcgaatcctctagctatgatttcaccttcaatctctcaaaaaaagacccctctctatccatgattatatccttaagatgaaaactctggctgacagtctcattgctacaggtcaagcatttagtgatggtaatctcattctctatattctaggaggtctcggacccgaatatgactctgtccctatcaatcctaaatccaagggggatcgcatcactctctttgaagttcagtttcttctccagagccaagaatgcgaatttatcagctaaactttgttgttgcctctcctgatcttactactctatctgccaacttgttatggatttttctacgcaagtgtacgtatcgatttcaagtaatataatattaagtagagtatcgttccccagagaattgtacttaaatactaataaattaaattcttaattctatctaccaaaaaaaattaaggaataatattaaaatctaaagcaaataaaagcaagtaatttagaataaaaaaattaacaatgattagagtttaacttcaattgtatctatcctatatagcctaatataacttaattcctaaatatcaatttctatgcaataagaagtttactaaagtaacttatattcagactaggatatataaatcttaacttatatgtaagttttgtactcgtgataaatttaaacatataagaggcattaagttaagaaaccataaatgctatctaaactacataggtactctcgtcctnnnnnnnnnnnnnnnnnnnnnnnactatagcataatcaacactcacttcttagat

SEQ ID NO: 131335 - DNA, 963 bp, Cannabis sativa
tctgactgtcttattgagcccaatattatgggctcgtctgacttgcatattggacttctcaaaaatatcgcaaatattaagcaaatttttacctccacagtgataaagtttcttttcccgaacaaaatttgtcaagcgcattgttctatatgccaccaatatcatcaaacttcagttaggtatattttttcttacttttcgttcaaagtaaaatattattatataattattatatttttttttactttttaatgtgtgattgtataaattcaaagtatatttagagattaaaataatagaacaatcatgattgaacttatgcaataagtatatatatatattatatatattacttaattttttataattgaatataatcttatttaataacaagattttttttctttttttgtaggttcattcgttaccaacaaatcattatgatctgtttagagattttaaaaaataattaaaacaataaaaaagtactatgtaaaacattatttactagtgcaaatttttttccaatgattttatgacaatattacgaataaaatatattttaattttgtggtttacttttggacatattttttgtgctctactctttcttttttaggataatttcatatggtgttaggccatctccaatgaaacggcaaaaaaacttatatatactgttattttttctctaaatactccagccacactgcaaaacccaacctattttcatggagttctacagtgttccattaataatggtgggtactgtagaccacagtatatatattttttaatattaaataatatattttaatatctactaatataatttataattagatttgataaatatttaatattaaaatattcttattatataataaaaaaatatattttttagtgtagatttaacactaaatatgagttttagcattggagatgactttagaactttttagt

SEQ ID NO: 131336 - DNA, 1016 bp, Cannabis sativa
aaaaaaaaaaaaaaaagtggtatagagaaaaaattgagtcctataattattatttaaaaaatcaaaatattactatttaaattttttaaataaatattattgagattttttttatttatatacataatacaatttcttatgaaattcaatagtattttttttttttcattttctaagtaaatgacaaaactggactttagtttcgtggtagaaggaagtgggacccttaaaatttgaaaatttaaatatataggattaagtttgtggaaaatacttaggtaaagccacaaaaaatttgtacagacattttttttaattatgtatcactttattattttatacaaataattaattaattctttttatattattttttttttttgaatcatttggtgacgcctaataagaaaacttactaatattcaatattgtggactcttaagcctcaaatgaggtgttttaaatgagattttttttaaagaaacacttctgcaatatttttgtttgatatatagtgaaacttggggattgaacattataaacacactggacatataaaactaaggttttaaatatatttggttgtacaattaattaatcaaatagcactaatttttttaccgcagtttgtatgattctgttagtatggcttttgataaatattattcacttgaaggttacttatgttgtatcagtatacatatcatttgttcaccaatcaaaatgcaattaaaaaaatcctaataatctatcacgcatcttttttatcatctacatataaaagagagaaagtgacatacatacacatcacattgatcaaacgaaaaatattgcagaagtgtttctttagaaaaaaaaattctcatgtaagacacctcatttgaagatcttttagtaaataaagcttaagggtcaatattagtaactttccttattaggggtcatcaaattattcaaaaaaaataaataaaagtaagggacttttcatttttacatttcaaaatagtttttttttt

SEQ ID NO: 131337 - DNA, 2030 bp, Cannabis sativa
aattgattataaataattgaaaaattaattaatataaaatatacataaataaatcaattacaaatataattaattgtgtaaatgttctaaataaattaataccaaaaaatcacaaaataaattcaccttacaaaactataaacttagaaaatattatatacacaaattattgttaatataattaaaaaatgctcgttcactgtcaatcatataaagaatttttaatagaaataagtaataaaatataaaaagtaagattgacataaaattatttaagatttttaaaatgtgagtgaaattaatacaattacaaaggcataattgacgcacaaatcaacttgtcaattactaaaaataaaaaatctaatttataaccaaaaaggataatttaatgtaaaataatttgaaatgaatataaattttaataaattaaaatatagaaagtaattacttagcttaattttctccaccatttaattctatcatgtgcatggacttccggctaatcaaaagattagcttaaaattaaaattaaaaagtaacagctaataaaataaatcttaatagaccaaaaggttaacttaaaattaaaaagtaacagctaataaaataaatttttttaaggaaaaaactaaaaagtaattaatttattaattttaataaaaattgcattttgaaatttaaccaattacattttgaaaaagctggaaaaaaaacgtgttacaattaatatcaatgaaatttaatataaaaagcaataaattctatttatataagaaaaaatcaaatataaaaatgaaacaaatatacaattatttctccgattactatcattgaatgcaatgtcatctccacgcctccgcctaaagtgagccaccaaggacaatagccggtttgtgttgttgccaccttcgttttatagataaaatattaggaattgcttccggtcacgaataagtgttcgacataagtaaatataaaattgagaaacattaaccactttcggatgtcacacaaaagtattgtaaatacatatgtaaacttgattaataataagttcacaaaactatgcatataaaaatagcattgcagtgaagggataaaacttgaaaatcaaagagaaattaaaaggatagaaaacttattgtcattgattatacgaccaactgattcgagcgactccaaagcgacaaaggtgcctacttcaagtgaattagggaggtccttgacgtagggcgcatgagatcacttaatggaagactaaggtctccttcttcaactcagagtcgaactcctctcgagatcgctactataattgtgcatcacagacacagatttggtggtcaaggagtactggaaaggtctgccaaagcaccaagtattggtgcggtcggcagaagagaaccgataagattgtgaaatttgagtgtaaatatgatccatttgaatcacaaaatgcaacttatttttaaaaaacattaaaaaacctatttaatgtttttttttatagagtaatctgaatcacaaaaagaaaaatgtcaacgtagagagatttcccgccaacaaatcagctatttagaccatccttttatttcttattaatattacaaaatcctacacgtatatcatcactaatatataaggtatacagaaaaaatcattctatacaaaatcatataaaattctactaataaataaataaataattcaatcacacacttaatatataaattaacaatatatttaaactaaatactatagtgagccaaaaaaaattgttatgaggcaaaagtgtcgcttcatatgatgaagccgtttaagattagtgtgcaaaaaatagctattatcttgaaggggtgttaaaaaatgcgtgagacttaaccagatgcataaactactttactcaatataaattatttgaaataaaattttatacatcttaccatagagatcactttcttctactttctcctcactacaaaaaatcttacttttatatcacaacgaaatttgtgactaaagataaaaaa

SEQ ID NO: 131338 - DNA, 1117 bp, Cannabis sativa
ccttttggtaataattcaaaaatggtctccgttcaagacctgcaagaagccgctgaacgttactctgccaaaaaagctgctattcacgccttaacccaaagcctccaagctgaatgctctgagattggaggttcggaggagaaagggacgggaggcaatctttctgtaagtagggagacaaatgaggggaacaataatatcaaccaaagtactaactcgattgaggagttgaaagggaccacctctgttgatggtggggtcgacgaaacggaccacgtgcgaaaaaggaggaccgacccattttgcaacaattctattcttggaccacaggcccaataccttgattggccatccaaggagtgctgggctcaaccaaaggcccgtgagatgatgaaaggggccttaacaattgataagttttttagagaaccaactctatttaaccccatccttgacatagaggattttagagttgaggaacatctccatgggcctaggaaaaggaaggcctctgatggaattgtaattggtccatcttctcaacccaagtacttccctttcagcccaaatgaaagaactaatacaactaaggctcataacaacctgaacttggacaatcttaagacacccactggatccaacagttcgatccccaaagaagatgttgctgccgaagagactactcaagagatagctacgagtttctcccctggctctaacgaagaaccaactccatcgagacgcagaggaaaagggagaggcggcattcaaggtacctccaagaatctggacacaccgaaaagaagagggaggcctccgaaacatcaaccgcctcttgcggccacgcccaaatcgtttaaaggaggaaaatcgggtaaatccagattgagagggcaaagttcaacaatcaatcattgggaaggaagagacttcgatctcaaggtaaacctggataaccattttgtcataattgagcaacaccataaacccaataccaattgtaccatcactgagatcaatgactgcctgcgcgaaaacaaagggaagaataatgtggattttcggtttggggcttcggagacttgcccggaaaagtctccaatgtcgccatgagaat

SEQ ID NO: 131339 - DNA, 2186 bp, Cannabis sativa
  modified_base (605)..(606): a, c, t, g, unknown or other
  modified_base (806)..(806): a, c, t, g, unknown or other
attttattattaagaaaatatatatagttttattttatatattaatgcaggtcttacaattatatatatttaataaatagtaaattattatattgctattttattagacttaattaatttttatttaatttaaaaatatatttagtaaattatttaataaatagtagtaaaattaactaattattaactaataaatagtagtaagtttaagtccctgaaaagtgatttagcgtatcactcaccaattgtccgaataatatgatttaggggcctgtaaatcgtcgagcagctgctccactcaagttggccaacacacctgaattcgaaaacgaggtaagattaaaataatgatatgaatatgttattatatgtttagcatgcttgtttatgaatgcatgttagataacctattttaatagtgatattagtgtgcatagagatgtagtgaatattgacagtatatgttattatagtcaatagtactgtcaaacaaacgctctagactcagtaccgtgtgggacacggggataggattgtaattgggtgtacaggcgcctgattataatccaagttagaattgtgttattgattatgcttttcttacnnagtctatcgactcacagatattgtttgcatgtataggtaagggcgaggctaaggctgagcagttgtgagagcaagcagatggagattgtacatgtctgggcggttaggcctggatcgtacgacctttggggacagccagttgtattttgtctagtcgctaggcgacaatttttgtactatgcactatgaaacttttgtanatattttgtaaacgggatcccgattatatatatgttaatattttagtaattataagaaattaataaaagttttaattaatcatatttttcattaaactcgttgattagaaacgagctgcacaactaagttaaaatcacgttatcatgcctaaactagtagggtgttataatttggtatcagagtcgccaggttgtcttctgatgatcgtcacgacatttacaatcatcatcagcgatcaactcgactcacggcttagtaagcatttattgccttagtagtttattttattagtatgttataagaaaagcatgataggaagcatgttagtaccctgatatttgaagaggtacattttttaatttccaaaataagtggtaaatagtaaattattcttgatcgcgatctgaccaggctagctctttgtttcgcaggctgttctaatagaatagacactgggcaaaacacgaggagctagggtaactcggttgaatccaattgtagtcagggagttcagattccctcgaatatacgttgccaaggcagaggccctagaggcagggtacgcggtcggggagatattaacctgccttaagttacttttgaatgggaaaataagtttgtagcaatgcaagccaagatcaatgagcaagatgaagaaatcagacgcttgaggcagcatggtgctcctatagtgcttgctcctaaaatgcagatggctcctacctgtgttgtgcaagcgtggccaattgctgcagtgaatcggatggaaccattgtacgaaaggttttgcaagcaggcccttccaatcttactgggaggtcttgatgtgatgaaagtcgagcagtggctgacagttattacaagaattttgaacttcatgggtgtgactgataatgatagagtgtcctgtggcacattccaattctaggagaacgccctagtatggtgggacatggtgtccctgactcaggatgttactatcattacttgggaagagctccacgagttgttcaatccaaagtattacaacgaggaagttagaagtgcgaaaagaaaagaatttactcagctgactcaaaaggaaaatatgagtgttactaagtatacaacttagtttgatcgattggctagattggcctcgggaatcgtaccagcctacttcagcaagaaagaaaagtacatggatggatttaatccaaaaataaacatgaccttatgattaccactaacgacaacaccacctatgctgatatggtgggaaaggcactgcgagctgagggcgtagttgagtgcaccaaggagtcccgaaggactcaggttgctaatggagccactactcctcctacctctggttatggtagggggggtagtgactcaac

SEQ ID NO: 131340 - DNA, 2193 bp, Cannabis sativa
  modified_base (41)..(56): a, c, t, g, unknown or other
  modified_base (234)..(248): a, c, t, g, unknown or other
  modified_base (2133)..(2143): a, c, t, g, unknown or other
aagttcatatttaggatgtttaataaacatacttgtgagtnnnnnnnnnnnnnnnntaaaataatttccaacagatatcccctttttcgttctaataccatgagagaaatttttttcaacaatattgcaacaattttattttttggctaattaggatttttaccccctaaacttcaacatgtaccaaattatgccccctgatcttttctagtcgttaaaaatttcccctgaacnnnnnnnnnnnnnnnatttaaggacttttgtttaatttcattcaattttactccattattcattttgacaattttttcaatccttaagtccccccaaactcttctggtgaatccctcaaaaactttaatgggtggattagcccccataacaacatagagcatcgctgttttctagtaatcggattcaacttcaattttagttaggtcaagtttagcaaataccttgccctcatgtttagccggtggagtaaaaaaaagttctacaccaatataatttgccttcggagccagcttcgtccagaggttcgacaactgtttttgttgattcaaactagaaactcccatcacaggtgactgatgagaaccatctgtagacaatcgaacattgtgttcatcctgtaacaagtgaaaatccccatccatggcatccacaaactcagcaatcgattcttcattcatcaccgagtcttgcgcatcgtgaaataaagatggaaattgatcgattgagcccaatctagctggcttttggttcaattttttttcttcatcgggagagaaaatcgcaactcacaccctttttcttaaaaaaattgtaacaattagttgtaaaaataaattttttatataaatattaattgctaaaagagttttattaaatatttaaatctaaaattaattaatttaagaaaataattaattaaaatctaaataagaaaattttagttattgttgacctgttattatatgttaaaaatatgtaacaatcatgattacaataaaaatgtaacaattgagtagtcacccatatatttatatatgtgtgtacttttaatgggtattacccatgaatgagtaatattagaaaattttgagtttttatgcttaatttttttttatttaattagaaaaatctctcactttgaatttatatgggttgcagttgttccattggctgaaaaaaaaaataatacaaaaatttctttagtaaaaaaataataaaaaagttgagtttaacttaaatatttttcatataaatatattttaatatagtgtaaaaaaatgtatttttttttataattttctttaattaaacagctaatttaagcataaaaactcaaatttctcttttattattcgtcatcggatcaaaatccagtggtttaatatttttaaagttaatatttataattaaatttgtttagtacccatcaatgggtaataccaattgagaagtgttccgtttatatatatatattaaaaataagagtaatttgtggcataaatacctaagtttaactcccagtttcaaataaatacctaagtttaattttttacagtaataatacataagttatatttttagaactccgtaggtacctgactgttaaatgttaagtcattatccatgtgtcatttttttattggtatattcaaattatttttttaaaaaaaataaaaatttaatgacttggactaattaggaattgtcacatgacaatttacttaacacttaacaattagttacctgagagggatgctttcttttgtgatcgttgagagtgattttgagacggtgatcaatactctgaagggattgtcatccaattggggtattactaattatgtaactcaatgtaaaaagctctcgacccttttgactggttgtaatttttaatttatttctagaagttgtaattatgttgcccataatgtggctaaatgggcttttgactgtaaggtgacgggtatggtggatccatcctccatttctagaaacttattttgtaatgactgcgaggtctaagttttttgttgtttaatatatcttcggtttctttcaaaaaaaaaaaaaacaattagttacctacaaaagttacagaattataacttaagtattatnnnnnnnnnnnattaaacttaggtatttatttataattgaaagttaaacttagatatttat

SEQ ID NO: 131341 - DNA, 548 bp, Cannabis sativa
attttcaattataaattttttatttatgtatatataatagaaaaaaaaaataggccttttcttaaaaaaaaaaataaaataaaaatgggggtcttgtgcaatggtcaatctgtcccatacttgggccgaccctgataaaaaaaactatatttttgtaaataaaatcataaaaatatttaaaattctatacaatcgtatttttataattttttttttttgaaatattttgtgtatttagaaaataatctcacccaaacttctaatatatgtttgtcataatgatttacgaggaagtaaaagtaatttatgaattaaataatacaaacgtgaaaaatgaaactttagcaaaagtaatttatgaattaaataatacagaaaatgaaacttaaaaataagaagaatatatattttattttgtagaaaataagaagaatctttaagaataaattttgttaaattgaaaactgttgctcctaaattcgcccaatatacgtggaccagtcaagaggggacacgtggatcaaattatttgggaagaactgctaagt

SEQ ID NO: 131342 - DNA, 595 bp, Cannabis sativa
agagagagagagagagaactgaaattatacaaaattaccactagcttataaaatattattcttattacattcatcaatcaatttaaataagattaagtacaaaaaaattaaaagaaccctaatggtggcagtaagcatcggctaccaactgccgagttcccaagcctgctgaaggtattttagctccagtattaagctcaaaatacaaaatatcattcttcactatattcattttcactactctgagtattcttgtccctctctctcgatgggtatgatttgtaaaagagtagagccgattggagagagagaaaatagcgtttagggttcgaattctcattccttttatcttaaatatgggatttgaaataatcttttacctaaatatggcatatccaaactcatataaaagcccaaaatagaaaaaatacaataaaaattacccaaacttaaaactgccacatttaagtaacaaactttttaaaacccatatttcatataatttaggggaattttcataaatatggaaattgaagatatagtttacttttttatggtataaataaataatactatagggttatggatttttttt

SEQ ID NO: 131343 - DNA, 617 bp, Cannabis sativa
aatcagattagattgaaatgggttttatttagggcataaaatcccagcatgattgcatccctactattaaatcgacccacataaggtgagtgagaaacaaaaacattcagcgtcttcactaattgttaacaaaggcaatctgatgccaacatattcgaagacgtgacggccccaaatttagactacattaacctagtgaactaggactaatggtcactaagatcagcatccctattgtattaggtcatttcaagcatctcaaactccttggataattttgtgttttaaacttgcttggcacaaggctctcgatcatcttcatatgagtctaacttgcccccttatgtctcttggccaccttggccatttatattcttaaggctaccaactcagtcgtgatcctttcactaactgtatcctagatgagttgtttaccctcacaccaagtgttaatgttattctgcatatcacctcattaggggaggattttatggttttgcatgccttctctttgagaattagtcatatctcttaaatcaggttttaggacatactacttggggccttcattattccactcattctgtaacaccctaactaccataggcgtattacgt

SEQ ID NO: 131344 - DNA, 622 bp, Cannabis sativa
taataggtcacaaaatttcttccattgtttatcactttatcacttagccatttaggcaaaatgtatgttaagtcaatattttttttttccttagaaaaaatgttgtcatgaaatctttgttactctatttatatgaccatataaaatcttgagaaaatgagatgatatacaactcagtatatattttgctcatagtgtatctgatccacactaagtgcggattttatattttagatacaattcaatccgcacaatagtttaaatccaatcaaattcattccgtaaaagtatggattggatcgcttattttagattggttattttttaatagtaaattatttaatgtttattaaaaagtattgttttcacataactaatagcaaaataaaataaattattgttattttatgtctttaataacaaaataaaacaattaaaataacaaatattaattttaaaaaaagaagaaaaaaattgtatgtaaaaagatatgcataattttattttaattatattctccttacatataaaaataaaatatacatttgatttattaagttttaaaatatattgtaattttttaatgtgtggtatggattggattagattggatcggttactt

SEQ ID NO: 131345 - DNA, 1352 bp, Cannabis sativa
aaaactgtattgactttgtacacctgttccttcttacccagataaaatcatggaaccctactgttcttggtaatccatccacgaagtctatggttgcctcttcccatttccactcaagtattttaaatgttgaaatattcttactggttcctgatgctctaccttgatttgctgacaggttggacatttgacatatactccacaatgtcacctttcattcttagaagagggcttaaacatcatgatatatcttagtttctcctgggtgtaaagagtatggtacaatataagactaatttagaactttctgttcattatccttattgactggtacacgtaccctatcctatatcataaaatcccttcagacgaaatcgaaaagtcctttgcggatctggttcctagtctttccttgtacccttgaaattcagagtcaccctgctggcccattttaattctttccaatagatcaaactacaatgtgatactaataagttctccaatcacgaactcaatccctactctggttatatttccatcaaactttggtgaaatctctcttcttcttcttttttttacaagcttgtcctagacctcttcgacctagagcatccactatcaatttgcttgaatagggtgctagagaatcttacagttatcatctttatctaattctaaccatcatattaaatccttacaaatgaagaagtacttgaggcacttgtgattcgtataaacttcactcttttcaccatacaggtgatagcgctaaactttcagtgcaagaataactgctgccaattcaatatcatgactggaacaccattgttcacactccttcaattgtctaggtgcacatgcaataaccttcatggattgtatcaatacacaatctaatccttgtttagaagtgtcacaataactcacaaatttctccttactgactggccacgttaacactaaagcaatagttagcttttgttgcaattcttttgaattaatttccactaaaggcatttcttcgataaatattccataacatcttgttaattcttgaaaccactaatctcagttacagacctgggttgaagccaactctaaattgcttaatcattactaaatctatcaaaatactatctatgtccacctcatgctctaagaaacttatttagggctggaaaaattcatatttcttgtatttagcacgaagctttggctcccaaagacattacaagaccatccaaaataggcctctcatatgcctcctttgaattgcaagaataccattaataaagacattcacaaacttattgggattttatgccctaaataaaacccatttcaatctaatc

SEQ ID NO: 131346 - DNA, 819 bp, Cannabis sativa
  modified_base (780)..(794): a, c, t, g, unknown or other
ttaatcaacatacttgtcagtagatctaagatcctggtaaaataatttccaacagatatagggtagggtacgggtataggtgtaccctacccgattaccctaccctataaccctacccgattatatatatatatttaaaaactatgcatttatttcaaattttaaaatatacaaaaaaattaatttaatatttgtagtggccaaaaatcgttctgagcccaacgatcgaagtattacggaagcccacttataagtcagtaataataaggttgtaggttgatgagcttacatgggttacacccaaaccatgtctttcgggtcatacccatatctagccccccaacctatgataaagttcaatcctaaactataacgataaggttgacacgtggaagatgaaggatattcagttttccaactaacccacaaaaggaacgagcttcactgacataacggagggagaagactagctctctcagtgccacgttgaggagaatacatctagtcttcctctaacctagaagatagcgcccatccctggaaaagtagaggaaggtcaattctctagggatggactacatttcaggaactaatcgttctcctaagacataaatatgtccttactcggacttagcgtgggaagattcttggaactattaaaatgataaactaatattcgatcactctctttctctgactttacgacttgatttacactttctctacaacgtactctttctcactctagtgagcaaggtattgttggaaatattttaccannnnnnnnnnnnnnnaccaagtatgttttattaacatcct

SEQ ID NO: 131347 - DNA, 850 bp, Cannabis sativa
aaacccgtatgctatattaaaatattagtaattctgcttatttcgcataagagattataataggagattgtaattagtattcttctgttataaataatatattaatatttccatatatttaaattaacttaaatttaatataagttcaattaacttaaaacaaacaatttgcatatttatatatatttaaatgaatttaaaataaataatatttatatttatatatatttacaaaaatattaatttaaaataaataatattattatttatatattataaaattaacactattaaattttaaaatatttttatatttttaatacattctgttaaatcaacaaaaattattaaatagccacattttatatatcaagataagggtgcttctacactacatcccttaatggttgtactgatgcaatccataactgtttcggtatctataagaattttttagtctaaatttttcatatatagtcgtgttaattaagatattgtgcaaaattttgagaaatttaaaaaaattaacaatatacaaatcaatatttaaactgtctatttcaaacacgtataaaattaaaaagtcacgcgtgcaacagactctttaaatattgttttgacgtgttaaatttttttaaatttttcaaaattttaagatatcttaaataactataatgtatatggttataaaaaaaattaataataacagtacatcaatatacctatttaaagtgagtttattgtagaatttttctaaataatatatatcacattttatatatatatatgataagactgattgttattattagaaactaaataaagggtattaaaggaaatattttaatta

SEQ ID NO: 131348 - DNA, 753 bp, Cannabis sativa
taaaaatgccatatttttctaactttgttatgaaatcccatatttcatgtaattttcacttaaatttatctaaaaagagtagagagattggaagcccattacccacactaatgtgtttcctttttttttcatattcaaattaaatttcaaaaaattaatggctgaaagtatgtagatcctatagttatatggtgtgtacgttagattaattcgacattattatatgtacttcatgttttcatataaaatttcttacacaataaacatgaaaacgacagcttaaataaatacaataaacatgagaaacgacagcttaaataaatacaataaactccatagatgaaacaacaaaatcatgacacaaaatacatcaagaattaaaggaaacacttaagaggaagatattataagaagttgtttcactaaattttatctcttgatggtcaatgacaggtaactggaacaagttttagagcagagttcttatgattagtaagcccaaatgcctcctccatatcaatatctgactctctcattccattaggcaatttccagtcaaaactattcaagagattggcaagtgtgagctccaccatagtcattgctgtatacattgcaggacagcctcttctacctgctccaaagggtaataactcaaagtgttgacctttataatcaatggaactatcactaaatctttcaggaaagaactcttttgggttttgccagtacctaggatcacgtcctattgcc

SEQ ID NO: 131349 - DNA, 1096 bp, Cannabis sativa
tagcaatgtctcacgcatatttgttaagggcacccacatttcatcactctatgtctctaaagctatgaccaccctcccttttagatggcaaatataatttcaagcaagttgtcttggccttgaaaaatcaacatcaccttttcaaagaaaggacctgcaaatactattaatttttccaagaatgtatttgggtaaaattatgatttgggcctaatatgtgtgaatagacatcaaaatagaattaatcaagatacacatgctcgcataagaaatatgctttgaactccaaactttgatttgagctaccgtttttatcacactcagctttagaaattcaggatgcacaaatcgaaacaccaaaatatttaaaaggaaaactactaagagtgaaaccagggttatcaataatgaattacacatcagagttagacataccagagcagtaaatggaagttttacttgtattagcttgtaggcctgaagtatctgagaagcacttgaaagctcttagcaaaaacaaaactgactcaatgtctcccttagaaaaaggaagaacatcatcagcaaaagaaagatgaataagttgattagatttatatctcgagtggtagccaaaatctttccttttagccacttttgagagcaaataagacaaatactccattccaaggacaaaaaaaagaggggacaaaggatctccttgccttagtcctctcttagcagggaaaaaaccatgaagagtaccattgaaaaaaaaaaaaaaaaaaaaaaagagaattgaggagtggtcatacactctatcacaaggtggataaatggatccaaaaacttaagagcccgtatcataagcttttttttaggtctattttaatcatgcaagaaggagaattcaacttcctaccatagtgcttgacaaggtcttgacaaatgagaatattatggccaatgtatcaaccatgaacaaaacttccttgattctgcgcaataaaagttggaagaatggatcttaaccggccacaaagaattttagtaatagttttatagaccacattacaacaagcaatgggcctaatgtaacgcccgtatttaacattta

SEQ ID NO: 131350 - DNA, 663 bp, Cannabis sativa
  modified_base (601)..(606): a, c, t, g, unknown or other
acctaaaaatgccatatttttctatttgttatgaaatcccatatttcatgtaattttcaccttatttaatggcccatatttagggatcttgaatcttgggctcctaacaatcatggcccatattgttgggattttcggacgagattgagagtttaagtggaatttgactctctatcgaaataatacaaaaaatgattgtctgcaaatttatcctaaattttaaaattaagttaataaatgtttattttttttaaaaaaaaataataaaatagttaaacatactaaatcagttaataaaaattataaaaatatgtttattatatatttttttaaaatataataagtaaattaaactatataatattttcaagttttaaaaggcagatcaattactcttcattagagctatatctcactctatatcttagtcatgtgtctgtattttagtttatatagatgatatactcatcacggggaatgatgataatcttgttgagcaactaattcaggagttgagctctactttttttcttaaagatcttagtttagttggttactttttggggaattcaggttagggctgtacatcggtcggttttgnnnnnntatcctatatattttctaacctaatttaaagttcaggttgctaaaatttaagtgcaa

SEQ ID NO: 131351 - DNA, 1311 bp, Cannabis sativa
  modified_base (848)..(863): a, c, t, g, unknown or other
ttttcgggttatttcggtttgtaatttttatcgattttttcggttcggtttggacggtttacaatttttttgtacagccttactcgctagggtttatgtgaaaactaggtccactatatgagtaaatacatgaaatacatgacttaaggcccactggcagaagtctagctcgtggggcgagggtttccatacggatggggaccatgcagcctggggcaggtgttgtgtgggcattgctctagtagacaaagatgtgaggcatacaccattggacaaaaaggaggtattccctttggtggtacgtgcactaccatgttctaacatatgagacaagatttgattcagtgggaccaagcgtcaaaaggaagccacgtcaccctacaaggggttctgggggcacctcttggcattcccattatggatgtgtcccaatgttcatccagagggcttcatttattttgtcttcaagaaagttagaagcctttcggatccgaatgagccatgtcttcggagatggccttctcgggctttagatgggcttgggcccatgttccgtctaaattggaccttccatcgtggaagggcttcactctgggctgctccagattagttacactttgtaaatgctgttagaactattttaccaagaaaatgagtcacatcataagcaaatgatttataatccttctatccaatgatatactaactaagcaatttctaatgaaaagctaagaagaaaaaattaaaggataatttcgaataaaataagaatccaatgatatcccgtttaggcaagagtcaaagttattctcattttatagatttttttcattgtttcatattgtaannnnnnnnnnnnnnnntcatctttggatgtacaactagatgttgcatttacaaatacttatctgccgagatctaacacaattatatttgtctaacggatgacaatcctttgttttaatgggatttgtcccattaaaacaacaaactaagttagaccaacaatgaagattcaaaatttatactacagcattaataacagaaaacaacatgatttaatataaattcatacacattcagaaagtatcatacattaagcaagtaacaaagacatgtaaaaatacaaaaaactatcatatcttaaataatttccaaagttttcaacaaaccaatacagtgtcccagtagatgagagtcaaagatatcattcatcgaatagagtagtgaactcatctaaaatggacactatactagcaaccttttattcgatcaaaataagaatctaacgttgtcccggtaggcgagagt

SEQ ID NO: 131352 - DNA, 1241 bp, Cannabis sativa
tggagttaatatagctactggaattgatccttggattcctagttataccaatttcaaacctgttagctacacaggtccacttaccttacctatttccactttcaactgatgaaatggaatggaacatagatatgttaaatgaattctttcagcctattgatgttgataagattttatccatccctttaagtttttttgctgcccaagacagattaatttggcatcactcttcctctagaatttataatgtcaaatcgggttttcatttagacacatccttggacgagcagcatatctcttcccctgcaaatccccacggagattggtggaggtatttttagaatctgaatttgccaccaaaagtacgcatctttgcttggaaagttttccacaacattctcccggtagcagctgccctttttaagaaaaaaattatagattctggagcatgttcactttgcacttctaattggaaatctataggacatgctctttttggttgtaagcatgctaaagggatttggaaagattcgaaattttctctagattacaacaaagctcagtcaatgttcaatgaagattacttgctgcattatgttgggaatttggtctgaccgaaataatcaggaggattttgaattactcatctgtattatgttgggaatttggtctgaccgaaataaaatttttcatggtggacaaccaagggcacgaccatctattatggtttatgtaaccaacttccatcaagatttcatccgtgccaagttatccactgctcctactgctattacagagcagtctcaaacacacgcagccaccaatattacaatgcagaaaggagttccatggtcaccaccagcaatcaatgggtttaaattgaatgtggatgctgggacgaatttggagcagaaaaaactgggtgttggggctattatccgagaccatgaaggcaatgttgttgcaaccctttcaaagattgtgcagggaagctttcggtctgatgaaatggaagcaaaatcactcttccatgctctcaattgggcatctcagtttcaatatcttgtcacgcatatagaaattgatgcatcgcgagtttcaacagcacttctttctaatgctactgatttatctcgtttctcgaatcttatatttgatgttcgttgtcttatatcctcttttcctggtgttttgatatcccatgttaaaagatctgctaatcaagcagctcatgggttagc

SEQ ID NO: 131353 - DNA, 1397 bp, Cannabis sativa
cagaacagatgttagagacaacaaatactgaacaaaagcaatatctaatttgccacacaaaacataacacttacagatgtcaaaaatgcttttcttattgggggtctaaaagaagtgcttatgagtcatccacttggttttgaaaaaggttttggttttggaagagtttgcaaacttaaaataaagtccttatgtgggcttaagcaatctcttagagcctggtttgagctctttggtggagtgttgaggctccatggatgtacttagagtcatgcagatcatgtcatgttttataaacattcaaaggaagggaaggtagttgtattatcgtgtatgtggatgattatgttaactggggatgatcatggtgaacttgatgagttaaaaaagaaacttgctcaagagtttaagatcaaagactttggtactttaaaatactttctttgaggaatcttcgttaagaaatgtaagtatgttcttgatctgtttagagagtgttatgctagagtgtaaatttgttgaaacacccattgaaccaaatattaaattgcaacccacacaagcagagaatgtgaaggacctaaaatgttatcaacgtttagttgggagactgatttacctatcatacacattgccaaatatagcagtctcagtgagtagtgagtcagttcatgcacgcacatgaacctaaacacttcgaaactatctacaaaatctaaaagtatctaaaagaaatacctgaaaaagggctcatgtttaagtcaagaggccatttacaaattgaagcctacactgatgcagattagactgggagaatagtggaaagaagatctacattagattattgttcgtttgttggaggtaacttagtcacatggcagagttaaaaatagaatatgattgatagaattagtggtgaggctgagttaaaagttgttattatgaataagaaggttacttgacaagttgaaggtatctcaagcatgtcctatgaaactatatttcgataacaaggctgctatcttgattgcacataatctagttctgcagataaacatttcatcaaagaaaagataaaggatgaattgaattgcataacttattttcataccaaagtagtagatatttttacaaagggattgttcagaaatcagtttgattttctgaatagtaatctggctataccaacttgaaggagagtgttggagaaaatcaaattattttagaaagttttctaattctagaatgattctttaaagctataaaatagcttatttatttactaattttatttattcttgaaaagtaattaatagggtgataacattaaggcaactatatatgtgcatatattgtaggggatatttgcggcaaaagtccccaaatagttcacgttg

SEQ ID NO: 131354 - DNA, 700 bp, Cannabis sativa
ctcatttaaatccaagaatgatgcatctgcggtgctatccaaacaaccgtgattttttaacgggggcttttgatcttggaggcgtggccggatacgggtcagtggaaggactttaaattagacaaaatctcatgctggattaagatgaaaggaatgcttctgaagatgttcactcaggaacctccggcgtttaggtgagatggcaggagagattgaggaatttaagtggcataatgatagaaggatgtttttgaatggatatgtccgaatgcgtattgaatttccattgaataggagtttgtttgttggccgttttattccgagcgaaggaaaacatcattgggttcagatcaaatttgagaggctttctatgctttgctatggctgtgggaggtggggacatgagcagaaagaatgtgataagctggtggtaatggagaaggatgtgcagggccaactggtacctaaatatggctcgtggttgaaggatgatgaccctagttcgaattgttttgtggccttcaagcaagctcaattagccgctgttactgaggcgcatggagtagtcgagatggtaggaggtgcgagatcgttgagacttgatagggacaaaggagatcaatcttttgggaactcggatggaaggtgttgcgatatttagcacacacaagtgtacgtatcgtttcaagtagtagactca

SEQ ID NO: 131355 - DNA, 676 bp, Cannabis sativa
tatttaatatatatatatatcctaatttttagttacaataactttttagctttaattttttatttaaaaaatgaatagtatcaatgctacaacgtaacatccagggacggagccaggattcaattgctagaggggctaaatttaaattttagtatcaaacaaaattttcattacacataattatatattatactcaatattaaaatttataacacggttttttttattttttttatgtcaaaaattatctataattaaaacaaaaattactctaaattattcaaattctgaaatattttattaacacacttttaatcaaaatacacattaaattttaattttttataaagcaaatatatatgtataaaataattttcatattaaaaacttttgacactaacttttaaagtaattaaagatgaaagttagcaattagtaaatgattttgaaccaaatgtgtaaaaaaacataaacaataatagatgttactaatttattggtaaaaaaatataacaatttaagtattagaagaaaaaaaaaatccattaataaataattgtcttattttatttacattttctatacatataaatttaatttgaaaaattaatttcttttaaaaaaattatttcatattttatttttattaaactacaatatatttctttttaataaa

SEQ ID NO: 131356 - DNA, 739 bp, Cannabis sativa
aatataacttaaaaatagctaattaattattaagatgtttataaataaggttttagaggtaaccaaattatataattttaaaatgatttttttttacgttaaagtaactatttagtttcttattagcatcataagtaaccaaaatgttacttttaaaaactcaggaaaataataaaaaaaaatgaaatttggaattaattttgtttcaggcatattattttagaattaaggtatatttttaatgatgtggcaacgtattattgtaattgagatttattaaggtatttttgtaaataatttatattttctatataaaattgaaaaaatccaaaaaaaaaattaagtatgaattttggcccactaacttcggcaacaagttatttcacaaattgatatctaaattttttaaattattttttaagatcacatatcatttaactaagagaacaaaattggaatttttgaaatcagataatcgagatttatgattgttttagtgcaaaaaaatggactttttaccactgtaaggatacggttaaccgtttctcccaaaaacctgtttactgtttggcaaacactgaatcgaatctcccgcttgcagtctcatttttcgtgtttaacagttataagcggctatatttcactctaacactctataaactcaatttttactcaaaaatttaagttgactgagcatttatttcatataccaaatctattcaagtgattttaatgagct

SEQ ID NO: 131357 - DNA, 651 bp, Cannabis sativa
  modified_base (606)..(606): a, c, t, g, unknown or other
ctccttgactaacactaacatgtgtttagctcaagagttaggacaaagtatactaactaaaccttttaaggtcaacacaatctgctaatgtggcaaaggtattggttttatgttcactcaagtaacaaaaggaaagctgcatagcttaattttaccctttgtgcactgaaaatacacgtttattaaattgtgatccaaacaaaaatgtggttcactaaattgaccgaaaaggaagttagaatcaatttattttatttacatattcgaaaaatgctttaatttgattaaattgagatgtaattatttattatttattgctttttaaggatgtatttgtctttttattttttaattaataatattaaactaaaataaaataaattaggaaagaaattacaaaagaaaaataagttaagaaaggggatgacattccatatagaaatgggggagaatgtgttcttttcttttctcccaaatttatcttgccccactagtttctccaatacaaaactttggattcttttaaaaagctttaggggcaggacagctttgttggtcttaagttggatggtacatcatggagcgtatgttgggttttatgccctnaataaaactcatttcaatatattcagatttacttattaatataga

SEQ ID NO: 131358 - DNA, 1219 bp, Cannabis sativa
ttttaaaaaaaaaaaaaatattatcttttttttttttataaaaaaaaaaataagaaatattatccttatagttggtaaagaaactaacaaccaaattttatggtggaattgatatttttaattaccactaatcaattattatacatctgttgaaaagattttaattttgaaaattattatgagttttgaatttttaccaataatatcccccaccattccatttccattatcttcgtataaactacattctaatagtttacaaattttcttcaaaataaataaataaataaataaaagtaagaaagaaatagtttacaaatttgtatacctatgtaatttatgtaatttttaaggaaatgcgatgtatcaaattgtatttattaaagaatattgttattgacaccatctataaaaaaaataacgatattgacactaaaaaaagtgctaaacaccaatagtaccctttaacatttctttttattaaattatgtttggttaggcataaaataaatataaattattagaatgacaatcgaaatcaaagggaatcttaaaattaataggagtaaaaaatttaatatataattattgatgttgatcacaaaaaataaccaaccatgaagagatatcaatacaactaatataagtaagagtttttcttttttttaaaaaaaattaaaaccgtaacttcatgaaaaatattaagtacaaattacaaaatacataaaatacattaattcggaagacaactattccaaacatcctcttgaatatagtcctcatgttctcctaaaaatataatgggataatacattcaaatttttaagaatactagtgaggctttatgtgctccccacgtggatagcatataagatgtaaaatattgacattataataatttacttcatagtaatttaaggtgacaaaaatttttaatgttgcaacatgattcatttcaagttgtaatagaactcaaaagattgttaaattgttcctaaattgtggcctatttatttacatattcattccatctagtagtgatggagctttcaagagtggaagcctataatatagtgttccaacaaggcccatttagtatttacatatgtattccattatggaactttcaagataattttcaaaagagtaacaaaagagcaatcttatttagaagagatgcacacccaagctttccactgcatctgatcttcattagaag

SEQ ID NO: 131359 - DNA, 545 bp, Cannabis sativa
aaagtaaccttgaaattcaggaaacgcaaaagattccctatgcatcaactattgggagtctaatgtatcttcaggtatgtacgcgtccagattttgcgtacattgttgggatgttaggcaaatatttaatcaaccttgatgtggaccattggatagcagccaagagggttatgaggtttcttcagagaacaaaagatgacatgctcacacataggaaataagatcatttggaggtcataggatattctgattctgattttgatggatgccaagatagcaaaaggtttacatcaggctatatttttctgttggctggaggagctatatcttggagaagtgtcaaacaaacacttataattttttccactatggcagtagaattcgtagcatattctgaggcatcaaattagggaatatggctgagaaaatttatcactaggctgcatattttggagaatgtagaaagacaactcaagttattttgtaataataaatcagcagtgttgtatttcaataacaatgggagctcatccaagtcaaagcat

SEQ ID NO: 131360 - DNA, 558 bp, Cannabis sativa
ataataataataataaaaagcagccaaatctcacaccttttcatttttgttgcacccgataggttttggttgataagtgacatgttggatctactcaactctagctcttcactagtccatatggcgtgaaaacccatctataaatttataaataaattagaaaacaaactcgattctattttaatgataattaaattataaaattatattaaattttaaattttgatattttttttgttgtataatcattttaataatacaagtaattattctactaaactttttttttctcttaataacataaaagtatatattgtaaagtcttaattattttaaatattttgaactcaataaataataatttttaataaattaatttattataaatatattattaatttttaatattcaaagatgttatcattaacatatttttttttttttaaaactgtcattattctcatttgtaattatttctattctcaaagtttttatcatcgacataacttacttgtaattgttaccgggaaatttgattttctatacttagaaaatcaa

SEQ ID NO: 131361 - DNA, 1025 bp, Cannabis sativa
  modified_base (445)..(453): a, c, t, g, unknown or other
  modified_base (973)..(978): a, c, t, g, unknown or other
caaattagagtttattcttgaataaagtattcttaaatagaggttctactgtatatacataggcgggtgactaaacaagtgttattgttactagaaacatatatatatcacgacaaattggttttttttggtgactattagatttttagttgactttttattttttaatgatcaataacataaatttaatgatattttttaattacaaattttttatttttagtgactgttaggacgttgaatactatgtagtatattttaaaaaggtcttatattaatagagataatatctacttttatataccataatttttttttatttttttttaacactataaaaaatcttatttttaaaaaaattatgattaattataaattattatttttatgttgtgactaataaatctgtgattattaaaggtactagtcacaaaaattataattnnnnnnnnntaaatgtattttagtcacaatacttattgtgattaaaaataaattagtaataatttgtatctaaaaattatattttagtcacaaataattttttattttaactaaaaatcacacttaatcacagaaaatatatattatgactaaaattttataggacattagtttcacacccaacttcctcaaattttgtttgttatgagtaaaataagtttttattggtagtgtagtacaagtttgaaaattgcctttagaaacttatattatttagagattttttttaaaaccaaatgagactatacaataaaaactatctattttaagatcgtaacttattgacgtgtataaaattgtacactaccaacggttcacaccgcataaattatgagtgtttgcagtgcgaatggtacgatttttgaatattttttcaaattaactcgcacatgtgaaattaaaaaaccgcaaaaaatagtgtggagcggtttatgcggtttttgtggtttggactatcactaaataattnnnnnntcacaaatacaacaaagtttgagcaacacttgttaaaaataccataa

SEQ ID NO: 131362 - DNA, 583 bp, Cannabis sativa
atatccgcattttgcggattagattggattggatcgtacggattggattggatcggatactttgtaaacacccctagtttaattaattgtcccaggcaaaatataaactgtaagtaaatatatgctattagttgaaattggtggttgtaaatttagaaatgaacagttcaatcttattcatcaaaatatatatatgctattgtgaaataatggttgtaatttttattttattttttatattaaaaaaaaacatatacaaacatcccttgataaaaatatacatagatagataattattctttgcgacaaaaagaaaagatctaaaataatatccattccgctggaatagatacggtggattgtttggataataaaatagcacatatgtattctttaaaaactactaattaaaaataatatacataacacttattaattattactaaataaagttaattataaacattaattttcaaaatattaatctattatttttttttttataaaaatcataagttctattaattaataaattcgtttaaaacaatagaattcacttcagaggaacattcctccaactgaa

SEQ ID NO: 131363 - DNA, 2228 bp, Cannabis sativa
tggaacatggaacgtgatattcggtgctccctgaatgagactttggccaggaaagcaatttattggaagcaacgggctagaatttcttagctcaaggaaggtgacaagtgttctaaattctttttcctctcggctgttattaaaggaagaagaaatgccattgagagtactttggatcaggacaatgtctagatttctagtcgtgagttaattggtcgtgaattcataaaattcttctcaaggatctttatgaggtctgatgatggaccagagattaattgtagtcagttgtttcaagagaggagctctcaagcggaccaggacgagcttatctagactccctcgcatgatgaaattaggaaaaccctatttgatatgagcaatcataaggcgccggggctggacgggatgtcaatgcttttcttcaagcattattgggagtctgttggtgatgatttttgtgaagcagtttctgatttctttgtgaatggctatatgcataagggcataaacgctacaaatatttttctcattccaaaaatccagaacccgaagagaccgaatcactttaggcctatatccctttgtaacgtgttgtataagattatatccaaaattgtggccaataggattaaacccatattacccagcctcattttccctaatcaagctgcttttgtcccgggtaggaatattcacgataacaatgtcattgcacaagaaataatccactcgtttaacaggaaacgaggcaaagaggggttttttgcaataaaaattgatcttgttaaagcctatgataggttaagctggagatttattgatcatgttctcacgaattatggttttcctcagaaattctgcaattgggtgtctcagtgtataactaccactactctcaatatatgccttaatggggtcaagttggcaagattattccttcctgcggtctgcggtagggggacccgctatcaccctacctatttatctgtgctgctaaagtttaatctaggcttttggaagaggctcttggtttgggcactataaagggtattagattgagtagaggtggtccgattttatcccatattttctttgcagatgaccttatcttggtgggtagggccaatctgaatgaggcaaaaggttattgggattgtctagaaaagttatgctcttggtccggacaacaagttaataagctcaaaacgtcaatctttttcaacaaaaatacttccaatggtgtaagaagatatatcaaggagactctgggattgagtctccagagggtgtcatcaaatatttgggcctacctcttttcagatcaagacagaaggatgctgacttcaactttatcatggacaacctcacctctaaactgcagggttggaaggcaaagacgttatccaaggcgggtcctactacactcattaaatctgtgggtttgtctttgcctacctataccatgcaaactactaaactctctaatcgacttgtcaatagaatagatggtttagtgagggatttttggtggggttttgagaaaggtaatcatggtcttcatctcagagcgtgggacaaattatgccttcctaaatctcggggtggcttggggtttcagaaatctagagaaatgaatcaggctttcctggcaaaatgggggtggaagcttttaaatggctgtcaatctctttgctgtcagattttggaagccaagtatcttaaaggaaaggattttctcagctacaattataaggactctgattcctggtttcggaagaaaattgtgaaagccaatgcaatcttaaggaaaggggcttgtaagttggttgccaatggtagggatactagcatttggagggatccctggattcctcatttaaaaggtttcactctgaaatcgactggtaatggtactcggagtcacatctatgtggtcgatctcttgttagcttgtggcaaatgggatgttaccaagttaaaaatcctgtttgaccatgatactatttctgctatttttaaaggtggcgatcctttgggttaaggaaagaatagatggatttggaccttagagagcagtgggcaattctcttgcaaaacggcttatctaactcaagctttggaaagagcgcctcattgtgaggtggctccatcactttagaataaactatggaatagcaaaattttggagtgacataagattttttggtggagcatcctttccaatg

SEQ ID NO: 131364 - DNA, 818 bp, Cannabis sativa
gcccaacattatgagtattataggttggaactgccgtgggcttgggaacccacgggcctttcagttcattgctgagcttgttgttcaaaagaagcccaatgttattttcttatgtgaaactttgtgttttaaaggaagagtagaaaggctgagtaatttaattggttttgaaggatgttttgtggtggatgtacatggaaggaatgggggagtagcgttattgtggaaggagaaggatgacatttccattaatagttactcaagaaatcacattgatgccgaggtgttgtgggaagggactcaacggtttcagctaacaggcgtttatggagagccaaaccgaaatcttagggccaatacatggaggttaattcgagagttaaaggaggagagttcgttgccgtggtgcttaataggagacttcaataatgtcatggatcaaaagtgagaagaaagggggcaatcgttatccaaattggttagttgagggctttcgggaaactgtgggagaatgtgctctacaggatttaaggttgtatggtcatccttttacttgggagaaaggaagaaacacggctaattggattgaagcaaggttgaacagggtcttggttagtgaagagtggctgagaatttttaactttgcaaggttattcaattatgatgtttctccttcggatcacacgaacacacatttccgaaataaaacccagggaaaccgaaggttcaggtttgaaaatcagtggctaagtgaccctggttgtgaggaggtggttcggagttgtttttggaaatatatttatccaggatcttagatc

SEQ ID NO: 131365 - DNA, 530 bp, Cannabis sativa
taaaattgtgataatcaagcctaaaggaagaaaaaaaattagaaataagatattagtacaaaaaaaaacaaaaaagatgtatgatcaatgatgataatgaaaaatgaaaaaatctatttatgtagagcacctaaattataaaaaattgaataagaccccataacaaaggtcacataattaaattagaagaaaaaggaaaactctccatagttagtcagttaaatattaaaaaaagaataagatcatagcaaaggttacatatcaaatttaaaagagaagaaaaaagtctgtgtagctaatcaattaattattattgttgattactaacaattttttcaaaaaaaaaaaaaataaactaatttaattagagaaatagaaaatgaaaaaaaaaaataaaaaactaaataaaattaaaaatttgagagaagctcatttgagctgtcatatggcttattttataattaaatgagatttttctaattaatataagaaatagaaaaacgatgtaaaattacaaatgctcaaaaaaa

SEQ ID NO: 131366 - DNA, 1995 bp, Cannabis sativa
  modified_base (802)..(807): a, c, t, g, unknown or other
catgcctcgtggcgagcctggatatccagacccgccccaaacaagttttttggtgcaccttcttctccatttttcaaaaataccatttttagaaataccatttaaattctggcccaaattccctagcccagccgagcccaatcttttcctttttaattcttgtacagtcagctcctctctcctcaaagcctgcgtgtcaccctctccatcatgggacatattgatatcaatattatacacgacaatctcctcaaattcaggactaattttctgcacaattattgcttcctcaatcccacgattttctcctcccccacgattgacgccatgaccacccgaacaatgaacttggacatcattcgctgcacgtccgaccgccccaccaccgtccctcttagctggcgacgactgctcctcccctttcttctccttacgtcccgatcgtaaccattgtcctccgatcagtttgctctgtcgttgagtcgtggcacgcatgaaaacaccatacggcttgacaatcttctccttcgatgtctcaaacagctttggacaaagtctatcagcatggccaattaaaccgtagatgaagcaaaacgtaggggcatgctcatatttaaagtttacccaaaaccaatccgaactatccaatctgcgaatcttcattcggcgcttgagaggttgatcaagattaatcgtaacacgaactttaaagtatactctccacacaccagagaagttattctcatcagactccacgaattttctgatataatcgccaagcttctgtagcgtcctttccgtnnnnnntccatgttgaagatcatggatttgaacccatagatcaagtcggttgagtatgatagttctcggattatcgcccaccttgagtctttcaaattaattgcttcctttcaaatgtccatggactcccatcaatgactcttttgatatccagttcatgatagaattgaaataaaaatcggttttgttccaattcctttacatagagacccttacctggtttccaaaggaatgccatcatgtgttgcatggcttgtacatcaataaccccagcattcaagaaccggctgacaagacaccaacgcacatcgtactcctcctcttcttcttccacttccaaagacagcccaccgaattcttcgatgtccagagtaacctcctcatcgatctcctcttagaagttccttgaacttgcagaagccattacagcagtatagaaatcacagaaaaaaatcaagcaccaaaaacagacaaactcaagacagcaaaacacaaaatgacaaaatcaacaccatgtcaaaagacaggacatgaaagtctctattaataaaggtattaatgggtaacaaagtagtaattaaaaaatttattatttattggggactaaaatttaacttatgttattttttgtgttaaatttagcacaacttttaacatgacttaaatttagcacatattttacagtactattaaagcttacttttaacaaatacatcacttttatagcactaaattggagatgctcttatagttatacatgaaatttacatagcaataaatacataaaatttacatttacttatatatatttatagaacatttaacataatcatttctaaaaaaaagtttttaacattgtaatatcgttaccaatttttgagaagttcatatttctttgtatatataaatatgttatctaacgaaaggggcgatcattctctttttttcttcaatcgttccgatcaggataagtgggttagtttgttttgtccttctatctacgcaattctctgtcttcgtttgcgattatgttaggggaaaggtagttatagaggagcagcttacacatgaagtaattaaatgagagttacatatgtaataaaaattattattattagctatatttctagagacatatggaaaatcgatcaatccttgagtctattttcctttaatggatcggggggggggggg

SEQ ID NO: 131367 - DNA, 891 bp, Cannabis sativa
caattgtgaccccaataaattctaacacatatttcttgtattcaaatactgggtggctactagctattgaaattctaagatagttaacatatgcgtatcacaagaatttataaaatataatattataattttacatatatttagttttttatatgtacatagaaaccaactaaattaattgagggcattaactaaattataggaaaatgagcctaattgttagtaattgatacatatatatacgttatgaaattttagcattacttaaaatataaaacttgagcctaattaatatatataaaattataataattatcatttatcaatactatatatgtatactcggggcttaattagggcggggagtaccacacctgaatctgccccgtccctgatccggggaatgaaaatttttcgtacccgccctgctccctgccaagccggagattccccatcccattaggggcagattctcgtgggtccccatccccatggagcttttgtgtatccctaggtacagagtaaactagaatgggagtttaggtagttttgtctccaatatttctttttttcaaccttctcaaaatagaggaattaaattttgaaaatttagaaggagaaaatctccctccacctctcctctcgctttctttctccttcttaccaaataatatattcttcctctcctttcaactctctctccatccacccatccctccttccaaccaaacatagtgttaatataggtgtccatcatatttacttacaatttaggttagtttgttattgtttggagatagaaaaaaggggtaagttgaaaaatgcctcttttattcattaattaatcaaatttacctctaattttatatttatttgaaacatacctctttt

SEQ ID NO: 131368 - DNA, 513 bp, Cannabis sativa
cagttttattattattagcatgcaaacctgaagtttctgagaagcttttgaaaattcgaagcataataatgatggattggacatcacctcttcagaataaaagaaggtcatccgcaaagcataagtgatttagcttcgaagaactgcagcgcggatgatgcttgaaatccttcgtcaaagagattttggccattaatctagagaagtattccatacctagcacaaaaagaaagtgccatgttttttgtatgcattactataaaattggactttagttgcagtttttaagacttttcagtgtgggttttggtaaaattcgctaccgttgttgttccaggcgacactataggggttacaaacaaccgacactgtagggattctattgagtaggttattatgaaaaaactgcctccataaggtccctatggcactacaagaattttgataattaggggcggacctattaccggcggggaaggtccgcccctaataataaggttattaccggcggat

SEQ ID NO: 131369 - DNA, 650 bp, Cannabis sativa
aatttaatggaattcttgctggttatgattgtggaaaaagcatgatattattgacatgttcttgtttatgcatgtatggaaaaatggtgttgatattgatagattaaagtgtaaattacatgattttgttatgatttatgttgttgagctttggatggaattttagggcattctctaggttggaagccatgttatttttggtatgttgctgctgaaaattagttgagatatatggttttaaagttctagtttaaaagcttgagttttgttaattttgatcttgatttcatgcttgttgagtaatctgattttagaggttaactactggaattgatacatgaaatatgttattttgaccgtctaatatttgttagcaaccctacttgatgatttgaaagtttggttgtgatttgggatggtttagttcagttttgggggttgattctcgtgtttttgctgctggtttttgggttttgaattcgggtgtcgcggcatggtattttgaatgccacggtgcgcctcctttctggaactgggagttggtcccaagtgtcatggcatggcttttgcatgttgcggcccgccatggaatttttgggcagatttgagttcaaacttttaaagtgcataactttttattccgaactccg

SEQ ID NO: 131370 - DNA, 601 bp, Cannabis sativa
accataaaaaaataaaaaaaaataaaaaaaaaaaaggagaattttctgggttttgtctttctatagtcactacaaaactcatcttttcgctgttacatttttatctctttcttttaaatattagcaagagaagaatattaagtgagaaagaaacaaagagtttttggcaagaaaaaaaagacaaagacaacatttataaatatatatattaaaaaaaacaagtgtcttttgtattttatctttttgttgggtccaaaaatgtcaattatcacaggttgtgaagatcatggtggtagaagcagcttttcttcagggaattttggtagagaatcaggagcaggagttgaaaaagaagaagttctggaaaacttgaataataaaaaaaataacaataatggttctaactctttttcttcaaccacaaccagcaatggctcttccactcatcaagtccttgaacaaccttccccactagctaataagaagaagagaaaccctccaggaaacccaggtacatacatacatacatatatatttatatatatatatatatatacatacctacctaaattactgcctctctatttatatatatatatat

SEQ ID NO: 131371 - DNA, 935 bp, Cannabis sativa
  modified_base (890)..(909): a, c, t, g, unknown or other
gggtctaaatgttcagccctactttaaactatttagttccatgatttatcagtgccctagatttacactgacgtgataatcaacgataaagtttacttacacaatgatatttataatgttttttttaggacattattaaagtttaattactttctttttggacattataaattattataaatttttcaaaaacaaatagaatatctactataactataatgtgcacacaagaaaattttaattataaactagtaaagtattacaatttccttacagcttggctaacaaacataaatagaagagctcttatttcagtaattatattactttactgaaatatcatttataagaagctaagtattttaaggataaaatacattgatgagcaaaacgataaatttgtcactacttgatgtaaatcatctatagatgatctttaattatttagattgaatcaatggataatttatagtgtatctatggtgaatagaacattttatataatcaaaagtgcaatttagaatctatatagtggagtgaggatgaattaataagatagagaatttacttggtaaattctagaactacttattaggagtttggttacatgggttcatgcttggttacataggtccatagtccccaaactaattaggataatattattttgtagtctcaattaattaatttatttaatcaaataggattctaaataaagattatgttttgtttgtgaattttaccaaagaatgacataattgagaagaaaagagagttcagagtttatttatcaattaagagaccttgtaaggtctaattgataattgtatttaaatagtaattttaattgataattaattataattattaggggaattaccccatatacnnnnnnnnnnnnnnnnnnnnttttaaaatttacggtttgggtttct

SEQ ID NO: 131372 - DNA, 910 bp, Cannabis sativa
actgccctcctatgtaattataaataggagcaggttacactgaaaaatggacgaaaaattcattagagaaaaagcccttgaattgtatcagaaatctaatgacattgactcgggaactatgcagaattttaactgcaaaaccacgtaaaaacctttgtgttcttactttttctttactgcttttattttctgtgccaatccatcacgagttaggctttaacatatttaacgaaaatctgcattaacagcttggtgctttcattgagagcgttcgtgaaaaaagctaaaaaaaaaaccctactggtatatataaaaaaaactttctccaaggatgacaacggagagaacgttgacactcctcatgaagaaaccacccaccgtcctaaaaaaagagccaatgggctcctacaggcctcccaactcacaatctaaatggaccactctttctaggaggacacaacctgatgttggcccacgtacacggaccactcgttccaggaggacccaacctaagggtggcccaagtacacggaccacatgttcaaggaggacccgaaacctcggaacaaggtatgaagagcctaaaatgaactttggtagacctcatcccaggccaactggcgaggatggcacctacgatccaacaagatacgtgtcaatcgtcgaattggaatacgccaactggaggaggcaaactagtaaaatgctgagttgaaacgtgaggcagtcatggtcagagtggcatagaagaataatacacaaaatcaacttgatcctggagtgagaagaccacaaggcagcctcgcggctcacgaaccaggaggcaggagacagctcaggagaaccctcagaatgcttaggaagaacaacttggggaaactgagggccccctgaaaatgaacaaccaaat

SEQ ID NO: 131373 - DNA, 911 bp, Cannabis sativa
gcgaaatatcagtaacaacagtattaattttaaatatttttatattgatataccatatcaaattaaaaaatacatattttttatttatatgcatttttttttaaatatgcgctaaaatatgtacaaactaaccatattagaattgtttttatgagagccttccgtcggattgtcttataaaataccctcaaataacactaaaatagtgtagcatgatcaatgtataagtattgctatatcaattttctgagcgtcaataaaactaaagggcaattgtatgacaactcaattgcaacaaaagtatcaaaattatgtggtcggatccatgacacaaaataaatgcgaatttagtttaatgtcgcgattggaattgattattccgatttcgaaaaaaaaaatattaatgcaacaattagaatatagcaattttgggaaactccaaattaattttttacagaactacatctttgcaatctctaaatttaatttatgataattagtttttttgaatttttcatggttcagtttaatattctatcgaacgcttttggtttatttttcagtttgagttactgattttcttagattgtatcatcagaattaatgaagttttcttatcgccagaattgttgcgtcattatagaattaagattatcattgtataggtttgtatccttagtgcggctaggaaatgtgagcaagaggtattttataataaaatatatttgggttgtataaaaatttaataggctagtccatcatatttttgtaattttttttttttttgatttattaggatataagaaaaaattctccttttactttcaggttttttgattttagggttaggtaaataaaaactttaaaaaattacatatatatttgttataaatattaataattatgtggat

SEQ ID NO: 131374 - DNA, 1868 bp, Cannabis sativa
aactcttgttctttccttggtgtgcttatctaccattatcggcttccccacagtgctaatgagagcactcaaagtttttttcccccaatattgaagaccaggactaggcaacctaatccaaagaagaaccgatttcacaatcctaacaacattcaagtccgttgtccatggtctaacaatgactggtttcctgtcaaattaaatcattccattctagcaatttgaactattcctaaatgccctaaattctacgaataaatccttcaaagaccactgcaggaacattagtacccaaaaccatacaaattacagctgatttcaaactctcttctttcaatttcacctcctccatatctatatgatctatctttctaccctctttaatcaccggttcactataagtgaatttagcatcagagtttaacaccttacctcctgagaaatattggccaatgggtctgagccgccgattgcagatccacttcttcggcccagctctttctcgcagagatcaacgaatcctcatcgaacctgttctccgtcgcaagctgctcagggccgaaaaccagcgattgtccatcttcacgcgaacactcgaagctctctttctacagatcttgattctccaatgatcccttcgcaaccttgaagcccgacctgcgccctggtttcttcttcctcgccatggagaaaagagagaactaggtcagaggtgcgatttttatggggtgttttcttacaggtaaacattatttattaaagtttttagttattttaatattatagtatgttaaatatatatttatacatatcatctaacttaaataatttcaaaaactcttttatgattaaaaattaaactgaatgtaggaagttataaaaaattatattaattaaaagtctatatacactactacaaaaatagtttttcttagaactaaaattttgttctttgatggtgaaatgagattctgtgtgaattgttgaattctattgcttggattggatctagtatggtattaattaaaagtctatatacactgctacaaaaattttcttagaactaaaattttgctctttgatggtgaaatgagattctgtgtgaattgttgaattctattgcttggattggatctagtattgtctatgcaagtattctggaggtttttgagaagtttggacttaaattgaagtgttgggaatgtttatgggtttacctacactgaaccggtccaccgattcagggggacctgtaggaactggttgaccggttggtcctcaggaaaccccattgaattggaattccaattagctagggaactggtctaccggttggggcaattttgccacccctaatttttctggttttatgatatttagggtgttgccatgttatccaccgatagagatatttctagttgcggttttaaatccccagaaagtgttttggtgtgtctctcattagaattacgaatattgtgttatagtgccctataaagcgtcatgctatttttccacccaggctgatcgacacgtctgaacatggaaatggggtaagattagcattaaatatattatatatgcatgttgtgcttgtgattgtatatgtttcgagtgatatcatagcggcaaaccattgtgtcggttcagcaatacaggcaacgtactagttaagagtgatattcacctagagagtattaattggcgctatcatagcggcacaaccattatgtcgattcagcagtacgggcatagtacttgttacgagtgatatcatgacaaattgtactcttgggtgctattgatgttatcatagtcgtacaaacatagtgccggtgtaacgccctaatgctaaggcacgctacagt

SEQ ID NO: 131375 - DNA, 1358 bp, Cannabis sativa
ataaattatttttatcaaatgtatataaatttatatttaaaaaaaattaaatatatataaaaaataaaatattatataaaataagtttttacatattcttgattataataaagtagattataacattatcattattattataatagatcttaacaacttacagtactttgaaatttataatttaccaaacactcagttcagctacagctgttttttctcacagcacagctacaactgctttatacacagcacagttgtgccaaactggccctaaaaatgtgttttcttaaatagtacaatttaaatttaaatttgttttgcatatttttctattatttttataatatgtggctatataagttaagattcaaatttaaagtgcaaatccaaaaaaaaaaaaatgttgtttttccaaaaaagaaaacaacaaatagaaaatgttgttttttttcttcaaatattgtgatataaatttaaatttaatgcacatatttagaattttttttttattattattatttttgttagaactataaaataaaaaaaaaaatagtatttttgatatatctaaaaaaacttactgtgactcttttacgttaccaaaaaaaaaattgttatctttctgcaaaaaatacagaaattgttcataaaaattaaaaaaataatatatgaagtaatttcttaatattacgttttctttatataaataatacttcaatcaaatatatttttaaataaaaatgatattatttattaaataagaataacatccacaatttctttttcttcttaaaaaaaccttaatcatacatatatgttaaaatatactcaattaaaataaaaactaaaaaatataattacatgtaacattatatagtatatatacccaggatatttatatttgagctcccaaaattataagtacatcccagttcaccctattttgtctttttttaaaaaagaatatttttataaaaacagtataattaattacaaaattaagtccgtttatctaaatagagaagtaccccacgttctatttaatgaaataatctctcttatttttttttttctttcaccttaattctattttctcaataaaataacaacttcattaaattaatattctaaatacaaaaaaaaaaaaaaaatatgaaaatcaaaaggaatattatgccaaagaatgcttggagcaaataaatatcaagcgtgtctaacaatataatcagcaactcgattcgctaattatctaacaaaatgtataaataaatgtttgataaaaaagaaaataaaattttataattattaataatcaaactaaagatagaagacatttgttgggtagaacgaatatgttg

SEQ ID NO: 131376 - DNA, 831 bp, Cannabis sativa
ttaaaaaattaaatcaatcaaattattaatagaattggattataagacttaaataaattggactaggtgattatattttttaaaattttattaatacttgtattggatcatattaatatgtaaaaaaagttaaatttaattgaattagtacattaaacaaaaaaataattagaaatattttaaaaaaaaattacaaagaccgcgcgaagcgcggcttaattctctagttacttataaagtaaataacaaaaacctgttacatcaaacaatttagcaaaaaattgatataaaaaatcgattacgtaaaataattaaaataaaaataaaatcacataaaccaattacctaaataactaaaatcttcttttcaagtagatttcttcttacccatctcattgttattactctaaaacaatataaaggtactcaaatagtaaattacaattgaacattaaacatattaaagatatatatgcattcggatctcagtttcaaaataacaaattcatgagaaatcattaccaaaaattgaatagaaaataaagcattgaaaccagtttcaataataacatcgtacatactttttttcgtatcttaatttccttagcaatatcaactttcttgctaagctctagcttattaaaatcagagattgcttctatttgttaaaaaataaacacaaaaataaaataaaatccaaagaatatagcaaccatgataacaaacataaataatcaattttaaaaaaataaaaccaatttataggctcttaaataataaaaattgaacaaaaaataaaactagatccatcaacaacataatgaaaaatac

SEQ ID NO: 131377 - DNA, 1261 bp, Cannabis sativa
  modified_base (26)..(33): a, c, t, g, unknown or other
tcctttccattccattccatttcatnnnnnnnnaccaaacgccaccttagtgttatggtttcatacatgttctttcaagaaaattgttcactcatccaaggaatatttaggttcttcaaacagtgttatgtcagttaccattttcagaaagtaaaaaaaagttttaaaactacgtgttcaagatccgttggatgaatagagctatctatctcaatgtgtgaaagtcgtctatgagtaaattaaaactatgtaattgggagttatgtagaggatacactgccattataaagggctaccattgagatagtggaacatcgtctcctatggttacaatctaccaaaaaaagtcttttttaacaaattgggcaatgttccctgcttacactttcacatacttatgcttggcacagtttgttgtaaaattttcatatattcaaaaatggtctcataaaacggttacatactgtttaatttgcctttaatattcttggtggttgagtcaacaatttttctgcgtaatcggtatgacctcattccattagttcattagcttgataaaataatttctgactattcttatgagtttaattttttcatcagggacaaagacaagcggatattctttactttttgttgaaaaaaatatcaaggttatttattaatctgtttttcatttaaaaaaaataaaataaaaaaataaaaaatgtgtgactgacattttcaattgcgctttcttaaaaattcttgttattttctttcttatgtttcactatttttgtagtcacatatttttgctctaaagttgttattggtgctttatatatttttcgtatgttgtctttttttgttttttttacaaaataaaaaaaatataccaaaaattggcttatttgaaaaaattcattaaaaaagagggcatatttttcgattttttaggttgtttttcttttatggaaacaagtttttattgcattttatttattgtttttctttttattttttatggggattttcttttattctatgcttttaggaaacacgttttgtgttattaattattttgttggtttcctttttggtgacattttcgaatataggttggtgtattgtgttttattttttagattttgtgagaattattgttttttcctttttgtatttttggtaacttttaactatattttgaaacattttgttttggtttcctttttctctcctcacgtggtgaccaaggtgaggaagttactttcctttttttttt

SEQ ID NO: 131378 - DNA, 1176 bp, Cannabis sativa
aggaaatttctctagtatacccctgtaaagggtggtcttggtagatcttctgtttaatttagtctaatttttaatttttatgattgcgtatgttctaattatttaagataatttgtaaattatttaaaaaattcgaaataatttacagtgtcaaaaataaagtttaaatagttatttaaatattatttttagcattgtaaactacacgtaattttttaaaaaatttacaagtgatcttaaaataattataacgtacattgtatatgaaaaaaattagactaaaaaatcttttggatgccaaaaaaagataggaaatttactgaaatacccttgtactataaattaaccctataaagtatctacaatattgatcgaattgcttattgtttaccttacaaataaagacattggatgctagcctatctggccttggtgtaagtttcagtcgagggagccccaccagagtaccatcctgataaaaggaaatatcgaacaaatattgctgtaaaccaaataagaagtaaataataaaaacattatagacaattaatgaattcaattgtgttattacttttgtagtggttttgctatgtagttgggcaccaatgtgtgagactagtctgacccttttgccacgatacagtgcttgaactcgaacaatcctctgaatgcagtgtaaggtggcaatagcctgtctcctaaccaagtgtccccgaattagtgcttgcagccttattaaccccttgagtgcaccaaaggaacgccgagcctacatttagcgagggagagcaaggcaaaagtgaattcaaatcaacataggcggctcttatggggtgcaagatgtgctattgcacagggccaaaaaaataaagggcccaaaaaatgaagggtctaatatatatttattttaatgcccttcaatttttttcaatgaactcaactttttaaagggctaacaacttatcattgatcatttctatgtcaatttctaaaatttattttcgattctattattgcttttaagcaaaaaaaataaaaattcattgtcgctatttattattttttttcctatcattgtattgcaatttttataaattaattggagttttttgatgttttgtaaaatatataccgtatataataatatttaaaaatattatttataaattgtatttt

SEQ ID NO: 131379 - DNA, 594 bp, Cannabis sativa
tccccccgccccattaggagcggggccccatctcctggggaaaatgtgcatccctactccttcttgtgtaattggctgacaaaacttttaaatacttggaagacaaatctgtattagatactatcaactattatgagctttttactatttgaaattctacaccagtttagaaaatattgccttctccttgccacctaagattaatatgcaaatataccattattagcatattaaatcttaagttacaaggttctcacttgtttgattggaatttgcaggaaaagactttttcaaatgataaatgatctcccgaccaccatatttgaagtattaacaggaagtgtcatcaaacaatcaaaggagcagtctactacctgtgtcaaggtgggaataaaaatgtctccaccaccaaaggatgagaatgaaagtagtgaagaggaagaagaagatgacaaacaaggtgttacctgtggggcttctctagatgaagtgctctaccatgtaaatatacaagtaatttaaaaaaaaaaaaaaaaatcattgatctccaattgcttttttttaatttaattcccattaatgtcttttggatca

SEQ ID NO: 131380 - DNA, 758 bp, Cannabis sativa
aggagtctctcatggacatttcagctttcattggaaatctgaatatacgtgtcctctaaataggtgtcttgtctcgagtttctaggtgagagaaatctcactataacagtcaccactcataatatatttctagcagtaataaagaggaaatatgatatatgttcaattacttagtcaccactctatatttataggttaacaagtttacaaatctcaaaacaaaacactcactctattctttattgcctaaatttcacttgaaggggactgcgcaaacaactaagtatgacatactatcttcatagataaaaagaatcagattaattttaccactataatggtgtagtatactcagacgagctaccttcttttcttactttgtgggagagaatgtttaacttaatattgtatcacatgtatataaatatgtatatgtggtttagtttgctttgattttaacccataaatgaacctatccttttataaaatagctatcacaaaatcaaatacaaaaaagagctttatatatttgtgaaaagtccatgagttgtttaacattatagatcatgacaggttttaaggagctattcatattatgtatgtttataataataaaataggaaggttttaagtagtttatgtgacatgcttaatcttctttttcttttttcaaatacttatttttctaagtttctatttttttttaatacctactaattaaaagaaatcaaaccaaagacctatagtattctaaaata

SEQ ID NO: 131381 - DNA, 1313 bp, Cannabis sativa
cttgcctttggtaagattgatcataatattagccactactagcatggttgcgctgcaaacccagcacgataattgtacttctatgatagcatcgttctatacctaaaagtaccattgaccataatatcactcttaaccagtactatactcgtactgttgaccaggtactatagtttgtacagctatgacaacatcaattagtactttatggaattaaatattagtcaaaactagcaatatactcgcactgctgacccgacactatagtttgcaccgctatgataccaattcatatattctagcaacataaatatgtatatcacgttcacacatatacatatatacatcttaatctattcttacctcgtttttgaattcaagtgttccggtcaacctgaatagaaatatcactcgctaaacaaagaccttatgtcacatttacgtaaaaacaggtaaataacttgctaaaaaccttatcaaggacctaattacatgaccaatatgaccaacataattaacatggtcgacaaatatgatcaacgtgaccaatatgaccaacttgtaggggctattcctgaagactaggtgactcatacgaatttgagcctacgtaaagaagtactttgtgttagccatgtgccctcaaagccatacaagaatatctacaacaactatcatttttttaaaatatattttttagaatcttattttatattttaaaactaactcaattatagttaggaaaggaagtatatcgagttaataaattttaaaccctacaatgtaaatctacataaaagtggtgaagtcacttgtaaatagattcttctcggactcttactttctcacattctaaaatctcacttgaggaatattgaactcttagagaatataactttggagaagtctcatcaagcattgagattaataatacttcaagtgaactagtctattatagcacaaagagggtgaaccactataaaaattcgttgttcatcttgctcgtttacaatttttttagatctgttgacaaaaaaccgcatcaacaatttaaacaaaactatcattatttttagatatttggtttgaaatattattttattattattttgtattttaaaattatttgtatgtatatatatttttatacacaaaaacaacataaatactatagctacatttaacaaacgtacgtaatattcactcaattaacatatttgagattattatatatatgggtgaacttttaatgggtactacccatgaatgggtaaaattagaaaattttgagtttttatacttaatttttctat

SEQ ID NO: 131382 - DNA, 730 bp, Cannabis sativa
aatatggatggaaaccatatcaataaattccagccgaaatatacaaagactaataaaatatttttgtcaattaaatatgcaaaaaatggaattaacagactcaacccttaatcgactattttacatgatttttttatgtgaataaaagtgtttgtattggattgcaatagtattctttttgtcaacctttatatcactttttttcagcctgagccctaaactttgatcgaatgatcgataatatcgatgtcgatggattcaaaattttcagtggtcgatttatgtcttttgatctgttcattaatcaatggatgttgttcgtctgttattttctagagaaacaagttatggcaagaactatttttcattatgagttttaattcgttctcttctctctttctacgcctcattctccttcatccacgattccctctatgtgttcttgggagattttccctttttctttgaatatattgtcattggccaaggagttatttttaccgcaattgtttgtgatttcaagtgaatcatatagcaaattttgtggagtacgtagtgaagaaaccaaaataaaagaaaagaaacatttgtttctatgccttcagttaccactattcgggtattgtgatagtgtgttggtttcaaatctgagtgtagttggtgtggtgatggtggttgacggaggctatggtgatgtggtggttgcggttatcgtatggtaacattgacc

SEQ ID NO: 131383 - DNA, 609 bp, Cannabis sativa
tttccgaactcgactatcattccataagactccttctaggactgacatctgtaagtgaataacttttcaaaaatgacgtttgcggagaccttatcatttgatggaactataccagagtatatatgtgtatactatgttaatattacatccaatgcatgtgtacttaatttttatttcagttgcgtatatttttagttgtataattaattttttttaaagatgttatttaataaacaatatcatttttaattaaaaatatttaatttaactcatatttacataaaaaaaatataataatatcaaaatttgttgttaattataattttattttagtcgtaatatttttaattttataatattttttatttttgtaagaaatattatacacttttttttttattttataataataagatttttttttggtaacagtaataagtaatgacgttaaaatagtgattctttcaaaaacataaatatttttttttattttattattagaaaaatgacaacagaaatatatatatatactagtatattgttacgtgcgatgcacgtatactatgttttatattaagtattatattatgagttcggaaggaaataaat

SEQ ID NO: 131384 - DNA, 601 bp, Cannabis sativa
aggctaaggtgggttaggcccgcacctaaggcccactcattttaggaatccaaataaaaaaatactttttaaaaggtaacatttatttttattgtaagagcccaaattttttctttttgcttatgacctatttcaactcagagtcagccctgcatagagcttaaagaaaatgtgaagggaagactgattgcattaatttcatggaaaatgagctcatggatacaagaagaataactaggccactataccttattaataacttccgacaaaacatattttgccgatgggtaacagtattagtagttttagaatagaaagaaagactagtatagtgaaaataataataataaaaaaactatatttaaaatctgctaaaactaactctaaaaaagaagccaaagaaatctagttattaaattttaaaatcacagtcaaacaatcaaattcaaacactacattttgaaatcctagtaagtggcattggacatcatgttttaaagctaatgtttctgtaggaaatcaagctagcaattaggtgtaaatttacatttaatgtattttttcatttactctaatattactaagtgttcacattgtatta

SEQ ID NO: 131385 - DNA, 1408 bp, Cannabis sativa
aacttcatgggaaatttcaggaagtgtggatactttccgaccatcttcacatttgaggcttcgaataaaatttcctcttctacgaatggaagcctttttgtgaaagtattttgtgtttttgtcaccagcttgaagccaatggatctcggacctttgcttccagaagacttcttgtttaaaaggagactatccagctgggattggagagaagagacattattgagctgattttgagtgagaggcagatttgaattaagggtatttatagattgttcaagggcattgattcgtttggacagactctgagaagtcgaattccaattccgaatagcttggatacaagaaccttgcttcgaaaggaagtggtcaaggttgttagaataggaagcaggattagacttagtccaggcagatttaacagtatcaaagaaagaatcttccatgagccaatggttctcaaaaatgaaaatttttaactctcggaccctgcatactgtcatcatgaaggacaattttaagcaccctatggtcagaaccgtagaagccaagatgataaagggttgcattagggaaaaggcaatgccaagcattattagcaatactccaatccaacagctcaaataaggtcccatgcttccaagtataaatattcccaaccggatgcaaaggggtgaaaggaaacttttggataaaatgctggaagtgtgtcatagcagaggagggaggaggggtactactcgatcgatcactaagagatagataatcgttaaaatcaccaaagacaaactagggaagggaaggagcattatcatacaacctattaagaaaagtccaagtatgagttttatcaacaggatagggaaaaccataaaaacaagaaaggtgcatagttatattatcattaaagtgtataatacagtcaatatggttagaggagaaattcaaaatatttacatcaagttaagaattccaaaataacaaaaggcctcctcttaaaccagttctagggacttcaaaaacagagtcaaaagaaagccttaatctaaaatgttccccacggccagcagtgagcttggactccataacaaaaagaagactaggcttgttcttcctgagacacagggagaggttacggaatgcacgagggctccccaaacctcgagcattccaacacaacaggctcatttttctgggcggggttgctctgcaacacccgcctgttcaagtgtggagttaatggcagatgaaacttcagcaatggtaggcccagctctggcacgcctcagaatattcctaagggaatcaccaacaacaacagactgtggagtaaaagcagcccttttagcaccagcaacaacttttccttgagctttctcagacaaccgagagatatgatccacatatggtg

SEQ ID NO: 131386 - DNA, 1559 bp, Cannabis sativa
tgataaatctaggaatatatatttcatcacacattcttgattactttccactatgctaacgacataataaataagaatatcaatgtgataagggtttggatgaatttataaataaaataagcatataaaggataacatgaaccaaatgacacaataaataagtgatgaaaatacttatgtctctttattgataattaaatgataaagattacattaaaatggagttttacttaggggacaaagcccaacagcatggtgctcatgcaatgcttgctcgagaaatgcagatggctcttgcccctgctgtgcaagtagggccgattgctgtagtgaataggatggaaccactgtatgaattgttctgcaagtaggcacctccagtctttctaggaggtctcaatgtgatgaaagtcgagcagtggctgacggttattacaagaattttgaattttatgggcatcacgacaatgacagaatggcctgtgccacatttcagttccaagaggatgccctggtttggtgggacatggtatctctgactcgtgatgttactactgttacctgtgaagagttctaggagttgttcaacgcaaagtactacaacgaggtagtcagaactgcaaaaagaaaggaatttactcagttgacccagaatgagaatatgagtgttaccgaatacacaactcagtttgatcaattggctaggatggcctcaaaaattgtgccaaccaattttagcaagaaagaaaagtaccttgatggattaaacctaaaaataaaacatgatcttataattactactgacgactacaccacctatgctgacatggtggaaaaggcactgcgagctgagggtgcagttgagtgaacccaggagtctcgagggactcaggacgccctactcctactacctctggttatggtagaagtggtagtggctcaaccagcgatcacaaacaaaaggcacaatttgcacccggtggcttaggtcagaataagaggttttgagggaaccaatgtcgaggcaactgttggggtttttcaaaaaccatatacacttactcggagtgtcccaattgtaagaaacactatttgggtgagtgtagagaacaaggatgtttccagtttgggttgccaggacactataaagagactgtccgcagcttaagaaagaggagaagaagtcaactgcaaaacccgctcaagcaagggtgtttactttaactcaggctgatgcagaagctagtccctcagttgttacaggtcagctctcggtcaacaactcttacttctctgtattgtttgactctggggccacccactcttatgtgccagcctgaattttcggtaaattagatagacttcatgatagttatgataaaggggtttggaacgctactgcttggcagagaattagttatctccaaaaggtggattaggtctatgcggatcagaattgtgaatagagagctgagtgttgatttcatagaattgagtttagcagattttgcactactacaaaattcactattcacgtctgtttttaagtgtcacttaaa

SEQ ID NO: 131387 - DNA, 1167 bp, Cannabis sativa
ttcgggtccgggttcggtttcaattttttgaacccgaaacccgtgaacccgaaacccgccaacccgaaacccggtaaacccgcccgatgttcagccctaattctccttttgagtcaattgtgtgaacttttttctttttgccttatggatagcctcattgtagtactttgcattaaataactcttgaaattcttcccaggtaattctggtgacatcttgggtgagggataccatgtcccttcagaccaaggcatcctcctgggactaaaacattgcacaagccactctatcattgtcaatgactcccataaaattcaaaatcttggtaataatagttagcaattgcttgaatttcataaaatctatacctcctagaaagactggaggtgcttgcttacagaacctttcataaagtggttccattcgattggcaacgaaagctggccctacttgcataacagaggaaggagccatctgcacctcaggagcaggcattgtaggagcaccctactgtctcaaacaccaaatctcttcatcttgctcattaatcctagcttgcattttagcaaacttatgttcctaatcctggatagcctgcggtgggttgacatcaccccaactacgtgccctacctcttgggcctatgcctcggccacaaacattaggggaaaactaaactccctaaccactactggatctgtctgaattaccatggcttctcgtgttccgcctggcgtctattctattagaaaagcctgcaaaaccatgagctagcctggtccgatcgcgatcaaggttaaattttatttactgcttacttaagaaaataaaacatgcgtctatttaactatcaagctactaccgtgctccttaacaggcttttctcattacttacttatagaacaaactactaaagcataaaaggcttattgaaccgtgagttgagctttcctctaatgaatattgtacatatcgtggcgatctttgaaagacaattggtgactttgataccaaattgtaacaccctgattggtggtgaaaaatacatatttattggcctcaaacgttaaattaaattaaattttaattaatattttcaagtaaataatgaaatatttttttacaattgaaaatatttagtttgactttaatttggtttattttgca

SEQ ID NO: 131388 - DNA, 639 bp, Cannabis sativa
tcaagccaaccctctctactcccacaactgttgcacctcaaatcgtggtcactatatcctcctcaaatgacattcctactataaacaaacacccgatgagaacaagatcaaaagatggaatacaaaaattcaaaacctatattgccacaaagcacccattacatgaattccttctccaaactgagccaaaaacactgaaataggcctcaactaaccccaaatggaatgcctcaatgacagatgaattttgtgctctaaaaaaatgaggcttggacactagtgccatacaacccttatatgaatctaatgggaaacaaattggttcatagggtgaaataaaatgttgatggaatctaggaaaagtgcaaatcgagacttgtggccaagggatatcaccaaacgcctagcattgatttctaagaaacatttagtcatgtggttcgacctgctacactgcgcattcttaacataagaagtttcctgtaattgggatatcaaacaacttgatgtctcaaatgcatttctaaatggaatacttgaggagacacttttcatgaagtagccacctgggtttgaagactgttacaaattttctgtttattacgcaagtgtacgtatcaagtagtatctcacgcaagt

SEQ ID NO: 131389 - DNA, 814 bp, Cannabis sativa
tactcatttaaataccagaatgaacgatctggaaaatttggaatctccatttcaataagaatacgagcaaattgcatccttttatgatccttagtatgtttatcagccattatcggtttcctaattgtactaataagagcactcaaggttttcttcccctaatattggagcccaagatcgtgaagccttatccaaagaggaaaacatttcactaaccttcccgcattcaaatcagaggaccaaggtctaactatgacaagcttcctattagattgaataactccattttcaagaacttaacctcgtgtagcttcatcgtttaacttgaccatagtgagttccattgtcatccttgctatctggataatacctagatgcccccgaattcgtcttatgaaaccttcaaaaactattgctagaacattttctcctagaaccatacaaattacagttgatttttagttggcttccttcgatttcacctcttccaaatctacctgagaattttcctaatatacttaacaagaggtttagtaaatgtcagtttgggatttcgcaacttagtatcatcgccaatcgccactcgaggttctctaaaaggttgatttctagtaggggtgtgcataaatcgatccaatctaatgacaaccgaatgatccaattacaaccgactgccaaatattggatatccaattatgatcaaatcagatcagatcttatttttgaatatccaattggatcagatcgaatgttggatggggtgtctaaaaatccaatacatccaacatccaatcgaactaattaaaattttcat

SEQ ID NO: 131390 - DNA, 984 bp, Cannabis sativa
taaaaatgtaaaaaaaatattctttaaacgtaaaaatgtaattattttataaaaaatggtaccttatgtaattattcctttttttttaagttcttcaaattttatttttacttttgtactaagtctttaattttctgacattaatttatagaaaatacagtattttgatatttttatattgtacttttattattttattatttgtatattattttgatgtcgtttaaatgtatcaaattatatagtaacttaattagactttattataaaaagtactaaacactatcctaccatttaatatttcttattaaaaaaaatattactatacatctccccagtccccaatagatatataggatctagtatgatacttttttaaaatgtaaaagttaaaatcatatttttaaaataaattgtcaaaaagagtaaaagtgttaatgaagaaaataaaataaatgtcattctttgtctgaccacgtgggggcctatctgacaataattgcagcccactaggcaggcccactgattccctccctagccagccacatgttagaattgggcccagttcgcacgtgctcatggcgcaaagcccatcgtcaagtatacgtatgtaacctccttcacacgtgttaccaaatcaccagttccttcctccaaaaatgttaagtaggagtgggcatttgatccaatttaactttttttttttttcatccgattcaattcaattagtaattagatttaaaaaatcatcatctgatccaatccaattagacttcaaaatccaattcaatcaaatataattactaattagattggattggatcagttttttaattagatatccaattacaaagccaaatttcaacattaacttaaaaatatgtagaaaaatgcataaaaattaagtatcaccttttatttaatggcacgtttactatacagtaatcagaatcggaataaattaatggagaaatgtaacggaat

SEQ ID NO: 131391 - DNA, 508 bp, Cannabis sativa
aaaaatattaatacataaattgatcatatttataagataaatatggactcatcaacatttgttatatatagtggcagatccaagatttaaagtgataaggggtataatttttttttcgtaaaataggggacaaaagtaaacttaaaataaaaatagtgttgttggtaggatttgaaactttatcctctaacatttatataaaataacttaattattacaccaaaaataattttatgtatacaaatattatcttttattataaatacatgttgtaaattataattaattaaaatacagatacattttttctttttttttttcaagaaagtgactgccctctcgcttcaatgtaggtccacctaataaatatataaatataaatacatatatgtagtgtagtattgttataatatttatttaattttattagtccttatattatattataataaacttatagagctcgtttggtacgccgtataatagtcatattgtattaaataataaa

SEQ ID NO: 131392 - DNA, 506 bp, Cannabis sativa
  modified_base (114)..(116): a, c, t, g, unknown or other
ttacaaacattaggtacttatgccgctaaaaataaacattgagtttgtgccgcttacaaacataaaactttaagtacttatgtcgctatttaacctaataataataataataannntaataataataataatatgtacatgcactactaaaaaaaagtttttgggtcaatcaacgcgtctggtcaaatttgttgaccgacccaaaaatcaacctacacttttttgcttaagttattcacagatgccaataattaataattagcgtcaattatttatccgacgctggaacaaaaactgaagcaaaatataaaatataaaaaaatatgtatacactattagcatcggtctacaaccgacaaaaaaagtcattatatataaggtattaaaaaaattaattatgggcttttgcccatctttaaaaaatcatacttatatacatcccaacttaacctaatctaatctctctctctctctctctatatatatatatatttgttttttagatt

SEQ ID NO: 131393 - DNA, 925 bp, Cannabis sativa
tacccacacttttggtataattatatagtatttaaataagaattttataaaaacacacaagtggcgtccttgttggacagggcgttacacttaacaaatcttgaatctagctcaagtaggctatcatctttttgccttggactgtgtattcatctagtttatgatttatgacttagtaagtcgttgtgtatgtccaggtaatcagcccgtatctcgtgtgctagcctgaggccaacaataagagcttcacatttagccgcattggttgaaactgaactttatagcctcgtgcagctatttccccctaagtgccccatgcctgcatcaggcaggtggtcaatgcaccttctaggttgaattgtcttgctcttacttttgctcttgctttcacttcttctctggctcttacttttctcccgaatcttgatcgtaagagcagtataagaacaataacataaacattaaggcctagcttaacaactaggttctcacaaaaagaactctctcctcacatataagaaaatatgcaaaaataaaaactagaagaggtaaatcatttgactgttctctaggttctatttatagtaggggtattcacagattggtttggtccgaattttcatagtttttgaaccaaaccagtataacggttttttggatattagaaaccaaaccagaacaataaatttctcaaaccaaacaaaaccaaaccattaagaacggtttggtttggttcgaaaccacggtttaagtagaatttattcatatttttttagtaattgtactgtttttactaagtttttaattttatttatcaaaatatatatttaaaatgataagtaatagatctataacaaataaataatgatataaaaacattctcaaaagtcaaacataacataaaaatctaaaattcatgcaataa

SEQ ID NO: 131394 - DNA, 1159 bp, Cannabis sativa
aaagatatatgctagcttcccctacattgaaatatttacattaaagagttctttctttatcatcaatccaataagtgatcagaaattatttttaaaattaataataataaaaaaaagagaatgagagaaaaagattggagagagaaatacatgaatataatatattaaaacatactcgataaaggaaaaaaaattctttatataaaccataaagtatgaaatgaaaattcctagtcaaatattaactagagtatgaatcaccactatgagaaaaagacttagaggatagcttttaaactgagaagaagtctttcttttttcttttcttttaaatgtaaatggtataataagtaaaacctttcaaaaaaaaaatatatatatatatacagtaaaatccatcaaaatgaaactatgctgatagattttataatatctcgtaaatttttttttgaatgtatattttttttattaacctggaaatttcattaaaaggagaaaataaagagcacaaaccagctcataatatcaagttggatggaaacaaaaaggtcccacaaaaaaagcgtggacggcagggttaatcttaaatttccgtccaaataaaaacaaaaatcaaaatcaaattaaaagcgtgatggcctaaactaaatagccattagccacaacttacacaatctaacaatctaataaatatgtatgaagataagataagaacgagtgtaaactatcgatcgacaagacagggcgttaatatgtggaggtatattataaatgatctttcctgacataattgcattacaattgaaaaacaccaattctattaacttgcattataacattatttacacgtggcccacacacattatttttcattcttttttcgtttcctgcttaaataaatatgacaactaccattaaagtttttttagtagaaacaagttaaaaaaaaaaaaaaaaagagaccaaaaattattcatacttattaatagatatatatatatatgaatatgattttgtcccgtgatgtacttttacggaatgtattctttggtacattagatgagtcttgggtacattaaatgagtgtcaagatacgtttctactttttaaccctaattacccttagatcaatctcaaccgtcagatcaaataactttct

SEQ ID NO: 131395 - DNA, 880 bp, Cannabis sativa
  modified_base (809)..(811): a, c, t, g, unknown or other
cggtttgccaatagtactaacaagtgcactgaggttgtttcgtccccaatattgcaaccccaatccatttagacggatccaaacgggaactgaattcaccatacgagttgtgtcaagatccgtggaccaaggacgcaagacaactggtttcttgtcaaaatgaaccacacctgcctcaagaatcagatcacgggttgcttcatctctgaaattaaccagactacaccccgaatgcatacggacgatcttctcaataccaagattgccccaaattctcttcacaaatccttcaaacaccttgaatggggggtttgcacctaggacaatacatacaattgcatttttccagaatgaagcttctacttctaattcctctagatcaaggttagccaaaacttgatctcctacacggactggttcagtatatttgagtctagaagaaggggtaggtacctgattagaatggaacttactccacaaatccttcgcatcagtctggtaatcggttatctctgcttcctcagcccagcttccagttctcgaagaagctcgctgttgcacctcgcctccaatgtccactccaggatctgaaatcaagatctcgcaggtatcatgaaattcatctgtttgttctccttccgcagtagtaccgtcagcttctacctcttggatcgaagggagttcgtcgatcgaatccaggctagtcgtggcagtaattccaggctttcgagtgatccgcttcttcttcgccatgggagaagcaggggaacctcacacgcctattttaatcaactactgatattgacttnnnaagatacaatggtaagtttataatatcttgactaagttcaatatccgtccagtccaatgtatactccat

SEQ ID NO: 131396 - DNA, 1086 bp, Cannabis sativa
  modified_base (1057)..(1060): a, c, t, g, unknown or other
aacatacttgtgagtcgatctaagatcctggtaaaataatttccaacacgttgacccacaggcgagacctgtgaggcagaaaaggtgagcctttgactcaatttgattcacggcattgaaggaagaagtacgataactcaacttgtttcaattcatacgggaagccttttaccctatctgggtgtcgaaccccgtcttggtcccaaagtcgaatgggaagtggagggtttgcgtagacttcaccaacttgaataaagcatgcccaaaatatagcttcccgctcccctgcataaatcagatggtggatgccacgaccgagaatgaggtactgcgctttatggatgtgtactcaagataaaattagatccccatgaaccctgctaacgaggaacacacatccttcatcacagatagagggctttactactatcaggtcatgccatttagactcaaaaattctgaggccacatatcagagattcatcaacaaaatatttgccaaccaaattgagcataatatagaagtgtatgttgacgacatgttggtgaagactaagaaagctagagatttgatcaaagacctaactgaaacgttcactaccttgaggaagtatcagatgaagcttaacctcgctaagtgcatctttggggtgttgtcaagcaagttcctaggcttcatggttaatgaaagggggatagaggccaatccagagaagatacaagcactgatagatagggaatcaccgaaaaatcagaaggagttgtagtgcctaacaaggagggtggcagccctcaatagatttatctcacagtcgacagacaaatgtctaccattctttaatgtgctaagaggaaataagcaatttgccttgggtgaggactaagaggaggctttctaaaaattcaaagagcacctgggaaagccacagatgttggcaaaaccagagaaaggagaaacattgtccctttacttgggtgtgtcaagatatgccatcagtgtggcttagtaaaaagggaggggaagcagctgttggaaatgttttaccaggatctagatnnnntaccatgtatgtttcattaacatcct

SEQ ID NO: 131397 - DNA, 577 bp, Cannabis sativa
gatcctttaaagcaaaggttttgttcagtttttgaatgaagttgttcacctcagcagtattattcccagtcacaatgatgtcgtctacataaattaggacaagtaggatcacttgttcagttgagtagatgaacaatgagttgtcagccttggaatttttgaacttccaattgttgagagtgagttttaacctgtcaaaccaagcacgaggtgcttgttttaacccatacaaagatttctttagcttgcatacatactcgggtctgtctttatcttcaaagcctggtggttgtaccatgtagacatcttcttccagtgtaccattaagaaacgcattattgacatcgagttgtttcacttcccaatttctggacacaggaagagttagcacaattcggattgtagctgacttgactactggactgaaggtttcactgaaatcgattccaggtctctgatgaaatcccttttcaactagtctggccttgagtctttcaagggatccatctgcattccatttttctctgtacacccatttatttccaactaagttgtatgcatctgaaggaggtacaag

SEQ ID NO: 131398 - DNA, 1098 bp, Cannabis sativa
ttgtaccatatgcacttggcaccccataagcactagtgttggaagaattagtaacctgactaatcattgtacaatatgcactcagtaccgcgaaagtactagtgttggtaggattagtagcctgaataattgttaaccgtatgcactactaccccaaaattactagtgttggtaggattagtaatctgactaatcaatgtaccatatgtactcaacaccccaaaagtactagtgttggtaggattagtagcacaagccattgttttaccatctacactcagtaccctgcaagtactaatgttagtaggattagtttgtactttctaaaacatgcatgttaaacatgtacatatgtgcattttttatactaatcttacctcacttccataatcaggtgtgtcaatcaaccacagtggaaaatacttctcaacaattctaaggcactaagtcccaatcacgtaaaacaggtaagcatctctttaaaacactttcagggacttaaactcaaaaccaagagtttccctatcaataaatagcatggaaataccttaaatatcgagaaaacacaaaaactgaggtacccaaaaatcaccccaactggtgaaccggattcccgaatggttcaccatttcttgggttctacctgggaaaacggtggaccgtttcatagcagaaactccaacactccattttcttcttcaattctaccccaaatcacaccaatctttttagaatacttataacatcataataaacatatcccaccacttaaatgcaacaacaaatcccagataaggaatccgccattggagaccaaactttgaaattccaaaactcaaaacttggttcaagccacaacagtttctactagcctctcaaatcgaccttaaaaaaaatcataaaatcaagtttaaaacagtttctaacaacatcaaactcgaacagaaacaatacctcaaaatcacacataacaaccaacttttcttcaaaattccaaagagaaaaggacttacggtgtgttagatatattttacaaggacctagatttactaacaagtattttcttaatatccaaaatatgaatttctaaaatgatga

SEQ ID NO: 131399 - DNA, 669 bp, Cannabis sativa
gttctaataggtcttgtttgcgtttgctggtgtggtattcattttgtagggcgtaaagcgttagggcatcttctcaccaagaccatttcctgcaattcgtcgttgccatcgtcgtcgtcgttatcatcggcatcatcgatagtagtagttgtaccaacatctgattttcttagcatttgttattgcatggtgatgatactcacattttgttacgctattctagtgagtttccagcttttgatcaaagaaagaagaagaagaagaacaacaacaaatgatacagatgagttgaagtggtggatttcaccatttgtattaatttgttggcttgggattcattatcacataaccttttttgtaaatatattgaagcgcaatgtggaagtaatcccggaaggtcctgaatgtattttggctttaattctgatcatttttatcattgcgccactcatttcgttacctttttttgctctccgtactttccattcctttgagaacaaaatatttgcagaggaagaacaagaattaattcgagaaaccaatcaccaaaatttgtaaccaacaaaattctatttgttataaatagtattaattatgtggatgtcaaaattttttatttattaccattaatgtaatcaacattccctttttcttagtttccctttctct

SEQ ID NO: 131400 - DNA, 514 bp, Cannabis sativa
aaatatgattttgctaccaggctgataatttcatcaaggaagaggccgggtatcttcgtctagcaatggggcatgaaggtgaatcacttgatgagtttgtggatgcacacaatacatgtttaaatgatctcatgtactttcctacccgtaatgcttatggcctatcgagtgttgctggaaacatggagaaacttgctgccttgcagaatgagtatgagaacgtcagaaagaatgtggaagatgatattaagaaggccacaaaccttgaaaagaagacgaaaatcctcacagatggttatgaggtatgtcttgtctggcttagcttttgcatcttatttctggcttaattcttcaatttgaaacatgatcaatggcatttttatggcaatgtctacttctgcccaacatcaactttgttgaatatgtaatttgacttaggaaagtagtctgactagggttttgaattaaggtagcggttggttggaggtaatgaaatggaatggaatggaaagga

SEQ ID NO: 131401 - DNA, 758 bp, Cannabis sativa
gatgaggttaactggattagttatcgagacttctaacatgcccaaacactggattggataaattagcctgtctaatccaatccagtctgcgtaccaaacgggcccttattgtttttggacatttttagagtacacacccctaaactgggcgcactagtgcgaccgtttaatatgacaatattattggttatagtgttagggtacacagtatttatgtgtggtgtaaaacatatagtgaaagttactatttttaaatttagattttttcttcaaaagctgaatctgaacggacccattagcttcactgcaattaaccagcaagaatttaaaatattttcttcttcttcaattcgtaaactgagaagaaaacccattgttcctgccaattgttcataccagcccttcttcatccccatacaataaaattatatgtttgtttttcctttttaatacttttttcaaattaatctttcttgtatgaccaaaaacttaatcgtatagttttcatcaacataacagtcagatagaaaaggaagaaacaaagaaatttgtagtttttttttattattatttttatgttgaaaaaattaaattgataccttcactaatttatcaaattaaattgacttaccacatgaatcactcaaaagattaactcactcagtaattcgaatagagttctttaatttaatttcattcacagatgtttataatggaataacttcaaataaatattcaatggtttcaaaaaaaaaaaa

SEQ ID NO: 131402 - DNA, 1055 bp, Cannabis sativa
actcacgcccactatagcatctctaacaatttagatttgccatctttgattcctactttgtaaccttaagagagatatatcagatcccacctatagtgatctgaatagtgttatttctcagtatcaacacagctaaaaggggccaggagtaggtcattaacggctaactaagagggccaaacctctataaaatcgttgtgttcatttacttttaagttctaattgtgtaacacatgggaagcatcaatttaatacgaccacagtgttggttggccaatttctaaggtcaacacttatatacatgtatatatattttttagtgcgcatccgacgctaaaagtcattgcgccaggaaaaattatctttttagaccatagaaatagccacaaagttccccaacaaattcaaaaaatattaaaaagataataatttaattactttttatgtaataaatattttaattaactaagttatatatatgttaattaattaaaatattaatataatttttaaaatagagcatactagatttaagggggatcaaacacatttattgggacatggccacgaattttcctagaaaattgtccaagcaaaccgaaaaaataagaatatggttcatatgtattaagatacatgattgacatcgttgtacgtgcaaaccctaaccattatttaaacgatcaaaaagttgtaagttttaatcattaattttcttatttattatattaacaaacaataatatatatatatgtactaatataaatatttacttatttctagagtttgaggaaaagaagacatatgatgtaaaaaatgaattattaccgttacagcgatagcggatagaacaattgatggcagtagttcacaaagggttattagattgatgctaaaatgtgtaagaattttttctcaagcttatatttttatgttaacttcaaacttttatatgtttaaatagatatattaacttgttaacttttggtgttgggataatatgccctaaataaaactcattttaatctaatctgatttgttatcaatgaaagatt

SEQ ID NO: 131403 - DNA, 1071 bp, Cannabis sativa
gtgggacaatgtccacaatatttcccctcaagatgatggctattttttgctcatcaatcttgaaccgtatcaaagtggatatagtcactatatgtgcggatcggataggatcacttgcctgcaaggggcaagtgatatggctctgataccatgttgaaaatcatggggttccatctcaaaaccaattggcaatgaatggagtagctcatgttcttatatatggctcaattttctaccatttattctatatgggacaatatccacaatattgtctgataggttaaatgatatctacactgataccaaatttacgaaggagatttgggatgcctaatttggaagcaaaatacaaggcgggggaacaagaaattttttaatttttgaatattttgaattttattttagtgatgctaaagattttcttcctcaaatccatgagttacaaattattgtgaacaagttaaagattcttaagattgagtttctcaaagtattttaagttggtgcaattgtggcaaagttaccactaacttagaagggctttaggaagaaatccaaaaatatatccaaattgaagagaaatcgagattaaaaaataagaaaaatgtgaaagagcctaaagacgaagttttcaaggccagataaataagcatcacaaaagcaacaacaataataaaaatagtaaaaaatatttaggtcaaacaaaaaaacatccaacttaaagactattactttgtgtgtgaaaagtctagacactacccaagaaattgtagctaggcatcgtaagaaatctaataaaaaaaatgaaattaatgtcatagaagatgaggaattgattttgagtatttatatgatgttttttttgtgatatgaacatgtgatgtaatgacatgtttaaataaaataaaatttattttaatttatttcaggtacgtagaattctgttttgtttttattatagttacatcatcttcttctatccaaaactactactatatagcccaagggaaattgaaaaaataataggtgatattcataaatcgacagactctttaatttagaagctgatgt

SEQ ID NO: 131404 - DNA, 570 bp, Cannabis sativa
tcaacatggattttcctggtgtaggagctgccaatgtgaacaatccatccgttaatgttgctactactgctactgagtctgatgaagcctggtatcccgattctggtgctactacacattgcactccaaatcctgccaatttcactcagaaacagccctatactggttcggaacaagtgaatatgggtgatggtgctggccttccaattcaaaacattggtaattctctctttcactctccttatcactccaaacaattcattttaaataatatgttacatgttccctatctcacaaaaaatctgatatctgtttctcagtttgcacacgataataatgccttttttgaattctttcctaatcggtgttatgtcaaagatcaggtttcgaaggagactctgcttgagggacaactcaaacatggtctctatgtcattgacccttcccaaatgcatctgtcaaaatctgcagatcattttccacccactgttatgcatagcctttacaatactagtgtctctcccttttctgattccacttgtaatcctttttcattgtggcataagaggc

SEQ ID NO: 131405 - DNA, 794 bp, Cannabis sativa
aaagaggaaacaacaagagcaacattaggaagaatagcaaaaggaccaataaaaactggatcaacagtggatggaataacaatgtcagactacccctggacaccagcaatatcagactcccctgaacaccagttgtagcaggaagagactgagactcccccttaaccaaattagtctgaactagaggcaaaaaagatggagactcctcatgagcgaaggaaaataaggctaaatcaggctcagatggacctgaaactagtacaaatgaattaaccagaggctgtgatgaccttattggatgctcaaataagggactatcaccatcagaagaactagaagaactatcactagtgggaacagaagtataacaccctctgaggacttaagtacttcagttgtggctatgagaacaataatcacagccttctaaaaataaagttatctctactaatcataagcataagactcagtcaagtggtgtgtgttgtttaccacaacaaatttactaatttttattaatatttactaattactttagtattacggtaaatacaggatgatcccacgagaattgttattaatttattattcaaaaattagtaacaagaattaaaaaggagggttttgatgatgaatattaaataacataaataaaaaagtaaatagaatgtgatactacgatattcaagaaattgttaaagattaatctccaccctcaataatcactcttccgcaaataatgttgaagcagtctgtaatgtccccgcttcaagcctccattgggtccttacacc

SEQ ID NO: 131406 - DNA, 619 bp, Cannabis sativa
attacgcaataagctctgacttatttatttgttcatatatttataattaaatgtttagctagaacccctaaacagtcatcataccaacacaacaccaatatatactccgataatatgaatgatattatgtacatagtacatttattattgaactgaaaaaaattattaaaagaaaaagaaaaatgatttgagagagataactatacaatttaatacaaaaatgcaaaaaatatttatcagaataggaagaataaatttaataaattttcatctattgcaattaactatttatgtaaagaaaattaactgcaaaagtttttaagtttttcacctacttaacattatcttgtgcgtaaaaaaatttattacttattaagtttgtaagagttcatgttagaatctatatgtatactagcagaaagctacgtgggaggcacgtatacttaattttatgctaaatattttatattttatttaaaaatgatataataaataattgaagaaaaaatattattagttattgcttggaattattattatgtatattcaaataatgtaattaataatgttgataattaaactaacaatatgtgacttgcaaatatcaaaatttaaaatt

SEQ ID NO: 131407 - DNA, 655 bp, Cannabis sativa
aacatgcattccctactactactcaaggagacacacatagcaagatcttactcactactcggaaaaatgatgtagctttgcatgccgatcaacatggttacattcatgaacctcatttcctcaatgaagaggagagttgggagctgtttcagaacaagtactcttctactggaacagattcatcaagtaatatactatacttcactctttgtaactcaatcatcataataatattcttcttttatctttgctaccatttatatttatacatattttacatgcctacacatgacatagttacccatatttatacatattattggtaactatctaaatttctaattcctattggttcttcctttcatctatagaaaagtacatgtagcactagggagataaaatctaactgacaggtctcaatataattataatttatgcatatgtttgacatgatgatcatccagtagtatgtaagtctctataattaatgtttcattacttaataattgatttttttgtgaatgttcaatggataaattcagactcaaatgttgatgaaaaaagcaaggaaaaactagcactagagatgcttagaaagtgctctggtctgccattagctatcattgtgctcgctgggcttctttctaagaaacac

SEQ ID NO: 131408 - DNA, 1153 bp, Cannabis sativa
aggaatagtgaggaagtaacaatggagctggtgggaacaaacgtaaagtctcgaagataacacattgtaggtatggtaatttggaaagatcttgttcttcgatcaatttatgttcaccaatttgttcattaatttcggctttagctttttccagaatatgaggatggttgagtaaattagaaagtacccattctaatgttacagatgttgtatcagttccacctaacaatagtgactaaaaaaagatcataaaataaattaataaggtatataacaagatttaatatatattaaatacttctcaataggtattacttattgatggttactaaaaaaaaactacttaatttaagtttcaatgcttaaaaattaagttttcatgtttaatttaattaattaaaaaaaacatctcattttacactatatcaaaaatatatttatacaaaaaaatatttgacatcactcacaatcatagcccatataatataaaaataaaaaaattaattagataaaattaagtggagaaactcaaattttcctcacaatattcattcatagctaatactcaaattaaaaggaaccaatagtactataagataatatagatgtaatttaatattaaatatcacatatttttaacttaataattaactattatagatcatataatatatttttattttaaaaatataaatatataaactcaatctttattaacttattcgcataataaaaattttaatttttttttctttgaattttatgtcaaatttatattatttgatttattaaaaaactttagtttaaaaataaaagaaatgttaaggtataatattattttcaatgtattcaaatatcaaaatattttaattaaatgaataatataaaaagttgataactaatcatgtgagtggtgatataataaaaataaacattaaccaattaaaagtaaatataatatagggtgattttacaatatactctctatacacctttgacttgttttgacatctaaaaaaaaactttttagtctaatttttttttatattcatattcatatacgttatagttattttttttttttgaatgattatagttatttaatatatccaacaaaattttgaaaaatttgaaataatttacaatattgaaa

SEQ ID NO: 131409 - DNA, 559 bp, Cannabis sativa
ttcataaataattataacaaaaatgtatataatttaatttttacatcttatcttaattatagtacaagttacaaaatacatattttattattatactagagaaagaatagtaagggacaaagtggatattgtagattgtttgaacactactttttataatctaaattatttaaaatttctttaacaaactattatgtacaaaaccttgaaaaaaataaaaaggggtgcatcgacacattcttttttagggaatgcaccttagaatagcttcctacgatactattaaattttcaacctgtaaccatttaaaaaaaattaagagataaaacttagaggaaatttatagtacaccccttaaatgggtgttgtagtagatcccattatttgtttcagtatataagaaagttttttaattcaagtgcctttaatgaccatgtacgtacgatgtagtattttacgatcatctataaatttttacaaaattttaaatagttttcaatgtcgaaaataaaaatcaaacaattacttatcacatgtataagaaaaaatagtcacgcgt

SEQ ID NO: 131410 - DNA, 547 bp, Cannabis sativa
agcaacaggttcatgggttgaccaggtcaccaaattgacctagtcaactcttctttctaaaccaaaattttatgttttaaaacagaaaagaaagcttttaaaaaaacttctactcctgttcgtgtagtgaatggacagacgagatcaaggaggaggcggtggcgggatgctgtctctagctggatgagacagtggcagcgagggggaggagagctccgttcagcgactactaggagaggagaggggttaaggtcctccgttcggtggctgggtcgtcttcgtcaaggaataaggccaatctttgacttcctagtgccatcatcgaggccagaggaaggggagggggggttgggtggttcatctcgctcttgggagaggacgaagggtcgaggtcttccttcccaatagtttagcttaagtttttcttttatgttttagtttttaggtgaaaacatgttagaaaaataaaaaatttaaaaactaaaaaaaaaattaaatgttcaggttggcgggcgggtacaggtccaacctaaacccaagcatgtgt

SEQ ID NO: 131411 - DNA, 698 bp, Cannabis sativa
aatgtgtaatgacctttaaactcgctgataatgtatagttaaaaggtacataaatgcatgtacagtaattaaaaataaacttagaaatattaaacacctaaattatacatttatagaaaattttcaaagtaataaggtgacatttcatatttttttaacttgtttttacaagttattggagcttcaaattttcactaaaaaaaaagtcatcaatttttactaatgtagtaaaacgggcatttcttacaaaatattttaggttgcccattctttcatgtgatccaattttaatttaattttatttttatttatacggatggttaattaatatttaacttgattagttataaatttttatagttcaactaatatattattttttctcaaaaaaaaaaaaaaactaatatattattatttatatatttaaatttatttacttaatctatattatatttatcgagttcatcaacatttattcttaagatattttatttttttattttagataaataatttagtattaaaaaaattattttttttattattttatatatgaaaataatatctatatttatactgtcataaatttagacaaacatgagtaaataactttatattcttttctgctcttcactttgcttcatattctttatcaaagttacacatatatataggtgaatacatgcatgtataatgta

SEQ ID NO: 131412 - DNA, 640 bp, Cannabis sativa
tttttgttactaattatgttgtttaatgtaacctatgcaggatgcttcagtggattcctcaatttttgacaacaattctaatctagcaagcatgaactatatgccttgtccagttcaaccatcttattcaaacatgtctctttcggtttcaaaatttagtgtcgatagtgacggtggtggtaacaaccgtggtgaatcattggacagcggcctttccccgtactttggaggagccgagtcttctatgaattctcctgatttcgatttcgaagctagagaaaatgccaagttgaggtacaaagagaagaagaaatctcgaatgtaagtcttctaatcttagccctaaaaataagaaaatatatactattttattacatattgttgattttgaaaaaataaataactcatatattaatttagaaagaaaaaaataattagtttaaggatgaggttttgctctcaagtcgattcgagtcgttctttgaagaatggccgtatgttcgccttaattgcatgtagagccgatgatttttccatcgtcacagatgtcctctctctttcaaaacaaatttagaaagaaatagtaagaaatcattatcttgttcaataatttacatagtgttttataataagatatttc

SEQ ID NO: 131413 - DNA, 673 bp, Cannabis sativa
tgagtagatctaagatcctgttaaaataaattccaacatagtattatctctcagtatcagtataccaaaaaattacctgctaactaagggggctgtacctctataaaatcctgtgttcttttagtttttggtttatattatgtaacacatggcaaacatcagtattaatacgattttgttgtcagttggctaaatgtgaggtcaacataagtgatatgcttctaaatccttaaaaaagaagttaagaaagaaaaaacgttaagaaatgtgagaactatgaaaattttatttgataaaaggaaatttaagtaataaatagtacaaaacgtcatttatcaacaaattttaaaatatgaatatttacctatatattaggctcgcctctaagtgtaggtgagttaggtttgcgtctagagtccacctaatccatgggcaaaagaaattttcattttaaaattatacattattttttaataattttgaaaaatactatatttttttttctgacacactaaattttattttcgatcatttaccataatttttcatagattctctttgggccagtttggcacagttgtgctgtgggaaaagcaactgtagctgtgctgtgagaaaaagcagttgtagctatgctgtgagaaaaagctcctaagtgtttggtaaatataat

SEQ ID NO: 131414 - DNA, 751 bp, Cannabis sativa
  modified_base (231)..(232): a, c, t, g, unknown or other
aataaggtctttccaatataaaaaatgaaaaaaaggattgtatgtttacaatgtaacaaagtatattaaataaattaattgatttaaatttattattgtaaaaaaaatagaattactttatatattattttttaatttttgtgatttaggttgttcggttaattattgtagagatttttatgtggaattccgtaaaaataaaaaaaaatatatattttgaagtgtaaaaannaaaaaaaaaaaataaaaaattgatccaaaagtttttctttttatcaaaaatatagttaaaattattttggtgtcttttggcctagaagctccgctcctcctcccatggtgaagaagaggaaaggcgttccgaagcctggtgctgttggcaaaagcaacgtgagagcgagccctgagctaccttcaatccacaacgatgttgctgaggtattcctagatccgtacgaagaactggaaccggagaaagcgctggttacagaggcgttggaatcgacccccaagtcgacgaaatgggtggatgacactgaggcgatggacttccaggcatctgctaaggttacttggagcaaatttaatctgaatcaggtgaaaaccccttcctctcaactatcttttactgaaccattaaaaattggggatcaggtggttgcaaaaatagatttggaagaagcagaggtcgaagcttcattctggagatcgttcattatcttgttggaatttattttaccatgatcttaga

SEQ ID NO: 131415 - DNA, 832 bp, Cannabis sativa
tagctctaggacccatcatcttttcactagtatgtatgattaggaatttctgcttttctttggaaatatttggataacatatgatttttctaatcctttttcctgcttttatcttgaaggttaacatatgggatgagagaaaagtttttggttctcggggacaaatgctgaaggaagagcttgtgggaagacatgcagaaaataataatagaaatggaaagcagatgaacaccaaattggtaatgcaaaattgcaaattagaatagcgattggatgatgaaatggatattgtaattatgtatttcgtttgaggattaactatattatttgtttgctcaaacagaaacatcctgttggaaatactctggacaagctagtttcaggttacaaggttctttatgggcagatcgatgaagatgtagttttgagcaaatgtaggaatgctgttaactttgttgagaaagtagaaaaggaaattggtggtgatataaattcaggtaaattcttgaaattgtttcagtgtgaccattggtcgtgatgatgtatgtcaatatgtgtacacataatcacttttacacctgttatatttgttctgttctgttagtattatcgcaagctttaacaagcacaatcatttggtacaccagtatatagtattttattgtacaatataatatattataaattgaattatatattatattgttatatagtattatatttggtattaatttgtatatgcatatatctacaaacgatattttgatataaattattttttcatatagtattatagaaaaatagttatacaatacaatttactataatacta

SEQ ID NO: 131416 - DNA, 688 bp, Cannabis sativa
  modified_base (628)..(628): a, c, t, g, unknown or other
aacctggcgcaaagggcattggggcaagatgaagaatgctgttggaatgccttagttccaactttgtgttagcttctactggagctctctcgtcaaaaaaaaaaataatatgcaaattgtaatatttcatttaaaaatagatattctatacgtaaaggtatatacctcaacaaatgtatcatggcagaattaggctaaatgtaccatggcgggatcagaccgaaatttaatgagaggctaacacaagtaaaaatatgaaaaaatatttatttttattcttttaattattttttaaatatatttttcaaaaaataaaacagaggcgggagacgatggcaccctcagaccctctggctcctggctccgtcattagtgccaagaaaataacaaataacacaaacttgacaaaaaatcatcgtgagtatttttgttgtcaacaaagaatatttcactaatcaataccagcacttttgcaatcaacaatggattatacccaccaccctatatacaccatacttataaacaccttaatctcttaagatcttttttgcctaattgatttagtttccacccatttacaaaagggaaatttacaaaaatactgtaatttgggttaacttttacaaanatactgtcacacggaaaagttttcaaaaatactgtctttttataaaacaccagtaaaaca

SEQ ID NO: 131417 - DNA, 1185 bp, Cannabis sativa
tcgggtattacttttcttacgttagccaaaccttaattgaatttgacattacttttcctacgttagccattaacgacttgtccttaaagtgagaagataagttgctcttgaataagatacactttctaaaggtgaatcttctctctctaccaaagatccagtgagtggatggtgaagttacatcctctatgtacctgaatcactgacctcctcacagtgcccaccgtcctctgtccaatcatcaatggctgggagtcgtaatcgtccaatcgcagtcctcgaccatgcttcgtgcgattagaagaagcaaatataaaaagcttacttggatcccacgtgacccatgtgtgaccaaaaataaaccttgggctttttcttttgcttaataggtcatcaagggttaggtcaaaataattgggcctcatatcaatgaagagagaatcgagctcagctgcctcattaacgattgaggcacatcaataatgttgaacaccattaggaagctcaagaagacaacgcggcttctctggtctgggcatcaaggatcgccgaagcggcttcttaggcaagatggttatctcctctagcgtcagtcgatgttgcaattaacttggccatgaattatgaatctctctgatgtctgatggagtagccattatcttttgaagcttcggtggaggttcgaccattggtgcaacctctttctttgttagctccggtcggcaacgcatcccccatgagcttgacaatggtggtcaaccacgctgctcttccaccgttgagcggtgtcgtgtctcacccatccaactaagaacctccaaccaacataaatcgagtaagacaaagaagctaccggtgttagtgtccttcaatggaacgtcaatcatcttctgcagctctggtgagctgcggtttgactttgacggtgtatgtcaaagagccatcctatggtgcttgacttgaagtgttcgcaagatgcttctcaaatctaaaacctctgatgcttcacccttattgatttcgtcttgttgttcatcctcctcgatggtagtcactactgttgttaattttggaagcagcatcttcaaacaaccttatgccgacaccatcgagtcaacctcagtcgccattagagtgtcattggtgtttcgtgcctctctagatttttgtatccgatcgatcatc

SEQ ID NO: 131418 - DNA, 893 bp, Cannabis sativa
agggttttcccttgtgtttcctctgacgcattccactaaggggtcatcatcaaaatcttccctgtctagatctcaaaacttgcctcaaaggcaacccatcatcatctccatcttatggaaaaacttctctttacaagctaacttctgtctaatcttatgtaactcgttaggaattcggacaacttcgaggtcttgctcataatggtatccgtttttgtaatacccatctttaacgtaattgtcaccatcttctcttcttcatcattcatcttagcatctatatcatcactaacgttgtcatgttggttctttagatcgtctcctcgatcgttctcgttcaacgtatccctgacccttgcattgcttggctaggcattctctggctagagggagtttacttcctccacgatcgtcttgaggctgcctagaagggtcttcatagggaccgtcttttgtgtgaatactatgccactagcagtggtctatgtctttcttcagctctcaataaaagcaccaaaattttacagagaattttggaaactaaatatttaggaggtaaagaaattataacttgtaaaaataaagagatgaagattttttacatagtttgggtgttaatgaaccttattgcacgagttgtatattagcctctaagagcggtattgctgtgtttataatatttttactagaattcctaactctttactctaagtttctcttgaagaagatgaagacctagaataatattggcagagttttggctatatcagttggattgtccccttccatgagaattaagggttaggtttatgtatgagtaatattatgcttttcttactgggtctgtcgactcacagttctacgtttatgtgtaggtaaaggcaaggctaaag

SEQ ID NO: 131419 - DNA, 984 bp, Cannabis sativa
atttttaaattaattacaaccgttcaatgataatttaatagctaaaaaaatgtaaccatgatggtaacatatttaatgtaaccattgaaaactcctatatatatatatatttatgtctctctaatattaaatgtggctatcgaatgaaaattattggtttaacagttcttttttatttttctgttaaagttaacagttaaaactaattaaatcaattaattaaatattctttttaaaaattattttaaatatctaaatttaactaatttattaaaatatagcttagataattatttaaaagtaccaataattattttttatataaatctcaatttaaatttaaattatacattaatttaattaattaatcatactttataataaatttattagttcaaaattccaaacttatttgttaattttattgtttaataaaattaggtttttttttactaaataaaattaattagatatattttcttataaataaatttaaagttagattaaattttatatatttaaaaaatattgttgaattgtattaatttaatttttgttattattatttaaattaataattaattaataaaaatttaatcaaatatgcattgtattttattaatatttaatatgtatatatatgtcatagcgtgaatgaaacattctgtgttaggacgaagtccaggcagaagaaggtcattctgtcacgtaaaagtgaagaaaaggcaattttttttttattattatatataatgaattctagaaaccatgcaaatttgaggattagtgttttgataccaatcaatcaaaagtccacttactaataagaaaatctagactccttgacaattaaagaatgcaaatgaagtacctccattaaaattaggaaattagtaatttttctccccgaactttgacatgtatttaatcgtgctcctgaacttttttggccgttaaaaattcctctcgaactattgagattgt

SEQ ID NO: 131420 - DNA, 926 bp, Cannabis sativa
  modified_base (37)..(38): a, c, t, g, unknown or other
aaaacaaccctaaaaactcactaataaataaagatgnntagcccacaattaaacaagttcaaacaacaaattaatcatttatatactctaatccacatgcgtccaagaacattcaatacccaaaggcaagcctttctaataatcaattccagcaacaaaactcagatttgaactcaagagaatcaaagtttcaagcttaccattaaccacaagcttccatcaccaacaattaactccattcaaagcaagatttcaagattaagcaaaaattgaaaatgatgaattaggaagagcaaaaggggttcagctagggctaaacaaaccaaaaaatgaatatctcatttcgtcaaaattcccttttcggtgattactaataatttctttcgaaaagatgattactaactaatgggtcaaacgaccaaaatgcccctaaggcctatatatgacataagcataaatcaagggcaaaaatttcattttcatcacatacatacttagataaatttcaagttattcactcaaccataaaatgccaatataaaataccgaaaatgtatttcggccctgaacccggttcggcccgaaatacccgattgtgactatatcgcgtcgacctatcagaaaacaccagaaaaaagacacaagtatactgcataataatatagtccataagcacgcaattaaattcaatttatagttttacccctcccgggtcaaaatcacgaaaatacccttggctcaccaacggggtcttatcatgtcaaccaatttaattcacatacaataaattatataataataaaattccataataaatatacatttaactagttagggtttgctaatccgattcttaatcaatgtgtattacaattatcccttccttatagaaatttcgtcccgaaatttacctgaacaactccgga

SEQ ID NO: 131421 - DNA, 822 bp, Cannabis sativa
  modified_base (27)..(28): a, c, t, g, unknown or other
actaatcagattgtaaagagttttatnnagggcataaaacccaacaggtaatcccaccaactcttgtctttgatgtatacacaatgaactcatctgatcaacaggttatcttgtttgttcgcaattgcccaaacatactttttcattgctgcggtgttccactctgttatcttcctcaaactaatcccccctgctgttttgggttgacatacagaatcccaggcaattggtcctgagccttgtgtcacatgatgtcctttccataggtaagctctgcagatagcctcaatatctctaattgttctcttcggcaataccatgatttgactccaataggaatggattgacataagtacagagtttacaagaatagcccttccagctaaagacaggttccgtgagctccatactttgattcgggctgtcattttgtctgctagcaccgtgcattatttccttgaaattcgtttagcacatatagaaatacctaaatatttgaaaggaacttccttcttgctaaagcctgaacaatcaacaatacattgtacctcattgtattccatactacaacagtaaaaagcttatttattagggttcagattcaaaccagaagaggttgagaaaagctttaacccttggagtatataatagatactcttgtaatcaccatgacaaaagagtatgacatcatcatcagattaaaacctataaagtataatagaacctacggtaatggttttgggattcccgggattagggtttgttcgtgtaacttacccggtttcataatgtgattagggcatccatctagcacgagacttt

SEQ ID NO: 131422 - DNA, 1059 bp, Cannabis sativa
  modified_base (1030)..(1033): a, c, t, g, unknown or other
taggtgggccctaggcacaggcctagcccgcctatgccgagggccgggcctgagtggagtagcccatgttcttatatatatatatatagctcaattctctaccatttattctatgtgggataatgtctacaatacgtgctactggcacgtaatcctcgtcaaaatctgtaggctataatcatatatcttactttcattaattatatttaaataattgttgaaaaaaaaaattatgttttaacaagaacatagtatgatataagttcatttattaaagataaaattatatctaaataatgtaatttactctactattatctactaataattaaagtttataagaaaaataaaattaattcacataaattaataaaaaaaaaataacaacacaaaaaatattaatatcatatgcatgctcgtattgtcttctatactattatatatttacttattaataaatgtaaagaaacattaaaaaaaaatatatgttagaaaaaaacacatgaggaaaaaaatggtaaaaacatgtagaaaattgtgaggttttaaaaaaatattaataattggtacaaacaaaacaaaacacacaactccaaatatgacaaagaaagccacaaattactaagaatctaatttagtttgagaaaataaaacagagcaaagattataggaaaacctcacctaaccggtgcgcaacaagtaaaaaagaaatatagagttatgtataattaaaaaaaaaaaaagttaaaattctaactaaagtaaataaggatatgtatatattaaatattgtgtcatggatatgtacatattctaaaaatcgtgtcaaatttagcacaaaatatagcatggaccaaattttaaacacaataaatattatatttttatttatttttttgccacttattaatttaattaatcattttttagattttatttttatatttaatagaatatttatatacttttaataaaaatttaatggttttgttgatatttttgtacatattttgtaaagaccgcttagttnnnnttggaaattagcagttaatcacgttt

SEQ ID NO: 131423 - DNA, 645 bp, Cannabis sativa
ctttgtcaagcactttgaaaatttcatggggagcaagagttcagcggttagctctattgatgtgacttgtttgaagcagggtaattgtctgaacttggatcaacaagttcgtttgattcggccgtttaataagggggatgtgaaaaaggctctcttcagcattcattcttccaaaagtccggggttagacgggtttggctcgggattctataaggacctttggagcaaaattggtgatgatgtttcttctgcagtcctgagtttcttttccaatggccggctgcccaacaccttaaatgagactgtcatctctttgattccgaaagtgacaaatccttcttcagctacggactatagacccattgcttgttgcaacactgtttataaatgcatctcgaaaatgatctgctctagattgtctgaagttctgccttccatagtcagtaacaatcaaggtgcgtttatcaagaacagacttctagctcataacataatgatttttcaagatctcttgaagggttatactagaaagaatgtctctaccaggtgcatcatgaaaattgatcttagtaaggcttatgatactgttgattgggactttgtggaagacttacttaggcatctgtgttttccttctcggttcat

SEQ ID NO: 131424 - DNA, 587 bp, Cannabis sativa
  modified_base (552)..(554): a, c, t, g, unknown or other
ttgttattttggattgaagtaaaatttggagtgtgagtgagaggggcagttagattaagagacgttaagtaacggcggcgcgtatatgtgttaaaaacgcaagtaaagagtgagtggtattttagtaattatacacctcacatcattatttattttctttaaaataaaaaggagtataaatgcctctttccattaccatttccatttccaccacttcttacttttattttctttttcaaatttcaaaacaaaattaaaaaaaaaaaacctaaaaaaaaatatattgaatcttaaagatctagctttaggggttcggatccctcgatccatttactctgttctcgttctccaacccttctttctcagatccttcgaagccctttgttttgaatcggagataatgaacttttgattttgttttcacgtttcacgaggtcagtattttttattttttaatctatgtttggctgctaagaaaatgagagattttgggttttaaatcttgtgtttgtctagccttatctctagtgagggtttttttttttttttttnnnttttttttttaaataaaaaaaattttttttttt

SEQ ID NO: 131425 - DNA, 1749 bp, Cannabis sativa
  modified_base (1198)..(1198): a, c, t, g, unknown or other
tttttcttattgtaattatggaaattaatctagtttcccattttatttcttattgatttatggaaaccaatctcaagtaattaatacctataaatactggactcatctcactattcaatgacacaaattttattcagagagagaacacttaagaaagaaaactcaatataagagtaaattactcagagattgttgtaaaagtttttgagagagatcaagacattcttgctcatcttctcacaagtcaatacaatcaaagaagagtaggctattaccaactataaggggccgaacctctataaatttgatattttctttacttttttattatttatattctattatttaattattctcaatctttttaatttgacccattatcattggctaaaagcaaggtcagtaagcctgaatcctgagtaatcatgaactcctgttcatgtttttagtttctttgattcatttattaaagtttctctaagaagatgattcttacaacttctattttgagaatctaataatatggatggctgggaacatgatctagaattatacaatcttgactttgctaatgaattgaatattgatccctaagtgttcatctagaactgaaaagttgtgcataaatttagattggatctaaattatactttcatttgtcaattaatgatactaaaggatacataagtaattagaaagataaaataataatttgaccaaaactaattacaaatcgactcaaggagggctaatcaccgaaatcgattatatcaataggcactgtagtaaaacttcgtaaatataattctatatttagtaagagtttaattatatatttatagtaggataatcatagaattaataaacaacattatttagttgatgagattcaataaataatgtaatttattggagcttagaattgtaggtctatgatctccagatcgccaccttgaaatactttcaagggtagggataaaagtcgtatatgaaagttcgaaaaaatctactttgatttgtcgaaatcataattcattgtctggataaaagacaccaccaatatcttgttaagacataggtggcaccacctgcactgtgttaggacacagtgataggcggccctagtgtagggatgtctccacttgatttttttttggttaattaattaatttaaaagataaatatttatttaaaattnaatttgaaaagtaattatagatatttgtgttggttgagatattctctcaaggtagttgagagattccgttaagtagttgagagattctctcaatcgattattaaaaataaatatctataacagaatttgtttgtattatgtattcaaataattaaatatgatttaataaattattagaataattaattaaataaaaaatttattgagtttatttattataccgtataaaccaaattctgtgatagaatttgaaataaaattttaacgtaattttttgaaaagcctaaaaaggattaatctgatttaagattttctctccaaaacactatagaattgttcgtactcatgtgttgagaatccaacaagaacttcatatatattttatcctactagcccacattactccttgtgtgtggtgtggaagatctggaagatcaaagtgtgagtttaacgtcaccgttccgaagatacaaaatacgaaaggactcgagaataccctgataggcttcgagacataaactatattttcatctattttactttcagattta

SEQ ID NO: 131426 - DNA, 1578 bp, Cannabis sativa
  modified_base (26)..(31): a, c, t, g, unknown or other
gtaaaaatgtaaaaaaacattctttnnnnnnaaaaatgtaaatattttacaaaatatggtgccttatgtaattattctaaaaaaaatttggtctttaccctaaagataaatggtatttttaaaaattattaaaaaaatatatgtatatttttttaaaagctacttttttttagataattagaccatatactgaaatttttaatttttttacttttatactgtgggcggaatttttttttcaaaattactgtgtagattttatactgtgtactgtgttaagttttgactgttgttttacggttgtttttcagttgttttattattatttttagttgttcagttttgtgttccactgttgttttctaaatacacaatattttttaaaagatgttcgtgtgatagtatttttgtaaaaattaactcaaattttagtatttttgtaagtttcccctttattgggccgttaaaataattgggtccaagcgcaggcctaacccacttatacttagacccggccctaactatttttaaaaaaaaatacttataaataataatatgaatacttaatgatacattatgtacactatttgcatcaaaaatattaaagatgacaattcacaacacaacacaatgatacaattcgaaatatgttcactgtcaaaattgacataaacgttttttgttttcctttttcctttgcagtatttacgtatccagcaggagttcataatgtgttcaaagtaaatggggcagacttcagacaatgcacagcaccagttggagcagtgccgttaacgagcggaaacgacgtcgtggcattagaaagtcgagggaaaaaatggtacttgtgtggtgttgctaaacactgtgcagtaggaaaccaaaagcttgtcattgttgtggctcccaatccatggtctcccttaccttccccatctccagctccttcaccacttcttagtgatgatgtatctgatcaaaaccaacactagtttactacacacctataccaagtgatttaattataattaagttaatatgttttgtccaataaattaatcattttcatgattacacaaccctcatgtttatttagttgtaatctaatgagtttggaaacctatgtgtgtgcaagttataagaatttcatctcactttacaatgtattaaaaaataaaaataatttcataaaacattttatcgaaaaatattttattttctagttaaaaaaaaaaactaattaaaaatataatattacaaaacatacctattacaaatattatacatccgaactcgaaccccgaatctcagaccctgatccaggatacttgactcaaaccaatactaaggattaggataacggctatatacgattattgttattagatactttaaggtgttcaacatcatactaatatggtgcgtcgtaaatatttaacagttttctatattatttattaaattaaaatacgttgaagtagatattaaattaattgaggaaattacactctatactttttttatattgtccttttttatttttactctcttttttaaagtctatcatttttacttctt

SEQ ID NO: 131427 - DNA, 602 bp, Cannabis sativa
  modified_base (59)..(67): a, c, t, g, unknown or other
  modified_base (523)..(527): a, c, t, g, unknown or other
tcacaacataaaaatgatgatttataattagtcacaaattttttacttttagtcacaannnnnnnnntgactaaaagtaaaaaaaatttgtagtgtcatggcagattgggatttagaaggttagaagacattaataaggcccttttgtcaaatttagcatgacacttggccagcgattgtgataaattatgggtaaagtgtttgactactaagtattgttgcaaaaagtctttctgggatacttagatttgtgggaacgagtctaccttgtcgaaagggattttatcttttagaggcactaatacaaaaatagttttcccagacatttttaaacagtcgtttaaagtattcatgtcggtttctataaccgtcgcctatacaaccatcgcaaaatgagcaaaataggcgacgattaaaaatcgtcgcaaatgtggacttcctgacggtttaaaaccatcaggaatgtaaaaaaaaatacagatttttctgcctttccaactttttttcctgcattagttttatnnnnntacctaaattaaaataaaacaactaattaattttattacaataacaaataactttaaaacacattaaatttatac

SEQ ID NO: 131428 - DNA, 668 bp, Cannabis sativa
tcagcaggttcaggatcaaggaaagttgttgtaattggactagaaggatgttgttcaagtgatcccctctcactacctgaaggagagtcagcagaggagtgagatatgagaggagaatcaggagtgtttacctaaaaattgtgagactgagatgatgaaggttctgcctcttgagagcttgaggattgattagcagatgtgaatcgagaacctgtgacaggtgaaacagatggtaaaatagaccaagtggaactttgaatgatgacaggcttttcagattgataattgttaagaaaacctatttgaaaaggaaattcaagttcattaaaaaccacatctcgtgagatatagatacgacctgaaggacttaagcatttgtatactttatgtgcatcattatagccaagattcacacatttaatggagtgaaattggaacttatgtgcttggtaaggcctaagagaaggaaaacaagcaacaccaaaagttttaaggaacttgtaatcgggtatttggttgtgaagcatttcaaatggtgttttgcgagcaacctattaattaagtagacagttgtggaaaaggcatcccaccaatatttaagtggcatgctagattgagctaacaaagttagccccatttccactatatgtctatgttttctttcagct

SEQ ID NO: 131429 - DNA, 582 bp, Cannabis sativa
agtagaggtgtacagtgattcacagttggtggccaactaggtgtaaggagagtatcagaccccgagagtaaagatggtcgcttacgtatcagttgtcagggaattgctgcaagagtttaaggaatataaagtagagtaaataccacaagaaaagaatgcccatgcagactgcctggcgaagctagccactgatagtgagatagagaagctgggtgtggtacctattgaataccttacggagcctagcattaggaccaaggaatcagtggctactaattaacaagggtcgagttggaaggacactatcattaagtatgttgacctcacttttagccaacgacaatgagtcggatttgtaagcgatgaatagtttaatacgagtacattacaataaagcaaataaagacacaagaattttatagaggttcagccccgagctgtttagtaatagcgtaacccttgtcatttgtactgacttaagaacaaggagaatggttccttttcttaaagctcttacaattatatctctgcatatgaattcttagacaaaatatttcaacccttttcccagtgagtatgact

SEQ ID NO: 131430 - DNA, 1278 bp, Cannabis sativa
  modified_base (1171)..(1179): a, c, t, g, unknown or other
atatatctagtaagagtgattataatataagtataaatattttttaatgataaataagccctcacaaagtaaaaattctgggtccgtcactggtcgccgttcacagggctgagctaaagcgatggaaccctagagattatttattgacataattaaatgcatggagtaaggtttttataactactaaaaatcttattttcttagtactcaaaaagagatatgaattcctgacaaataaaaggaatagggacaaaagaaagagataccaattatttatgcaaaaacaaaaatttcatgatatgccagagttgtacagattgtttgtgccttttttttcctatttttttcattatcaaatttacacattcttccatctctaccttgtatggatccccaacctcttcttctacacatccaagtggaactccatatgcactaaagaatataaaacactaatatgagtttcaaatttaaccaaaacattatgttatatgtactcacttaagcttatgaaagtagaggtttcgttcctcaagcactgatgtgactgtctccaatcatatatgtatatattttttttttcaaaatattgtctctaatatggaacaacatttattgcattagctttaataccaaagtcaatgtactgcttaatccattctttccacagcgaagaaagaatagtaggtccttacattaggttttcgagaagtgaagaaggaaaagaataagaaggattgtcatagttgttgtgatcatgaaaaacatgaaacaaaactttttatggtgaagcatttttttttacatctcatatctattgcaaattaaaatttttgttagagcaaatttcataaagaatgagtatgtatgcttattttttttaagaaaataatctttaaaagtttttttaaaaatatatgatgtctcacttgatttgtgcatttttcttctttataatagtgataaataaaatgctttttttttaaatagttttatttatttaggaatgaagagaaaataaaaaaaataactaataaaaagaaataaccgccatgtattaattttaaaaattagctaataattataaatatcaaccattagatttgatttaatggctaataataaaataaccatgggtaatattccattggttgggaggaatgaaaatatnnnnnnnnnaatgagaatgggaataggaataggaatggaatggaataaaagttaaaatgcataaaaaaaattgataaaaaaatcattaattttttttttgttacattg

SEQ ID NO: 131431 - DNA, 804 bp, Cannabis sativa
  modified_base (26)..(57): a, c, t, g, unknown or other
aagttcttatttaggatgttaataannnnnnnnnnnnnnnnnnnnnnnnnnnnnnnnaaataatttccaacattaacaacccttgaagacagggatattccctcaaagatattatcctagattctagggatttaattatctttttttgtaattcaaatataagataaaagatatgttactttccctactttaaagggatatctttacctatttgaattaagatattttgtaaaccctgcaatatctaaatggcattagatcacatgaaaaaggatcgaatcctaagctacatagatataatgctctaatactcccttccacacgcctatagttctctctctctaagttccacatgcatctaaggcctcctagactctaagtctattttcttcacatatttttcatagaatcttacccgttcttcatctgtagctcttatatctcacaattttaatacagatgagagatatagatacaaatcacaaggttttaacctatgatctgcatggtattatctgtgtgatatttttactatttattatttttattttttttttgataaatcaatgagctgtattgaacaaaacaagcttttttacaaactatacgcacccaagaaaagggccgatatctatgtatacaattatatcaatctagagacaatatgtgtaatatgatttacaaaggaataaaccaatctctatcattatttatgatctttttaggcatcaccctatcaatctgaatcttgatgttccattttgtttcttcaacaattccggtcgagctaactctagctttttg

SEQ ID NO: 131432 - DNA, 1070 bp, Cannabis sativa
  modified_base (995)..(1006): a, c, t, g, unknown or other
gtacaagtcatgcattccacctacgtaagacatggttgatatagtgcatcctcatgacaccaaggctacccacaacattgaaggggtctcggggttgtcaccccgagatagccaccgacacccttctcatgttaggtcttgggggtgtcacccttaagtattagcttctacccccaaagatggttaacggtcatacaacaccttggggagaccctcatcgtcagtggctagttcaaatattcaaattctgcaaggagctcaatgacggttatacacccacaaaatagtggatattatcacaagaataagacttcaaccaccttcaaaaaccaaggaggcggttgagatgactcaacattggtcgcgtctcctgaagcgagaagcaccgaccttttcccctatataaagggtcacccatgacttgggaaaatgatccgaaaatttgattacttagagagaaaaaaactctaccattgctattttttgcatttaagagcgtgttcttgattttgcaactctgatcaataaaacacaaggggagtaggctattaccgatatttgggccaaacctctttaaatctggtgtctttatttatatttattgctaattatggtctcattatttatatttactgctagtttttggtttaaatctcatttattttgactctgtgtcaattagctaaaaatccattcaacattttggtgctttcattgagagattaatccaaaatcttgaagttttttattggaaaaaatgttgctaactagaaaatctcaagaacgacctaatgaggagatggataatgcccaataatttccatctgcaagcaatctcatcgagaataatgtagagcgacccctgcatcctggtattagtggtgcagccaccactaatgccattgtccagactactgctagtcatgggacaactggccaaactgccgctgctgggcagacaacagctgggcgtacctgttgggttttatgccctnnnnnnnnnnnnatttcaatgtaatctctatcattttaatatcaataaagagacagaagtattctcatcacttatt

SEQ ID NO: 131433 - DNA, 1121 bp, Cannabis sativa
ttaagtgttgttacaaaacgaaaacgtaataaaattcaagtggtttagccgccaatatccctaacaataaatatttaaaaacaataataataataataatatattaattattgaataataacaaaataagagatttaaaacaaaagggaatccaatttaatgagacattaattaactaaattcattaactaaaattagctcaaaattaaatacattaaaagctaaaatttggaatattataaaaagtataacctatttaagataaaataaaaatgtcagaaaatagctaatctaatttctaataatagtatgatgaaggcttgaccaaaaataaacaaaatctattaaaaataaaaaacaagtccgaaatgaaaacaaaaaactaacaatttacacttctaagcaaaaaagagaaaattactcaaaaaattcaaactaaaaaaacatgtaaactgccataaaaataatataattaaagctaatttaattaatttattagtagaaaaataaatcattttcaatttttagttattattaaatgaaaatattaaaattaattactgaaattttctcaaacagcaatcacgcgcatgaaactcggcttagtcaatcctcaaggctcaagctgtcttcgtccaactcccctgtcggccttactcaggcgacaccacccaacttattctacatatcttcaggagaaccaagctttaatagccaacaaaacttacaagagatgaataatagaagcatacaaatcataaaactaattcacaaactactctcaatcactattactatgattgacaacactaaacattacatgatgagaggatggccgagggcttacactcgagaacaaaaaccgaaaaaacaaatatacaaataatcatatgaaatccaaaagattgtaaaatatcaaatagaaaaataaatattcaacaaaagaaaaaatatattctagtatgaataacaatacatggatcgatcactatcaagtatctcaagaatcgtatgatgattatgttagacttttatttggacttacattatattttattggttttattaaaacttaggttaattgttaatttatctaacatgtggtatcagattgcctattg

SEQ ID NO: 131434 - DNA, 517 bp, Cannabis sativa
  modified_base (477)..(482): a, c, t, g, unknown or other
tgcctctcttgaggtgtgtcaccaaagtggaagctgaacggctgatgattgaagtgcatgaaggcttctacaaaaaccattttgggggtaaagcttatcaaaaaagataccctgataggagtacttttggccaatgatgatcgaagactcgatggactatgtcaaaaatgtgataagtgccaaagattttcgaagataccaagagcttcacctaatgagctcacgatgatataataacctaggccttttatagtctgggggatagacctaatttgtcaactcccaatgggaaaaggaggggtacagtttgctgtcgtacagtagactacttcaccaaatggaggaaagctgaacccctagcaacaatcacctccaagaaggtccttgacttagttatcaagaacatcatatgtagtttcggccttccccataagatggtgcccaaaaacggtaagtagtttgacaatgacatgttcnnnnnnttctgcaacagacatgacatcatcaaaagcttctc

SEQ ID NO: 131435 - DNA, 666 bp, Cannabis sativa
gacataatttgtcactacagaaaataatagttctaacagactcattactgttagtccagctgtcattgtcatgaccttggtgtcttcagtgagtatcttcgtctacgtggtggcctctaagaatagttgttggtaatcctttagaggttcgtcttcttgttgcttaatgtagaccaaattgttgggttagatttgtctgtgccttgatggggagaatcggtcataaaatacttgcttgagtgtctcccaagaattaatagatcacagggaaagcttgagataccactgttgtgctacttttgatagcgtggctggaaagatttgacaaagagaattgtctcaattgctttgtaggttagtctgtactttgaagttgtgtatgtaagagatagggtcttctttgccagtgtatggatgcaacaccagatttctgaactttgaggggatctccaaagccttcatttgatttgagagaggtgaatgtcgctcccattctagctcaaactcagtttgctttggcgttgcgatactctttaccaaggcggcaagagcatcgaattcagccctagacacatgttgctataatttataaacactacgcaagtatacgcaatcaagtagtaaatctcacacaggtgaggtcgatcccacagggaattggattaa

SEQ ID NO: 131436 - DNA, 610 bp, Cannabis sativa
aagagaccattctcttttcttgctactattagtttgttgctcttaaggaccttacaaccactatctttatcagatttatgaatattgggcctcttagagccttgtgttcataagtctcgataaaagaaagaaaataaagaaagaagagagagagagattaaattttattatcattaataataagagttaataaaataattgaaaatagtttttagttttaatttatttttaaatttaaaaataatataatgggcagccaagttggactttagtggtgatgcgtcactagccacagaggcaaaatatagagattgtaggacgacaccctaaaaatacaaacagaacatgaatttggtaggttttctcactaaaatttaatcttagaggattaaatacaagtggaatgaaagttgagaagatttagccgcaaattaccgtaaaatataattgtacccaaatgtgtcctcttctattttaagactgatgatagtaactaaagataaatattattttataacaaaattattctaaaaataacataatcttgtgaagaaatgtgttggtgcctgttgaccgaggttttcggcaactaataaaatattataaagtt

SEQ ID NO: 131437 - DNA, 584 bp, Cannabis sativa
tgccgctgtaaaaatctgattggtttttccttgaaaaactcatcaatttttttttttttctacaacaatggtgtttggtacgaggatgaacaattaggaggaagatactcaagtcccaagggaaattaatcaaccacatagtgaaggaacctttgtccctccacaatcacatggagagagaatctctaggcaccaagaaaagcaccccatgccacctatgtcagaagatgagaggcaagttcaagattgtgagagttcctcatccccatctagggagcgcccactagtcaggtttatacctatgcatgaggtgttccaggaaaatgagattatgcgcgtccaattggtagaaagcctatgccacaatagagagctccaagagcaaacccaaatgcatggggaccaacccctgtaccaagaaatccttctctacctaggagaagaaagggatgcacaaggagagaagatgtggccatgaataatccatcaaggagggggaaccaccaacctttaccaaatgcataagaaacccatgtaccattacatggaggtggtcatggaactcatgggacccaaactgttcc

SEQ ID NO: 131438 - DNA, 1315 bp, Cannabis sativa
  modified_base (434)..(439): a, c, t, g, unknown or other
  modified_base (494)..(515): a, c, t, g, unknown or other
  modified_base (1128)..(1132): a, c, t, g, unknown or other
tcacacaaacactcctgagccccccctctctctctctctctctctcgtctttattgcttctcatcaaacaaccacgcccaaacccgacgtcgtccattctcagtccttcaagcttgaaatgaacccagaaaaattgaaactcgaacccgaccttccaccctcgagccccttgtctgtccgtctttctccttttctccttctcggatgtgcacgacaatggtggtgctctggtaatcgcagtggagaccacaaatcgtggggtttgggtacgctggggtttcagatcggggcgacttcaatttttttttcccttttcttttggttcatgtttgagtttaatgtttgttcatggataaatggaattttggtggtagtgctagtttggggttgtttctggcagtgagaagaagaagacgaagaagaaaagaaagaannnnnnaaaaaaaagaaaaaagaaaatgaaaattatttttaaataatttatttatttattnnnnnnnnnnnnnnnnnnnnnnataatttggaccaataatatttcgacacatggaaattttttaaaaataaacggctcagttaaaattagaactaacagacaaataaaaagtttgaccttgagaactattgccgctatttctcgagcttgaggactaatctgtaacaaagtgaacattttgacaacctttgccgcaaatttcccaaaatataactaatataaagtaagttaaggaaatggaaagatattccttatgaaaatggagggagaacctttccttttgttttctctttaatttgtgtgggtcccactaatttcttctattccaaaatttagtaaacaaatgaatggaatcaatcccttacaattgattcccattcccctttagtaaacatgccataagtggagcgataaaacatactatcacatataaaactaattttcagccaaaataaaaagtaacaaactttattttatttatttatttcaagaaattacattgtatatccactttattttaaggattttttacactacatactgaaatttataattttttaattttttaatttttttattaggggtggaattttttttcaaaaataatgtggtttttttaaaaatactgtgtaagnnnnntactgtgtactgtgttaagttttcacggttattccacggttatttttcagctgttccattgttgttttaattgttctgttttgttgttttacgtttgttatataaaaagacagtatttttgtaaaaatttcgtatggcagtaaaattgtaaacttttgaccaaaattcaatatttttgtgaaa

SEQ ID NO: 131439 - DNA, 827 bp, Cannabis sativa
ggcttcttgtttctccataggtcgtactatctagagggttttctgtgtcctgagttagttgccattgctttggctgatttctcagtttaatgaatactgaaatttttattcaaaaaaaaaaaggagaaaataaaagtgtgtttgaaattctgaaaaacaacacaatttcctccttcaagtattgtacattagtagtggttgattgtccaacagcttacaatattattctaggacgaccttttctaattgactttggggcagtaacatccatccgccatctatgtttaaaatttccaggagatactggaagtgttggaataattagagacaaccaaaagagtgcaagaagctgctataatgtttcaactatagatttgtcctcatggtccatgaaggaaatataacggtaaatcggaacattttctcagccagcattgggggtggtctgagaagagaatgaactagatccacgggtagacgtagaacgaataattgaacctatagaagaggtagaagaagtgtggatcagtgataaagatcccactagattcatcaaggtgggaaaaaatctgcctgcaattgttaaagaaaaaatagtctccacggtcaagaagaacaatgatgtattagcttggagtcattctgacataactggaattattcctcatgtagcctgtcacgcactgaacatagatctcaaggcatatccattccgacaaaagcaaagacttttagatcctatgagagcggaagcagcgaaaacaaaagtagacaagctaactagctaacatccactttctaaaggaagctctatatcccatatggct

SEQ ID NO: 131440 - DNA, 804 bp, Cannabis sativa
  modified_base (757)..(763): a, c, t, g, unknown or other
attttatgctggcaaaaattctaataccaacattgatttgccaacccccttttgccaacacatcataggtaaattctattttaccagcgcaataccaaaacataccttttttatatgcagtgtaccttaaatatcttaacataagggagttatattgagagtatcttgaagtaacaggggtaaaattgatacaatgtaaaaagggtatagagtccaatttctcaattgagaatgttgtgttcgcttctaacaactcctataatacccaaatcattcatttaagcctagctatattgagagctgataatatccatggtgcgttatacttgtttagatttaaaaatatgtgattctaaatattatataaatacatagattagatatgctcatttatatactattttttatcttgaaaaatattgctacaaactttataagcttgattgttttcaaagcaattccctaatttgcttatagattaatggggaaataagagattgttagcatgtgtttttcaatctttataattgtattttcaaaagtaagaactcattttaataatttaatagtatttgtctaatgctttataaaaactatttttaggttttttttactaaaaaaaaatattaatattccacactttatcacgacatgaatccagctcacctcggatccgatcccgacctcgggattagacccagactcggactccaggccccggacccaaactcggacccagactaggatcagaaccaannnnnnngacccagaactgaatctagactcatatcgggattggaactt

SEQ ID NO: 131441 - DNA, 612 bp, Cannabis sativa
gtagtcaagtgattttaatccatgagtatttgatcatttattaataaaatttaatttgatggctactaactaaattctttatcatgcattcatggggataaagctaaatctggagttattctgtacttcaatctcaatcttatttattcttcaacccaacatgtggcaaactgatcggtttatttgagtcttaactgttttgtttgggtgatattgtgtattttttaagattacatgttctggttcatattgaatccagaaaagaaatctattgattctctcccaattggttggaccataagtgcgatgatttacttcatcggcgagatctctagttcaagtccagaatagtttagctgcgccaagaaaaagaatagaagaagcatttgactcctattttgatttataaagctcaaaattaatcaaaacaagaagatgaaatctgtattttctcctttattgaagagaaaaaggttgtcttgaagctcattcactgtaccattatgttattaattcgtgaaattccatttttattgttattaatatttaatttatacttggaaaacatttgacatttggcttcatacacaataggatgccattacagtcaat

SEQ ID NO: 131442 - DNA, 718 bp, Cannabis sativa
aactggacaattcttaccactgccaacagtttgtctaatttattttttaaaagtgtttggtaacaatttttttaacacgttttttaattataaaattgaaaatatttctcaaaattatattctataaaacaatttttaatttttgattaaaaatttaaattttaaaataaaaaaaaaattacttttaaatttttttaaatagttttttttaattaatattttagactccgattctaatttaaattttggaaactgaatctgaactcgaccccagaattagacgggcacctggtcccaatctcaaacctaatttcagactcgacttaaataaaatcaataaataaaaatagaactgaaatttatagaacacacttttgtttttttgttaataaaaattaaaaaacaatagtagttatataacacatttaaaattttagaaacaaaattttacttttatttttgtaattaaaaaattttaaaaataaaagttttactaaatgccacctaaaatagtttaatttttaaaaagttagctaaatgtataaataattatttattgaacaaaacatattttaatatttttcttttaacttttatttatatatatattttaggaaaattctacaatgcaccatcttaaaaaggatgcaccgatacatctttatctgttttagtattcgaaataattttttagtcaattttttctcatggtcatgta

SEQ ID NO: 131443 - DNA, 786 bp, Cannabis sativa
tcattgtcgttggctaaaagcgaagtcaacaactgtaaaacatgcatgttttcttcggtcaaccaattgttcaacaaaagaacacgggactaaagccaactaataactcacggaaacagaaaactaaaatcaaccaatcgtttactgtaactcacggaaataaatagaaccaatcttttactgtctttgatcaacgacacagaagaacacggaatcgaatcgcagaacagaaacagattgaaccaatctatttctgtctttgatcaacgacacggaagaacatgaaactgaatcgcagaacctactggatggaagaatgacacgcctgtactcgactcgactcgcctggacaaaagcagaacgtcctggacgcgacggtggctatcggagaagcttcgtgaaacgtcccagccaatacgtgacagtggctatggaaaaaacttcgtgaacctcctagactcgcctccaaagatatctctcacgatagattttttaattgtgattatatatggcataaatatttaattatactaaatatcgcaatttcttaaaaaaaatttacaaatatgagaaaaaattatgaggaatactctttaaatttgtgtgttttttttttatttttttcctttttaaaactaaaataaataaaaaaataatctcctggatgatgtttttcttttagaaattaaacttgttttttttttatttaaactactatttatttattttttgttaaaaactaattatttcattaaaagcagcaaaaaaaaaaatcagtttcatcaa

SEQ ID NO: 131444 - DNA, 916 bp, Cannabis sativa
gaaaaagatttccacctagcccttgagtctcggtaggtgacatggtaccgaaagcattggccatctcaaccgcctctggtctaaagaccatgaagtcaaagtctggcagcttggtcagggtagtgtagatgtcgtcaaagacagtctggtcgtaagccttcttctcgttctcgttctcagctgcaagatcacaggtaaggccagtgttgtcctcctccaacttcttgactttctcattcaagatcttaattcgctcttctacctgccctttggctttaccgagatcctcgacttccttgtctttggctaccacatctagctttgtctttttaaggccttcttgaagagctaagttctatttctttaggagattgaggtctttaaaatgaacaacatatgcccacgaataaatagtcatcagttgggagatgagatcagctgatcgagacaagaggtcctcgacaggagttcccttaactttagtgacaaactcatcgctcacaaacttgtcctgtagagccatgatatcgcgagccttgatagcggggtcaatcacaactttctttcccttgtcttgagtaaccttatgctactttttcggcaagtcagccgcctgggtaagaacgacgtcgcttttccacttttgaggtgtcgcagacgatggcgtcgcagtaccaaccttaggcttgtgattgaaaactagagcttctttcaagaaattcatgtttgtgagaagaagaatgacaagtaagaacttgtaagtctaagacaatattgtcagtaatatacttaattatattacctgatgttggtctcgaagtttgcttggatagacgcttgttattctttctttctacttctcagcaggctctttgtacactggttcacactgaagtttagcgtcctttgggattag

SEQ ID NO: 131445 - DNA, 752 bp, Cannabis sativa
ataaattattaattttactattttccttctcgggtcaaaattacttaaatgcctctggctgaccaacaggtcttaacatgacataaatcatataaattctcatatattgaactatataataatatagttcctcaattattcataattatctaatttgggtttttctcatccacttcttaaatctagggtattacattaggcaccattgttaggacagttttcttgatttccttgagtatcttgcctgaatcaagaaaggaagtgactgccctgtaaacatcctctccaactagctcccaattattttgaaaaaaataactggagaaaccatctgggcctggagctttgttcccagggatttcaaacacaactttctttacttcttccttagtgaatgcccttgttagcatagcagcgtgttcagaagttagcatagaacctctattcagaatcttgctagatactttcttcccgtttaccgttttagatccaagcaggatcttgtaattggagataaaatattctgtgaccaaccatggttcaaaaacccttattccagcatcagtttcaattgataagatctgattccgcgtattccattgtttgataccagcatgaaataacgaagtgtgttagaactattattttctgaagtgacaaattatgtccagtagcattccagttgcgtctgggactcgtagtgttttgtctagggttcgtactgttagtgttagtccacgtcagcaaagata

SEQ ID NO: 131446 - DNA, 2086 bp, Cannabis sativa
catccttatcataattggcgaaaaactttcgcatgttgaaggaagagttgggtaggggcggtacggtacggtgcatagaaggggccctaacccactcagtgaacaactgcagacactccacgactttgaagccggaggagaagaagaatcggtgatggtactccttcacgttcttctagaagttgtaaggcaccgaaccctcattagcagaatgggcttggagcttgaaaaatccatttttaagtttgtccccctttatggggacagatagaagttcgtaaaaataaaaaatttcggccagactatgcagggcccagttcctagaaaagtaaaaaatatacaggcctaaaagtaggcggtaagctctaggaataagttggtacagcgcaaggccaacaaaaactaaaaaatttatgaagtagtcttgaagcggtagaatggctccagacatcaaatgggtttgactccatgccccaaaactgtcgtagttgtggttgggcgttcttcgtccctcgggaggcgatgaaaaatcccgaccgtggaaggcttgatcccgacaatagtagctatcttctccagctgatgagtgctggtcaaggtcaagtgtaactcgtccgcgtcccagccagtggaccggcatgtgtatttctcatggaccaccgggctcttcatcacttcctccaaggtggctagtttcttgggcaccttgtctgataattttgctctagttgaagtagggacagacatggtctgggtttgatgaagctctaaaatccctcggtcaaagccgaagaaatcgtgatcgtgaaagtcgcggagaacctcactcatctgaaaaagaaatccaacagttatctctcaaaccaaaccctaaaacaaaagaggggaatgggggtcccctaaccgctggaaggaggccccctccggatgtctgccaaagataagaattctagagattctcctaggaaaacatcaggtacaaatatccaaaaggcaataaaagaaaaaagaaaaggaaaaaaggaagaaaaaggcaagagtatgaaagtcacttcacactctcgacagtccctaagtaaagaaatcgttttctaaccccaaaaggaaaacgacaataggcacataaaaaactacggcatacaacggtcttcgccatgaccgtcttatcgaagaaatcgatttcaattaaaacgaagacgttgttctaagttttaccttaacatgcagatgaacaataaaataaagtgtacccagaaacttacacaatggtgatgggcgagaagttgatgtcgtctgacgataaaacttggactggctacgacagaggaatagcagtaagaagttgatgatttctgaaattttttcaaatgtgttatctcggtcgaaaggggagagtggtgaaagtaacccaacaaagagaaagtgttggcttttataggccagagagggtgcaaggcatctgtgaccaggcaccatcatacggtgggaatttgtatcaattcgcattctatgatccaacggatggggtgaatgggtgaaacgaagagaaaggatggttaaaacgttcaagcacctctctaacaccagcattaaatgcgcaggcctatcaataggcgagaagcgaattgttgcctacaaaaagaaataaatatcaatgatgacggtcataaatgcaacccacgcgcctggggcacgtgccactgtatttataaagagaccagaggccgcgtacaagcctcatttaccatttactaaatgagacttgggggtaaatgttgcctcaatttttttccaaaatacgtggcagccactgtgtgggacaagtggatttcaagaacacctcacccacaaaaattggctaagtcacgtatgggtaggaaagtgtatctcagggagtgagcccccagagaggagcataaagcatgccttgactctctgggagctagaaatataacaacgcatctctgagagaagaagggcccattcgaacagtcatttcacatttaatgcggcatgggggaaacgtatcagaatccccataaaaggatttgacagatggcgcaagcctcttttacggcgattacac

SEQ ID NO: 131447 - DNA, 716 bp, Cannabis sativa
ggatgaggcacttatcctgtttacagcttgcatgtgtgacactctttggaaatggcgaaatgatatgatatttaagaatgatggttgtgatgtggagcgtgtctttcgggattgtatggcgagattttaggagttttcttcttgccattactgggaagactgtcaagagactcgggttactttgaaggattctacaaaaaactccatgtgggatgattactggtgctgcaaagtcaatgcctctgtgtttggtgttgatgcaggggtggcggtagtgtgctgctacgatgagctttcctcaaatccttggattgtcgttgacttctccatggtgtcgggtgtgttggaaggggaattgctgggaattcaggtagctttgaaagaggcaaccgaacgtcgagtgcgcaagatcaagatagaatcagattctaaggttgcagttttggcttttgagtctggctctcttccttatggttggggtacttatcctttgttctctttgtgtctagatttgcgtaaatcctttaaggatgttgttatttctttcattccccagttggagaatggtttggctgattctttagctcgttgggctagagagtcaagggtgaagacttcgggtcttctaagggatgtagccccctcttgtggctactagttttcttttgtttttcgaataaaaacttcatgttgtgttaaaattagatacgcaagtg

SEQ ID NO: 131448 - DNA, 1358 bp, Cannabis sativa
tcacccataaatttcttaaaaaccaagaattctgttatataggtacactttatatagaatagatatattaattattattaaaataataattttagcattttagtgtaatggtaaactttcttaaaactcttaaagagctaaggtttaatcttccatagctacataatgttaggacaacatctaatctaatctaattgaactgaacttatctaatttaatccaacaataaaaaattaaatatttaattacaattggattggattggatgttaaaagttagattctaattgaattggatcagttatagaatgtctatctcaaaatttaattatatacggatccaatttaattatatttatatacatattgaaaaaattatttatatttatttttataataaaaaatattaaaaaaataaaaatatatattaattatatttttagtggtttttttttttaatttgtaactattggttatttttgtgtatttatttgtgatgttttgttctattttattacttggaaatattattattttagttattttaaatttttagttgcattacacttgtaacaataatatttttatggagtattaaacatatattttattatggagtgttaaacttagggtgcatttggtaacattttttttaatcaattttttgtttttgaaattataaaagtgaaaatattatctaaaataatgttctataaaaatgttcttacttttcaatctttttaattaagaattaaattttaaaaataaaaagaaaatcatttttaaatttttttaaacagattttttaattaatatttcgtactccaaccctaacttagtttggaaactgaacttggactcggccctggacttggacccgccctcggtctcgaactcggacccagtcttggacccgacttaaataaaattaacagatgaaaaatgaaaataaaatttacaaggcacacttttatttttttgtttttaaaattgaataataaaagtggtcattatagaacacttttttctttttttaaaaaaaaaaattatttttgtgattaaaacatttaaaaataaaagtgttaccaaacgtcaccttaaataaatagtgatatttaaattttacatattttttttttcattcttttaagttaacataaaaaattaggtgtgtaatttaatatacaaatgaaaagctgatcaaatctaattattaatttaattaaattgaattttagaatttaattgaatttgatcggatgataatttttcaaatctaattagtagatttggattagataaggaaaaaaatattaaattggattgaatgtcccatatcctacttaaaattactcttta

SEQ ID NO: 131449 - DNA, 1288 bp, Cannabis sativa
gtgaaccgatagcagttagtttttatatatatttcatcctcaaacatttgttagatatttttaggcgggaatatgactctgtgattcctttctactcgaatcgatccacgtcatggatctgtatttctttcctatttatcttattgtttcttctattttgttcatcaagtttcctcctcactactatttcgaacacagcgtctttgatgaaaagaacaacaattgtaataatataacatgaaaaataaagatattatcaatgaaaaagaagaaaaaaatatattttaattaaactattttcattatttgtaagaatatttattaaaatatatatatttgtatgaatatattaagctctagttaataaatgcataggtttcatgttctagttaatagcataaaagaaattatttaataattaaattatacctcttcttttaaagtaattaaattatactaaaaaaaaatatatagcacaaatatattattatatatttaagaaatttatttgagcagtatggagttcacaaattaatttggtctcaatttttatttatactcgaatttatttaaattcaaatttaatgttaaagtaattaaattatactaaaaaacaaaaaaaaaacaataacacaaatatattattatatatttaataaattcgagcaatatggagttcacaccctccacagtttcattcgatgcgaacaaacggatcacaaacgactttttggaccggtgacattgggctcacaacagatcacaagtggctctgataccatgttaaaatttggggataagatgaatgaggttccaactcaaaaccaattgacaaaaagaggagtagcacattcatcttaatatatcacaatttatttccacatattagcaatgtaggattaactctaataccttcttttataatgaaattaccattctgcttataagaaaaataaatgagcttttgagaaaaggactaggcactttttttcatccaactgttatttaaataactagttttcctaaataaggtgcccgcaaaaaactatcatttacaaattatataattaatataaatttttaagtttatttaattttctcattagtttgaccaaaatattttattatttcagtaaaattttaatttgactgaattaattaatcaaccttaattaataactaaataatttataaaaatttaatgtattttgactaaattatagatgtcttagaatttagaaacaataatatattgaaaatgaagaatgctaattacaacttcttatta

SEQ ID NO: 131450 - DNA, 614 bp, Cannabis sativa
ctggctaatatcaagcaagaacccagtgagtctttacaagactattttaaacgatataatgctgaggtaacaaaagtagagaaggctatcgagtctttgctaatatgtatgttgataacaggtgtcttgccaagaactaatttctggaaggaactgcaagctcgaaaacctgaatcgttggtcgagttcttccccatggtagagccgataagaggattgaaaattctctggccgagctagagaaaggcaaagacaaacgcaagtcaccagtgccgcggtcacgatctcacactcctagaggaaaaaattccagaggaaggagtctaagaagacgcagtccacagagccagcgaagtctaaaattggccaagtcccctccaaagaaagaatcatctccgaagaagaaaggttgtccgcgctttgtcaattacacagagctcgcagcacctcaggaccatatctatgccattgaggagaagaatggagtcttcaaaaagcctcccccgatcagggggaaccgcaataaaagagatccgaagaaattttgtaagtacgacaaagacattggccacactactctggaatgttggtttttgcaggatgaaattgaagag

SEQ ID NO: 131451 - DNA, 566 bp, Cannabis sativa
  modified_base (512)..(521): a, c, t, g, unknown or other
taattttataagtttggcaccagaatggagtggtgtggactaatgatttcacacattgtcaagaagaagttattaggaaaaaagttttattaattacattcatgtactattttatatatagagagagtaacattttcaattaattattatcatactcaataatgatatataattgttagaactttttcagtagctttacctgctattatttctccatgcctactgtgtgtaacactttgcatgcttagccctgcgtgggtcatcagcccaattactattattacttttataaacccaaaattattaaaaatgtggatttgattacctataactttgactaagtataaaaaaataccattactaacaaccacgcaaccaatttcttatcctaaaaacacattttatttacattgttatatatctatattattgatgattaattatttatatacactatccgacaagacatgatatatatatatatatataaatatatatatactagtaaaaannnnnnnnnnaggcacgtatactaaattttatatgctagtttttttctacgttat

SEQ ID NO: 131452 - DNA, 535 bp, Cannabis sativa
ggatataggattatttaatttgaactaattatacagttaaataatttcaaaaatgcaacctaggataccgaagaagaagaagaagaagaagaagaagaaaaggaaaaccctaagctgaaagaaaataaaaggaaaatgaagagatattgacaaaatgtgtgattgattgaagcagaagaaatggtggtaagcaatgagtatactgagctagctccatgcaaaaagtgagctacagtagctgtagcttaataaaattaaaaaatatatatgtgggaattgggccaaagtttaacaaaaatatggcaaccataaaacccataaaaggaaaaacaaaacataaatcccatagaacaaatggtttatttaaaaatgccgtaaaagtaaaaactaaaaaaatctcataaatagtataatttctacatagggaataatagcaaatgatcttaaatcatagaactatgtgttggaatatattttaccatgatctagatttactaacaagtatgttttaacatcctaaaatgaatttctaaaa

SEQ ID NO: 131453 - DNA, 585 bp, Cannabis sativa
  modified_base (340)..(345): a, c, t, g, unknown or other
  modified_base (502)..(507): a, c, t, g, unknown or other
aagtttatattttttttaataatggggtgtatttataattttatggggtgcaaatataactccccttaaattattatagaaagacttaaataaccctgtgatctgtgtttggatattattataaatagtaatgttctaatcaaacaaattacacacattaagtcttgtcattctttatatcaaaaagaaaaaactcttgttgattcttcactatagcaaaaaaacaagaaagaaaatggcacaatatcgggcagttataggtaaagcttcatacttaacatttttttatcttcattcgtaaatatgccttacataaatataaatagaaatatatatatannnnnntaaatatatatatatatttagaaagaaattttcctatcgtatattatattctagttatttttaatgaaataatgttcactgtcaaaagaaaaaaaaaatgtatatatttatgtatgttaattaattgtattgttttaagagattatttcacaaatannnnnnaataataaaaaaaaaatacaaaaaatacaatttcacggaattttaaatatttttacatttttttgattttatttacag

SEQ ID NO: 131454 - DNA, 822 bp, Cannabis sativa
ttttacaaaaaatggtgtcttatgtaattattccatatgtaaatgagattatttactaagtacataaaaatggcaaaagatttacaattttttatatataattttttacaaatttattttttttatatttttacaaaaatataaagtgttaattttgaaaaaccgttgtattggcgatcctgctactagaaaacaacgtgaatgttttttacaacaatacaaagtattgctattctattgtttcaaaataatgttgttttaaggttactgttacagaaaatcaatatttttctttgaagaaaaaacgagtgaaaaattgtaaaaacaaagaacggtgtaaatataaataaaaaaatatttataaaaatgtaataaaaaatggtaaaaatgtaatttgtaaaacaattaattttgggggcaatttgataatagttatatataattttttttttacaattataaatacataaaaatcaaaacaaaagaaaaaataaataaggagggctacagcctccatacatactctctaataagtgtatgtacaaatattgatgagcataaatgaaggatatctaacgaaaaactagacaataaaccttcaagctatatacaatgtaaggatgtcttaaagaaatagagacttggtttcaaaataagaaaatagagaccaaacattgaataatcaatctctgtaaagtgatggatagtgtatatagtctaaacatttatataataggttatttgtttccaggaaaactatatgaatcatagacctgcaaatatgaatttcctattatgtctgagactgttctggcacttttg

SEQ ID NO: 131455 - DNA, 642 bp, Cannabis sativa
  modified_base (586)..(587): a, c, t, g, unknown or other
ggtattgccaaacaaaaaaacaactaaaaaaaaaaatcaataattaagtgtacaaaattaaaaattaaaatggctttaccgccagttaccttttatttaaatattatattttatataaaaatgtttattagtgttccctgtattagtataattttttgtttttaacttttaacataatattgttattatttgacgtaatattatcacttataatgattttacttttaaaattaatattttttttaaaataattaattttgattaatattcattttatttattatatatattttttattttgtattacaaatatgtagtgacatactagatattaaaggaaaattttatttttttatacttaataaaaatttaatttacaaaaaataccataataatttttttgtacaatactatcctaataatttctcattttgcccaaaagacccttaccatttaatttttttcaaaacctaaaaacccttaaagtaatccaatctctctaaccacgttgcaaaaaaaacctatggctcaatcaatggctaaccatctatggctctgatgccatgttgagaatcatggggttccnnctcaaaaccaattggcaatgagtggagtagcccatgttctttatatatggctcaa

SEQ ID NO: 131456 - DNA, 1154 bp, Cannabis sativa
ataaaatgtagtatacgtgcctcggacgtaactttttactagtatatatatatatatgtttagtagtgcaaaatttttaaaaattgagggggggccacagcccctatagggttgtatgtggctccgcccctgctcaccaccaaattatattattatctaccgtcaaagtaaatttggccaaaaaatgaacaacaccattgaaagatctattagaataaactaataactaacaactttaaacttattacaaataccagtaatatcatctaagactaaacctaaagaagtaacgatagaagcatttatttttaattttaaacacaacattcaatcaattagactcaataatgatatttttgcgtggtgtaagttaaagttagttaaatttagctagtattcagttacaactagtaaattttttaaagcttcatttttgacaattaagttagttggagacaatgctgtctccgacactcttatagacactgcctttaaatatcatgcctcttctacaatcatagttaatcttttttaatttcttcttcctcctcttctaaattttctctgcacagaaataaagctatagaactgtattctcttatgagttcataattgtttgtgattatcactattataacactaagtgtgaatcaataaaaattaaagctaaatgttgttccaaccgagaagtaaatagttgccactgcaaagcaaaaaatctaacctttggtagaagattaaaagacaatctttttccaccatccaacaaaccaccaaatggagaatcacgaagcacgacctaatatattcctattagcttgcaaaaagataataatatattcctattatattctttagcttttttttttttttttttttcatgtttttgtttttatttatttttttgttttttctttaacttcttttataatttgttttttattttatttttttatggcagctattggtcatgtttaggggtggcgaaacgagtttcgatacggcacacgaacacgaacacgacacgaattttgcgggttagggtcgggaaaattagatacgggtccacacgacttgacatgaaataaaaacgggtcaaacacgacacgacccgcttaacacgaatgtgacacgtttgacacgatttttttaaa

SEQ ID NO: 131457 - DNA, 574 bp, Cannabis sativa
gaggaggtgatgacttctaacatattatagggtgaaataagaagtatgggcctccctttcccaaaaatatatgtattaaaacaaaaacaaaaattcaccaacaaaacctaatcaaagaagataaaatatgagtttcttataattagttaataatttttagaattgttgaatgtcgaaagagtaaagaaaagcgtttattgtaaaatgaataatgttttgaaatatatcctaattaactatttagggctacttgaactctctcattaaactaatatgttttagcttaagaatttatggaatgatggaaatgaacaaaaggaaattgctaatttggtgagagagggtatgaggaagaatttggagacttaaccattatttttatgaaaaaaatcaacctatctattacaagagaaaacaaaaacaacaagagccatatataataaaataaatatgatcatacattttctttttaataatatgtggcataaatacttttaactctcaactgcaaataaatacatgtatacttacaaagtctcaaaagttaaactagatatttatgccacaaattact

SEQ ID NO: 131458 - DNA, 1308 bp, Cannabis sativa
tattaaaacactcacttttgaggacaatatttttttttttcaaatttttatgattttagtaatatgagagtcacttcacaacagtcctacattgtttagaacttataattataggtgatatatttttacattaaatagatcaatattcttctattttggtttgtcacaaagttattataatttattttctatatgggtgatagatgaacttaattttatccaattagttataattttttttttaaaatagaattaaaattatatttttgtatttttcaatctttatcaagtttgaaataattataaaaaaagcatttaaatatttttttcttataaaaactattttttttataattctttgtgttaatttgtatttaaataattaaaaatatagtaatttattgatgtcatattttattagaataataaggcttctcttttcaaaaaaaaaataaaaaaaaaagaattaagaataataagactccttaactatatatttttcatatatacttttagtgatatgagactattgtgaatattaaacttataaaatatttattttactattgtttattcaaaattagtattatttattttatatgtgggtgattgataaacaaaatcttcctcaattagtgaatgggtgattaacattatttatttacacatatttttttatttttttaaatctttgtcacatatttcaaacaaaatattcttaaagtattttaacaaataaaaaaaatatatatttttttagatttttattttaaattattaatttttgttgaaaatatatagtatattatgtatataaaataattaaacctataattatcaataaaaaataaatattttttaaattttttattttatactataaattttagttaaatatgtataatattattacctatataaaataattaaaaattataatgatttgttttattatttttaaaatataattacttttcataataattatttttaattacaaaatcttatagaaattatatggtgcattatttttactacagttcaaatcttacacactattataaaatctatgagtctatgtatttatgtaaatcaatatctaatttctatatatttatataaacaaaaatactaaagaaaatgaggtagaatcctataatattttaatttattttaagagaattttagtaaatttagttcatttagtccattctatatatttgtagatgttgagatttatgatttagtaagttttttttcattatttgtaagaattctacatggattaaatgttgggttttatgccct

SEQ ID NO: 131459 - DNA, 593 bp, Cannabis sativa
attgaataattattaatgcatgtatatacatatatccattcattttggataattataactactaggtattttgaagaagcctttttttttaaaaaaaaatgataactttatatattaaaatactttaaccattacaataaataatatgtagaaacaatggtttcactaaaaatagaatattatgatgaatatatagaaacaagagtgacgatcgatattgagttgaggcatattcaatgaaccatgcacagcttaaacaatcaccaaccaataattaaattaatttccatcttttcttttattaatccaattatattcaaagtctctctcatactaccaccccatcatttttacatatacggaaaaagcaaagcttgaaccctattttttataaattaataaattgtaatttatatttttatatttatacattcaaacaaaatatgtcataaattattttaattcttatttccgcatctaaaaatattctaaatttatatgatacgtaatgctatagtatttgaacaacagagtactttcaaacataattaaaattaattaataaaatctaatatatatatatatatagagag

SEQ ID NO: 131460 - DNA, 786 bp, Cannabis sativa
catagttttgacctccgttcaacacagggggcagctttcgtcctctataggaaatcttcttcctataaccgagcaaacaggaagagccttggaaatgatacaccaccaaagaaccttgagccgctctgggattttactattccagagcttgttccacatggatggggcaacctcgcaaggactcgttctttcctcagcctgggccctgtaagctgatttgcaagagaaacaaccattactttccaaagtccaaaaccagctatcctttccaaggtcagaaggaatgccccctttcaagatagctgagatagtttcattatcaaacaaactgttaagtttttggatattccatccaccatggtccaaaaggagctcagctacctttatctcctcattcaacgacggttctcttggttgggggtgaaacccttcatatgtgcaatccatggatcaaaccatatatttgtatccagaccatccgccacttgcttacaggcacccttacgaataatggcccttgaattagccacattcttccaaaaccacaaatccgaggcttttcggttacagtcaagaaagggcttacctttaagatatttggcttccagtattcgacatcataaggattggttgcctatcagaaggttccacccccatttagcaagggaagcctggttcatttctttagatttctgaaagcccaaaccccctaaagacttggggaggcaaagtttgtcccaggtttttaggtgaatttcgtgattacccttctcggaaccccaccag

SEQ ID NO: 131461 - DNA, 626 bp, Cannabis sativa
acacaactgaccaggcaaaaataatgatgattttcttaaaattttatctttgccaaagaaaatgtactcgcccaaatttaatatttgccaccacataatacgacacacaaaacgaaacaaaccaacatcatcaggcaatgagactaatatatagaccagaaatatttcaaatatgccagcaatatttgcacacagcccacacttgagaaatcagataaaaaatagacatttagggatactcaaattttagaagaaaaaaaacggtatcaacagatcaatgaacatgaatatagcttctgagtattttaagaaaaatgcacaccttgagcaaccgatcattgcatcgcacccatccacaatgatactcatgggatcactaaaacttgaatctccatacgtgtgtgagcagtgatctcatgtggtccaagaagagaggagatcagctggaccactctctcaactaagcataagctgatatgtgaataactaagaatgtattttttatatatataaagccttttttttcaaacactctggctctttctttagtacccaaacatggctttcactctcttcaagagatgtagccgtcctctttgatccccaagaactaatacagaaggagc

SEQ ID NO: 131462 - DNA, 978 bp, Cannabis sativa
gagaggaataagactaaactattgattgggaatttgggatgtcaaaactaaaatgaataagactaaactattgggatgccaaaactatagagcaggccctttaatcgataatagtcacatttaattagtcataatgcatagagaaatcatgaattctttaatggtagaaatagaattcaagatggattatttagtttgataatagagaatacattatgaagccagcccatcaaaatattaatttatttgtgaattattatgtaaatgcctctcatattaaaataatatttattggatgatgtattattgatataatttggatgagtacatatacataaataacattattctagtcttttttacattgtttgtgacaatatctctaactttaaattgttttagacatgagtatatataaatgtatatatatacattttatttatttttttgactacagagtggtgattaaaaattatttcaaaagaaattcagtggatccatctttagaaagaaaaaatggaaataataaaaaacgaagaaacgatgaaatcaactttgaagatcttcccactgatccaggattaagaattcccattttaaattacaatccaaacattcgaggccaaattaaaagatatttatgcaaatgggtccttgtcaacttcaaagtcatgattttcctccgagaaaatgtctaggagtgagtagaaaattcaatccttgattagttgaagattatagttggttggaatatagcatagaaggagattctgtatattgtttatggtgttatctttttaattcaattattggtaagcaatcaggtagtggaacttttgttgttgaaggattctcaaattggagaaagatagaaagattgagcacccatgttggaaaagttggtagtattcacaaccaagctcgcagaatggcagatgctttgatgaaccaaaagcaacatattgaaaccattatttc

SEQ ID NO: 131463 - DNA, 692 bp, Cannabis sativa
aattaaaataaaaacaataaaaaaaaatctcttgtatgggattatttatcccaccctgttggattagatacacaaccctatatagatgagattagctagattagttatccagacaactagcatgcccaacactggatttgacaaattagtttgtctaatgtagtcttgtcatgcataccaaacgagtcctaagagtattgttataagacacacacctagtaccacctaaaagtaaagccttacgattggttagtgatattctataaaaattattacattaaaatatttaaaatacgattcttaattacaccaataataatatgacaccgtgaaggatgctagacacaagtgataccctttatcatgagtatctctaaatgcagcattctttaaaagtgttgaaaatctccacatcaccaataaaatattttttttttgtgatgtggacattttcaacacttttaaagagtgctgcttttagagatgttcatgataaaagatatcagttgtgtctaacatctttcatgagttgggcggagatgagaaggagggaaagagggagatagagttttgagatcggagtatttttgaactaaaactaaaaattagtgggtttaaatttaaaattttaacttaatatatggatgaaaaatcaaattttccatacatttattataatacaaattttgtat

SEQ ID NO: 131464 - DNA, 867 bp, Cannabis sativa
tgagatacatacctatcgtcgaaatggaaaactaccatcttaggcaccgcatggaggagacaaatcagtggaatgctgaattagcgcgtgatacagctgccgctaggacggaacaggggaataacactcaaaatcaacctgaccctggagtgacaagaccacgaggcagacctcgtggctcacgaactaggacacaggaaactgctcaagaagaaaaacttggggaaaatgaggttccctctgaaaatccaaatgatcagcccgaaccatctcatagaaatgagaatgggaggcaaccaaaaactaacaaacaggaaattcctcgtggaaacaaggaagaccttgggacacaacctggggaacatcggtcaccagcgttcttcttaaacccatagggagagggctcgtacaaaccccagtgggggaaacacaatgaaccatgcccagggggaagaacagggtgcgaagaagcaagtgtaacctcagggtggtcaaggacccatagtcgacaaactcgaggaggagatagttctcgtcgcgctaatgactaagaaagcatgggaaccagtaaatttgcaagtcactcaacgacgagatccatgagtaagacaaggtccgtaagtaggacacaatctgtgagtagaatgaggtctgctagtaattattcctaaccagatctgcgagagcacttgatcagaaaaaacctgatcttcaccaacaacttggcccaaagcaagaggattctatccaattgcgaatagacaagttggaggataagttcaggaggtatcaagtagaacaattaggaaaaaaatctggatacaacttagacgaggaactcgagccgtaccatccagatatcatgaa

SEQ ID NO: 131465 - DNA, 664 bp, Cannabis sativa
aatatttatttaaatacactactaaaaaattagactttagaagtaatttttttgcgacatacaacatcagttttgacataatttgtgactgacgttgttttaggggtcacgaagggggtgtgagataattatagccatagagtctctatggtggtccctatggtgtgggttattaaataaccgacaccataagagttgatttttttttaattttagaattttgtgtaataaaagattttttttcaattttatttaaaatctaatttatttttttaataaattatatataataaacataaataaaaattaaattaaaaaaattaaataaatacacatttattaaatgtatttctttaatattatttataaattactctaactctaaatatttaagagttatctaaatatgaatataaatatttttataaaagtaggttaaagaaaacatacctcatattaaaaagcatagccttgattttcgtaaaaatcacataacgccacatgttgaatccaaggacacataatttatttgcaagggatgcatggaatctaggttagcaccaaaagctcactagtaggctccaaggaagacaatttgggccaagcccaagttacataggaccttctaggaacgtaccttagctccgtgacaagatagatcttt

SEQ ID NO: 131466 - DNA, 940 bp, Cannabis sativa
aaaggctagatgacgggggctattgctgagcctgagatcctttgtcggccccccatgtcgctaatttttgagatctggttgttctcactattagactccctctggcaagggaagatctatcctagtccctaaggaattgggctggtcaatttgtcgatagcccctccctaatctatcaactagttttccttaaggctgatcattgatgagatcttggcctcttccatcgattctctagttgaattaccttatcatattgttgtcctctctgttgcggcgatccagcttcgcttggtgagattaaaggatgtactcttggtcatccatccgccttaagaatttgcgtcttcattgagcgaatacatcataattagcagcgcgattcacttaggatggcttctctaagtttggctaacctaagatcttctcccgagtccacatggggttcaccatttgtaggctcgccaactcctggtcctgtctctccagcatagtactggagatgagattcagttgttgttcttgggggctgtcgctcatgagtccttcctttagtaggaggcgccactggagggtcctcccttggtggcaagggattgctattcagatccactgggatgtttgtgtcagtttggccacttgtagtggttagacttggtgcctattatggtgacaagattggacacatctgtcgtgttaataggaattccagttatgggtggaacatgaacatcaggatctgcagtctgtgggtcttgagggagacccaaagatgcatatggtgcaatcggagttcttctcttgttaaccattgcattgatcagatacaatatccactcgctctaaatgaaagtaccaaattgttcgcctcaaaaagtgatcaatcgatagcagggtcatatgaatctgatgtttgtcacgtgttacacaattagaatta

SEQ ID NO: 131467 - DNA, 755 bp, Cannabis sativa
ttactaattagccttttttttaagtagaattcgagtgtgcacaacacatttaacagctcatttcttcttcttcttttcttggaggtgccacatggcgagctatggttggagagaagctgacggggagcacacgtggcttgtgctagttcgctgagggctgacgctattagcgaccatggggacatgtggcaggctagagggaggcagaggataggggctcacactcctttggtcggggtgtatctcacatgcgagctcgaccttcgaatcaggacgtggacggctgcgatgggcaggtgactttaaccgcaagtgggccttgcatgagggctgatcagatttctttttgaaattatatttttggacctatttccttaatatttctctaatttaatcctaatttgaacaaatataaaactaattaaaaaactaaaatcaaattaaaaataaatattacgtacatattatcacaaaataattataagaatacataaaaccctataaaattaaaataaagctaataaattcaaaaataattaaaaacttaagaattaaaccaattttaattttaaaaatatgaaaataactctaatttttagatttatcacaactccaaacttacaattttgctagttctcaagcaaaagaaaaattaaaaatacacatttttttgaatttatttggtgatatcaaaaatgtccttaaaatatacattaaaaataacttatagaaaatatgaataaaaattaagctta

SEQ ID NO: 131468 - DNA, 983 bp, Cannabis sativa
  modified_base (718)..(722): a, c, t, g, unknown or other
gtgtccttcattgaggtggcaaccaaattttgggtataacaattaccccttaaaaagttttttttagtaaaaagagctttttaataattacatagggtattttcgtcaaaatattttcttggaaaaaacgcatcctttgaatctggcggttgtacggtttcgagagtcattatgaattgtctcttcatattctgcccttcttccaactgtttgatttctcaatctttagttttcttgtcattggactttgtgtataaagggcagctcaagcttgtcatttttcacaaacctctggctttttggtgagatccattttcataatggatcatttctttcctgctagaatgtcccttctgagttcagaagtccatcctccgaaactcatcttacccagacgcaccaaccaatttccattcgttcctaaagacttcaagcctcaactggagtcgaaaacgatggattccaaggctgaggagcttccgagcaatccaaaccaggggaaccttgtagcctgccatggtcaatcctcacaagtgatccctgacggtatagatcttgtgagtgatcttaaaggtcctcctcagactgataaagaattccggaggaaggttggaatggttgcagatgaacttctattagagaatccagcaacccaggacccaaacctacaccagaagatctttgcaccatcctctttctggtatcgaggaatttcctnnnnntgggaaagagatctcggcttcaagaaatgggatctgatgatgaggagaataaggtctgtgtggagatcaaggctctctacgtacagatggtctttctcgacctacgtgtagccggtctttctccaagctatgtgtagacggtctttctctcttatccttggttttggaagatgacttaatggtttgcccctagtggcatttttgtaaagacaagtttgtaacccaacttgggtttttttcttatcttaaaagccttgtact

SEQ ID NO: 131469 - DNA, 987 bp, Cannabis sativa
ataataataataattcactcaattcaccttcttttatttcttttttaataaaatactaaatagaatttgttccaccaactttgatatttttaaactttttaagcccttacaaaatttcccaattaataagatggttgtatttaaagatttacgtttaatattactaatgagcggctgatatggataaaaatttgccgacataatttaatacatgttaaacttgagagatatgattcggtacatgtacaatcgctttatagatattttttttcaataaaactgaatggaatttgacggaaattcttgatccaacaattttaatagtttaagaagaattttcaacaatctaaattatttattatagtataatttagaatatgcgaattcttaataaaacaaataaataaataatttaatatgattttaaaatataagtaagcttgcattctaaaagcaacccaactttgatagtgacaattttcaagtgaagcataagtaaggtcaaagaatattattttatgtagattgtaagtgtcgttattttgtgacagattattttaatagaatgtctagtcatatctggatttttagtctgttttatctgcacacttgcgtactgttaagttggtgtgagtctgttatgacttatcgttaggagttagttagtgctaggtggattgttctgttgggtataaatagtcggtctcattctgcaaacagattatccattaaatcgatattgttagttagttcagtttcatcgtgggtgttagtgttgtatcttgttgttcttgttgttgttttctataggtctgattgtatagcttgaagatggtcattaatggcagaacaatcagagcctgacgttgctgagttcagtgtcaacttcgtcatcagatctaaagggatttcaaattgaagaagtgtcgaaggcgaactcaatttctgcacaagggattgtgcacttgcaatcaagattcttgattg

SEQ ID NO: 131470 - DNA, 1382 bp, Cannabis sativa
  modified_base (1328)..(1353): a, c, t, g, unknown or other
acaacattaacttgagaaatgagaacaatcatttcaggcagttcgatccaccaaaccccaacaattggtgtgatctaccccttgtcaacacacagggtgcaccagcccatcaggggagaacgagtgaccacacattgcctagcatagagttggccgaccatacaaaactgcccaggtagggctccagccatggctagtttcccaacctaaggttggtcggccagagctagatgccaagcttgggggtggcaagccttgaacataccctttcccaaggtatggccagccaggtcctgtccaatccagagctacagtccaattaagaaaggacaattaactaggctcctacagcatcatatccttctgtgcaagcacaattggatcaaataagagacatgataaagggcttaattggcccaaaaccatctgaccttgaactagacaggtcaaggggctctccattcttggcatacatcaatgccctacccttgcccaagtttaagatgtcggtatgaaaaatatatatatcggatgagaagatcctcgagcacatatcaagtacttcgagatgcagatagatctctagaaaattactagtgatgtgcggtgccggatctttctgacaattttgtcaaaaatagctcagcaatggtactttaagctggctccaagaagattcaattcttagagtgaattttcctgagaattctacactcaattcttgtcctcaagactgatagcatcgtagctgggagaccttgtcaaggtcaaacaacgacaaggcaaacctttgaaggattatagccaaaggtttatggtcaaggccaccaaggtcaaaggcctaacagaaaaatgtcattacctggccatactgggggcatccttcctttgagtgacttctagaaaggcgtctagaggatctcaaccaacaatatgaagaagttccttgaatgagcaaacggttttataaagctagaggaagccgtcaaataagcccaaataggggaaagtcaacaataggcagtcttagggtgttgtacaaccccaagacttgccaaatgtgcaggtcagcactagtagtgcaagccagatctctagtggcaagaacactggaagcaagtgcattaacaacagttccggttagaacagtggaaaaaaaaggaagtacaatacttctcccatgccataaaactagaaagagaaagaggagaagtatacctgcttcaccctcctaaccaagaaacctaatacaatttacatggccactcaatctacatacctatacaagaagccccctcttatcaaaagggtgttgggttttgtgcccnnnnnnnnnnnnnnnnnnnnnnnnnnagatttactagttaataaagattagaaat

SEQ ID NO: 131471 - DNA, 830 bp, Cannabis sativa
tccctcctcgattcacgtgagcttccgccaaggactgcccgtacctggaagcaattctactatgctcctggaagactagatagtgtgttccttgaagaccagaatagttttcctttttgtcaaattgcacaaaataagagattaactttcattatttttcagccaaaaaatcatatcaaattaaaaaggaaacctaccaaaaatgaaagtcaagtaattaatttacaattgattacccacaattatagggcacgataatgacagcctgatcgtggttaatttgcttagtcagcatgtctatcctctcatggactaggcctcacggatacaactctaatttatgtattgatcatgtaaactccccattagagggaaaagggaaaccaagtataatttctgtaaatactataaatacccaacaaatccttcgacttaggagttgaattctcttgcaatgttttcccaggcaaaaggagagaacatatactcattgtattttccaaaggcctttcttgctaaaatatataataacatcgactcgtggactaagacttattatgtaacgccctgtccaatagagacgccacgtgtgtgtgtggttttacaaaattcttatttaaatactttataattataccaaaagtgtgggtaattaaatttttgataattaaagccaagcatataaaaacttctttatagtaaaagataagtaatgagaactatggaaaccccctgtttttaaaatattacaaactagtttattagtgctttttcaacataaactttgcaattccaaaatactatcaaaacggagcatcctgttcactggg

SEQ ID NO: 131472 - DNA, 618 bp, Cannabis sativa
gttcctctaagatagagaagttttattaaatttaaagaagcatattaaaaatacacagttcctctaaactctttcatttttaagtttttgtttaaaatacactattcatgttctacattatttatagaatactacttactggtctaaatatatttgttaattattttttatgtagatatgtgtatatagatattaatattatatatttgaaatgagtcaatataataaaaaaaataaaaaataaggttttagtaatgtattttaaaaaagttaatgcatagtgtaatataaaatgtgctgtaaaataaaaaaaaaagattttaatgatataatttaaaagataaaataagaaaggttgctctaaatattaatcaattgaggttgtattattattattattattattcacactaatttttataattttatacaaagtttaaagcaagtgggcctagaatttagaacgtcatggaagacgccgtcacacatgcctccacgcgtcagcacgtgggaaaacacgcagaaactttaagcgacacgtgagccccacgcgcgaggaatccggcgaccagacctcagggtttggtagatcggcggctgggcaaccctcttgagtgg

SEQ ID NO: 131473 - DNA, 712 bp, Cannabis sativa
agggccacttagagttaggaagtaaccaggaaagtacgtacttaattaattaataattaataccaaattaggtttcatttcgtcaaaaggactatttcttcattgtcggctgaccacttaaaaagttaattaatttacaaataattatacataaatttgaacaaaataaatattttctaatatatctagattggaaaacaaattaagaattactatgatcaacttattattttggtaataaattttcaaaattaaagagttgtacgaaagaaatccaacataaaattataaatttatatacctatagataagttataggaaattttttgttttaaagagaaaatagatgtatatagtagttttatatatataaaatatatttatccaaatatgggaaaatgattttattttttgattaaaatgattattattttctcttttaaaactccacaaccaaacttaatggataccattgataaagttatataaaggtagtgagaaaaattaaacaatgcaaatgataatatttaaatgattaattaacctaaaagattatttatatatatatatatatatcctaccactcacatcacttgaagagagagcaaacacaaaacagagaaatctgagctaaaacaaacttacagaagatgaccaataagtttactaataataaagacggagtggtcatgattcatctgatcatgaccac

SEQ ID NO: 131474 - DNA, 636 bp, Cannabis sativa
aagtgtatgcatagtgagtttgagatgagcatgatgggagagctcaattttttccttggacttcaaatcaagcaacaaaaagatggcatgctcataagtcaaaccaagtacatcaaagacctactttaaaagtttgacttggtgaatgcaaagtccatgaaaaccccatgagcacatctataaagatggataaagataaaagtggtaaggatatggacatcaccaagtatagaggtatgattggttctttactatatttaataactagtagatcggatattttgtttagtgttggtctttgtgctaggtaccaatcttgttccaaggaatcccacttgagtactactaagagaatctttagatacttgataggcacaatgaatctaggaatttggtatcccaggaactcaacctttgaaatagtaagctactcagttgctgactttaccagttgtaagacggataggaagagtactagtggaacatgtcactttggatgaaacaaaactcagtagtcctatccacaacccaagctgaatatatagccgtgggtagttattgtgcacaaatactttggatgaaacaaactcttaaggattttgatgttgattttgagtgtacacccataaaatgtga

SEQ ID NO: 131475 - DNA, 542 bp, Cannabis sativa
atttcaaactatatcacttaatcatttaaaaaaaatactaaaatagggtccaacccgcgcgaagcgcgacttagttccctagtaataataatagaaaaaatctcatataggaagtgaattttaagtgaaaatttgagaatattcttaagacaatcctatagataaccatttatctttttttcgtttctttttatttttttaaaaaaactatattatctcacaatagaaaattggagcaagaaagttgtttattttaccattggcaacatggggattctatcatggtggaaaggaaacaacaaacattcccaacctgataacaacaacaatgacaaagccgcccaagcttcaagtcctaaccctaaccctaaccctaaggcggtggaggtccctggtatgaacggtgctgtggaggttcctcggaaagagaatgtgacagtcttcgagtttggttctgtcgccgctaccgccgataacgtcacgctcgctggtttctgtcccgtctccgacgaactcgacccctgccgttgggagatcttacc

SEQ ID NO: 131476 - DNA, 1548 bp, Cannabis sativa
  modified_base (1219)..(1224): a, c, t, g, unknown or other
  modified_base (1279)..(1290): a, c, t, g, unknown or other
taattaaatgtttgaatcgtgatttcaatagtataaattattctttacttcttaaagatatatatatatatacaattaaaattaaaatatatatccgtagataatagatgaagaactaattaaagtgacatctaattaacacaaaaaattccaaaatatatattttaatattgttattggttttattttcaaatttatatttatattttttttttgagaagggtcttcttaaattacatttttgagttaatttgattttatgagagtatttttgatggaaaacatttagaggatgtttgataatgtggatatattaaatgacaaaatattaagatgttatattattggaaagatgtatatcattctaaaaatttgtatggatatattatacagtaacattgatgctatttatttttttaataaaaaattattattgctagatatatattaaataataatgtgaagatgataaatatagtatttttaaagagtgttatactattaaaatatttttaaaagttagagtgcctaaaatttatattttataactaatgagttgcaaaaactagttatatttttgtagtgattctcaatatagcttagctcaagtggttatattgttattggttgttagaattaaaaaaaataaaataatcttattatttaggggtccccaaaagtcgaatatatatatatatatatataggtttggactttggataaccttttttgtacgcaatatcataagtcatatgcatgcatgtatattctatcctatacgaaagaaagtgggtgttctccataacctcgttgacgtcggctaaaatatataactctaatgaaatctcatcaatttgtgaccatacattaggtgagaaaaatcctcccttatccatgattgtgtcttcccacgttgacgtatatcatatatgtatattgatcattattctcatattattatatcattcatattcatacaattcagtttcgagatgtgaaaatatccataactgaattgtataaatagttcatgtattatatatataaataagaacaaacttacaaaaaaaatattagaatttaggttaatttttacaaaaatactgtcacacgaatttttttttccaaaattactctatttttatcaaaatacaaagcagaacaattcaaaacaacagtaaaacaccagtgaaaatttaacacagtatactgcagtatnnnnnntataaaaaaatacagtaaaaaagtgaaaaataccgtctggcagtatttttgtaannnnnnnnnnnnagttagtataccatgtaaatttcgatgaaaattatataaatcaatacaaaatagttaggcatatgtaagtgtaacccaccaagtctttctatcacctgggcccaagcctaataaaaagtaaggataccattctattacaatcattttaatttaggatattggcggctaaactacttgaattttacggtttgtaacacttaaccacaaaaatcgaattttttgcggctaaactatataaaccctggttccgttttgctc

SEQ ID NO: 131477 - DNA, 911 bp, Cannabis sativa
  modified_base (365)..(368): a, c, t, g, unknown or other
caatgtttggcggtccgttgtaattggatcggtcggttcttattggattggatcgatttatgcacacccttaatgagtattgcccataaatgggtaatattaagaaaatttgagtttttatgcttaattatttttatctcattaaaaaaatcactcatttttatattatatgggttggagttgtttcatcgactaaaaaaaattgacaaaaaaatattaagtttgacttaagtattttgtatataaacatatttttgatatagtgtaaaaaaatatatattttttttaaattaagtaacacaattaagtatagaaattcaaattttctttttattattcacaaaatttaatagtttaatattttnnnnattaatatttatagttaaatttacttggtaaccatccaataatattcatattatatatttatagatggtgaagaccaatataattaggtaagtgatgtaacttaaaattatttctcttttaaccaaatttgggggtttttaaaaaatgagatacatgagttcatgtgtgaaatagaaatatattacatatattttcttttttttttttttttgaaagaaggatattacatatattttcacacatacattaatttagattcttaagagccattacgtggtaaaagaaacctcaccacagaacaagtcatcaagatatcgcaaaggtgtatatgtacataaaagatagaaaaaaaaaaaacaaaacaaaacaattaaataaagcaaaagataaccccttttttctcatcactcatcactactcctcttttgtttcatttttacgtacccttttaattgtgcacatataataacaattgaatatatatatattatatattataagtctcttaatcacgtcctgcttgattctcttatataccctca

SEQ ID NO: 131478 - DNA, 613 bp, Cannabis sativa
attttaaatgagctaattcaagatacattaaaaaattgagaaagatatataaaacttctatgttgtaacatttttctaaaatctattcggaaaaggttgaattcatatttaaagttttagcttttatttttctttgtgaagtttatatatatataaaaataccaaaataacaaatttagtagtaaaactaaaaaaaaaattaaacaaaaaaaacataagaaaataaacttaaaatactctaaactatttgtaaaataaaatattcttctattattatattttatgtgcttataaaataaagtaggcatgcgtgcaagaaattatttgaacattattttcgacgtgttaaattttataagatatcttaaataactacaacatacagaattatgaaaataatagactaaaatctcatttgaatgctcatgttacagagacaaaactaattgcattagcaaaaatcaaattacaatagcaaaaatcaaattacaataaaaaatttaaccccgaccaagttgcacctatgtttaagaaaggtcgacgagttactaaattatgcctcttaaatttttctggctgttaaaaattatcactgaactattgagattgttag

SEQ ID NO: 131479 - DNA, 579 bp, Cannabis sativa
tgctatgcaaaccaccaaactctcaaatcgtatggtcaaccggattgatggattggttagggatttttggtggggtttcgagaaaggaaatcatgggattcacctaaaaacgtgggacaagctctgcctcccaaaagctatgggaggtctgggattcaggaaaacgagagaaatgaatcaggcttttctagctaaatgggggtggaatatcctaactgggagtcaatcgttgtgttgtaaagttctggcagccaagtacttaaaaggaaaagacctgctaaattacaaatgtaaaaactctgactcttggttctggaagagtgttgtgaaggccaattcaatattgagaagaggtgcttgtaagatcgtgactaatggtgagaatacaaatgttcggggggatccctggattcctcacttaaaaggttttcatccaaaaccaattaggggagatcaatcaaacctaaatcgggtagctgatttgatgctttccaatggacaatgggacatcaataaactgaaggacagctttgatcaggaaactgttgctgctattttaaaagggggccacccttcagg

SEQ ID NO: 131480 - DNA, 700 bp, Cannabis sativa
aggtaaagggaaaggcaaaattgggcagccatgagtttgaggtctctgcagcagtgtacatatcagccgtggtgtcttggcttctgagaagccggatcaatcctttttctatgactaaaaatgtaacctactttttgtaataatgtaataacagttttataactagttgaaaaagaattttataaacaggggatccccgtgttatgacagtatttgtatgaagttttattataaattttaatcaatagttttatttagaccacactttccctaaactaatagattagttattaataaatttgtaagagtacacacataacgtccttgggagtcagggcgttacagtacaaacgacacaattttattggtccacgtaaaaagttatttaaaaaaaattaaaaaattcaaataaaattaatttgaaattaaaaaaattataaataaaaaaataatttttctttttttcctttctttctatttctttttcttttttttttcttttcttttctttctttttctttatagttcatcttttctgacctctctcgctctatcactctctctctatcgatctcctctctctatctctcttaatctcaattcaatctagggttttcaaaacccttgggtagccacttcggcagttctccgaccaccccaaggcacctcgactcctctctctctctctcgatctcgatct

SEQ ID NO: 131481 - DNA, 564 bp, Cannabis sativa
cccccctttcccttccccatcaaccgacccccccccgtttttttgcaaaaaaaaaaataaaaaataaataaagctctcctcctttctctctagctctactgcctacaacccttgaggacgtctgcccagccctctcaccagcccaaccattgtgaaggacgtcggccaaccttcactcatagcacaaccgtcgcaccacctattcctcctttttattgtggaataatgggtaaatattttttaaaaaacatttgttaaataattgaaaaagtatagtataattcggtagatttatgcggttgttcatatgattttcatcaaaattgcgagatctcgttttttaaagtattctatgttcgtatttttctcgactggttggtaagttctcaaaagattctcaaagcagatgtcccaaggtcacggaagacctttctcaaagactttcgataggttctcgattgtttgtggaaatggcgaatgattttgcatttccaaccactcttgacatgttatcttcgtgttctcaattgtttgtcaatggtgtgtatagttgtattttcaaac

SEQ ID NO: 131482 - DNA, 909 bp, Cannabis sativa
accattgccaactttatatctgagccttttaatcaacaatcagacacgttttgaacaataatattttaaaaaatacaattttctgatcacaaaccaataaagttctaaatttttattattttatttttatttaagttataaaacattaattaagctcccctttaaaaattaatgtctcatctatggtataagtggagtagggacaaaatgcattgtggtctcttttattagttagccgttgaagtcgctacccaatttaaacaaaaatgaagtggggaaaaggaaaagataattgaatggtaagagagatgggaatgctttgtttacgtccctactcactcttgtcactttcttctttaaaatgggagtttctatatttagaaaaatgaattattggtgtttgtacattatgagaaagataagaacaaagatgcctcttttgcttaagagaaatcctaaggggtttagcgtgatacattgtaattgatgtattttaatattgggtctcacatattttaatttaataaataatatatgaaactgctaactaattatagagtgtcatattggtatggtgttgggcaccttaaactatcaaataagaatattatttgcttaaattctaaaactaagaataatttaaagttaaaagaaagataaggagagcaaccaataaaaaaaatatctaagttactcttaattggaatttcaactcattttcagcactacacaattaccacattataattccattgtttgatttgattttaaaactttgtatgaaatcattaaaagtaaagaaaaaatgatatataaatttattagagagataattttatagggaaatttgaaattctatgcttaaaaatgccattttatttttttcctaaatgtatagttattaaaatt

SEQ ID NO: 131483 - DNA, 618 bp, Cannabis sativa
  modified_base (536)..(537): a, c, t, g, unknown or other
ttctaactcaatagcctatctattagagaaaggatgacctccccctccttgagtaattacaccttcacctcctggcctagctatattctcctcatcagcaacaaataaacattctccttcatctgctaacacttaaaaattatttgaaatcacaacttgttgagacccttgcatgaaaattttattttttttgtcttaacttgttgaaagccctcttcatcaaccgccttagcctcctgtttcttttatgttattctattccatgtttgtttcttttccactcatatcttctttggttttgtggctggaatattttacacactattacgatatggcccaaattcttgcattcattacacactaccagtatccgctaatacttcacaccaacttcaacctcaaggttaatttcattatgaaaagatatgatgttgggaaactcctagatcatccaaacttctaccaaaactctaggaaagttaatgtttggtattgttttctgttttttagtttcaaaaaattatttttagaaatgnnaacaaaaaatagtttttgaagtttctaaaacagaaattatgtttggttagtgttttttaaaaacaatattgaccaaaagtg

SEQ ID NO: 131484 - DNA, 1064 bp, Cannabis sativa
gaagtaaattcatatggtacttaaagttaattctaattataatcatatcaagtaaatatatattttgtataaaatttgaattaatttttacaaaaatactgttagtttttaaaaatattgtatttttataaaacaccagtaaaacacaaaacagaacaactgaaaaaacaaaaacaaataccagtagaacaccagtaaaaaacataacacagtatactacagtataaaacttataaaaaacacaataaaaaagtaaaaaataccacctaacagtatttttgtaaaaaaataacaaaagttaatatatcatctaaatttccatacttacttatatgaaactgtatgaatcaattataatcgatccgttgagaagcttgctctactatgaaaatcgtaggggaaagttaagcaaatgaacgtgaaaccaaacatataaatatatatatatcaatataaataaacatatatataactaatatgctctcgaactattttttttagttagtaaaattaataaattttatggctcactcaaattgttacaatgctataacacgtacgtttggtggtcaataatttataaaaaacggatgcgagttgtcttagtatatctcattcagagaaagggacacatatatataatataggttctctctatacgtataatttatacgtgcaagtttctcaagcgaagtaagagaactgaataatgcgtgcatggtactatacaagtacgtacatattatatataaataatattatcatcatatatataaaaatagctctcaagatcgatctcaagagctgagcatatatatatataaataatgacatcgaaatgttactgcatgttaaattaacataattagtattaattagctaggagccctaaatatttatatgtatacatattgtctactgttttatgcatgtatttgaggtaaaattgtatagtatattttgttgtgatatggtaaatcgtaagttactaatacaaattaacaacgttctatattataaatcactacaaaaaactgctacctttagtgataattttttagtca

SEQ ID NO: 131485 - DNA, 896 bp, Cannabis sativa
tttctgatcattattaataagtaatctgattatattgaaatgggttttatttagggcacgaaacccaacacgatcatcatcttcaggatggtcaggggtttcaaaaaaagattgaatttgagtttctaatgcagtaagattgagagtggcattgaaagtgttggataagtcatccattttcaaaagacagcagggtaatctagagtaaaaagtgaaaagagaaacggttgtagaatagatataaaaaaggaaacttgacagagaagtactggatgcagtaaaaatcagaggatattcagctatatagtgcagtgggcaaagagttagtatcactggggattgtattgcagcaagagataaattctccatgtcaggttatcgaatgatgattcctgcaacattgacagtggctcctagagaaattatagcgttctctacaaatgtagagttaatcatgatccaaggcggttcagggggttgggggctaattaatagagaatcagtaaaggggcttttcttatagacaagcttaaaggaaagtaaagatcgatataatggggatttaatcacagatgagacatcaacccaaaagttattacagattagaagtttacttgtgagggagaagacaaaggactttaatggtgatttccgtctgttagcagcaaacggcttcagggatttggagatcgaactgtcactcgaaggggaaacccatggatggacttgaacgccgatagacgacgacgacagcacaacacaagaattttcgagaaccctagggcacactcttctcaggaaaaactatcccatgaataatatttatgttgatacttaaatatttaatataaaatagactattaaagtatatatttatttatattttattatttgat

SEQ ID NO: 131486 - DNA, 723 bp, Cannabis sativa
aagcgtttgatcgtgtggaatgggattttcttctggccattcttaacaagttcaattttcctacaaaatttattaatttaattcatcaatgtatatcttctgttacaatccgtttcaataattaatggtcaaatttctaactctctccatccgtctcgtggcattagttaaggggatcccttgtcaccttatctcttcctcttatgttcaaaaggccttactgctgcccttcgtcttcaggcataaaggggatcctttaggggtatctctgttgctcgtacgacttttctcacttactttttgctgatgatactcttcttttcactgttgcctccccttcttcttgtaatgctcttaaggaggccctcaccatctataatttagctactggtcaaaaagtgaattatgctaaatcttccatctttttttcacccaatactccccctcatatcactgcttactttttcgacactttaggactagaacggcgaccatttattagcaagtatcttggagttcctctatgttttgggcgttctaaaaaatctaactttgattttcttcttcagaaggttggctcacagctttctgtctggaatgacaagttgttttccaaggctggtgaagaggtgcttttaaaagctgttatacaagctattccttcgtataccatgtcttgtttcaaactccctgcctcaatctgtcataaaattgaaagactaa

SEQ ID NO: 131487 - DNA, 855 bp, Cannabis sativa
ttgcttcggttttcggttctacgtctttgttgctatgtttttgtttgatatttcatcaagcttaatgtttttaaatctgcctactcaaaccttacatcccaaaagtttggaaaataccaatgagtagacctttcaaaataagcaaatttgtgttcatcacatataatataatagagaatcaataagataagtatgcttacattaatttttgttttgagtttgaaatagtgaagatttcattatctgccatgaacaaaccttccttccctgttctttctttggtttttattctctggttccgtagagatgattaggcgaagaccaagagaaccctttcgataggagttgctgtaatggaagaacattttgatcattgttctcttgctattccagaaccgtactagattttcatctcatttcatatggttccttgaggatcataaataaatctaaagtattaatagacattaaagtggttagaactaaaaacatgaacaacatgataaggcaaatggttaattgcaacttaattactcttcaacatcattacacatagttgtagaaatcttaaatagagaagctccatagaagagaaatggttaattacaacttagttactctttaacataaagcaaaaatttacaattttaatgtcaaataattttttttttttttttttaaaaatactatcttttcataaaacaaccaaataaaacttatacaatatttgtaaaaaatattagtatgtgatgtaaaaatcactaaaatattattgggtcaaatttatatggaatctcaataatagggggatccgagtaaaagaagtctttctgtatgctttgattgttgttgaaa

SEQ ID NO: 131488 - DNA, 520 bp, Cannabis sativa
atgatatatagaacaactaaaatggatactcatgtgaaaagtcaacgtcaaaatactaaaatcggcatttctcgatacagcacaaccagtctaccggttcacaacatcaaagactcaaaaatttcttatttttaaagtctcaaagcttactctaatcttcaccaattgttactgaacttactagaacactatattgtggtattctaatcatatttcacaagttaaacacattaaaatcatcaagaattcagaatcaccactgaagctcaaggtttagatttataaaaattcaagtttaaagcttcaacacaaccaacgacatatatcctcaattaaacctcaaacctaacttaaaataaaaatctaaatcaatcataatccgaccataacatcaaagaaattaatttcttaaaattaactctaaattcctagctaaaacaataacatatcatcaaggaagggtaataaatcattacctcaaaacacatacaaattctaggagttactttcttctaagcct

SEQ ID NO: 131489 - DNA, 672 bp, Cannabis sativa
caagacagctagcaactaacataataggactctaacaaactcctaaccgatttcaactaacactccatcttacatatctcaatactcccccttaaggtggagtgtagatattgcatattcccattttacttttgagaatttgaaactggttaggcagcagagcctttgtacaaatatttgcaatttgttctttgctagatgtgtgaactgttcttatgattccttcttggaccttctctctcacaagatggcaatctatctcaataagtttggttctttcatggaacacaaggttggcagcaatttgttgtgcaactttattatcacaatatagtgcagcaggccccttttgttcaactctaatttcttgcagcaatgaaagtaaccaaaccagttcacaagtggtgttagacattgctctgtactcagcctcagctgaggatctcgagactgtgtgttgcttcttactcttccaagaaatcaatgactttccaagaaacacacagaaatcggttgttgaccttctagtatcaacacatgctgcccaatcagcatcggtataagcttcaagtttaacttcaaattcagctggataaaacaacccctgtctaggggttcctttgatgtactgtagggccctttgagcagcattcatgtgtgtgattttgggag

SEQ ID NO: 131490 - DNA, 809 bp, Cannabis sativa
tggaatatagctgccatgtttaaacacatatgggctgtggccaataaaaaggataatctttgggtgaaatgggtgcattgtgtatatataaaaaatcataattgatgggagtacaaagctccccaaggtagtagttggtaggaaaatggtgtccattaaagaattagtgaaacaaactttgaaccatgaagaattctcgaatgaagagtataaggtaacaacaggttataaaacactggttcaagaacaggaaagggtggtctggtgcaatgaggtctgtgctagaattaacaccccgaagcacagttttctcatctggttagccattcagcagagactaaaaactaaagatcgattatgcaggttcaaagtaattgattctccagtttgcagcttctgcaataacgaagatgaaacaatagagcacctttttttcgggtgtattttttcccagcaatgtctgatgcaagtgaagaactggcttcaatggagagctcgagctgatacactgcaggtagttctcaaaacaatccggaaagccaagcaaaccaaattaagaaagaatgtcaaagcttcaagtattgcagcacttgtatacttgatttggaaggcaaggaatgatctcatttggcaaaagaaggtcctaaaagttgaggaattagtccagtggctaaaagaggttgttaaaactagaacattgcttgtattgcctcaaaaagtgaaaatcaaagatagagaatggtttgatagtttgtaaataattgtatagatttattgaggccaaagttggtgctcttaggatgtaaata

SEQ ID NO: 131491 - DNA, 1237 bp, Cannabis sativa
cggtagttgcggtcgtgaccgaatctcccacattcaactcatccttattataaccagcaaatactttcgcgtggtttaagaagagttgggtgggggaggtgcagtgatgagtggaaccctgacccagtccatgagtatattccgacgctcgaaggctttaaaactggaggagaagaaaaatcagtgacgatattccttcacatttttctaaaaattaaaaggcatcggaccctcattggcggggtggtactggagtttgtaaaaactgtctttttggggaccgttaggagttcgtaaaagtataaaacttcagctggactgggcggggcccaacacctagcaacatagaaaatatacaagcctgagagaaggcggtaagcttgagggataagttggtaagacgcaaggccaacaaaaactagaaaatctataaaatagtcttggagtgggagcatggctccggacatgaggtgggtttggatccatgccccaaagccattacagttgtggttgggcatttcttcatctctcagaaggcgatggaaaaccgcggcattagaaggtttgatctcgacgacagtgatgatcttctccagctgatgggcccaggtcagcgtcgagtgtaattcatctgcctcccaaccattggaacgataggtgaacttcttatagaccactggggccttcattacttcatccaaagtggtcagctactttggccccttctttgaagattttgctcctgttgaagtgggggtaaacatggcgtggacttggtgaagttataagatttcttggtcgaatccgaagaaatcgtgagcgtgaaggtcgtagggaacttcactcatctgaaaaaggaaatccaacagttagcccccaaacaaaaccctaagataaaaaagaggaatgggattcccttaaccgctagaaagaggccccctccgaatgcctgccaaaaatagggaatctagagattctcttaggcaaacatcgggtgcaaaacatcttaaggacaaaaataaggggaaaagaagaagaaaagaggagtgtggaagtcacttcgaccactcgatggcaggccggaacataaaaacgctaaaccgtgggaaccgcccaacccattagaatcctcccgcatggaaactgcgcattaaaaactcgcaaaaattgggttgggttgagttttaacccgctgtttagcgggcgggtacgggttagcctaaaaggggcgggtcca

SEQ ID NO: 131492 - DNA, 1034 bp, Cannabis sativa
ttttttgtcacaagtaatatgccttcagaacttcactcctccatgatatccttaattcctaagcatgatcacccaactaaggcaatagattacagacctattgcttgtttctccactttatacaagtgtgtttcaaagctactttgttctagactggccaaggttcttcctctactaactaaccagaatcaaggtgcctttgttcaaggcgaatctattgcccacaatgtgatgattttgcaggatcttttgaagaactataacaggaaaaacatctcaccctggtgtgctataaaaattgacatcagtaaggcctatgacacagtaaactgggacttccttgaagacttattggctacctataatctgccccaaggatttattaaatggctgatgacttgcataacatcgacttccaattctattgtcatgaatggaaggatccaggggagttttaaaggtgaaaaagggttgcggcaaggtgatcctctttcacctttactctttgttcttgttatggaatatctaacgagattgcttcagttggcagccaacaacttccactacagattttatccgctttgcaaaaagctaaagctcattaatctttgctctgcggacgatctcatcatcttcagcaagggctcacatcagtccatcacagttcttaaacaagttctaagaggagttcagtaaagctttggggttgtacattaaccttgacaagtctcagatttttcttcgtggagttaatcctttggataagcacatcatttttgaagatttaaacttgctgaaggttgtttcccgataaaatattttgggattctcttgagaccaactaagtggaaagctaaagattgtggcataatcatcaagaagatcactcagagacttcataattgggcaagtaagcatctctcttttgctggtaaaatttagtggattcattcagtattactaggccttagaaactactgggtgagaatatttgttgtaacaccctaactagcatagacgtattacgtgatttt

SEQ ID NO: 131493 - DNA, 765 bp, Cannabis sativa
tcacttaaaaaactaattttctttcttacattgtgcctttccaaggtctgatacatgggacaagctgtttaatttcacaagatcgtgtcagaaaagtgtcacatgggatagcttttgagacaccaagtgatcccggacaccccttagtattccgttcacggatgactccttcaggggtaccctcctcaggttcacattgtttgcatgctaaatgtagaatcataatccaactcttaatgtccgaattcgttgctaagaagcgatatcaataacaaaccatatgtctggttttgcctaattaataattattactcttgaaaataactcatacaaatttgacaataaacaagactgcctctagttgaagaagctaatccttgttttggagctttcagattcattgcaaggcatgatgtgatgaagagggtggtgtaattgtcacgaggaagaccaattataaatgccccatatgtgggactctcaaataaagaaaatgaatgctttgtattcagctaccaagaacttggcataagtggtaatcacaacacaacatagttgaaagtctattattctttttggttgattgggtttcacatctactgtatgcaagcgaaattgactgaaatattgtgcaaaaatctatatataatatggcagggttaacgttcacattacccaattgcaaccgtggaaatttttatgaactaaatatgaaggaatttacattacataattgcaaccgtggaaatttttatgaactaaata

SEQ ID NO: 131494 - DNA, 1240 bp, Cannabis sativa
aaaatcctttccttgagataaatcttgtttgtcaaagatttctgttgaaattgctcttctagctttttccaaatctttgatgaagtctcttccttgtctacaaatttaattattgcatctgatagattgaatattaagattcctgtagcagtttctaggtattcttcttgctggatctttgaggttccctctggccttcaataggttcatctagcacccttagcaatttttgttgagctaggagagacctgattttctttctctaggttttgtaatcacttttaccatcaaatttatcaatatcaacctttatgttactcatattaataaaattgaaaatcagatagagttttagaaatctcagtttgtgatgtttctgtttctttttctgtttctagatctgaatttgattcagaactttgatcctctttcaggtttgagtatgttcttgattggtaatctttctttcagatttcttgccaacttcctaatattccgtttttagttttgttgatcttcctttagccaaaccaggctctgataccactgtaggattttactaatttaacctacaccaacaaaacagcaaatatcagcatacaaggttaaaatcatctttcctcagtctaacttaagtttagacttaaacggcagcgtataacccacacgacaccaattcttgtgttgtttagacccttggcttaaagactttccaagaagagtctagaaaccctaacactcaaacacaatcctcacttagccactcaaatctgaaagctcgaaaccctagcaaatcctaagcacgaaacccagaaatttcacccacacacacagagatttaggtttagtaaatgaaaaacaagggtaaaggagagaaaacactagaaaatatttcagagttcacccaaaaattaggggtgcacgtctctgtcaagctcgtcttagagattagcttgatatccactatcaaacaatgtcgatttacaagttttggagcttcctgtcaaataagaatgtaacgccccgatattttgccttattttacaaaatactaactttgatgcataaattgaatagactcaaaactgtttaaaaatacacagcgggttttactataaatatgtaaaagacgaatgatcattcatattaaaataaaataagtagttgaatgcacttttaaaaataaattcacaacatcccgttgagctcagaatactttactatatatatataaaaaaaa

SEQ ID NO: 131495 - DNA, 912 bp, Cannabis sativa
  modified_base (884)..(886): a, c, t, g, unknown or other
gagagagagagagagagattggtggagtgcaagagatgagaagatggcgatgggtacaacaaaaaacattaagatttagggttcgagaagaagaagaagaagagagtgttttggtctgctattgtgctggtatggaagtgaacaagtctgtcaacaaggatatccatgtggaatcggaggatgaaaacatgaacaaaatcctagagcgtgacaatgctctagagctggagatgcttgagcttttcgaggacatctctttagaggatgtagtggcaaacaaggcctgcgtaggtaaggttattggctgcaaggatgtgccgacctcggtggttaaaaagatccttacaggtaattggcggaggttagggccttggagaataaagaaatgtgaggatgacattttggggtttttctttgagcacaaggatgactgctcttttgttctgcaaaagcgaccttggttggtgaatggggtcctgttaaacctcaaaccttggccactggagggagaggttcatgtgggtgagtttgcggttgcaaggttttgggtccaaatacatggactgcctactatatgcttaaccaacgataatgctcccattgtggcgaagaagataggttcctttgttttggctgacgataagagcaacacggagcttgtgagaagagaggctatttaagagcttggattgatgtgtgggtctcgcaccctatttcggcgggtttctttttgactgcggatggaaagccatagtcatgggtccagtttaagtacgaaaaatttccccttctctgttttaattgtggaagattggctcattaggagaaaacttgccttgctccgatggcgatggtcactccataggtgttgggttttatgcccnnnataaaactctttacaatctgattagt

SEQ ID NO: 131496 - DNA, 3619 bp, Cannabis sativa
tttgtttaagtactcttgaactttctagaattatttttcacttgtgttagtatagggaattaagctagtcatttaataatgtttctagattagtccattataaatggagatgtgattccataattattttgtaccaagtcacaaatcacacaagttgagatataaaatatagcttcttccattcaagtattctccccaaagtttccaacagcaatacccaacttttgcgagcataaaaatactctagcaaaagtcttatttcctgtagcgtgtgtttatattatgtgtaaaaataaggttttattttccaaaacagttgtgttatggataaaattagaaaaaaaaatgtaatcgtagagagaaactgagagagaaactatcgtagagagagaaactatcgcaggagagagatactatcatagagagagaaactattgtaggcgtccaggagaaactcttgtcggcatccagcgttgtcttctccacgtctgtacgccatcgactagcatcgccgatcaacgacgaccactgtctgcaagtcttatcttttgtgacatggtgcgattattttcttgtttgagattgttcttgctttttccattgtttttctggtttgagagtttaagttctcttggttgagattgttcttgattttgccattgtttttctggtttgagattttaagttctctggtttgagattattcttagttttgcctttgttttctggtttgccattgttgttggttctcgtttgagtttgcaactcttgtctttcgtttgttttgggatggcttttagcagtaatcataggatggatgaagaggatttggctgctgttatcattgaggagcaagatgcggtagtattatcctatgatgcgagtgtcactactggtaatgattatgatgatcgctggtgtattgttggtagattcttgactgagagatccatagattttgacgcgatgcaacatatgttggcttggggaagggtatgttcgttaaagaactgtattctaacagatacttatttcaattctatcacgaattagattttcaaagtatgatggatcgtagtccttagacttttaataagttcttgctgatttttaaaagattgaaaatgtaggtccaactgcatgatcttcgatcgggattcaaaacggctacgattgtaaaagatatagccaattatgttgggaagtttgtcgaatcagatgaaagaaattttatgggattatggcgagattatttacgtgtctgagtaaatatatattgatgtcaccaagccattgaagaggcggatgaaaatgcagaatgcggatgggattgagttttgggttaacttcaaatattctcactctccgataagttttttcctcgccggtttgatgctgagggaaagctagtcaagccttatggagaatggatgagagtgcggcctatgtgtaagaatcacaccataggaacaaagtggctgaaataatttatggtggctatggaggaggtacctactgctcctgtaaacgcgcccaccagtgaggttcaacgatcatagttagtcagtgctggtgcgggtacagttggttttttgaaatctcccatgattgtcgaagataacatgggtcaatgtgatatccctattaatgtggagactgattttatggaggcagctactgctcaggaatttagtgagaatattgctaaagataatgattgtttgttggtggtggacacgaagagaagaaggacataatcgggcttgtttgatgggccgaatgaattggatgaagatggggagattaacaaagttgtaatgggttcaaaaaatatgagtttggtgggttctggtatccaggcccaccgtccattatgaaatattatcatggaattgctatgggcttggaaacccatgggctttttaattccttaaggatattgtgatccaaaatcaacccaaaattatattcctttgtgaaacgcttagtaatcgttctccgatggaaaaggctcgtgtttcattgggatacgatgggatgatggttgtcgatgttcaggggaggagcgcagggattgcattactatggaaagaagaagatgaagtttcggttctgcggttctcaacaaattacattgacgtgaaggttccagttgaaggcatggctgtatggaggtttactgatatgtatgggaagccaaatagaagccgtaggattgctacctggaatcttctacgttcgctcgctgctaattcaaacttgccttggtgcgtcatgggagatttgaacaatgtttgctctcatgaagataaaagggaagggaaccgctatcctgagtttttaattcaaggctttcaacaagctttgaatgacagtggtttgcaagatatggaactttgtggctatccttttacatgggaaagaggcagaggcacttctcattgggttgaaattctattagatagatgtttggcaaatctttcttagctgcaagctttttcatttgttaaattatataaccttgagctttcgacgtcggatgattctctcatattgcttgaactagttaatactgctacgcaaaggagagtaactctgtatttgttttgagaatgcgtcgcttcgagagcctctatgttaccaattatagtcaaagatagctgggatggaagtggtgtaatagatgtgcaagaaaaaaatcaagatttgtgggcagcagctaagttcttgggggaaggaggttacgtggaactttaaggccaggataaagaagtgtaaaaatgcagtgcaacagtggaaattgggatgggatgagtcttcggttgccaagtataaacaagctaagaaggagttggctgaagcttatgtacaacgagaaattttttgcagcgtcaaagatcgaagcaattatggctctaagaaggtgataataatggtaaatattttcatgcttacgctactaatcaacgtcgtaataactttattgctaaacttaaagataataatggtaattgggttgattggagttcgggtttgcctcaagttatggttgattatttttctgcactttttttttgcttcaactaattcttggctgaaagttgcgagtgttgtggacagttgagtttcagctgaccgaaattcgacttgttacagccagttactgatgaagagtttcgcaaggctttctttcagatgcaccctgacaaggctccgggacctgacgaaatgacaccatcgtttttccaaaaatgctggtcggttgtgagtagtgatgtaattactttggttcaaaatttctttcaaacggggtagctttctagaggttcaaataacactaatttagtgttaattcctaagaagaaacaaccaatggacatgagagacttaaaacctattgccctttgtaacattctttataagattgtttcaaaggtcattgctaatcggctcaaagctgttatgccttcaattatatcggatactcaaagtgcgtttcgccaaggtcatttaatattggataatattatgatttcttatgagataatgcattatttgaagaggaagagaagaggctgggatggtgttatggcacttaagcttgacataaccaaggatt

SEQ ID NO: 131497 - DNA, 637 bp, Cannabis sativa
ttattagtgtcaaatagtaatggggagacttgaatggctatgaatcccttatgacttgaactaagtaatttgaatgcatgattttagcatttttttctttgttcattcaagtaagcttacagtttattaattgttattaattggccatgagtaacaattggctaagctacatctggttctagaaaggctagatctagtagttacaacttcaatgatgcaagtgaagtcccaggtttaggtttttcttagtaaatgaaataaggatatttcattacctagcataacttgagaattgatgtttaattgcaactagatttggtataggaatatattaaactaagtggtagaactcaatctgtgagttttggaaaaatctcataaacacatgaaagattctgtttaactctgtgcaactttgctaaatgaatgttgtaacgactaagaaaatttaacatagggagatttagctattcaagtctatcatttcatagatactttttcttgcaattaatttactagtatttgttgccttattttaagaatttttttttctcctcaccaatttattttagtttcatcacttatccatttgtttttttttttttttctgtagagtctctactctaagtttctttta

SEQ ID NO: 131498 - DNA, 991 bp, Cannabis sativa
  modified_base (27)..(32): a, c, t, g, unknown or other
ttgagatctcatttcagtaattatatnnnnnnactgaaatatcatttataggtacgcttctgctatttgagttcatctctttaaatcaacaaatgtattctttagattaatagttatgcacttatattaaaatataatatatttgtttataaaattaaatcttgatattacatattttatgagtgatagagaactctaacattggtgttttttttttcgctctacttttttttcgatcgactttttttttttgtatggatcagatagtggttagaagtttttgtttatgttttagctctgatacaatgttataattgtaagatgcatcatgttttatctcaaaactaattagttgtaagaggagtagtgcatatcttatatactatatatgatattgtatttttcacacattagcaatgcgagactatttctaatgctaccttttcaagtttgagcttggaaaatgtaggtataataaacgacatttaagagactacaaaattgaacgtgatttttaaaagaatctcataagtgaaaattgagaaatttgtgagtgtacgtgtcgaaaaatttgtagatttttttaaacaagttacagactcaaaacacttaaaaacgctcacacattggtcaagatcccaaataaaagtcaaaggcgaatagagcggaagctatttaattactatgatagcatattagaatttaaaataagttaaatataattccaacttaaaactaattgactacgagtaaagtagctcataaatcttatacattttattatctttatacaaattaataattggagactttctaacaatagccacttttgctttccactgttcttcaactaccgacaaaagattatctttaactagtttttgccttatttctcaagtagttgttgaagatttagatttaaaaaagaatcgtctttaatctcaaaataaataaactttttgagaatccaaaaaaaaaaaaaaaatttttt

SEQ ID NO: 131499 - DNA, 1681 bp, Cannabis sativa
aatttaaaaggaatatctaatttttattttttaataaaacaataaacttcaataaaaaaaaaatatattagtaacaaaaaaaatcaaaataatatattaaaagattaaacttaaactttacaaataaaatccccaaatacaaataattaatagcccaaatcagatcaatgattcaataacaacaatacaaaatattaaacaggatattaaatctgagtttgagcataaattttaataaaaaaaattacacaaacaatactagattataaacaaaacataagaaaaaaaaacaaaaaaatattcattcactccgtcaatcacgaattacaaactgtaaattatcaataatgtcgaacctgtcaaatatataattgaactgagtttacacatttttacactaattttccaccattatttgaactcttaatttatcaaagttgcaatttatttgaatcttcaattatttcgtccagttttcattgcctttgtcaatatcacctgaatatttataacaccggttttcaatgattatttttctcactttttcattcttactcaagaaaataaataaacaacaaatgtcaaatttcagagtaccagtgatgttgagagatgaattataagaagtagtggtgctttaaactttttaattgagaaaaaataagaaaaagtggtcacactggcacaatgataattctcctgtcttttacgtttccactaagattttataattaattttataatacattgcatgattgaaacatatatatatacaaagaaataataaatagtaaatttattgaggaaatgagatgaaggcaagaaaaacctttgtctcttactcctaatacgacaagttgtagccatagatgatgaagaaaatatttttcttaaacgagatttatacaaacactagtattaccatgctcattatttttagagctaagaataagaaccagctccaaacaccgtcgacagattaccttggctttcttgggatcttcggtcctcgacgagaaatgaggagatgacgagcgagagagatgaccgattattaagatccctgcactggagagaagaggcggagacgatgactgtccgactggtttgggagatggaaagctcaaattagtggagccatggatgctaatcgctggagtagacctgctctggaggacgccattagttggaggagtcgaagatgccattagcaggaggagtcaaagacgccatttgtcttgtaatacatgtgtaaaccctaattaatatccaccttttatttttaattttttatttataaagtatataattttacagctgtttacctttccaaaacaaaaatttacaactattttttttcttaaaaaattatgattatgatatagtgacacgctaagtgtgccggcatatacttatccaatcacatttggcgcgtcactatatgtcaatatttttcaaataaataaaatttgaaactttttgagttttaatctttagtgacactctatatttatagtgacacacattataggagactaacactaaacatttagagttgaattgtgcatgtcattaaaaatccctcctaactctttagtgacccacatttttgtgtgtgtcactaaatcatgtcactaaaaggctaaattgtagtagtggcgataggtatacttacaccttg

SEQ ID NO: 131500 - DNA, 728 bp, Cannabis sativa
atttggcaagagagaaaaattgaaaaaagggggggagaaactcggagttttgggattcaagacatagggagcatggatttgtggtccatcaacgggtgtcgtggccttgtcatcatggttgcacaaagaatgaaaggggaagagcgagagagaaagaaacgcgagaaagagggagaaggaatcaaagtttatggggatgacgagggagagaaagaatgaggaagagggaactcagggggattttttgggttgatgtgtgttatcccaatttttgtcctcatgacgtggcatgcttatgtgggcagaacttatgccacgtggcagtacaactcactaaaaggaaggccaagtcagcatctgagaaaacgaagacccagcagttaaacggggatcaagtgacagactagctctcccttctaggagctagctagtcacccctagtcggccaacctaggcacaacatcatggccaaccaacctggccagcacaagggcctaggcggccaaaggatgctttataggccccataagacactcctgcatgtggacaacaaagatgggctacaaattgggcctcaaaagccgaacagaaaagctaaatcatatctagaatcaagggcattttggtcttttataaatatctaactaattatacgatttctaagggatttgaattgtaaacctatgatttaaggattcctacacaaaggcattaacctctaactgaaa

SEQ ID NO: 131501 - DNA, 594 bp, Cannabis sativa
cataaataacaaagactcgtggactaagactcattaatacccgaaccacgtaaaaatcacctgcattaaaagcttccatagttcttctcattctttcttttaattggttgccgaaaacctcggtcagcatatatatttctacaatctacttatttaaatttaatttgtcggtttagaataaaaggcggagttaccaagattgattatttttaatgaaataaaaaaaaaaaaacaagtatattaaagaaaacaaaaatgtaggtatataaatatagaatgaagatcttctgttaaaattagtatctcatattgcgttaaactaatttaaatttaacacattaactaatttaacttatattaaatatgttaactatttttgttgacttaattaaaagtttaattttttaataaataaaaaattaattgatgtgtcaaatttaaattaatttaacattatatgaaacaccaatttttaacaaaagatcttcattcataaatgggtaaattgcggcttaaatacttaggaggcgtttggttgggaggaatgaaaatataggaatgggaatgggaatgggaataggaataagaatggaa

SEQ ID NO: 131502 - DNA, 643 bp, Cannabis sativa
tcaaacttcaaataatgtctttaagaaagttaaaagcaatatttggttttgctttggggttggttggtttggtgcatattcaacaattgatggctccttggttttcgaaaaaagcagtgctaaaagaagattggaatcttttcaatttgtcaataaagaatacttagtgaacttagctggatcagattcccaatttcttaatattataaaattttatgactattttgccctttattgaaaagagagtttccaaataaattcttttgttgttttcttgataatttattttaaaatttttatttatttttatggtgtgatattttatgactattttgccctctattgaaaagaaagtttccaaatggatccttttctagttttcttgataatttattttaaaattattatttattttttgttttactttggtgaaaaaaattataatttaccatactatctattataaaataatattattttatttttttaatttttatatttcatgtatataaaatagtataatataatttttttattttttatgatttacctatgttcattaaattttatatatatatatatatactagtatattgttacgtgtgatgcacgtatattatgttttatattaagtattatatta

SEQ ID NO: 131503 - DNA, 799 bp, Cannabis sativa
ggccatagggccagccaagggtggctagccagctcccgggagcgagctggactatcacttgagttgtactgccacgtgacataagttttgtccacgtaagcttgcaacgtcataaggacaaaaatcaggatcacatttgcccaccaagtccctgtgtggacgtctgtacgaatagggactttaccagcaagattgatattgtcgggactgcagttacttttgcctaataaaaagtagtgcgcatgtttggagcatttttgtcttgattgtttgatcttgtcgtaatagagaaataactgctttatgtgtctttatgatgagttggtgaagtaagtgagaaaaagggggcccacatgtacataagtgagttttgggggaaaacccttttttcacttttactttctctcactagaatttggctcttgaaaaagctcctccttctttctaagtggccgaacctcttggcatcaatctccttgggatttttgcgttatttcaatgatccaagcttaccatcttcgtctccatcaaaatctagttgcggctaagctttctatttcctctcttttacttgatttgaatgatttttccatgaatgcatgaacattatttcttattttgaacatgctttcattcttacattagattgtaatccattcaatattttgatccgcatggtagccttaggatgaacattgtgctatttatagatgaaaaagaactgaatctaaccttcgttgtgattcttggctctttgaatcacgaagaacatgtttgagttcttgaaaaatcacatgtt

SEQ ID NO: 131504 - DNA, 737 bp, Cannabis sativa
acatatagttttatataaaaatatagtataaaatacaattcaatataatacaatataatacagtgtaatacggcgtaccaaacaaactttgtatttatttatttttggtgttattgttgtgtgtgtttgtctttattacataaaattgttctactgtagatatcatagaaggtagtttagtttatacaagatttagaatatttacatgagtgcattaattgttttaaattgtacaagaattagaatatttacatgattgcattaattgttttaaacacaaattatgggcgtagatgaaacttaatctaaccgtccatattaaatcatttatcaatactaaattaattaaaaaaaatatcatatctatttatttactaaccttttaatgcacaccatcattgaactccttactctctctccttggtttgatagaacgaaaccagagtacccgtaagagcatctccaatccaagaaactttaaaagttgtcacaaaatttcacatcacttcaaagtataatattttattttctctctcatccacatcatttttagctacttattactaaaaaatactccaatacttaacaactttaaaattgctatcatagttccacacactataatttaatatattattcattttaataataaaaaatatcacagtaatatattaaaattcatatattaataaaaataaatattacatgaaatttaaattacaccaaatttaaaaata

SEQ ID NO: 131505 - DNA, 550 bp, Cannabis sativa
tgtccttgccgttattcccgaacaggtacggtacgtgcaaaccacgcgctcccctgagtttcttggcttgaagaccaccggcagtgctggacttctgaaagagtccgactttgggtctgaccttgtgattggggttatagacacaggaatctggcctgagaggaagagcttcaacgaccgtgacctgggtccagttccttccaagtggaaaggccagtgcatcgcagggaaggactttccggcgacttcttgtaaccgcaagctcatcggagcgagatacttctgcgacggttacgagtccactaatggtaaaatgaacgacaccacagagttacgctcacctagagactccgatggccatggaacccacaccgcctcaatcgccgccggaaggtatgttttccctgcctcaacccttggatatgctcgtggagtcgccgccggcatggctcccaaagctcgcctagcaacctacaaggactgctggaacgccggctgctacgactctgatattctggctgcattcgacgccgccgtcgcagatggtgtt

SEQ ID NO: 131506 - DNA, 506 bp, Cannabis sativa
caaacgggccctaaataaaaacataaactaaagcaccactggcgttttgggccattttctcgttcacaactcctcgcagaatacatatatacttgaaacctacttcgctcaccatacgtgtcaatcaacagtaacatgtgagttaatgctcaataaagaagtatcaagcaatattcatacatcatatatcaacaattaatcaaaaatgattagggatgcacacggggtagggaattagcggggagtgctctccccgtcctcatccccgttaaagattttaatctccatcccagccccatccccgcttgttccccatcggggacgaggcggggaatcccctaatagggcgaggacggggcgaggaattccctaatgggacggaaacggggcggggaatcccctattgtaaaaaaaatattatttttaaaaactaaatatataaaattattaaattacattaatgataaaatattacatattatttactattaaatatagtaattatt

SEQ ID NO: 131507 - DNA, 1218 bp, Cannabis sativa
  modified_base (28)..(48): a, c, t, g, unknown or other
gaaatgaaattaggtattttggccaatnnnnnnnnnnnnnnnnnnnnnatttaatttaccttttaaaaaaataaatatgtaatttaaataaaataagatataaattaataaatatataatttaaataaattaaatttaattaaaaaaattgaaattcgagtatatatgacgtcagttaaattcaaccctacagcgtcgccctgatcaacatcgataaaaaatttcgtcaagaccgacactgaaagccctaaaaaaccgccactaaaagtggtttttataggagtgtatatatatatatacatgttgatcatcctactaaatgaacttcattgatatgaatgtgtatgttataatgtgtatgttggaaatcttaattttccgttttttgagatttttacatttttgaaagataaagaatttttagcaaaagtttcagaaaaatttgaaatgcaaaatggttaatattagcaagccctagttaataagtaaaagtaatatcagtaagttctgaatacaaatttagtagctttttcctgtgttctaatcaaccccaaacgaaatgtaggacaatagtgatcactttgttcaaacatgagatttttgtagctttaattgatatgcctgctctaataaccttttccttaccaaacacttttttcttctatgaaagtatgaaatttttgtacctctgtttcaactaccacgttgtatcaacttgccttattatgtgtttatgtatttttttttttatattagttttacttatgcattgttttgctctaactggctaaggatgcacataaggtgatatcagggtcgaccctaaaatttagtgagccatagagaaaaaaaatatttttgggccctcatttagaaaaaaaatgtggtatttttcaaaattaataaaaaaaatatgtaattttaaaagaagataattttttttgtgcccttgagctaggtgggctctaggcacaggcctagcccacctatgctcaggaccggcccagggtaatatctaatataattaaactacatttatttcttatattaaaaacgtacacatggtttcacaaattttatattctaagtaatactaaatattatttatcatattatattatacattgggtgactatttaatggttacatttttattgtaactatatggttacatttttctttaacctgtaatagcaggttactaacaggtagactttc

SEQ ID NO: 131508 - DNA, 685 bp, Cannabis sativa
  modified_base (626)..(628): a, c, t, g, unknown or other
ccacccttggctagccctatggccagaataggatggccaacttctggacatcctatggtcggtcagccaccctttggcttgacaatgttttagtgcacagctttcatacatggacaacaagctagaccacgaattgagccttaacagcccacagaaatagaggaaatatatttattttttaggggtattttagtcattcttattttattaatttaatatgtaaataatagtttattttacctatttctaagggagtttaaggctgtaagctctcttatataataaccttagtcaaaccctgaaaccatagctcattaagtctcaaaccctatagtgatttgagtagtattatctctcggtatcagtacaactaaaagaggactaggtcattacctgctaactaagggggccaaatctctataaaatcctatgtctatttactttattattttaattgtgtaacacgtggcaaacatcaacattaaattcgactctattgtcggttggccaaatctgtggtcaatgagccttattatgacctttcatgaatctcaaagatcctaacattaaaaaaataatcgattttttctacatcatataatacctaagttatatttttggaactnnntaggtacctaaccgttaaatattatgtcattatccatgtgtcatttttttattggta

SEQ ID NO: 131509 - DNA, 556 bp, Cannabis sativa
gtttcacaaaacttataagcttttttaaataattaatatgcatactaatatctacctactataaaaaaaactctttagagacagttttctcagccctttagaggcaattttaaagaaatttacaacccactatattttagggatcgttaaaagggtgtgagacaactaaaggcatagggacccttatggcgtgggtcattaataaataatcgacgttatatacttttatagcgtcggtattaactagggctgttcattgaaaccagaaaactgcgatttaaatccgggccgtgataatctgaacaaatgtagaccgtaattggaaaaactacttttggtggtctggttaatccggcctgtttacagcgtaatggttctgcggttcgtaataaatagttattagttaaaccggaccagaccgtttatattaaataattgatttatgtaaattatatatgacaatatgtataagtttgaacttttttgtgtgtcaaattttttattgcatgaattttagatttttatgttatgtatgacttttgagaatatttttata

SEQ ID NO: 131510 - DNA, 1670 bp, Cannabis sativa
taaaagtaattgaaactaaatgtggaacaatagagtataaaaaaatgaatcagctcgaataaaatactacacgaatccgaacacgatataaaaatatatcgggcctatgaatcatgctgagcctactatttaaaatgttagcacgatacgaccactactacaaaaaggcttattcccgtcggtttttaaattgattttttttcggggattgttgctaataatgttaagtgactgtttaaaactatcacaaatactccactattcccaacgattttaaacaatcgttttagaatccctaaatgtgcaaaacaatcacaattttaaatttcaaaacgagttataacggtatctctaacggtttaaaattgtcgggtatactatagccaacgattaaagaaccgttggcaacaatagtatacccgacagttttaaaccatcgaggatagcattttaaacatataaaaacccaaaaaattgttttgttcaaacattttagatctcgcgcctctcccgtatctccctctcatcttcaaactcacaatagaacccccaccaccacggagctctttctctctctcaacacgatagcagatcttgagggttggtggcacctcctcctcgtcggtgactgtaggtttacaaaataattaatctctattatttttattttgggatttttatgcattcttgaaatttttgtatttcgtagatcttcaggtatcttgggggttgtggttcttttggtggagccgtggcccgaatctcattcccattttgagtgctcgttggagaagacgaatgaccattctttttttgttatgtttatatatagatttgttgtgtatataggtgtggggtttttgtatttatattgtatatttcatattgtaaagatttgaagatgtttttccctatgtagttgattgtgcaaagttgtcgataataatatatatagctgacgatttggcatagtcacctatactataggcgacgatgcaaaattgtcgcttataatataggcgactgttatagacagtcagctataatgctcagtgtgggttttgcatagttggggaaaaaaaaatctgatcacaattttgcattgttgcctattttggtcagttacccgacggtcgaataggcgatggtcttagagactgacaggaatactttacacgactgtctaaaacattcgaaaaaacccaactttataatagtggacacaattcatatttttttatagcattacacaatccatatctttttatagcattacacaatccatattttaaagagaaatgctaaagggcatcagtggtgcctagcaccctcttatgtgtcagtatcgctattggtccaactaagtatcgggtccatatagtttaatataataacttttaggaagtatcgctagccaattgcaacgtgacatatcgagaaggtgctaggcaccactagtgcctaatagcaatgctctattttaaaaaatacaaataaatgtaggttggaacaacttgacatgcacttgtctacaacactaatcatatatagcgagataaattttatttctcattcgctaataatgttaaggctaattagcaattttttcccttaaactttgacatataccaaatcatgtctcctggacttttttggctattaaaaattcc

SEQ ID NO: 131511 - DNA, 585 bp, Cannabis sativa
  modified_base (373)..(379): a, c, t, g, unknown or other
attagtgtaattttaatttattagactattttgaagactaatcatgcatttggagggattttaccatattttggtagaaaatagtattaaaaaagttatggccaaaatactaatctgaacacatgaccgaatttttatgccagcaagctgtcatcgcagcaagggaactcgtggccacagtgaggacacgatttctgccaatttttaaattttttatcttttcttaaactgagatattttgggggtatttacatgatttttagggttcgtttttagaaacttttgaactacaaaattgaaagagaaactcagagagagaggaagaagaagatgaagattggggcatcgattgttctacatcatagttcttttnnnnnnnttaaactcttactatttattatgacttttattataatgtctacttccgggtagatcttttaggtaagtgttatttcaaaattcaagacatgagtttttaatttaattgatgaatgttaatttttagtttccattatattaaattgcttctattcttttatgtttaatgtcatgattgatgtgttaatcttgtttatatgatcacta

SEQ ID NO: 131512 - DNA, 1435 bp, Cannabis sativa
aaattcaaaggtcctcgactaaacctctttgacaaaagtggattcgaaccgttataactacctgactaaacctttttgacgagaaaggggtcgaatcgtttaaacaccttggtcaaacctttttgacaaagaatggatcaaacaactataattttttatttataacctatctgacgggagaggaaaatcaaaagttacaactcgcatataaaattgaatactaacggttctcgtgagctacgaaagtactaaacgaggcatcacgacgccttgataaagtacttaaatcgagaaaatggacagataatataactattcctgcgagcaaattaaaatatacaaagtgatagaatccttaaagtatatttaagtttgcttaaggctgattttaactgcaattgctaggcagacttgacaatcactcgaatatcataaagtttggcagattgaaaactacttacacaagaagattatgagcaaaggataaacccaaaagtgttgtatattcgatcaaaatatagttgtttacattgtgaataataacgcaaacacatataattgtattaagttcgaatgaaaacagtacaaggtattttcctaagcagatgatgagaggggaagtcgatgaactcgagaaaggtcgtcttcatatagcttgaaaaagatcgtctacacgtatctcagaaaaagaccgaccacacatagcttgagaaaaactggctacacgtagaaagccttggtctctgcacaggcctcattccactcatcatcaaaagatcccatttcctgaagccgagatctatttcccagcctcaggaaatttctgaacactggagagaggctaatgcaaagatctcctggcataggataggatcttggggtggatggattctttgatagaaacaatgccaacttccttcccatacccacctgaaaccatgccaatcttcctctagaattctttaccaacctagggaggatctttgagattgctcacaagatctgtactcgttgggataacgtgtgaggatcggtcatggcagtcatggggttccgctggtttggattggtcggaagctcctcagccctagaatccatcgtttcttgctacggttgaggcttgaagtctgtaggaatgaatggaaatttgttggtgcatctgggtttatgagtgtggaaggataaacttctgaactcagaagagaaattttggcaggaaggaagtgatacattctgaaaatggattgcactaaagaacaagaaggttagtgaaaaatgacgagcctgactgagccgtccttttatacacaaagtttagtgtcaagaaagccaaagattgagaaatctaacggctaggaatcttgccaaatatgaataggcgattcataatgatcttcgaaaccatacaaccaccagaatcaaaggaggcgtcctt

SEQ ID NO: 131513 - DNA, 691 bp, Cannabis sativa
aagtaagtcccccataagtagatccccccctacttcagccttttactctcattatataggctttagagtttgtcagtgatcctccacatatcagggtgtctcattaacaaatcccttattttatcttccataatgaataaataattacaaataaatataattctccttatttttaagtcaaaattccacaagcattgcgaaaatacttattttcagctaaagatgcaccaatttaaaatagagtgacaagagatgtcacttctcagcttggaattcatgttattggtgagaagtgttagaaacatgtattttgggatgacactactcgcacataatgccacacgggttgtagcattgttctccaacattccacacttaactacactattcaattcccgattaaagtgtaccagtctgcctattgagccaattttggcccgataactacggaattaagctattatcatgagctacacgtagattcgtcttgaaaagctatttcaactgcaagttgagccaggtcatttggataaaaattgagagagttatgcccattttactgaagggtagtttgtggtgttttattctagttgcgagcactgacatgaccaaatggcagctctcggccatgcttgttctcagaccctttagggtgtgttttgacttgttttttgatggtaagtcatatttt

SEQ ID NO: 131514 - DNA, 883 bp, Cannabis sativa
gattagttatccagacttctgtcatgcccaaacactagattggacaaattaacctgtctaatccaatccagtcctgcgtaccaaacaggcccatagtgtaatggccattacaaaggtttaaaaataaaagcaaacaatgtaatggtaataataattctattacaattcccattagactaaactaaacatgccataaattcatacactgcagacttgtaataaaaaataaggttgcaatcttagataattaataatgtttaatggactacacttgcacatatatagtacaatacatttgtttaagcgatagaatcaatatatatataaaggaaagtttaaaaaaagtgaagtggcgtaatttaagagctttcttctattttctttattttatcattttttttttacaaatatatcaatttttgttattattttattatttaaatcacttaattaataataatgtaaagcatttaaaaacaaactttaacatgtaataatttaataataatcactttctaaccctttacattctataaaaactattcataaattactttgtaaaaaatctcaattagaaaagatactaggaatattaaaaattttaatttggttatttaagaagaaaatttaattataaaacaaaaaaaattgtactaactaaggcattgcacaatgaaaaagaggatcaaggtcttttctccttcatcatatataattcatattcatatttattttgaataaagaatatatcttatataatttaatctctcacactgtttaatttcaagatatttatatttttctttgaagggactatgacagtgtagccctaaattatgaagatatatttatatactagttaggacactcgtgcgtgagatat

SEQ ID NO: 131515 - DNA, 887 bp, Cannabis sativa
tttgctgcaacatgaggagatcctaggcaacctacatggctataagctcactaggagatcagaccccatttcgcacttgcttttcacggatgatagcttacttttttactatgctatgaagaatcttgccttgccatcaagcgtgttttggacattaatcaccgtgcttctggccaatctcttaatgctaaaaaattagttgtgtctttttcaccaaacactactctagttgcacaagtttttttgcatagaacattatccatgccgatttgtgattgccatgaaatatacctggatttgccggattactcttgacgtgataaacaacaaatgtttagtgatgttaaagaaaaaatattgaggctgatgaatacttggaatgaaaaaatattttcagctggaggaaaagaaatcttgctcaaagctgtggttcaatcaatcccaacttatgccatgagttgtttctgtttacctatcgccgtatgcaacaaactggaattgatgatgtctaacttttggtggggacgaattgaatctgactcaaaaatccattggtgtaattggaaattgatatgcaaaaccaaattagaaggaggtatggggttccgatcttttgagcaattcaatcaagcattgttagcaaaacaagcttggagactacttgaaaacccatcctcaatgatatgcagacttttgaagagtagatattttctttcaattctttacaagatgctcctcatggtcattcttcatcactatcttggcaaggtgttacgaattttataactaatacgcaagtatatgtaatcaactagtaagctcacacaggtgaggtcgaaccacaaggaattgggctgagtaccactagattaaatctatgtttctat

SEQ ID NO: 131516 - DNA, 1043 bp, Cannabis sativa
ttgaatatgttggacaccaatatgtattctcttgaaatgtataaagaaaatttggtgaaatatgttttaattctatctctttcaatgtactctccatttagttgagtgatgcaagcagtattattttcatagagaactgctaatgttgataccgcgtgacagagtgtgatccatatatttctcgaatatgttatgtcaatgatgtcactcccacacattctctacttgcttcagaaagtacaagtatgttaacatgatttaaaatttcctcgttaaaaatcttattaggaaaacccagtgggacaaaacccgagctaaggaaaaaaagagtatttttcgccaaactttctcattttttaacatttttcaattctgtaagtttgtacacttcacatttcacatcattaaactactggaaaagaaaatttttaatttcgttgcataaaactcattttttgtaaggttctagtttattggcaatttttgaaaagcttatcgtaaatcctcaattttcgacatttttctaattttcttgtttgaacatttttgttttgtcatatttaaggtgttagaaaagatttggggtcaaaaggttggatgaaccatgttttgaagccttgtttgggaaaattgcctgctgcaggaaacggttaaccggttcttgcatacctgacgaactgattaaccggttcgcagcaggtaacgatcccaaggtctttcttgtcttttcaactgcgatttttaccacataaaaatcctaccgccgagtttctattccccattcagatattctaaccctaaatagaagcctccaaccctcttctctcaaattttcactctcgaaaacctaaatttcccactctcattcttcatcttcaccgtggatgttttatcttcaagagaaaagaggcaaagatctttaatgtagcaaaggaaacaaaggtccaagaaaaggaatgacctcttctcccatggaaaatatgcgagaaggttcaatgaagacttctcacaaagggatgttctaaatggtaagcaatgtgatc

SEQ ID NO: 131517 - DNA, 826 bp, Cannabis sativa
tatttatatatttttacaattattattgatgaaatgtgggttcttctgtgttggtaagcaagtctattctatagctcttgcttggattgttaccaagattgaagaagacgaacttagcttcttagatgcaacaggatcccttcaatttcagcttcggtaagttggttgaaaaaagaaattaaagcactacaagaaaaaaagggtattggcacgactaaatgagtgccaagcccaccatttgattggcacgacgtgttgtgcccttttgatcgggccaatagattcgggccaaaatgtgacaaccgcgcggcaccacaaatggtatcgtgccaatggctagaacaaatggcacgacaggtgtagtgcccacttgaaatgctgaaagttgtcagccataacagttagcaccacaacggtcgagtccattattctttattttttttataaaaaaaataattttctaatttaaaatcaatttatatttaaatttgaaatgtacatgaaaaaactaataaaaattacaataatcaaaataataaaagcattcaaataattaaatacaactactaaattaagtgttcaaataaaaatactgaaattgtcacattaaaacaactaaaatagtgttaaaatataaaatacttatattatcaaattcattgttcaaatgatacttatattgccacaaatgaccacactataaccctaattgtgtggactcctcctcgtcctcctcctcatcatcatcgtcattctcttcagactgttgttgtggaatatgcgacatttatggatagtaaggttgttgcgacacttctggcatttg

SEQ ID NO: 131518 - DNA, 1033 bp, Cannabis sativa
tggtaaacaaaacatcttattaggtaaatttcatgtctaaaataaggtaaacgacatgccttattaggtaaacaaaaataagataaacgacatgtcttattaggtaaacaaaaataaggtaaacgacatgttttactgggcaaacttcgtgctgttaataagatattcaacatgtcttattaagtaaactcaatatcttcaataaggtaaacaatacgtgttattgtaaatcaaaaaataatttatcatcgaaatggtaaacgattacccttaaataagataaacaacaatcttatgtctccttattgttaatcctaattattagtaattattcaataatggttaaaaaatatttaaattaattacaagtctcatttctatatatatgtatatatatacacgatattttaacaaataaaataaccgacacagtttattaagtaaactttatgtcgtaaattaagtaaataatatgccttattacttaaattttgtgctgtaaataagataaaaaaacataatttatcattaaaaacacatttttttatggaaattcctttaattttattttccaagcttatgtattattactcgattaaaaatattcatacttagatgaatcatttaacaaataaggtaagcaaaacactttattaggtaaactctatgtttaaaataaggtaaacgatatgtcttatttgataaataacatgtcttgttaagtaaaattcgtgtcttaaataagataaacaaaaatataatttatcattactaacataaagttttagagaaattccgttggtgttattttccaagcttattattatattcagttagaaacaatgaatcatttaacaaataaggtgaacgaaacgaatcaagatctcatgttaaaaagttgtgtgtcatactgtattaaattaatctatgcttgacacatcaattaatttttcatttattaaaaaattaactgttgcccctgattttgtccaatatacgtggaccaaccggacagtgacacgtggatggaaag

SEQ ID NO: 131519 - DNA, 766 bp, Cannabis sativa
tagtggtgttttataaaaacacagtatttttgaaaagacttccgtgtgatagtatttttgtaaaagttaacccaaattctagtatttttgtaactttccctaaagaaatctaatgggtttcaaagtattgatgtgtaattgggccttacatgttggtctcctcacttgcaagtgacgagagaagcccaccataatcaacatcagttaattctatatgtggtcaatttctagagaaaattacattgtatacccactttattttacatgttttaattttaatttttattttcatatttttagagatatgcccacttttatggatgatgttcccattataccccttaagttaataaaaaatatgtgttagacttaagtggaagatgagggtatattgagaaacccactcacaaaagtgggtacattttactgaaagataatatgaaagtatttttgattaatggatacaaaaaagagatattccttaacttatcctcaatttccttccgtctctcaacaactccagcgagcataggtcacgattacatgcttctccacgtttgtctcaacttttcaactcaaccatgtgcctaacttcttccagcatttacagtccactaatacaagtaataaatgtgtaaaaatagcagtgtgatgtattgttgtctctataaataggagcaaaatagaattgaaaaaaaaaattaaattttatctagagacttattatactaaaattttgtctttttctttccttcttctttatttt

SEQ ID NO: 131520 - DNA, 1801 bp, Cannabis sativa
  modified_base (872)..(879): a, c, t, g, unknown or other
gctggagtcaaactattcaagatcaaactcacttgagttgtctgatctataatagctccatgattctcagcttcttggaagtaactagtaatgtggagcaagtgatcacacacattctgatgaggtttcattcgtgcattgataaaattcttggtcgccttaaagcgagcttgaattgacgccatcccaaacagttcagtcaactggttcatgatatctgcaaccgtgagagtattggaaaaccttgttttcaaagtatcgaccatgctagacaacataaagtatcgagctttgttgttagcattttggcaatgctcgaacttttccttgactgccttggtcgcattctcacctggctgctcaggagcctcttcagtcaacacaaacagggcattttcaccaatgagagaaatattaatgttctctctccattagatagagttagctccaaagagcttattttaagtcaacagtgacaccatagggttgttcatagtcatattggggactaccaattaaaaaatagaagtcaagtaagtttaatacaaactcatacacattcaaaaattattagcacttagcaagtacgaatgacaagtgaaaatactaaaacatacaagcctaaataatttccaaggtttttaacaaactgataccagtgtcccgtttaggcaagagtcaaagatactgttaccctaatttctgcactctaacgtggcatcactagatggtgacacatggaatcgactccaggtatctgctcgcaagacacatccaaaataggacactttgtgtattcgctcggacgaagttctctagaccgagcggtgggaaatttgcacagaatgccaacacttagcgaattcagcttnnnnnnnntgagtcatcaaggaaatccctataactttaggatcagattatggagatatggcaaactgtccaaatcccatgatcagtgtattctgtatttactatgcaatctttctgcttatatcaattgtaacgagaagggaaatactttctctccaagctcatagccctataaatagtgatgcatattcattgggcaaaaggtcgaaaacattttggtcaaaagatcttgtctaagaattcatattccgagatactgtggtaagagctataagaaaaggaacctttctccttgttcttaagtcaatataaataacgaggattaagctattatcgaactgctcggggctgaacctctataaaattcttgtgtctttatttactttataatatttcaattgtgtttaactacttgtcgcttacaaaattagactcactatcgttggctaagagcgaggtcaacattttggtgctttcattgagagaagagtcaaagatcgctcttcattctaaatttaataacaagtacgatggtggtacaaactcgtaggggcgtggttgatctagtaaatccacgggcagtggatcctgcactgtagaatccaggaaacacaagggttccgccagctgtaaatcccaaacagccgtcaactgcgcgtcactgtgtgacgactcctgtggatgagattgcgcctggtgtgcaagagactggaataccagttcaagagtcgaccagggcgttcatagcatagtcatttcgcccgccaccaatgagcaaacaaccattggagatgacattgagatccagaacctccgtgttgctcttggactaatgaagtgtcataccaacaccttacatcatgatcaggaggacctccgtgctgcggtaaatctcgcgtttgaagagtagaggcgtatgtttgccgaatgg

SEQ ID NO: 131521 - DNA, 840 bp, Cannabis sativa
tcatatacatccaaatttctatagtcctaatttggatttataaataaaaataaattataattaattatatattttctaaatcctatatctattaataaaatattttttataaaaaataattacatcttaataaaatatatacatatattttttatttgcgtagaattaaaaattttattctaaattataatacatgtataatattatatttactcaaaaataattataatattaatgattatttattgttattattgttacattacttttatttttgggtatttttaatttttttctagtgtaattctatttagttataacctctcaattagaatataatttatttgttctaagtatattcttagataaaatttttactgtatatatatatagcggcggatcttgaatttaaaacgaggagtataatttcttttatgagatatggtaggatttaaactcttgacatttatcatatatgtaatctaagttaattattatattaaaattaatattatatttataaatattatattttattatagatatacatatagtaactaactaaattacatgtgagtccaccccaacataatttatataaattcaaacttccataacctacgctcttataaacaattaacatagtcaaattaatcaaacacaacatttcgatatcaatgatcaaagaataaaaatgaaacatactatatatattatttgtccttcatttcttctctaataatacctaatttcttatgattaaggaaatcaattatatataaatatatatgtggaatggattaataataaatattaaaggatatatatatatatatattt

SEQ ID NO: 131522 - DNA, 675 bp, Cannabis sativa
tattacagagaaatttggcaccaccagattttttttttttttcctaactaaaataaatgaatttcatatatatatctttttctcttttcaataagatggctcaagccacgaaaagtgattctcaactatgaaattatggagcccttaataatttaatataaaattttgtaggcaaaattatgggggccataataactttatatgaaattttgtaagtgtctcattgtaataaaaaaaaattagtttagtagaaaaagttctattgtaatatacaattcatggtcttttcttttaattttaatggagaataaaattaaaataaaataatgtagtgaccgagattcaaacctacggtcgagaaagaacaagggactttcaacaagtgtagttaccactacactagttgaatactttattttgtattattatttattaagttttatcatgtaaaaaagaattgacttatttttttggggctcacatattatcaattttcaatttttttttttttttgtctaacatattacattattgctcacatactcagatcctagacttggaaccaaaattcaacatggacccggataggttcatgtcatggtatggtgttgtaacgccctgaacctcaagaacgccacgtgtgtgcttttataatcttattatcaataatctatt

SEQ ID NO: 131523 - DNA, 570 bp, Cannabis sativa
tcgtatatcttctttttcccaaactgtaaaaagaagtaaatatttatattagtatttatatattatcgtttgttaatataatgaatacgataactacattaaaacttactattttttgattgtttatgtaatggttagggtttccacgcgcaacgatgtcagtcatgtattttaaaatataaaaatcacattcttagttcctaggttatcttggacaattttctagtgaaattcctagccacgccctaagaaacgcatttgattcttctataatctcgtatgctctgttttaaaaattattttaacacttcaattcattaacatatacatatataacttagttaattaaaaagtttgttacataaagagtaattaaactactacctttccaacattgcattaatttataggggaactttgtggccacgtacaaggtctaactggataatttttcctgtcgcaacgatctctagcatccaatacacactaaaaaattatatttgggtgtaagtaagatagtataaaaataatttcaagttataataaagaaaacaattagcactaaaaaat

SEQ ID NO: 131524 - DNA, 895 bp, Cannabis sativa
taaacaaggaatgtttggttgatgagaatcaataaataatctagtttattggagcttaaaattatagattcatggtcctcgaattcccaccttgaaacactgtcaaggtaagggataaagagtagtataatgtaaaaatttattttgaattgaaaaaatagtaattatttattctttgtaaaaaataaataatttctcaaataattaaataggaaaaagacaaaaattatcaagacaatatttgttaaggaaaaaagtggtcaagacatgacactatccttgtcctaaacggacaaggtaggtgcctagcatgtagcttgaccctacactacgataaatatggtgtatattttcgatttttaacaatattaaatataaaaaccgaagagaaaagtaggaagagaaagaaagaaaaaatttgcgaacctataacttctgtcatttcgaaataaacgaagacataggtcatggagacctttatcattagttatacataggtgtgcctatgtcttcataggtttcaacaaccttagcctcatatcaaatacacgtggaggcctatgtttcggttattttgaaataaccgaagatatatatgtctataaaatcttaatttcaaatttaaaactctcattttctttttcttctccatctttcctctcaacaaaaaatgctgccaccatctctcttgaagccccattttctccatacaccattatttttcctcatttttttaaatcttctagttttctcaactaaaatacatatacactaggggtgttccgctgtgtgggtggtacggtttttgaccattttttcaaaccaaccggcacatgcggtttttctaatttatctaaccgcacccgcaccgcgaaactaaaaactgcaaaaaccg

SEQ ID NO: 131525 - DNA, 1655 bp, Cannabis sativa
tcatttacaagggtataaagagtgtaactttggcatttgggtttgggccccaaggggtacccagttttgtgcgaatgggtgaggacacacacacttgacccaccacacactcgcgcgcgcgctgtccgagccgggccgagttgggtggtgtggtgtgacactatattattttttacagaaaaattatttaataaaataattagtttttatttattaatttaattaagaaacatgtttaattaaactgataaattgattacttagtcgtatcagttaacgagacacgttcaaaccaactcaccccacgattcagaaaacgttattcttcccgttacgattattcaatccattcgcctatataatgcgattgaactgatgggaagaaaacatcttttcttataaaaaaaaacagttttcataaatactaaaaattccatctgcggtatcaaaattagttgggtgtattcaacagtgctctacagtgcagtggggttccgatacagtgcgacgactgggctgttttatcctggggacgatcggcaaattctgactgcttgcacactcctgggcagtgccgcgaacgtcttaaagagagcgacttaatccgtgactcaacccaaaaaattttcattcggttatatcgttcctctttaaatattaatctctcataaattattttgttgttttagttaaataaatgaaaactttgtattattttatttattcaagtaaatggaataagtagagttttaattttttatctactcaacaaattaccgcttctttgaacttcaacacaagtagttttttttttctttttttcaaaaaaaattgtatcattaaaaaaaattaaaaccaacatttttaattttttttgtatggatttgcaaagattatggtggagtctcttatgattcactatatattataatttatttattttattaactataattagaataaactatttatcttttttttttcttaattattagttgatataaaatttaaataagaatttgttaaataaaaattaataaaattggtatttattttcaagattttttgaaattttaaatccaataccaaatatcttaatttaaactaactaatttttttttttatataatcataattataactaattttataataattgtaaatatgtagatttttattaataataaaattttgataaaaataaaattataatcacaattaatgaactatatataaatatatattttaaaaaaatatataaatatattgttataattatcaaagttttgatcagtttgttttgacgatatttcaaaacaatcaaaatatcttaactaaaaatattaatatgatataatctaatttaaaatataaattacatactaacattttttttagaagttggtttctttgtatataatattttggctactaatctttaaaaaaatatataaataattataacgtatttaagttattaataaatttatttaactatgttaattatattttcttttataattatatatattgtttatttaatatacacggaatatatatttgagtttttttgtgtacttataattaagggagatttttatatatatatacattatatacattaatattacaaaaaaaaacgttatataaaaaca

SEQ ID NO: 131526 - DNA, 1411 bp, Cannabis sativa
tgtaaattttatattttggatctaatttgtaaaataactcaaatttaattcaatccaattaaagtacagatttgattagttattttaaattagttatttttttaatattaagttatttaatattaaaaaaatatatttttttttacataattaataataaaataaaataaattattgttcttttatgtctttaataaaaaattaaattaaatacaataataaattcaaagaaaaaaaattgtatggagaaaaaaatgaataattttgttttaaattatattttcttatataataatagaatataaattaatatgtttatatcataggtatagtattagtttcttaaattactattttttattaaaaatattaattgcatatatatatattttaaaaaatatacataaatatgtatattagattggttcgattacttttacatatcaatcaatattcaatccgcacaagtgtgggattttgaatttttcaatctaattcaattcgcatgtgcggatattcgcactttgcggattggattagattggatcatgttaattggattagattggattgggtattttgtgaatactcctttattataaaaatatgacacttttatgttagccacttttataatatattttagtttttaaattatttatggtattttttatgccatatatgtgtaaacttaatttttaaaacccatatttgatgtttagataaattatttcaaaaaaataaaataaattcaaagctatttcttttcctccatttaagtactctacttgcctcacctctcaatagtccacctattgacctccattcaccagcgacatattcgacgactgacgcctcaatggacgatgaatatcagatctccaccaccaaaaccccaaaggatcgaaaagattctatcgctgtcagagatctagaaaccaatttcttaaaatgaaaaatcaattttattataagcaaatcttatatgagttttggtatttgtaactggtttctttattaagaaactagttttagttatatggaagtaactagtttcttaatttattggcttaacaaaattatttttaacaaatttcttcatgaagaaactaatttttcatcaaaaaataagtttcttcatcaaaaaactgattttgattatatagaagtaaaatatgagtttttaaattttttatgatattctttcttatttataatgattcattctatatttttaaggtttttttaatgtcataattggtgcaattaagtttgcatgttatatatatatatagggtaaatggtgttaaaatccgcaaaatttttattttggtttcacttaacctctaaaacctaaatttgggcggtaaaacccccaatactcgtgttatgttagcaatttaacacttcc

SEQ ID NO: 131527 - DNA, 698 bp, Cannabis sativa
taatttctaaattaatcacaatcattcaataataatttaatggctaaaaaaatgtaaccatgataattacatatttaatgtaaccattagaacctcctccatatgtatatatagattagtggagattgcaggtgcggccattgtgcatttaaaaaaaatgaaaattattataaaaatttgaaattatacttatgtgtttgcagtattaagactgctattaattgttacaggttcattagtcttaactatggctaaaaagaatataattcagcattggctactaaattgtaccaatcaaaataaggtagtatggttagtaccaacacctaagtctcaagggccgattgcagcaatgtttataggtttatctagagagagagtgcgtgacttaagactcatgtaaacactaggtttctgatcttgaagtcgatctttttgtatgtggtgtgttgttcttagagattagtcttctacgaatttcttagtttatttcgtcgtaggttctttctgttctcttgtttatttccttactgtctttcagtgagtggagtttcgtttgttttgtttgtgttttctttgtcggggtgtgttttctttattgtgtttggggtagggtagttggtcctactgggtgtgtgtatttgtctgcgcttttaatggagttagttaccactaaaaatgcccctcttttgggtaaa

SEQ ID NO: 131528 - DNA, 638 bp, Cannabis sativa
agcattatcattgtaacaaaaataatgagaatgtggcttgaagttttcaagagtaataccagagggcctctttcttttttgaggaagaataaggcttggataaaacacgagtctttttcctttgtccttctttagaactgcagcagggacagcaactagttctacactgataggatcaacttcaggcacttcactttcagatctaaaatcattagtagagggttgttctttgcaaacaaactcttcacttgagtcagacacaccctttgattcttgaacctcttcggtttcttcttcaggttcagaatctaatgatgaaacggaagggggattttctttgagacttttggcctttgaagatgaggacaccacatttttccctttggacacttctttgggcagagccactttgggtttctttggtttggacaccttggacctggttcgagagctcaggtaggcaatggcacaattgctttctcgacatttggagcaccattcgaagaggaagacttagacaatgagtgattggatgaatgagattcatcatgatcaccaagcccaggagttggggttgaaatcggagaggcaatgtataacgttcccgcttcaagcctccattgggtcctcacacccac

SEQ ID NO: 131529 - DNA, 679 bp, Cannabis sativa
tataatttatgtgcattttatttcctttactttttattggtttaaataagttcctcatgtcatgaggaagaatgggccggccctacatcagaacttccctatatatatatactatatataggataatattcttcttataatagtatgtagggacatatatataaatattaataataatgtatatatatttttggaaaaggaaaatctattattatatcactaattattacttattgctactactacgtacgtactaatactatactatcaaagcaatattcttaatatatactataattttgtattgttgaaaatcacattataataattataattatgagctttgtgtctaaaagtaaatttgtaagtatggcataatcttaagtacgtttatatagtattttctttttagataatgcatacatagtaataaattgatgaaattaatttataatattgagttatatattttataattaatttacacccaagaatgtgaaaccgtttaagattataagatattggaggaggaatgataaaaattattttagagtaaatttatttataaaatatatgtatgtatatattttattaaaaagttcttatatagaagtatagtttgttaataagagacttagaaaaataattacaatttagaagttattcttatttataattg

SEQ ID NO: 131530 - DNA, 512 bp, Cannabis sativa
aagaaacatcttgaagaagccaaggatactggccttaagagttgctcgagtttctcttgtcttacagaataatagaacggattatcactggacaaacgccttttacgatggcctatagctatgaagtaatgcttcccgtggaattaaaacctccataccacaaaaggttgatgtacaacaatgagaccaatcattccctcttagcagagtaacttgatgaaattgaagaacaaagagacctaacacacctaaagctacaagctcattagcgaaaaagtagctcggtacttcaataaacaagtgaagcaaaggactttgctcttgggggacatggtacatcgaagagtgtttcttaacaccaaagatagtgcaacaggtgtgctcagacaaaatttggaaggaccataccaaataactgaagtcactaaatcaggagtgtaaagaccgcttagtttaatttggtgattagcagttaattatgaaaattatttatagatatttaaataattgtt

SEQ ID NO: 131531 - DNA, 678 bp, Cannabis sativa
  modified_base (628)..(639): a, c, t, g, unknown or other
cttaatcgttcatctatttagatagatttttgtgtgtttcagttacttactcatttttttctttgatttatgagtattcttgatttcctttgttgttgttgattcaagttaacttcgaaggcttctagtttgtatcaccgaaaagtatgattattttctggctgttccttggttgattaatgcttgctaattgtgattgctgagttttaggagattttggttttgtttggctaaaacacaatataaaagttataaatcaaatttggacagtatagatgtaaaatatactgtcccattatttatgtaaagttcgaccatttttaattatttgtgtaagttttcctaaaacaaatgacttcaaataaaattaagaggatcaatgtaacttcgcaattcattataaccactattacacacatatatataattacatatattaattagttgccataacataatttttacatatttggactctaaactcagtccgaattagttgccataacataattttttacatatttggactttaaactcagtccgaaccaaaatattcaattgtaactatagcactccaacttatcttttttttttttttttctcatattagggtaaatactattttggnnnnnnnnnnnngcaaaagttactaattgaactctctgttttgttaaatga

SEQ ID NO: 131532 - DNA, 578 bp, Cannabis sativa
tttgtttaagtattagaagtaataatatataacaaagtttaaattcctacattgcagacttgtaattaaaaataaggttacaatcttacataattaataatgtttaatagactacacttgcacacagatagtacaatacatttgtttaggcgttagaataataatatatatggtttaaagttaaacttgtaaacttataatcggttataaatttgattactgtttggattgtgctcttgaactaaaggtaacaacatatagtgccaaatatttcacaattaattatatttttttattaaccaattaatagattatatatagactaccagtacttgaaaacttatttataattttaaagttattttgtttagtttatataatataatatatatagttttggttaacttaattaattagttattttttttatcgtataatattataaaaattaaataatttcaaattagtttttctgacgttgtagtttaaattaattagctagttaaatatattttttaaacttcaaataacaaaaaatttcatacttagttagagatattttctaaaatttaaataaa

SEQ ID NO: 131533 - DNA, 867 bp, Cannabis sativa
  modified_base (796)..(797): a, c, t, g, unknown or other
gagcatcagatttttgcttaatgaaatgcatccaagtgaacctagagctatcatccacaatagtaatgaaatatttgaaaccctcaacagataagacattaaaaggcccccaaatatcaacatgaataagatcaaaataatgcttagcaatgttctgattaaaaacgaaaggcaattttctttgtttagcataatggcaaatagaacaatggaaatgattgctagggtaatgattgaatttcagctctttattcaaaggatgagacttaatacaagaggggtgacctaatctatagtgccacactgtttcatcacaaatcttagaatctgaaaatgaaaaaacagcaggaggaggacttgtttcttgagccagtttcaagtagtaaaggtttcctatcctctcacccatcccaatcggctgagtcctcataatgtcttgtatagtacactgattaggataaaaaaaaaagaaagagcaggaagcagacttggttagggcagtgacagacaaaagataggtttcaaaagtgggaacacacaacacattttttaacacaattttatctgtcaagtggatagaaccagtgcaaacaacagcaacatttctaccatctggtaacttaacataagattgagaaggatttttgacaatatcaacaaataaagataagtcagggcacacatgatgtgtagcacctgtgtcaataatccattttttataatgaataaaattggtcttaccagagaaaagtgaaacaattggctgatctgttggaattatttttaccaggatctnnatttactaacaagtatgtttcattcacatcctaatatgaatttctaaaaacaatgaaatataaacacata

SEQ ID NO: 131534 - DNA, 679 bp, Cannabis sativa
gttcccttaaatatgccaaaaaaagaaaaaagaaagaattaaattttattggttttggttttttgtttttttgtttttttgtttattttttaatttttggtggttgaggaaaaaagaaaatattggagttaatatgtataattgttgattaaattgtataatttaggggagaataatatgagattctttgtacaattcaatcaattatttttttaacactatgaggaggatgggggagagagattgaagttgggatggtaaagtgaattttgatatggtaatatgaaaatgataccaattttacatgttagagttgaaaaaattatatacgagtcgagaatgagttgatatgacttgacacaaatttaatacgattaacgtttgataagaatttttcaattaaaataaatacaaaattattattaataataataaaattatgtaaaattatgataccaattgttattagacattaatgctaactattataaagttacgccttaaaaatgattagaaatatctattaaagctgcaattttaaatcatataaaactaaatacttaattgtatcaataacaatattcacttgaattgtttagacaaataatagattttgttgtgtaaaatgggtgtgcacaataagagcatattacccactagagattgatgctaccttaca

SEQ ID NO: 131535 - DNA, 1000 bp, Cannabis sativa
cgagttctgttttggctcggggtggtatctagtacctgttttaggttatttatgtgttgtgtagcatattttgggattgttggaagttaggttatgtccggttttagatttgggattttgtttcagaatttcagtttaaggcatattttgggttttggttgtcgtgacataggactgggatcgtccagctctatttccactcaggtcggcccgcacacttaatttcttgactgaggtaagaaaatttttatgcaccgctaagtggttaaataagaagcagttataatcgttagtgcctcgtttaagtttgagattaatgatgtgtatttgctgtgactcgattatgattgaggtgatgacaggaaacgattattatcatttgtgactcgattatgatcgaggaaaagacacagtcattaccgttgttgtaaatgaataaagatactgtcattatatttatgagtaattacttgttgaactcgcagataggtttcttacttatcgtttgcgttaacgggcaacgatagtgacatacatagcttgtgaataacggtggtaagggtgctttatgaagcactgagattatgtgatcatggtaatgtgtgataagagtgttttatgaagcactgagattatgtgtttatggtgatgtatgattagagtgctttgtgaagcactaaaattatgtggttgtgtatggtgtgagtatccgttaaatgtaatgaagaagttgatgactataagttattatcatttttcttataagtgcataacatatgcgtttgtttggacgctaagttatatatgcatgctgaatatgtaattaaactacaagtataaatactatattgtgatgaaaatacttgcattttcagtgcttacgatatagtaacttttcttgctgagtcattgtgactcacaggtgcttcgtggtgcaggtatgaaggatagcagttgtgtttggccatgagtcagaggtctctcagcaatgtacatatca

SEQ ID NO: 131536 - DNA, 1269 bp, Cannabis sativa
  modified_base (624)..(624): a, c, t, g, unknown or other
  modified_base (749)..(752): a, c, t, g, unknown or other
  modified_base (1241)..(1244): a, c, t, g, unknown or other
atatcaaaaaaaattcttatcatatataaggttgtgacttgtagttttacaaagaataaagataacttaatcatgaataaaaatatttatatacattagtttacataatgtaattatttaaaatattataaaaattattttaaaataatttgaacttaaataaaagaacaaattaagtaaattaataaaaaaaataattattaattatttttaaagaagtattttccttcatttgctttatctctttttttcccgacaatcgacaccaccctaacccttccaccccacctctaccaccacactatcactagggctaagttagaattggggtttggggggtctttgagttcgatggtgaggtcctacacctcaccctcattataaaaaaataacaataattactactattactaacatagctagaaatatctttgttatcctaaaatttgcatgggtaacgtggtggctaactaagtgacacatgttaaggagaacaattctggtcggtatatttacatgtcgactaggtccgaaagacttacatagacccttcaccaaggaacatcagcaatcaaagataggtgatggttctgttagaatatgttttactaggatctagatttnctaacaagtatgtttttaacaacctaaatatgaatttttaaaacgataaaaataaacacatagaaggtatgagaaatcttacattggttgcagcggaatcaaatgactcattccgctcagatctnnnncccttgtatcatttctgtcgcagagtatcaccaagatctgagcccgaaactccttcagttgtttagattcttcacagtcctacatactatgattgaggactaacttgttatgggtgggcacacactcaatcactaatggatgaaatttgttttgtgaagaacactatagaattcgaaattagaagaagaaaggaagaagtctcataaacctagagagaaagaaaactaggtttttagctttagaagcattagttggataatgagaccatagctttccttttatactaatttcacctagggttatggttgatttatttagaataaaaaaacgataaaaatggagcaaaaatacccttaagtggccggccattagtgagcccaaacatttttctcaaccatttatttatttttcacaaataccactttttatactttcaaccctatgtatgccaaaactatttattcaataattaaaataattatcaaatnnnnttgtcatttataatatttattaatt

SEQ ID NO: 131537 - DNA, 631 bp, Cannabis sativa
tcgtgacatgtcatattcatgcctaagtaaaaagcttgagtcattttccctaagaaagacccaaaaactaagacctaagctgggaatgtcaacctgggcgtcgggcgaaaaccctaggcacccaggttgatttctaagatgctattttatctcttttcaatttatagggcttagacttagattctttgtgtcttctttgtttagaataatgaatgatggtgggtttgaaataacttggaaagatctaaacaaacattctaaaattcccaaagtcaacttggaggcagggcttggaacccctcttaggtcgactgctatgactcgggactactcaactctgtgaatattttccttcttaccaaatattgatgtccacatcatcaaggatagttttcgtataaacaatatataattgagtatttgtatacataatattcagaagaagagaagtgagtatactatatataatataaaagaataagatgaagaagaacacaaagtgaatgaaggcgggtcaccaatggcttgaacaaggttaatcacttttgtctgaaaagcttattgttggattacaaatatgtataatgtatatgctattataaagtatgatacaaaattaagtgaccaatta

SEQ ID NO: 131538 - DNA, 878 bp, Cannabis sativa
  modified_base (395)..(399): a, c, t, g, unknown or other
acttaaaaccttttccccaagaatatttctgaccaaatcgtgaaggtatttaccatcataaagaaaacttggaaataaactttcaatcttactataattatcccttctaatttcatgggaagtagttgtaattggatgtgaaattttcaggtgcatttcatgatggttttcggattggtagctcatgttcatttccacagcaacaccagactctttttgattggacaaaagattacaactgcatacatattaaattaaattatacttattatgaactacttagctaactatatagataggataaatattatttcgaattggggagttctatttgcaccctataaaataataattaaatacactctattattaaaaaaaatataaatttaaataannnnnaaaaattactcttaatatttttgttagttgtggtctgtttattcagttaggacatttagataggctttagtgagttagttatttatgttattcttagtccctttggacaactataaatacctgtaaactcgcctacaagtgagtaacttgtacttgttccataatcaaattagactaataatatacattctttctctctcaatttcacttgtcttctacttctagtttgaggatctgctatcagttctaagtgcaatcatgcattagtgaatgcatctatcaagaatcgattgttttcccaacaatctggtattagagccgaagcgttcttggagcttggtgatcagttaaagaagtgttcttgagctttgtagatcgaggaaggaactcttgcagatagtgtgaagaactcaaggtgggaatcatgggaaatgcgaggttcgatttgaaaaagtttacatggaagaatgattttggtt

SEQ ID NO: 131539 - DNA, 1134 bp, Cannabis sativa
cgagtaaggcagtttgtcaagagataaaatatctagtgaagtggcgtattttgggtgtaatcaattctaatttgaaaaaagataattagtatatttaaaatgtaattgagggatggtagtgtgttgagtgagttgttctgggctatttggctttgctgtatgtttgtttttattcaattttgaataaaatttatcttttgttaaaaaaaaaaagtattgaagaagataattttatacaaataattttcattagaactgttacttttgccgttgtatttgtttgcgccggcaaaaatcttaataggatccctaagatgaaacattgtgtttcattaaatggttaaattttgcaccagcaaaaatttattctccccataaccatttcccatgcaggaattttgtgccaaaattttatttacttttgtcgagacaattactcgccggtaaaactttaaacttcctcgctaaaactatttcatggagggaaatttcccacctaaattttttaaccttttgcaagtacatgcttgcgttgacaaaaatatatgaaaccgccaaaataggatgcgccttttgacgattcctactaagccttttgccgctataattacctaaatgcgccgatatataaaatctcattttattggcgcaaatatgcgccggtaaaaactaaacctaattattacattagggattaaaagttaccccttttgccaaaaacttttactgaatagttagagttgtttataaaaaccgatgctaatagttagggtcggtttataaccgacgtactagtttttttttattattgattttaaatggtccctcaatgttattaccgttggtcattgaaaaaataaaactcttagtgaatagttagagtcgattataaaccgacgctaatggttagcgtcggtttataactgacgtactagtttttttttattattaattttaaatggtccctcaattttattaccgttggtcattgaaaaaattaacatttgcacagatgggaatgcccatttctctaaaagtgtgatttaatacgactaaaattaatataaaaatttatgatcatatatttgacataacagtactgtaacccacaaatatatatatatatattctata

SEQ ID NO: 131540 - DNA, 665 bp, Cannabis sativa
ccgcctgttcaaattcttcagcagaagagacaccatcagactcaaattcaccagcacgagctcgcttgagcatggaacgcagagaaccaccaatttgagcttgaaaaggttgaaaacatggccttttcacacaagaagcacaagccagccccttccctttcacttgaggatcaagccgcaaagcctcatcagtagcagcctagggaacaccatcaacatgtccaagatccaaacttggaattgctgcagccaacgaatgagcagcatggaccatatcagtggtaacagaggcaggggggtcactaacactagtggagtcagtgacaacagattggcttgcagagaggtttgggttcattggggtgggaatcataacactagacgatctcccaggagcactaaaactagaaagagaggccattcgtgagttgagcaaagaggtaaaaccaacagagtgagtaaggaaagggttgataggttgaccctcatgaggaaaatcagtgaaatcaagatcagctatggtaatatctggagcatgaggatactcaaaaggcataggtttctcagatgatttctctttaccacagagttgttagaaattattttaccaggatcttagtgttgggttttatgacctaaataaaactctttacaatctgattagt

SEQ ID NO: 131541 - DNA, 840 bp, Cannabis sativa
agcttgcagtttgcaaagcttctctccaaaatttcttgtctaggccagcacctctcagcatacatctcaccctttcaagtaaagttctattcattctttctgaaattccattctgttatggggtcttgatcactgccttgtgtcttgctatgccattgtctgagaaaatttttataaactgatctgagcaaaactctaacccattatttgttcttagcttcttaaccctcctactagtttggttttctatcaatttcttcaaggtgacaaaggttttgaatgcttcatcttttgttttgagtagaaacacccaaacccttctcgtgtagtcatcaataatgctcgtgaaatagctagcaccccaatggtcttagtccttgaagcaccccaaagatctgagtgcatataatccaatttgcccttggttgtatgtaaacttggagtgaacttcactctgctgcgcttaccatacacacactcttcacgaaaccccaatttctttcaaagttttcctttgagaatcccctgcttctcccattcatagagacctctccactgacatgtcctaacctcatgtgccacaatcttgtattgtctctatcactgttcttaacaactaaatttctttttccaacaacagtctttccttgtaaatagtaaataccattctttatgtctcccttcattactatcctagaacctttcatcactttcaatgaattgtctatcctaactgtgcagcctttagatatcagttcactaacagagagtaaatttctcttaagttcagggacatacatgacttcctgtatgagtttgacttgaccatcatgcatcctg

SEQ ID NO: 131542 - DNA, 870 bp, Cannabis sativa
agagatatgcaaaatcatttcgacatgaaccaagagctaaagtcttgcaggttgtagaacatcctccaaagtctcaacgctacgaatgtgaacctatcaccttcaaagaattgaactcctatcatgttagctacccttacaatgatcctttatttgtcgaggtacaaatagctaatatgatggtggctagggtgatgatctatgaaggagtatcatcaaacatcctgttcaagcaagccctgataagaatgggtttgaacaaggactgctaagatgaacgttgcagcgagagaattatatttctttataattatttgaggactcccaagaagaacgctgtagtgaggaacgccatgaagatatattctattatgctccctttattctttgatcttcttgggttgtgtaaaaataggtccactattcctgacttgagttctgctcttaaagctctactatgagtggtggagattccaagtcttccagttcaagagaaaagatgagttattatttttgtgttgtttctttttcgttgttattgtgttgaataatagttgattaaatgttgtatttttctattttttgtcgaacaatgattttggcacatttgttgctacttttgttgaggatttcatccatggcatagatgttcctaaagactttgacattaaagtttactgcactcgggttgctaccctcttgtttgcctatggtcagataaaaaatgactaaaatattgacaatgagaatgagaagctcaataagtcttcgaagggtggtaaaggcaagaagtagagtcttctgatgggaaactgatttataaactagtttgatttttaaatgttaaatgataagacttttttatggctg

SEQ ID NO: 131543 - DNA, 621 bp, Cannabis sativa
cttttggaaattcaccttctgaccagtggccctctcatacacatcgagaacctctttgatggtgttacaagagttgatagaagcctgacagaaaaggaaactgtcatccgcaaacaggagatgagagatggcgggggctcgtctagcaactttaaatcatgtgagagttttatttctttcttactggtgcaggagggaggagaaaccttctgcacacaaaaggaagaggaaaggggaaaggggatcaccttggcgaatacccctaaaaggggtgacactacctaagactttgccattaagattgaattgaaacgtggctgtagagatacaggcaaagatcaattggatgaaccgatgggggaattggaattttcggagtatggcgacaatgaaaggccactccactctgtcgaaggctttggccatatcgagtttaaccgccatccatcccgtcttccctctcgacttaagtttgatggagtgcgctacttcctgggcgattatgatgttatccgatataagcctacccggggaaaaacacgctctgattgggcgaaatcaagttgttgaggacgagtttaagcctgttagcaattgtcttcgagataattttataaacta

SEQ ID NO: 131544 - DNA, 613 bp, Cannabis sativa
  modified_base (553)..(570): a, c, t, g, unknown or other
ttttttaaaaaaaaaaagagaaatatcttggatctttcgaccttgaataatttttaaaccgcaaaaattcatttaattaatttgactagtttaatgattgctacattttttgtttagaatttgatctcacaatacaaccaaaaactattgaaattaatagtgaaaacaattccaggatattctcgagtcttagatatctcaaataataccttttcactaagaaaatatcataaaaaatactaaaaggattacaaaaaataactatctttagtgacaaacttttagtcacaacataattttttgtgagtaaatgtgacctctatagtcacaacaaaaaattacttgtgactaaaacattatttttagatacaagttggagttactagtttacttttagtgcaaacaagtattttgagtaaaagcacacttagtcacaataaattgtaatttttgtgactaatacctttagtcacgcactgcaaaaaatatttactacttttagtgacaactttttagtcacaacataattattttgtgactaaatgtgactttnnnnnnnnnnnnnnnnnnacttgtgactaaaatataatatatagttataagttgtcactaa

SEQ ID NO: 131545 - DNA, 1394 bp, Cannabis sativa
  modified_base (1336)..(1363): a, c, t, g, unknown or other
tgggcagccaccttcgatttcttctttggaggaggtcgctcacgtttagacaatggaggagcaaaatcattgtcatcctcctcaacaacaggtcgtttagacatttgtttctattagctaaagattaatttcaatcccattttagagcttttcttttgaacatgggaaggagttgatgaagaacgagttagagctatatttatatatggattaagagaaaaataaaagaatggaaaacggttatggaattcggttaatgggagttgaaaaaaatttgaagaacaaaaagaagagagaaaatggagtttggattgtggagaagaaagagttcaactatggaggttgatattttttttaaaaaaaaaaaactaaaaagaaatagaaaataaaaggaaaaggaagagaaaaagaaagggaaatgatagatggttgattgatagatgtcatagtctactgacgtgtagtgatgtatgcatgaaatgtgtgtataggtagtaaaattgtaataaaataaagttgaagagtaaaaatgtagacttaaccatgtggtggtattttagtaataaagtatgtattttgtatttttggtgtaaaaatttcaataatttactattttttttaatttttatttagttgttagaatactaatattacgaaaactagagtcaagttagtttctcaatattttttaaaaaattacagataataatcttaacagcgtagtaattattttttttaaaaaaataaatcctgaatttcttaattttaggcaaaccataaagatttgatcttctgggatttgggagctgatttcgtcgatcattgatctagaataagttaaagatgctggtcagatggttcgaccagtatcttaccttgcgaaactaaagtgataaatctcaccaatccatgtcaattgcatgcctctagtcggatggtctactctgccgagtaatgagtgggaaagatgagtcaaaattgtactaattgatttaacaattcttacatagtatgttgtacttcctgtcttccagtcattccatccaactttcatccttctagctttatcgtgtgatgaccaacctttcacttaacgccgcatgtcatcttattgcatgccacgtcattcgggcaatttttgggataatagttgctaacttgaccgaaaaatgatactttctattttgaaaaggataatatgagatatttagatttcaaaataatatagatgagaatcgtctcataggcccaataaaattaatttaaccaaccttaaggcgacacttaataattgtctaaggattttatcatagaattgttgggaattattttaccnnnnnnnnnnnnnnnnnnnnnnnnnnnnttattaacatcctaaataagaactttctaaa

SEQ ID NO: 131546 - DNA, 1309 bp, Cannabis sativa
tcaacctgaacctagagtgagaagactgcgaggcagacatcgtggctcacgaagtaggagacaggaaaaggaccgagaagaacaacctaaggaaagtgagatacccccgaaaaatcagaatgattagcaagaaccctctcacgaaaaagagaatgggaggcaacaagaaattgatgaacgagaaattcctcatgaaaatgaggaaaatcttcaaaattagcctggagaacgaaggtcacctacgaggaaacaccaacgttcttcccgaacccatagagcgatagctcgtacaaaccgtaatgggggaaatatgacaaacaacacacggggggaaagaataaagcgtaaagaagcaagtgtgacctcgaggcgatcaaggacccatagtcaatcaactcgaagaggagaaagtactcaatgagctgatgatcaagaaagtatgggaaccagtaaatccatgagtcactctaagacaaagtccatgagtaggaccaagtctatgagtaggaagtgatctgtgagtaagacgaagtctgtcagcaattactcccaactggatctgcgagagcacttgaatcggaagaaacctgacctttgccaatagctcggtcaaaagcaagaggatcccatccaattgtgaataaacaagctggaggacaagttcaacatatatcaagtgggggaactaggcagacaatctcggtatgactcagacgaggaatttgagccgtatcatccagatatcatgagtacccccttttcttcaggattcaaaaactcgcatgtcttgtcatatgatagaaccactgatccggtctcacatttgaacaactttaatacaataattcgagcgagcaatgtgacgaacgatttacgttgtatattgttccccacctcgcttgtgagagcagctggattaacaagtttattaaccactcaataacttcttgggagcagctgtccagggattttaagaaacaattccaggctgctagggatagacgacccgaagtggggcctcgctaaccaatataaagaagcagtctggcgagacacttaaggcatacttaagtcgtcatttcagcactgctgcggcaagggttaggaatttggatgacagcacacaacttacagtccttcaggcggggatctctactgatccatcaaccgcagggggcgagctgtgggacgacttacaaggccctctagtgagaaacatcactgaattcaacgagagggctcaagtattcattcgaaaggaagaagcctgaaaggaaatgaattggttgaaaacaagctcgggaagcaa

SEQ ID NO: 131547 - DNA, 582 bp, Cannabis sativa
gtggtgaaaagctgcttcggcttgtcgatgagctgcgacttgtacagggacatcatggggtactgctgctgtaacgaagccatgtgatgagattttgagttttgggtcagcttcgatgactttcgcttcttggaatttgagagtactttcaactgacaaactattgttggtgaacgaagttgaggttgagactattgtagggacgagacgtgagatgggccttttcatttagagatgagacgtgttgttgctggcccttataatatcacccctattattaaaagtggatttttgtagcctctaaatagatcatatatggactatgattcatcgttatatatatgatgatgtatattggttttccactatacgattgccattcttgtatgcatgggcaatggagatataacactatgatctctctttttgatctattcattccttctcttataatcaacatctttataactttcacctacacacaaatataattaattaatatgtgagtcatatatacgtatatggggaattctttgctttctggaaaaaaaaaatgcagaagaagaggaagcagaagaaaga

SEQ ID NO: 131548 - DNA, 548 bp, Cannabis sativa
atatacataccaaataaaaatgttattttttaaatattataacaaaaaaattaaaataaaaaattatgtgaaattttattagaacaaaattaaaatatatataaatgatttaaaaattataaaaataagtattataattaatacaaaaatgtgagaagtttttttttaaaaaatattaaaatttatttaaagtttaattttttatattgtgatgtactcatcagtttgtgggtacaaatagaactaccttacagaggttgtttggaataaagtaatatgaggagaaaaaaagtaatcttaatgattaccctgtttgttatgaaattttaaattttttaaattctaatatttttatggtagtattcaaactacccaaaaatgtgcaataatcaccccttaaaaaaagagtagaactcaaatatttcctctatattaacctaagattagagtttttattaattaaaaagtcaaataataattataacttaaaaaagatataattattttagagtgattctataatgcaccctcttaaaagggatgtactg

SEQ ID NO: 131549 - DNA, 639 bp, Cannabis sativa
gccccgacccactctttttacacgtcctctttgaaataagagccccacccgctagctgtcccctaaaagaagtcaaaggactacaatccgtacctctctctttaacaaaattcaaattatcttctgaagagggtaaagttccagtcttctttccaatattcagagtggaggaaaggggattagcattgaaaacgacaatagcaccttcagccgcaccaacagatctcggacactacgtcttccgtacttgatctctgcccctacccctcggaaagcgaccacacatagatctcgaggcctgttcgcgagtcgccggggcatcgacaccagggggagtggtgatttccttctccggcaccgaactcacaccaacaagtatcatctctcctccaaccactcccttaccattcttagaatcgcctacatgtttctctgcaacccaagacaaactaccacccttgccagaaatgcaagaggtataggtcgagcgtgtagtaagccacagtccgaacagaggatagggactgcctttgtcgttgatcaccgtaaccggagacgcaaggctacactcacggggttggtgacccaacatcccacacaagtaacaaaatatatccagcttctcatatttgagttgta

SEQ ID NO: 131550 - DNA, 1064 bp, Cannabis sativa
aacaaccgatccgatccaattggatttttaaaatttacatccgatccgatccaattatgattagatatccgattttattaggtcagttaggattggatcggttggttgtaattgaattggatgactttctacacacccttactcgggaccccggacccagacccggatccggacccggaccgagaccgagacccggaccttgactggaactgggaccgagacccgggaccaggacaaggacccggacccaacctggcccagaactcgaacccagactcgtgacccgagaccgggaccaagtccataacccggacccggacccaggacccagactcggatccggacccaaactttgacttgaacctagacctggaccgaggcctagacccagacccaggactctgactcgaacccaaactaggacccagacacaaacttggacccggacccgacctgtagttggtgttggggtagagtttattgaaaatatattatctttacacaatctattaatacatatcaataccaaacatagtattgtataaaataatactaatacaaaattaaaagagattttttcaataatatacttaaaataaaactatttacaaaaataccgtaataaatctcaagaacaataataccttgccacgtcattaaaaaataccttatctctaatgaatatacctggaacgtaattagtcccgaatttcgttttttttaattattttctcgggttttcaaaagtaaccttttggttacttaattatgatgctaataagaaaataattagttacttatatgtaaaaaacttcaatttaaattatataatttgggatacaatttggttacctctaaaatcttatttgtaaacatcttaataatcaattagttattttttaagttatattgtgctatcgtattatttaacatacatttgggtaaccttaaagtttattatttaatataataatctactatttttatataccaattattttatatacctttttattactttgaaacttatgtgtttacttttagattatattaaattaatttgt

SEQ ID NO: 131551 - DNA, 1041 bp, Cannabis sativa
tacagctgttttttctcacagcacagctacaactgctttttgccacagcacagttgtgccaaactggccctatatctttttgttacttagattatgaatcctgtttatttttattttatgaggttgttatgtcccctctttggtccccactgctactcgattagggcaagataaattgtgatattaaaattagaggcaacaccatgtgcattgtggcgaaccacaacaaatctattttgtggatggctacaaaccagttcaatttctctaatccttcattggagaagttgagacttgtttgttagctattgagacgactgtctctttgcatcatcatttgttctggtgaagagcgattctgagatagtgatcaagactttgaaggtcacttgttctagttaggggattgacaactatgtgcggcattgtaaaagcctctctactaacttgttatgttgtaatttttcttttattccttgattatgtaattttgcagtttataatatgatcaaatgtacttttgcaagacaatatcttttgtaatgattattaggtctaattttgatttttacctttttttttttcaaaaaaaaaatcatataaaaaatgaaattaaactcatttaacaaaaataaaaataaattaaattaataatagcaatgattagaaaaagaaatcgaagatcccgccacaccaaacgcggtagattaatttcactttcacaaagcttttggcacattttatcaaaattcgcgcacttcaaaaattcccaccaatgaaatttcagtaaaacttatccaacggttcacaatccaaactcactccctacgcggatcgctacttaatccaacggtcacaatcaaacatcccaacacctataaataccctacccaacctcatttccgataacatcagcaacaaactcaccactaagaaaaacgaagagaaaacttgcagagaaggaaaagaaccgaaaatgtcaggaagaggaaaaggaggaaagggtttgggaaagggaggagccaagaggcatcgcaaggt

SEQ ID NO: 131552 - DNA, 1262 bp, Cannabis sativa
ttatattgaaatgagttttattgagggcataaaacccaacatgccaccctttaattacattaattaaatatgcatttttcaaacaatccttaaagggccctttattcaaaatccttagcctaactatacctctcacaaccaaacttctgtttctaggagtagaacatgtcatctcaaagatacatctgttcctattgtttcaaatttcgtaaaacgctgatgtcataacagcgtttactattctgttttggagatcatcatgccagccacatcacctgctatatatctcagccaaagagccaggccaacaaaaggaccccagccacttgttaatttcagctcccacctgctttgtgaaggtacagttgcaaaaaaatgatcatgagtttcagtcccttgatcacacaccgggcaaagctccacctgagtgtttatgatcctgcttaagaagtctctgacgaggaggtgttcattaatgacctggcagaaataaatcttgtgttttggcaccatcaaattgtccaaaacagcacctgcataatccactttcatctaacccacaagcaagttataatagttttttgccttatattttcctcctgttatagcaagttcagagaaataccaactaaaatcaggatttttttgataattccaaacatcctcgttcttcagataaatggagttaatctatttaacccataagctatcttgcttagtcgccaaggcccaaaggaactttgccataagagctttgttccacttttttccttctcggaacccactcctcctagctttttggggaggcaaaccttttcccaagaaaactcaacccacatctattgaatccgaatctgatcttggtttgtcagaaacagaatacgatttattaaaaatcgtaatgctcttgagcctatggtttattcaaggaagaacatctgcgaaagaagtagagaccattgaatcatccctgcacaagaccaaatggaagccccgaacaatggttcttcaagtaccccaggtaattcttcttttatccctagttcttctttgtctccaagtaatattttgtcttcacaatctgtttcaagccctacatctgaaactctagatcttcctattgctcttagagaaggaactcgtgcttgtacaaaacatccaattgccaaatacatctcgtacaatcacctatctgataactatagagcatttattactaatatttttgaacttgttgagcctagaagtatacaggaggcact

SEQ ID NO: 131553 - DNA, 624 bp, Cannabis sativa
ttagttgcttgggattgcttgggccgaactaagaagagaagggaaggagtttctaatttttggttttttctttgatgaaatctaattgtctaacataatataaatcctatattcagatttaattattgaataacaaaataaaatattagaatttccactacaagataacctttgtgggagtattctaagccttttttttgtgtataggtcgaatcccactatgaggtcttttcctagaagatttgaaccaatgactctgtggacaacggaacatccaaagaagaattgtaattttatcagcttgctgattaattcaatgcgaagtacttaattatttgcaacttggaaataatgtatcttcttcttccacaatttaaaatactatcttattatttaaaattttctttgtggactaaaataatatattttcttcacaattttgagaccctgaacattacagacatcaaatcgcacaccttgccttaccttaagtcgttctttgtacatatacattcagatatatatatggaacatttcttgatgggtattacccatgaatgtttactaaacaaatttaactataaatattaattttagaaatatcaaaccatcgaattttgatct

SEQ ID NO: 131554 - DNA, 976 bp, Cannabis sativa
gagtgtgagtgtgagtgtgacctcaaatctcttcttgttttcctcaaggcgttgcttgcgaacctcttcgtaagtgttggaatcgccattggaggtcattatcatgagtgagttttaagtctgaaattatttattatgagaaatgtgttaactaaaaccaccatagaaatggaagagtgtaaaaatatagagttaatagtataaacctgtctttagctcacctcacacactattagtattacttactgcctcaaacgagttgacttgaccgccccttttgaatttcaaattctttctctccctctcaccctctctatatttttttttcttgtatttactttttatacgggtcggaactactatcaacgacgtcgtttagtccttttttttcgtgcttttttctttttctttttcttttttagaaaagcgtaaatatattaagaatcaaagaatttgatctcacggtcattacaaattaaattaaacgttatagaaaatggattttccgtacttgtcaccttacagcttttttcttctttcaactttactcgcattttattttattaaaaaaaattttactcgcattttttgtagtaaaaattttttctactctgatccatccaattcaacttgttttttttcttaatactatccaatttaatttgagcttaaaatttaattggattgcttttttaattgaatattcaattacacacctaaattttcatattaatttaaataaatttaatactctataaaaatattatccttacaagtttaatgtaactaaaaatttaaaataattaaaataaatactgtcaagtaataaaataaaacaaaacatcataaaaataaatacacaacacaacaaatttaacacacaataaaaatcaaccactaaaaatataattaatatatatttgttataaaataatataaagtagatgaaaaaaaaaaaaagaagatgaagagagaa

SEQ ID NO: 131555 - DNA, 542 bp, Cannabis sativa
ttttatacctacggtttttatcaaaaaccgcttctaaatgtcaatttcgaacaaagcgggtatttttacaccctttagctttcctttttatgaatgggggtgaaaaagcagcctctaaaggctaacattgtagtagtgccaagacaaattagcttctaactgaccgggttcctcctccaatctctcactaatgttcgacctaggctccaaatctacgtgcactttcccaatatgcgcctcattctccccaagttcctttgcttcttcaagcactgcatccttctcactaatcgcatctgaaattagtttttgcactatcacacttccatcatcattgtcgacaatcgactccacactccctgatctgatagctggctttcggttcactttcctcttcttcgccatggaagagagagaccgagaacacgcacgcctctataattgtacaacacatatttaatatatatacatcaaccaaaactatatacattatatataaataaaaaaaatatatatattttatatatacatttaaataatct

SEQ ID NO: 131556 - DNA, 992 bp, Cannabis sativa
ccccggttgccatagagacgccaaagtgttctgcatagcatcgaaatcgatcaaccttcttgttaagaactttccaaccagacaccatctatcatcaatgggttggccaatgtcttcaacaatgtcacagagtaatcctccatcttcttcctcttccagttggatttgatcatactggtcattaatattttgcatattgtggctactagaggccatgcttaccaaataaactaaaaaactcgagtcaaaacagacaaacttttagacaaaacttggattcggacaaaactttcacaacaaactctcacaactaactcatgtcagaagacaagacgcgggagtagcaagtttttaagctatgtaccttacacaatagttgagtactcaagttatgaggttgaatgaatctgttgcaacaatttctactgttgtgtcttttaagtcgtagatgaaatagaaataagtattcttaaaattaattataatgctgcaatatttttcatctaattttattttaatttttttgtcaaacgatctaaaaattaagtgggtgactatttggttcgtttttttaattcttattatggtcgtgttttcaacaagtagatattccgactggattgcacactattattttagttgatgaaattaataaaattttattatttattctttaaaaaaactactaatacatttttcttagaaattaaattagtttcataaaaaaaaataaaaaaaaaataactgacttttattttttggaaaaagaaaaaaaaaatctataactgacaatactattcttgtaaaacttggtacgaaacatgtaattttgattcttcttctctattgtgtgtagagtgcttcattaattacaaaaatactgctaattcagagggttttccttaagggtgtgtttggaaataactgtgtaattactaggtagggtaattactagggtagtaattacactatattttaaaatgtaaggtgtg

SEQ ID NO: 131557 - DNA, 1117 bp, Cannabis sativa
aatcattttatttttattacataaataatatattaaaaataataatatataaataatatattatatataatttgtaacttaacttttgtattttagatttaaaattaatgtattttatggtgttattataaatttataatttatatacttaatttaatatatagaaaaaaacacataaaatttgattttatttaaaaaattaaataaattaacgagttcaccggtcaatccgaacgtcaacccctattgaagatgctctgagtcactaaaacaaaatccgcaataaagttagaaagtgagagtagagaacctgaacttggatgcatcccatccagagtggttagctgctgtggctagagcaaccctccatttctttatcttgtcttggggaaatcgttcttcatttttcgagaatgcagtttcataacttctcttctgatttcgcacatcagatggatcaacatggtaaaaaacaggcaaaacatcgagaatccccttttccatgcatttacaaatatgcactaactcatccaagcaccacctagaacttgcatagttttgagagaagacaactacacagttcttcgattggtcgatggcgtctgtgagagccttggagatttcctctcctctttcaagtctgtaatcaatgtaggtttctatctcattctcctctagtgcattatagagatgactagtgaagttacaacgagtgtcttcacctctaaaactaatgaaaacatcatatttcttctcatcaagagatatagagctagaggccccaagatcatcaagattattaatgatcattttggtcacttttgtggaaaactagagaagaagagaataatttgaagcctacaaaagcaatacaaaaacattattttgatatgaattgaatatttatgagatgatatattttttgtaatgaaaacatttgtgtattaaataatcagatttaaagtgataccctttaaattgttaaataaaaatgagaaatgaatcgtaatagaacactaatatacaaagggaaaaacagagtctaaatatctgacttttttatgttccttacacacatatcctctcccaatctaaaccttatacaaatatcctatat

SEQ ID NO: 131558 - DNA, 547 bp, Cannabis sativa
  modified_base (28)..(42): a, c, t, g, unknown or other
taagatgttaataaaacatacttggtannnnnnnnnnnnnnnggtaaaatatttccaacaaaggcaatctagcaaatataaaaagtaagggatcagaatatagcacataggaggaaaaatagaatcttaaaatccaaatgagggaacaagacttacttgcaagattgaaatccaaactcagggtaggaaccctccttagtgggaagctagaggtgaagaaatagtaatccctaaagtcatgcgtgtactccgtgtaacttgtggggtagggaatactcttgttgtatcgctccaacctatagaagcctaccttcttcttgtgacctctcattggttgggacttgatcttgtagaaatacaagagctcctctggcatcggcacagatttgtcgtgtttaacgcagaagatgtagtacccagataacaagcggtacgcctgcgggtagatgcacaaaacttagcataattgcaccttgagggtagatgcacccccacttcaacgtgagcctagctctagctgctgaagcctccttctgcgcacttgcta

SEQ ID NO: 131559 - DNA, 802 bp, Cannabis sativa
  modified_base (743)..(758): a, c, t, g, unknown or other
ataaaaaaacacaggtaaaaaataccgcctggcagtatttttgtaagaaaatggcaaaacttagtataccatgtagatttccctaaactaatttctatattttaaagagatatatattttttttaatttttttcataaaatatattctttctataaaaagaaccacaaattaattttttttttaaatttctctaatatttatttacataccaatgattagaaagtattattgtaatccatgtattttgaccaaatatatacgcatattatatttgagtctctctttgtcagaatttttatttttatgatgtttaaggtataaatttggtataatatgattttttttcaaaaaattattttgtggaaatttttgagaaaatagttaaaattgacactttaacccaaataagtatgtaaaaatatgatagaattattacatagaaaatataaattgacactttatttacaaaaatacctccataaggtgtggacaacatttatatattttatgtgattttaattataaaaatattacttacacaatcaggcgatggttgcagcgtagttgcgcagtggttgcatcagacgaaggtttcaatcagacgatggttgcagggtggttgctaggtggttggccgaaagttgcatcagacgaaagtttcaatcagattaaagtttctgggtggttgctggattgttggccgaatgttgcatcaattgaaggtttcaatcagacgaaatannnnnnnnnnnnnnnnttatgcaactgtaatgcaactataatgcaactgttgtgaaacat

SEQ ID NO: 131560 - DNA, 843 bp, Cannabis sativa
gggataacactagttgagacggctgatatcccaagtcttagggacaagatttttttggcagacacgaatgcaagagggaatccaacaatcgtgagttggggatgtgttctgtccattgccaattttagagtaagacatttatgcagtaattcttttccccaataaatgttacgccaaaaaaaaaagaaggggagtggccaagagaacagttggtgaaagaggttcgatggttgtatctggctgcaaagactctagctataatggagtttggatgcttaagtattcgccaagcttgcttagcaagcatagcttggtcaaagtgaactaatgatcgaaagcctaaacttccttccttttttgacttagaaagtttttgccagctttgccagtggaccttgggtctattgttcgcattgaaaccccaccacaagttagccatgatagactgggaatggcaagtggcaatcgggatatggaagcaagccattgtgtaagtaggaatcgcttggatgaatgatttgagaaaaatctctttgccacctttagaaaaaatcgtatgcttccaattattgaggtgactccaaaccttatctttgagatattggaagacttgcttcttagttcttagagcggccaaaatgttgaggaagtcccaggtacttctcgaaggaggctctgacaatgatgcccatgtaatcaaaaattaggttttgatctctgagggtcgtgtttggggagaagtagagggatgatttttgaaggtttacttgttgttgttgggttttgtgccctaaataaaatctatttcaatataatcagattactagttaataaagatcagaa

SEQ ID NO: 131561 - DNA, 1188 bp, Cannabis sativa
taaaaatttctagtcaaatttattttggaaacaataacaaattgcctcaattttgattgtttttttttttttttttttttgtaaagaactaaatttgattgtttaataaatataatgagtgaaaaattggtatatagcttctaaattataattaaaataatttgaattaattgacttaactttgaaatgacaaatatatcctaattattaacttactagtgcctgtcaattctaactcctcaaggaaggagcatagcaacaagataagattatttattagtaggaaaatgggaaacaaattaacaagataagctaatatatttgtagggatataggaaacaatttataagtgtgactatttccggtgaaaggtttacatcaaaattcaaattcaatgtattgaaataattaataaacaataaggctaaatatttttttaatggattaatttgatataatgaagcttataataaaatttccaacaagagtttcaactacaaatgaatttgatttggtgaccaaaaagtaactaattgaatttactttttgtatgaaaccacaatcgtacccttcttcatatgtataaaatataatgtaatgttataattttaaatggaaaatcttggttaggatctctagtagtatacaacattgtttggtgggtgtagaagaaaatgggaatgggattgggattgcttaagctatggagcattatgtattaacattgacaatctcggcccaacataatcgattgtgaggaagtgatgcttcggcattattttggaccttggtccgagttgaggtgacaatcaaattacattgaaaatatgatttttatacagggagatttatatagattactaatttttttccaatttattacatttatactgttagatggcatttttatcttttttactgtgtatgttttttttatacggcacgcagactttttggaacaaaatttttttattttttttacttacccgtatctttataagattttctcacatcaaaatttaaatgttttttgttttatttgagagattgattggacgtgagatatgacaaaagtgacatattctttactttttttttaatttaattctttattattttttgaatattatataattattatataaatctcactttccaatatattacgacttatcttcttatataaat

SEQ ID NO: 131562 - DNA, 767 bp, Cannabis sativa
tagatttatgatttagggttttctatattaaagcacttttaggaatatgtttggatctgtgatttatatatttcttaagtgttttataaatcctaacagtatggtggtactggtacatattgtttatgagatcaaaattttgttcatgttttgttttgtccactttattttttaatttcattttattattcttagtgccaaatttaacttctaatatagtataattttccccataaaaaagaaaaagaaaaagattggttatgttaaataggcagtggcagtgactattggttttgactgggtgttgtgtaatgttgggaatggtagactttatggataagaagtagaagaaggatactgatttccgacgtgtgagatcagaggaaggatactgattacagacttcatgggccatgcatgtggcccattatggaaacaaacataattttcttagtatgcacgacaaatttctatttcggataaggatatgatcaaattcgacccccttctcactcttactagactccttcaaacaagttttaagattgaaaataatacatttgaatagttcaaattcatcataaataaatgctatacatgatgtaccttttgttgagaaatacttgtggaatttcggggatggaaataaatgatgtagagctaataaaaaaagggattattttataaatacacaaaaataaaaaaaaaattataaaaatacgatttcacagaattttaaaaaattttacgatttttttgatttgatt

SEQ ID NO: 131563 - DNA, 769 bp, Cannabis sativa
tgattggaaactgaaaattacattctttaataagaactaggaatgattgttgagggtggggaataacctttaacaaatttctcatatcgtactctatctttaaacttgttttctgctattttattctaatcatcaaaatcccccattttttataattcttgctactaaattgttaataattaaataaacataatgctcgtgggatcgacctttaattacgattacactaaaataattggaagtattagaattaagaaaaaatagtaaatttgttgtggcttacgacacgtaccaaattttttggcggcgttaccagggactattgttttactgtattattcatatgtaataaatagatagcaaaaataataaagaaagatagcgaaaataaagataaattttcgagtagatttgcgattttttttatcttttttttttaaaagatgagttatcttttcttttagtgagatatttcctaatactattataaatagaatcctaattctaataggattcatctaactttcctatcactataaatagaacctcttaggctacaaatgaaataattctaaaagctacaaattagagagagaaaatcagagagagcaaggaagagatggagatcggcttcaaagtgttcttcatcataattcctttcttctcattctacttttactaaatattatgattttggttataatgtctagttctgagtagttttcttttagttaagtgttatttcaaaacccgaaatatgaattcttaa

SEQ ID NO: 131564 - DNA, 1520 bp, Cannabis sativa
  modified_base (27)..(34): a, c, t, g, unknown or other
acaacacaggcatactatataataatnnnnnnnnattaagcacgtaattaaattaatgtcaataatttacccttctcggggtcataattaccaaaatgcccctagctcaccaacggggtttttaacatgttaaatttcatataatttcacatatattgaattatgtaataatataattcctcaattaactcataattatctaattagggttttgctaatccttttcttaattccgggcattacaatagtaatgagactataatcattgaaaatggtaagaaattactcatctctcatattggtcacacatgcattccctcatccataccctctcagccaattcacttaaatttagttctaaatgtgccttcaacaaaaaactttgctagtgtatctcaacttaccagtgacaatcatatttttcttaaattttataaattgtgttgttttgttaatgataaactaacagggattgagctactcaaagggaaggctgaggatggtctttatcaacttagtgaagctttcaactcctcaattcactgtaacctaacaacatttttgaaagattctgatgaatcttgcttttgtacttgtaattgtcattcaaaattgtcaattgaatcttgtactgttgaaaatatcaataaaagaaattctaattcttttcttattacttctagtcaagttgtctatttccaaaagcaatgacttaaataattgtcattgcaaacttggccatcctgctcataacaccatcacaaaaattcttcctcacatatcatatatggggtcatttagagccctgcaattttgcaaagcctatcactaagaaaaagtcacaaactcccttttttctaattctactaccaaggctacacaacctcttacactaatacacatagatctttcaagtccttctcacatcacatctaaagatggctttaagtattatgtgcatttccttgatgattttagtagatattgttggatatttccactatccttaaagaaccaaacatttgatatattcatcaaatttaaaagccttgtagaaaaattatttgattttcccattaaaagtgctcaaggagattggggtaaaaaatattgaccttttgctcgatttttggctgaccaaggaattcattttcaacacccttgtcaaagaacaagtgaacaaaatggtcgagctgagcgtaaatacaaacatattattaaaacttatctagccttgttggctcaagcaagtttaaggatggagtattggttgcatgctatgtcctttgctgtgttcgccatttatagactcctaacacctgttattaggaacatgagtccttatgaatgtttgttaaagaaacaacctaagtataacattcagaaattatttagatgtagttgctttcctcatctcaaaccatacaatgctcataaacttgagcttcgatctgaactatgcctgttaggctatttttagcctatgttttggatccaatttatgtgcgtttttagctgtg

SEQ ID NO: 131565 - DNA, 702 bp, Cannabis sativa
aaaatcgttactttttaccaaatataaatatattcggtatatacagtatttaattgcaaaaagtgtctcccagcataattttctttatttttttttttaaaaaaactctcatatggattaggaattaatgtaagttatatgttataacggtaaataatacattcaattgcttactttaatttgtgccaaaaatatttttattatatgggtgattaatttaatcttacacaagcatttttagattacaaaaaatactatatatatatttatgatgttttaataattttttaattttcgttatgttttttaccattttaattttagaatatataaaacaactatttctacaaaatgttttttttcataaatttagtttaaattatttaaatgtttttatattttttacataataaatttaaataaaatatataaaatataaaactattaaattctacaaaacaaattgttgttcagcactacttttaaattaggaaaatttgcagcagaagtccccaaaagggtcactttgatgcagtccccaacctcctaagataactgcaatagtcctcacggtcacactttttatttgtcagttagtcctaattttaactgagccatttactttttttaaattaccacgtgtcaaaatattattggtccaaattattattttaattttaaaaaaataaaaattaaaataaa

SEQ ID NO: 131566 - DNA, 666 bp, Cannabis sativa
atttacctgaaatagagattgagatgatgatttattggattgctctttacctgaaaaaaaaaaatatataataaaataaaattaataatccattaataataataaaaatcgagtagaaaacaagaatatatctgtcaaccaagaataattgtattattatggtatatttatcttatatatgatatacccgaatttattttattctagaaaaaattttagtttaattttgttttattatattgtactaggaatgtaaaataaagattagaacttctgtaacctgttgttgatgaatggattcatggtctgaggttacttgacggagaaatagagccggtaactattaggtgaattccgagatcaaatcggtgtctttattttgtgtttatttttctgggattagtgtttctggtaaaacagaattagaaaaatcttagaaccctaccctaaattttgtttcggctgtagcaagaagaagataagctcgaaagaaaaaaaaaaaaaaaaatttagtagagatagtggctgccgtgtatattagaaagtatatagcttttatattagggttataatattgagaaatttgtatgggccatcttattttggtaattatttttaaaaataactttgtttttgttatgttaagtttttgtatatataattgcc

SEQ ID NO: 131567 - DNA, 1136 bp, Cannabis sativa
catgattatatgctttaaagtttatgtcctttgatttttaagtacctaacatgataatcagcgataaagtatacttacacattggataagtgttataaccttttgggtattggcaaagtatgctaggatgggatgtatagagtatacatcagattggaccaatattaaacttagataagatatcataaacttaccgttatatctatctaagtcaatatcagttagttgatcttaagtcaatagatcttaatcctgatatggttagattttatctcattgttctttctactagcaaagattacgagataactctatacacaacttcaacaagacccattacttttagataaggataaaagacgattattaacaattattctatttttgacatgttgtaaatatgaaacatggggattgtctacattttatgaataggtatctagataagattaaaagagaataattgtccttcctaaaaattctataaacgtagaatagggacaaaaaatcttttgggaggaaaactttgagagattaagtataggaaatatccaaaaatactatcatgtatcctaaaacactataaatgaacaatcaaatactcatggaatatgtagattttaactacaaaactacgtaaaaatttcttttgtcttatttatatttggttataattaatattttaatttcatttataatgcttcattattgtaaccaatttttgttttcacaactctcctcatatttttttttctctcttacatgattaataaaagtagtattttgttatgtttcgtagtttattaaaagttgacctacaaatgatttgcatattgcaacgagatcgatgtcttgtcatttttctgttattttgtagtgatctttttgttgttttcatgttgttgttaggtgttctatagttgtttccatattgttgttgtttaggtgtttgttctatctattatagttagttgttttatagttatttttctgtaatttttatatattttttttattgtaatacaattattgtttactttatgttcataatttgttatggtgtatatttttagtttattctagaaaaaaattttgtcatatatgtgtatatgttttgttatttttatattgtattt

SEQ ID NO: 131568 - DNA, 615 bp, Cannabis sativa
  modified_base (400)..(401): a, c, t, g, unknown or other
  modified_base (547)..(560): a, c, t, g, unknown or other
tctcaaattatcttatggtgtaataaacttgactacttaaataaatttggtaaggctacacttttaattggtattatccgtgaatgggtaaattttagtttttaagcttaatctttctatctaattagtttgatcttgcatttttatattatctgggttggattattccatcggttggaaaaaaattaagaaaaaaagatttatcggcaaaaaaaaaagataaaaaaaattgagtttgatttaaatattttgtatctgaatatatttttgatatagtgtaaaaagagatactttttgacattttttttaattaagtagctaaattaagcataaatattaaaatttcttttttatcatttgatattggatcaaaatttaataatttaatatttttaaaatnnatatttatagttaaatttgtttaataacgatcaatgggtaacactcattgagaagtattccatatgtaatgtatacatatatggaaacacttcttaatatgtattatccataacgaataatgaaatcacaaatttgaatttctatnnnnnnnnnnnnnncttaattaaaaaaaaatatcaaaaaatatctctttttacactatatcacaaatat

SEQ ID NO: 131569 - DNA, 793 bp, Cannabis sativa
gccacgtgtcactattcttgtgatgccacgtcagagtgccaattttaggataacagtatccaagtccacatgaatattaggcacatcgaaattgaataaatttgaaaagtaatggtttataataactgagacatgttccttcccaccttatatcagtgttgtctttaagagcccatatatgatttcttcgtcttcggatcacggtagaggcatgggaaaagctagaatttctatctctcaatttgagccataactctcgagattattgccgccatacactttctctccttctccactcctccatgagtttttcttgaataattgtttccttattacacaaatcttgcaaacacggtttcaaagccttaatattttgtgcacaatcacaaaaatttctcttcttccatttttgtaaaactcttcgggcattatctatgttccaaataaggcttatgcttgcttcgtgattatgatttttccagactctctcaattgactctctgtaagactcttctctaatccaaccctcataaaatttgaaaggtctgaagcccttaaacttattaaaagctggaaatagaaatggggagattaatcaccccatcccttggatattcttgaacccagtcaaacgaacctgtcaccctgtccaacctttctctaataagtccaccacgaaatctcttattttgctaagtgagttttcctcttgtgaaacaaacatcaatgctcccaatattgaatgcaaatttagatggatttttacactaagtgactttttttaccaatattt

SEQ ID NO: 131570 - DNA, 1361 bp, Cannabis sativa
aagtaaaattgaaaaataaaaaatgtaaaaaggtttaaataactgagaataaataaaaatgtaaaaaaaaggtaaaaaaggacatcaagcgtaaaaatctctaatatttacatatttaattctatattatcactatggctcacatacttttatttattcttttttttttctttaatttttttattaagttttatttatagaaaatatgatactaattactaacatatatctctttcttcataaaaaaaatctaactatttttttttttttagctgagatgtaaaatagctttaaatttaaaaaccatgttagcaatcaactcagctcggtcgacggcgcacgtgtgttgtttaggtaagtctttaagtgacaaatctctcttccacaaaagcgagtaccctcttatgcaagcagactatcagcccgtcctccccgggataaaatagcctattcaaaccactatatcaaaccttttcactgcactatagagaaccataaaaaatactacatccaaaaaatactactgctcgaaatacataatataatataatcgtaaataccacaccaaaaaagtactattgctcaaaatacatatcataatataatcgtaaaattatttactcattaattcaatacttttataatattaattatttaaaaaataataatttaataaataaattttctccaaaaaaataaagtgcacaccacactacaccacaccaaccagctcagctcggtcgacaacgcacgtgtgttgtttaggcgagcatttgtgtgactcatctctcttccacaaaaatgtgtaccccttgtgcaagcaatctattagcctcgtcgtcctcaagataaaacaagccaatcgaacaattatttcgaaccttcattgtagagaaccgttgaaaatactacactaaaaaaatactactatttaaagtgcatattataatataatcataaatcttttttatttttctatatgagaaataatgtctttctcctgttagttctgatgtattatataaggcgcataaaaaataaagacgaagaaagttgttcttttttttttaatcatgggagattaagttgcatcgtgggaacattattgaaaaaaagaatgagaaaatgtttctgtttacccattaattaaacatatttataaaactaattttaattaattaaataaaaaaaataattaacaaataaattttctccaaaaaaacacacatgcgtgtgatgtttattcaggtaagtttttgtgactcatctctcctctataaaagaagggaaatttacgtacattactaacttttcccatttttattacttttctactgtgacacgcttattgttacatttat

SEQ ID NO: 131571 - DNA, 664 bp, Cannabis sativa
  modified_base (27)..(29): a, c, t, g, unknown or other
  modified_base (622)..(639): a, c, t, g, unknown or other
actaatcagattgtaaagagttttatnnngggcataaaacccaacagataccggtctgtgcaaggaagatatcaggcaaggagtgtgagctattggcggaaagaatgaccgctagaatcaagagttggagctcaagaaatctctcatttgcaggtcggattattctaatcaactcagttctaatagcgattcaggcatattggagtcagatgatgatattgccaaaaaaagttataagagctatagaagctatttgcagggcttttttgtggaagggtcaagctatgttccatggtgctggggctgtagcctggggaaacatttgtcaacctaaaaaagcaggaggattgggaattacaaagatagaagagtggaataaagtggccatatgtaagtacatttgggccatatcaaacaagcgagagagcctttggcaaagatggattcatagtgtatatctcaaagaccaagagtggtggagctacacaacctcaatccatgctagttggtattggaaaaagctagtagctattaaagaccaacttaaactaaagtgtgatatagcagaatttcagcaagggaagtacactattgcagcagggtgttgggttttatgccctannnnnnnnnnnnnnnnnnataattagatttacttattaatata

SEQ ID NO: 131572 - DNA, 662 bp, Cannabis sativa
tcacaacaagtattgtgactataaacacatttagtcacaacaaattatgatttttgtaactaatacttttagtcacaacatagaataatagtttataatttgtcacaatttatttttacctttaatcaccaattttattgtaactaaaagtaaaattttttgtagtgacacataaaagcagtaacaagaaaatggactaaacacaaaagtaaggaaacaaaagaatcagatgaagaaaataaaaaagataggtctaaatgtagagtgatgctgcactatcactactactcctattgggtttggacatataggaatagaaaagccatccgatcatggcgtggagatgtcgagttatctttttcaagggcgatgcgacaagcagaattagaagtacagattgcttcactatgtaaccccaacaaatctttgttttctgcttgtgctgttaagtttgttagtaccaacatactgtttttggtgaatgagagaaaccaaagacaatgacacataatcctacacaatcatatatgctaacataaaagtatgagtcattactgttaaaattagacctcactgtaacctttattattacagttttacagatgaagtgaaaattacaaataaaatacaaactgaacacaacagaaatcagatcctaggtg

SEQ ID NO: 131573 - DNA, 897 bp, Cannabis sativa
tacaatgagttggggctaaaattaccgttctaactctcattatattttattcttttaaaacacttagtttcattaatatggtatttcaataaactaataaaattactaaaatgagtactcaatcatttagtgattttaaccaaactaaaaagaaactatcattttacttcttaaacatatagaattcatagatatccacatcactctcacttaattgcactaccgagttctcaatatataagtatggactagtccgtagggtaaattggtaacaaataagacaaagaactcaaaataatacaattaattagcttaaagcgtaatcatatcactcaagactcagatcgaattgatttatgatcaactaagtaatattaacttaaaataaataataagggtaagtttatctatcaactgtcaatatcggtctaatttaatgtagacctatacatttgatacaagttgttaacgcggattttcgttaactaaatttgagcctcacaatattgatttcacacagaaaaaataaaagctataaaaatgaaaatatgaacacaggattttttatgtggttttgtagttaaaattctgcatagtccaagagtcaatcttattcagatttttgattgtttttcagggcttctcctgtatgaatttttttttttttgtcccttttttcatcttgtctgccactatttataattacatagtggacagcaaattacaaaagttggttgtaatctttacaacaattattccttcaaatcatgagatttgattacaaattatgctaagtaaatgtggtttttatttagaatccacacagctgggatttaaagatatacgataagtcttatctcatggggatgcctcgctaggaatggagccgagttaact

SEQ ID NO: 131574 - DNA, 997 bp, Cannabis sativa
tgttttcagtcccttaaatgaaagttgttgacaattttcttttcatctctaatggtagtattttttaagatattaaaaactttccatcatttaaaattacaatattttattataaatctcatacacatcattttaaaatatttcaacggtaagttcctctcaaagtataatgcaccctttaaaaggagtccatcgatgcatcctttatctttttcggcatctgagataattttttagtctaattttttttctacgttgtatttatttaagtgatcctgtaaaatattgagagatttgaaaaaatataacacatcaacaataaggttcaagcagtctgttgcatgcgaaactcttttattttatacgcgtacgaagtagactatttgaaccatattttcagcgtgttaaattttttaaaatttctcaaaattttgtaagatgtcttaaaataactacaatgtagatgaccataaaaaattagacttataaattattccaactaccgaaacaaatagagggtgcatcgcttgaatccttttaagagggtacattgtaaaattttctattattatttaatatatattgaataattaaattttctttcacaaaataataaggaagataaaatataaaagatatgatattcttttttgacattttttttcactctaattgtaagcatttattaaaaaatgctaaaaatatatctgttatcaagcattctttaaagtatctctattagagatgctatactaatacttaatactattcttaagatgttatacaattattgatgtaattaagtattaaacaacacatctcaaaaaactttttttttctcgaaaaaatgctaaaagtatcactaccaaaagtatataataattattattattataattaaatattaaattttatataattgaatttaataattattataaaaaacttctaattattttctattgttttttctatgtttacataatataaaatttta

SEQ ID NO: 131575 - DNA, 1455 bp, Cannabis sativa
atcgatgtgatttatggctctactctagttctggaacaccaccatatcctctttattattgattgagcaagaataaggtaaaatacagtcgatatcgattctctgttggattctctcaaagtgtttactctcacactcttacccaagaaaattcatcatctacagaagattcttcatacaaaactaaaacccaatctctctcttttctccgtaccactctctctacctctcaatctttctctcacaagatcacctctcgtaacttgtttgatgaatctgatgaatcacctcctgaatcacctccttgaaatgataagtgttggtggtatttatagatctaggatatggatcctaaaatcggtagctgcacatgctaagttgttaagttagtcacgacataacaagcttaacaaactcctcgtaatagtgtctccacgtcagtacaagaagaagagcttctggatgagacatatgcttcctggaagaaagaccaaggcatacggggaagggacttcccagataggaaagatgctaactggagtcgactatccgaaactcccttacaggagagaacaaatagctacccgaaactccttttcggaatacatctatctatatatgaccaaaaccactttggagatcattttatttggaggaactataccataaattccacctagttacttcaaattaagatgtgatggtgatgaagaaagaatgcaaccatcatagttggtgttccttctgagattgatcaagttcaagcaatgcttgaacttgttcactgttaagaccttagtctcaacatcatcgggattatcttttattctgacattctctaaatcaatcaatccttcctctatcttctctgtaatccacttgagtcttatctttatatgttttctcttcttatgataaatttgattcttacaaagatggatagatgactggctatcctagtacacagtcactccatcttttaatttcttcaattcaaacaaaatcccccaaagccataatgcttccgtggtggaaagggcaaccacatactataactgggccttccagcatatacagttctgtttgtcaataaaacgtaggaaatgattgattttttttcgtatctctatttaaagcatagtcagcatccacgaacccatttaactccaaatctccttttactttttcataggttagaccataatcccaagtgcccttagagtaccttaataaccatttgagggccttccaatgttcaatggtcagattggacatgaacctgcttaggatgcttagagcatgagcaatgtcaggcccggtgttcaccatcacatacatttgttacgaattttatgtttactactgtaacgccctaagatttaggcacgctacccaatatgattaagaaaccctaatcccctaaacgggattggttttaaaataagcgcggaaatt

SEQ ID NO: 131576 - DNA, 884 bp, Cannabis sativa
attttagtcacaataaatattgtggctaaaaatacatttagttacaataaatattatggctaaaaatacatttagtcacaacaaattataatttttgtgacttatacttttaactataaacctttagtcacaacattatattaataatactaataataatttataattagtcataatttttttactagtcaaaaattttattgtgatcaaaaataaatttttttttgtatcgaagataaaattttaataataactgtttattttaatatttaaaaagaaaatccaaagcagactttgtatacatatacgttgtcgttttcgagtttcaaccgtggaactaggcatgcacgtacgtacgtacactacacacatcatagtttaggtattttaatgtcgtttttgagatcgatccaattttcaaagataataattcaaaagaaattacaagaaaatagctaggactacctagttagcccataaggtctttacttttgcatattctaagtactttgacatttcttgtatagatatataacaaacaatatagtctcttttttttcttgtgcatgcatatagactaagattgttaacaaaagtttccaagtacacttgcaaatttttgttcttcttttcttatgtgattgtgacaatactgcatgaaatgaaagcagattcggtccaaattttgtgaagtgttactttcaaagagaaagaatcttagctctcacatgaaactcttatatatgtaatcatacttgggtttgaaaaatatatacaaaacgctcatatgatcatcatgatgagagctctcttatgatgatgaattgagctaacactactacaaaaaccccctttagaggcggtttttaagccttttcagcgtc

SEQ ID NO: 131577 - DNA, 945 bp, Cannabis sativa
ctttatagcttgactcttgagttcttgcaaaatttgtttcgccttggcgacagtttgcaccttgggagcttgctcgacaagctccccataaacatcgacgaatgtcacgaaacagaagccagagtttcacctccaatggcaatattatcactgatatcataatcattttggcttgtttacaaatagtcttaagcatcgttaatagtttgccaaaatgtattcaccattattttttataattttacttttatttagtttagatgtgccgctttgctttgtacttcaaagtctcaaataatagaataaaaaatagattgatgttaaacataatattaataataataataataataataataataataataataataataaaacttgggttttaatctaatgttggctcatccacaacaataaagtgagacctaaactgaatacatatgatcatgtgggtctcctaaaaagataaagaaaattgccaaaaagtatcacacgacaagaattatgcccaggaaaaatttagtcagtaaaaggtagttatttgtcagtaatgaatatcactaacttaagaattgttaaaaggtatcatcatcggtgtcatactactattgatgtaattcaatattgggtcctatataacttaataaaatattattaggaatactgctaactaatcgtacagcgccacctctataaagtactaattaagtacgtatcattagtgtccattgcccaatagcaatactaaaaaataaatcatatattaaatttttttattaatattctttcccacactcagctagtttaagtatataaaatatctaatacaagtaaaattgatttatcttttaaaataatttatatcatcgtcgaaattaaaaattaaaaaataaataaatgaatttattaaaataaaaaaaataaaaatgttacactttctca

SEQ ID NO: 131578 - DNA, 747 bp, Cannabis sativa
attactaaacaatattaagtttttatacaaatactaactattttgtataataaaataataaaaatttatatgtaattattatattatattcaaagaaaccattgttatataaatatatatagtgtaattactagactcacttacataggcgaagccacatgcagactaagcagagtggtcgctccacgtaaaatttgactcggtttctaaattatttaaggcttaaatttaagtactttttggagccttttttatacaaatattatcaaattgtattgtttaatttattggtaaatctatgtttaaagtttaaggtggtcacaaattcaaaactccacaccttaactttacttctggtattattgttggaatttaaatttagattaatttaaaatataattattattttatgttttattatagtcaattatataatttttattaaatattaaagtttaaatattagtaaatctattaagtactataatatctttattctttagtactattatgaggtgacgtcttataaataattactgttttttaataattattattaaacataaaataagcagaattcaatataaaaattttcttaataatttactataaaaataaataatggtctcatttaaattttatttcttcctgctcacttacacgccctataagcagcctcttatgtcattaggtttaattaatatagttgaagaaacaaataaaaaacaacccacaaaaatggccaac

SEQ ID NO: 131579 - DNA, 1033 bp, Cannabis sativa
aattcctacaatttttttttttttttgtaatgatcgaaatgtttaatttttttttatttatgcacgttttttctaaaaaaaatatgtgtgattaacttgggattgaagattgaaaaagattcagtttttttctttcttattaattaaaaaagaaaatttaacagcaaaatatacattattattattattattattattatatataaaatatatattattattatgatattcattattaggaatttatttatttttatattttaaaataatttttttttaatatttatataaaattctatatagaaaccgccataacaactaagagcagttccagttccatcgcactttgctaaaatgtcaggggactgtcaagagccaactactttgcagagttgctattgcattggagaagttttgatgagcatctcttgttgctacacaagagcaactattatttccatctttttttatttttttctttaaaaaaaaaagtaaaaattaaaattgaaaccagtaaaagtatggatttaaaataaatgctatattaaataatattgtgttaggtacttttaaaattatttagtattggagtattttttttttagaaagtggtaagaataatgtggataaaagagaaataaaatattatattttagggtgatgtgaagttttgtggcaatttcagatattgcttgtattagagatgctctcagcaatttaaatcgcaatcaaaatctacttaacaactcacataaaaactactgtaaaaatcacttagacaatccaaaccgtaaatttaaaacaaaaaattaaaaaatagtatataaaataattattcttattattttttttttctaactagttaagagtcagaaaagaaaaataagtgaaagtgacatagtcctaatacaaatataggaatatgattttatttcgtgacgtactttcacggaatgtattccgtggtacattagatgggtctcagggtacattaaatgagtgttaggatacgtttctactttttaaccctaat

SEQ ID NO: 131580 - DNA, 1208 bp, Cannabis sativa
ttaatatataggtttatattttatgagatataatgttattaaatacatatttataaaagaaagtcaaattttaccatcctcttctccctctctttctttgatttatatttttttttgaacaatctctctctcgttctttttttttttttttaaaaaaaaatctctaactaataattatagtatttgaagccagataacttcaagtacttaataactattccttttttcttcccgtgccattaagttcatgtctattgacatggtttcttgtgttttgtctcttctggtgattgtttgagtgttgtctgttttgttttattgagaaagtgtgtgtaaggcgtttgtcttgttgttgttggattggtccgtggaaagtgttctgggtttggtttcctttgccacgatttctgttctggttctgggtagtcatggcctcttctagccgtcacatggaagcagttgatgaagatactttacggtttcatattgaagaagaggatctggaagcagtcatcgtgacaacgggtgaaggagaagaaggcatagatgatcgctggtgcttggtggggagatttctatcaaatcaagttatcgattttgaaaaaatgcaaaatgtgttagcatccttatggcagccaggtatggggatatttgttaaacaacttgataataatcgatttctatttcaattttatcacgaagacgatatccaacgagtgatcaatggtagtccttggacatatgatataatgcaattgattatcgaaaggttgaaggttggtggagacccgaagctactagctctgaatacgctagacatttgggttcaacttcatgatgtggaacccggttgtatgtcggaatcaacaatccgcaaagtggggaacacaatggggacatacttggagtccgatcctaagaatttcattggtgtatggagggattatcttaggatgcgaattactttgaatatcgataagccactacgaaggcgaatgaagatcacaaaagaagatgggaattggttttggattaattttaaatacgagagaactcctactttctgctttatatgtggcattattggccactccgataagttttgcccacgtctctttcatcaaccgattgatcgaattgagaagcattatggcgagtttatgaaagctcttcctcaacgtaatcataagaacatcggggcgcggtgg

SEQ ID NO: 131581 - DNA, 1154 bp, Cannabis sativa
cttatccatgctttcttgcaaggtatttatttgaagatatgttgttgtgggtatcatccatacttgatggttatccaacatgtctatttcttttgaaatagagatgcttagctctttaaggaactaagcaagtacaaagtttgccttgcttaccaaggcattgctagccagtcgagcgagtgcatcggccattgcatcttttttggggacttgtctttaagtacaacctttgagcaaacttaacaagtcttgaatctagctcaaataggccataatcttttttcctttaagttgcgtattcacctaagacattacctacgactagttgagagtcgtggtgtatgtcttggtgttcatcccgcgcttcgtgtgttagcctaaggctagcaatcggagcttcacatttccccttattattagaagctttgaaattaacctttattgcctcatgtagccattgcccacaggtgccctaagggagatgcctacactgggtagttggtaattgcaccttctaggttgagtagtcttgctcttgctctcgcttcttctttctctctggcttttctactgaatcaagagatttggggagatatgctttatatttagcttgaagctagtgagatcttggtctttttatggccatgctagattgacatgttaccttatattggctgagcacgatggctcaggtgcttcaggtattggtggcacgtattgccatggccggttggcatgcattgctttgggaatttcggtaggagagtgaagtatgcgcacttctcctccttctcccttatatttcatggcataagggaattgtggaattttgcttttttgtcattattctggctagagtcatcattgttgcgcttgccaccaatattcccattttcagagaattggcagagattttctacactggccggcatgtcaaatagtacttggcgtagtatgatgccctatgtctattcaacattgatctaccctcttgtttgggcttgccggaaagcttcttccaacttgatgaggccatctgatcgcttaaggaactttgtcatgtttctcgttgagatccttttgatgtctttctagaattcactcaacgggaagatgcctttgagtatggttgtatatcagccttcctctatgag

SEQ ID NO: 131582 - DNA, 884 bp, Cannabis sativa
gttttgccaccaaaaaaaaaaagataagggggttgagtgtataaaaattaaaatataagggggtatcgccgcaaattgatctaaaataaaatagtcacgtgtgcaacatactttttaaactttattttcggcgtgttaaatttttctaaattaatttttaaaattttgaaagatgtcttaagtaggtataatgtatatgactatgagaaaaaatttgactaaaaaattattttgaatgctaaaagaaataaaaatgtatcaatatatatatttaaattaagagagtacattgtagaatttttcattatttaatagcaacattaaaaaaaaaaaacatttccaaaagtaatatttgacagtcaaattcccgtaccccttaagtaaaaataacaaattaatgtctttatccaacttgaatgttagctgcctatgctttatttggttatcataaacttgtgtacacgtgcacaattttattagtctaaataagttaattgtttgattatattaaaatttatttaaatattaaaaattattaaaatatctaaaaaaattaaagtttattatatatttttccttttaactttttttttttttttcattttcttatattcttttgttctttcctgatggtcttcttcaatcttattcctcctcactctctttttattttttatattaattttctagatattttaataattttaataattaattataaatttatatactaataaaattgtgacacaagtacacaatttaagttagatgaagacatcaaatttgttaacatttacgtacctacataagagggtattgtgaggttataatggtatctctttatatattaaaagtgcctatctaacggcatttcttggtttaac

SEQ ID NO: 131583 - DNA, 1856 bp, Cannabis sativa
  modified_base (1634)..(1645): a, c, t, g, unknown or other
atgtatgttatcaaattaaattactttggtattttatttaaaagggaattgatttagacatggcctgagttcaaaaggcacgagtacgacatgatacgaaaaaatataacttaaatccggtgcgacataaaaaagtatgagcttgggccagcacaaatagtataactttaaacacaacatgacatgacaaatgcgacaacacaatattaaggcacgaatataaaatcacaattacacccatcttttatattttattataaaatacataacaatacattttttattacatttttaacttttatatatagtgattgataatttaatattataaagttatattaatatagtaataccaatataaatacaacgcaacacagtccatatttttgtatgagacgggttttgtcttcatatttaaaattaactttcttaaatataaacaaaaccacaatggttgcacggcccttatgtacaaattttataatggagatgaccataactaagcagattatacttatagagaaaactaatcataaaattaacacaacaaaagataaactcaaacgcatgcccttgcacacaaaataaaaatggttttccttttaaaaattactaataagtaggcatgtcaaaaagatctatttagttagagcaggtcgaagctccgacccaatagatcacttatgatctgaaacattcggatacttattagagctcgaatcaaattcgttctgccccgtctaactttttttgtatcagatctgatctgattcggtttcaatatattttaagaaaaaacttaattcaagactcggaccctcaacccaagcccgaacccctcagacccaagaccatacccacctgagatccaaacttagacccgggcccaaactcaggacccaaaccctgacctgaactctggatcggacctagatttgggttttcaaacccgaacttgaacccaaacctggacttggaccgagactagggacttagttgggggcctgacttaggacccagaccccgaactggacccaaacccaaatccgagaccagactcagacctgggcccgagatcgaactcgtacccaggacctagacccaaacaaagactcggacacgtatccgtacccgggagccggacatgtatcgagacctggacccaaactcgaacccaggacacaaacctgagcccggacatagacccgtgacccagacccaggacctgaacctagacttagaccaagactctgacctagacctacacctagacatgggacctgggaccaggacccggacctgggacccagactcaagacccgagaactgagacccaaacctacgttcggactcggacttggacctcgacccagacccaaatctggacctcatccataatttatgttgtggtcaagtttattgaaaatataactttacaccatttattaatacaagtcaatgctggggaatattttactaagatctagatttactaatatgtatattgattaacaacctaaatatgaattctctaaaataatagaatttaaacacatataaagttaagaaatcttacattgatttcagcggaataatatgtctccttccattcagatctctaactcttgttcctnnnnnnnnnnnngtattatcaagatctaagcccgattctccttcaagtgttggattcttcacagtattacacacaacgattgagtacttgacttgatatgggtgggcatgtactctttcactataaggctcgaaaatatgaagaagaagtggaggagatttgaattctatagcaggaggttctcaagtctctagttgtctgacaaagaatgaaaactagaatg

SEQ ID NO: 131584 - DNA, 970 bp, Cannabis sativa
  modified_base (619)..(619): a, c, t, g, unknown or other
ccactagcaactataacatccaagaaggtgcttgactttgtggtcaagaacattatatgtaggtttggattaccccataaattggtatctgacaatggtacccaatttgacagtgtcatattcacaaatttctgcattaaacatggcatagtaaagagcttatccgcggtctcgcacccccagtcaaacgggcaagtagacgcggtgaataaaaccttcaagcacaccttgaagaaaagactcgaagaggcaaaagtaaactggccagaacaattacctaaagtcttgtggtcgtataggacgacagaaaaaacagcgattggggatactgccttcgccttttcttatgggtatgatgcgatgatagcggttgagctagacccaccctcccaccgacgaatgacgtacaaccaagtcaataatcactagctaatgggtgaattgttggacctattggagaatcgtagggaggcctcacaaatacggttagcagcataccaacaaaaagtagccagatactttaattccaaagttaaggaaagaggcttcaaggtagtagttttagtactacgcgagtcttggccaacactaaagacccaacagcaggagtattggggcnaattgggaaggtccatacgaaattacagaagttgtaccccccggcacgtataggctcgactggtatgactctaacatgaaccttataccagtaccccgatattggaacggccaacacctccgcaaatattatcaataacagtttctcttcagcgacaattcatgctaagggtatgcccgtaagcgacttagaatctttattagtgtttagtcttttcttttagatttgctctacttttaatcatatactgctacgtagtgatgtaataaggcattgtcgccaatttcatttatcaataaaattgcaagttattttcatataatgacgcagcttgtatgattgttattgaat

SEQ ID NO: 131585 - DNA, 634 bp, Cannabis sativa
aataataatttaaaaaaaaaattattgaaacctgtatactttgctcacaaatggggaaaaaattctgaacacactgaccaagaaataaaataagagaatattgaaaattctcctatttcatattctcctattttgcagcagattgaactctattttactggtattttctcttcccagggtgtcgatcagctggcacttcaagcagtcctggacactatttctgtgaccataactcctgactctcgtgaagctttatcttctccttttactgctaatgaagtttatgctgcattaaaatctatgtctgaagacagcagtcccgggattgatggaatgtctgttatgttctacaccaactattggcatattgtggggtctcttgtcactagttctgtgttggatgttctcaatcatggtggagttccttcttccttcaataggactcttatcacccttattccaaaagtgaaaaagccgtctagaatcactcagtataggccgatcagtttgtgcaatgttttgtacaaacttgtgtccaaaacaattgtgcttcggcttcaaccatacctggcaatggtcatctctgaattctaaagtgctttttgttggaatttattttatcaggatcttagat

SEQ ID NO: 131586 - DNA, 756 bp, Cannabis sativa
ttatagggatttccttgatgactcacgaagctgaatttgctaagtgttggcgttctgcgaggattgcccactgctcggtcttgaggacttcgtccgagcgaatgtatgaggtgtcctgttcggcctatgtcttgtgagcagatacccggagtcgattccacgtgtcaccatcgagtgatgccacgtccgagtgcaaaaattgggataacaatggtgttgtttaataaattgtatagaaaaaaaatcaaaatcattttattttgtttacataattaggaaaaataattaaaatgctaaaatttgactttattaaaaagtgtaatattttttttatagtttttgaaaggatatatttatcttttgaattttaaattaataaaattaaaatatagataaagtaagttatgaaaatgaaaatattctctataaacatgagagaagaacctttatttttcttttcacttttaatttaagtgggctacactaatcgatggtatacacttaattcccattctcatcaagttgacatgcctattagcgagatattgtttggagggtattcaccaatgaccacattacacgcgttttataactataaatagtcatgcccacctattacatttttcaccaactatcttacaaaaccttcaaaacgatggcgtccttatcttcttctcccactatcctcctcttctccttctgtctcatctccattctagtctctctctccagtgctactacagccaaaacagtacc

SEQ ID NO: 131587 - DNA, 1322 bp, Cannabis sativa
taaatttataagaagatttggctaccaaacgaatttgtctataccaagagttcgttctactaaagattgagcaataaaattattagactttttgcaatgatataagaatatactatgaaagaatttctaaacatgagaaatattattaagcaacattagcatcttcataactccaaacattagcatccaataaaagtttgtggtcatgaataaaggtattatgtctataccaaatgtgctagcaaagaacaatgaactctaacaattcttttttactcaaaatatgcatgcagcctaacaacatctcataataaattaaggctgagtatcggttggtttttttctatataaaaattcaaaattcaatttttgatttcaagtggtgcaatctaaaaatcgaccgatcaatctagaatctatcttaaaattgatcgttttgaatctcggtttggtcggtttaaaccgcccaaatcaaacttttttcattctttaaaatatgatccaaatttattctataagcacatcattctacattctacagctatacaaattaattattcaaaaattaattatcttattcttttaactttaatattaataaagtaataataaattattatatattatcaataattacaatacataaagtaaaaaaattaataaatatatacgtataacggtcgattttgattttttcggtcagtttattactaaaaaaaaactgatcgtttcatggcagttttagccgttagcagttattttagtttttgattttgtcgattttggttctagcggtattcggtaggtcggtttgaatgattttttcggttttctgaatttcatgctcaatcctaataaaaacaagagacatcctttaaagtatcaagaccttttagaatccattcaaactgaattgacttaagtgaagggcaaagctatagtgcatgaataatagtaaataggacaaatcttagacactttcataccatgacgagtcaaattggcatatgatggtaagaaatttaagtttaccatctaaacaaagtttttaatattttgccggaggttaagactctaaagaagcctccaccaacgagaagtcccagaggagatcgaaacatgtctctaacccatgctcgaaatagtgctccaataacctttcttcaccgaataaaaacaattgtctaaaaaataccagataagcctatcttgtctactaaacaatgtacaagggataaacaagattgctcttgtaatatctcaaaaattaattaaaatatattaaatgaaatataaaacaatatgggtattaggagaataat

SEQ ID NO: 131588 - DNA, 727 bp, Cannabis sativa
tgagctaattcatcagcaactttaacatcttttttggttacatttgatgatgctttttgtgctcccatatatatcacataatgctgcttattatgacaattatatatatatatgaatttctatatttacaagaatgtagatgagatgatccaagtatatatgattttaatgatcagcattattttacgtacgtaccttggggatctgatttgtagtcggcgtgggtgagccagaaatgagcagccattgcagtgagatcagaaaagatagtacgagaacaataataatattaatattagtcattggaactaataataattaattaacaattaacttaattatgcggtgcggctataaccaaaacccatccatatttatagaattaagtttggtgtcaaaattaggccaaatatttgactttcctaattatttaatttagagatatagggtttggtgcagttgtactttacaggggcccaaaaataaaactattgcaaatatagtattaggatagaatttggtaaagtgtacggggttttatataaaaattaaagttctttacggttaaatccctttaatattattttactggtatttaaccttttaagttcaaatattagtggtaaaattctctaaactattagtaaatttaaggtgatatctatttttttacatttaactgccaatatgaaatatttatgtatatatttttgtacacgtgacacgt

SEQ ID NO: 131589 - DNA, 1628 bp, Cannabis sativa
ctagggatactaaattctttactgtttattaagtgtatctgaatgtacagaagacacatctctaattctatcaaaaatggaatagagataaaaaaaaaattaagaacttttttcaatttgaataacattctagtgccttttaaaagcaactaagttatttatcttcattggtggaactaaatcattatagatgagttttgacacttttctcgaataattcttcaacccccaaagtaaccaccatttttaaaactaaattatgagttgttgtcgatataaggattctaatgtacacctctatcatctaatatatataggtaacttttagaaataatttcttgattgtctcccaatgttccttgtttgatgattacatctttgatggctcccactcaatagtaggagtctcgtttaatgcatacacaagtgcatttaacctcttactattagtatttagggacatcttgttatgacattttatcttaatctgaaataataaatttcttttagactaagtcatcaatatagcattcaagtattaacattaatgtaaaatatttgctttagattaagtaatcagtagagatattataaaacatttcataaggaccagtaattgtgcttaagtccttcaaataaacgttgcaaaattttatatcttatccttataattctgataagttattactatccatatgaattgttagattaacttttcttttgttttattttaacgttcctttcttgaacatatcattgtaggctatcactaatgtcatgcaaataataatggcctggaaaaccctcccactaaggtaaggtattgtgattctatgtctagggactttagtggtatcaattaatattgaaataaatattggaacgcatacaagatcaagaatacactctattactttgctagtttgtctattatattatatttatgtctcatcaaaatatatgtgtcatagatattctgtgatattttgaacataatctagagttcaatgtaaaagttgtttgaactacatatgttaataacgtcttcaactcctatgtgttatagagattctgtggtgttttgaatataatttagagttcaatgtaaaagatctttgaactacatatattaaaaaacttcgtccagcccaaattacaagatctttcattaaataaaatatttataattgtttaagaattgacaattatacataaatattgattttaaaatctaagtgtttgtgtggtattatatctttgtaaagatgaatacactatagatttgtatcaataataaatgctaaaacggataaaaaaacatgataaacatataaatataatgcgacattggcatacaagttatagaatataaaggtcaaattcatagtagcaactaataatgaaatcttttaaagagaaaatttcgattaatattccttaacatgtcataataaattatccgtaataatatgaaataaggaacaaaatttccatactaattattaaaactaaattgtttgataagtaaaacagttaattcaaaaatagtaaaaatgagctttatcttcaacttggacaatctccacccttctggagcagctggagcagaaataagaagaataataaca

SEQ ID NO: 131590 - DNA, 631 bp, Cannabis sativa
  modified_base (407)..(411): a, c, t, g, unknown or other
tttaagtttattgtatttgaacttaattttttaatatcataagtattttatgttattaatactgtaatttttgtcaatatagattctattagtatattaaataaattacataagacttagattctaaattattgagtctggttaatgtagtataaataattacattcaaatttttttcaacaaattcaaaaataatttacaaatgtaagatactaatagataataacaaaataaaaattgtagaaattaaaggggtgtttgataacatttttgttttttaatttttaatcacaaaaataaaaagtaaactttgtgtttttaaaaaataaaaatgtgttttataactatttttattttttaattttaaaaaacagaaaataataatgtgttctataacttttattttnnnnnttatttttttaattttatttaagttgggtccaggtccagatctggaatcggggccatggtccaagtctaggactggtgccgaggctggagtctgggtcccaagatccaagttaggatcagagcctaaaatattgattaagaaataaaaactatgtaaaaaaatttgaaagtgattttttttgtttttaaaatttttagaattttgattctcaattaaaaa

SEQ ID NO: 131591 - DNA, 622 bp, Cannabis sativa
catgggttatcaaggaggggtcgactctgaccatatctccatgtgaccatgcgaataggtccaggtttgcctttagaaattctatcaagattgacttgaattctggggccaaaccttcatcgatttttagtcttcttgttaagatagtgggatcaacctccacttcttccaactcttctacaggtccgaagcttcctacagcaaccccaaagcaaggatctacatctgtgtccctgccttgggctagaattcatcgccccttattaggctcatcttctggactttttgcgggaatcttttcctttttggtcatggatagggccaagttgtaacagtgatggctagactgttggtctcccctcaagcatgcaaccccatgccttgttggaaatttgaggcataagtggtagatagacatcaccaccttcaggtcattgagcgtcagtcagccattcatggcattgaaagtcaaggcaacgtcgatcataatgaactgcaccatcagtgttgtagtggttggatcttctccaactgtgagggttaatctgacatacccgacaggtgcgatgccttggccaaagaagccatacatcacctagttatagggtgtcaggtcattgag

SEQ ID NO: 131592 - DNA, 547 bp, Cannabis sativa
cttatcatcactgaatcacaagacacttcagcaaaagagttcagaaaatactctttaaagtaagggatttggtgttacgacttgtgtttgctaatacatgaaatcccgcattaggattatttgatgggaaggtctttacattgtagaagctgtcataggaacaagactttacaaattagcatagcttaatggctcactgataaaaaaaacacctggaataatgagcacttaaggccttattaccaataacgtgttatgttgtattttattcatcaattatgtaaaagtaatttattttaatagagatatttgtatttcaagtaatcataaagttcttctttaaatttacttaggggcatatgaattttatgggaatcgccagaaatgacagggtggcgtatgccacgtttcagttttaggaggatgccctggtgtggtgggagatggtgtctttgttagaggatgtcaccagaatgacctaggaagaattccgagacttgtttaacgctaaatactataatgaggcggtccgcagtgcaaagcggaa

SEQ ID NO: 131593 - DNA, 738 bp, Cannabis sativa
acaatatttaaaaaacttgaccaacaaaatatctataagaaattatatttcatactcaaacatcttgatctagcaggaaactaagataagtcctatatgttgatgacaattacctgatcgacaataaatagatcttgatctaacttcccaatgatgaatccaaggttgaattgtccaattacctacaagaatgaccagtttgaataggcatgtaggtcttttaggaaaaatgtattctgaatgcagaaagttaagagccatcagatcagttagaaaacttctgccattttctatactttatagttgttttagatggtttcttctgccattttagctgaatttcaatgcacttcataatgggtatgacttgtgatgctttacaaaataaatattattatataccaggctatcactttccttctgtatataaaaacagttagggtacacggtggttcaattgacctatatattaacagagtagaagcctcgttaagacctgcatatttagctaaatccaagaatctacccagaatgcatcttaagcagatcaaaagacaaaacatgagatgactaataatatgaaaaatcctttgctcatataaaggttctgccatgcttcataaagcaacaagctttccacacacaaatgaaaataaatacgtaaaaaagtaatcttgtcacctaatcaagcaactatgaacagcacaagtaggaagctatataatctgttaaacgatg

SEQ ID NO: 131594 - DNA, 916 bp, Cannabis sativa
tttttttttttttttgtatacacctagtgtacagtgtctcttataaatgctgaaactatgattggagtgacagttgaaaccattatgccttttataattaacttctttttaagattagtgtgtttaattcaagagagtctcatcgtcatttattctagtctgtttttgtacatgcttgtgaagttgtaatgaatacaagatagtctaagacaaccaacttcttgcagggccttgaggtttgaagtggagatttacctcaatttataatgcttaaaatggaaacaagtattttttctatgctactacttactttcttttcaaatggttacacaaaagtgccattcatcaatattcagcttaattatcttaaaagtaaaatattatttctcttgtttttgaggcatcttaatggttatttgacattaattacttgtttcaaacaaaatttttgaaaactctttttgaaggctgcaatgcagaattcatgtgattgtaaaaattaaaagtgcagactctatcccaaatcttcgcacaattattcatgcatctgatagggttagtttaagtctctttgtggaagggctcttcaacaccttctctcgaggtgagtcattaaacctttgtattgtgagtgctttaatgattatatcagaaacttgaaatttttttggcgcatattgtatttcggcttcaatttttttgggcatattataatatatcatagaatgtttgattttcttagcacaagtgagaggcattatactttgtagacatttactgacagagatatatatcttttcgaacttcaattattgatatggttgttgtgcttacagattatctttcaatttggctcccaaaggacagttcaagctctactagcatcacacagctgagatcatgccttttagataat

SEQ ID NO: 131595 - DNA, 864 bp, Cannabis sativa
  modified_base (837)..(838): a, c, t, g, unknown or other
aaaattcaaaggaagaaaagataccttgcttacaaagagttgttgcctccaatccgtaagaatttcctcaccaacaaccttctgaattactgaagaaaaacaagaaatttcccaagcttctacgacttctaggtgaccgacccccaaagagagaaaaattagttatatctcttttgcttatgcctttcttcatgggagatggtttcttgtatgacaccatagactgggtcgttgcataaattgtctctatgtcatctattagaactgagaaagcaataaagttagaggcattttccctgggatgttgtttggcgcttgcctctttttttgttaccctttctattatcgttattgaaacttttctcgtttaaattcgaactgttaggatattgtgaattatgggcagacgtactggctattgtggtatgctgctgacttttcttttgcccaatagtatcgacacaccgtaatgcttcctcgagcttaatgaatccatctactcagtctagaaattcagccatcaatcccatagttaatcttttgatgtccttccataactctcctagaggctccatgccccctagtattgttgcaatctttcctctctaatcatccccttaatctttgttgcttcaatcataaacctgctaatgtggcatttgcttcacttctaccaagtcttccatgtgtgagggaagctcacgagaggaagaaaactgtgtgttgaactctgaggagaaagcaattatcattaaactttcctagaggcaatttgaaataccattgttgggttgcctctatgagtgtggcatgaaagattctacaccgtacatcacnncttaccccttgcagatccatctgcat

SEQ ID NO: 131596 - DNA, 1184 bp, Cannabis sativa
gaaccaataatcaacactacttgtttgataattgggcataaaagaatgagatcttactattttttttatttataaagcttcattttttttttcttttctcatatattttctttttcacatgattttttttcttgatgctgattttttttttttgtttttatttattttttcagtcatgattgatttttttttatcttctatatatatatattctatatatatatatatggatgattttttaatgggtaatacatggttactgaaaaaattgatgaggtggctatttggtcaccgctagagcaagttaccaacaagatttttttaaaaagattatatttatttttttaattatagagaatgatgattcaactcagtgaagaagacaccatcagctaccaaccacgaaatcaaactttagtaaatgaattctttcgccatactaagcggattgaagattgaagattgaaaatgtgcattttgcttcttgctcatctgagttgccattttcagttgagaatgtagagattaggactgccatctacaatggagtttgagtatttttttttttttttttctaaatgccagtggtcacacacatctcactttcaaataaaaatttccatttaatcataacaacaaataaaactcattaattttgataaagatccaaaaaaatgaactagaaaaaaaacctaaaagtcctgaacataattttcatgcaactcgacaatgggacgtgccaaactcttttgccaatatctaatccacatggagttcgagtagttgataggagagattgtgccttcagtcgaagcttttttcaacaattcaatttataaattaatgtttttttaaggtgtcgtttggtaacatttttgttttttaattttttaatcataaaatgaaagtaaaatttttgtttttgaaaaacaaaaatgcgttctgcaaccatatttatttttcaattttaaaaataaaaaacaaaagtgtgttctgtaaagttcatattcatttttattttttaattttatttaagtcaggtctaagtttggggttgaatttgcgttcgggtcagaggtcgggttcagcgccaaggtcgtgggaggaatttgggtctgagtatggtcggaatccaaaatattgattaagaaaaaaaaaaaactatttaaaaaaatattaaaagt

SEQ ID NO: 131597 - DNA, 1229 bp, Cannabis sativa
  modified_base (1020)..(1026): a, c, t, g, unknown or other
taatttgaataatctgtcattcacaacaagaactggaatagtaattaggcattaacgattgggtaaatctatcaaaaggattctcttccctatcttctcatcttgattaatttatattgtctctttaatcttcttgaatttttattcaattattaaactcaagaaatattgatttaccaaataaaaacatagatttaatctagtggtactatatctaatttcctgtagttcgacctcacctgtgtgagcttacaattttttatttatttatttttgaaactatttatttatttttactatcacgtttttttacttcttctcttttttttttctttaaattaagatctataacttatatatatataaccagtacatggcatatatattaagtaagtaaataattaatttaatatataactagttgttttttctttcaatgtttaatttatatatttatacataatattatgttacaatatattgacaaaatatactatacgaaataattttggaaaattctatcaattgccatagtctaaattacgtttaataatatttatagactttgtttttaacttaaaaatatctattagaatttatttttatatctataaaaattaatcatttattttttcagctttgaatattaattttatattgtaatatatgatcaaatgattatgaaaaaagaaaaagtttaaccaataaaaggtaacaagtgagataaataatttttattttaatttctttattttcacaatttatatttatagttaaatttgtttggtaatcatttatgggtaacacccattaaaaagtgttctatatatatatgtttaaaaaaaaatatcataactcataagttattgatttttatttttatttttatgatgtatgattaaaagattattgtcgtttttagatcttaaaataatatctatatatatgagagatatgagacggtgacatgacactctaaaatttttccaaaactgttttctcttctctccttaattctcnnnnnnntaatattttattagaacataaatctacaaatcaattattttatattaacataaatttacaaattaataattttatattattttaataatctatctttataaatatataaatgagagatatgaagaagtaacatgacactctacaatctctcaaatagtattatttgttctatccttaattatctcattttttttttttatttt

SEQ ID NO: 131598 - DNA, 513 bp, Cannabis sativa
aagatataacccccccaaaaaaatcatatctcattttttcaaagtcatttgtaaatttcattttatttcttgactctctctctcctctgcggccacgagccacaccctccctctcctccactttctctcgctctgtccctctcttccgctctctcatggcatcacaaaggtaagcacaaaatgctcttatttgttgtttaaatttccattagccatgatttggtttgttaatattgatctttgtacgttcaaaataaatccaaagcttgcaattcgaagaaagtttcaaggatcgtcaagtgaaaagcaatataaacttgtaaaagaaaattttgaggaggatgaaaacgagcacaacaacggtggaggaggatgaaacttgtaaaggttttagagcggttgcgatatatgcgagaagtagttttgaggaggatgaaaacgataattttttttgggcgatccactatagcaatagtttaaaatcgtcggctatactataggccacggtttaaa

SEQ ID NO: 131599 - DNA, 725 bp, Cannabis sativa
gtggccgttgattttcaaaggttggtttgttttattatctattgttggttctaacaggctgaataggctcctgattgtggtatttgctgcactcggttatagaatctgggtaaatagaaacaaatgtattttggaaggatactcttatatagctgatgcaattgtggataatgtaaaaaatatagtcaagtatagattacaaagtgttaagaataggagaatgactagagttgagagagcctttcttgtaaaaatgcaagtgtattaggttggctttgtggttactagtgtctttaaggttcagttttgattccttattgactagtttgtacttggtagttgcttgattaatgaatttattctccttcttgataaaaaaaaaaagcttaactagtaaagtgatctaggggtaaaatggtcatttccaaaacctcaagcattctcaatattcctaatgtctaactaggttgccgcgctactactaaaatactaagatgtgattctattggccaaacgccgcgttccaatattgtcggacacaaaacatgcaaaaatgtaaaattccatatatgtcataattaatacaccctgaattcaaataaatctccattaaatgataaatcataattaatattctagtttcataattataccctaattatatgtaattctaatttaaagctaagcggtctttacaattatccccctgttaaaaggatttcgtc

SEQ ID NO: 131600 - DNA, 1197 bp, Cannabis sativa
aagggtgtaagccttcattccatggggatatccaatgaagatagaggcatggcttctaggggtaaatttatgtctttttgaagccaaagtggagccataggcaaggcatccgaatgtccttaggtgatcataggatgggggcttgctatgaagtatctcatatgatgtagtccctttgagcaaggctaatggggttctattaatcaaatatgaggcggtctgtatgatgtaagaccagtaagaaagtggtatgtttgagtgaaagcaaagtgcacgagccacattcaaaatgtgttggtgctttctttctaccacctagttttgttgtggtgtttccacacaagagtggtaatgttgaatgcctttagaggcaaaaaaggagctcatgttgagttcttttgcattatccgatcgaatggctttaacattgattgaaaactgagtgcaaatgctgttaaaaaaatttatgaacacggtttgggcttcagatttagttctgagcattagtgtccatgtatatcttgatttatcatcaacaatggtcaagaaatatttgtatccttcaacactaattatgtgaaagggaccccatatatctatatgaagtagatcgaaaatattttgggcaaaattattgctagaagggaatggaagccttttttgttttgctagttggcaaatagagcagtgatgcttagattgaaatgtaaaagaagggtcaatcttttcattgaatatgtttgagacatacaaagaggggtgaccaaggcgattgtgtcattgatctacattattctgaaaaataaaaggagtagattgacaaacatttgccatagcagatttttgttgttgcagcaggtataacttgccatttcttttagcaatcccaatcacccgattctgagagtgttcctggattatgcatatgttaggtttaaaggaaacaagattagtggtattgtccacatatgctgtaacagaaaataaattgatcttgaaagtaggaacatataggacattatgtaaaaaaatatctggtgttaattgaacatttccaatagcatgaacaggtatattggtattatttggtaaagtgacatgtttaggaaatggaattttagaaaaggaagtgaaatgacctatattggagcacatattgtgggtggcaccactatcaataatccaagatttagagag

SEQ ID NO: 131601 - DNA, 776 bp, Cannabis sativa
aaatagtatttaccctaaataataagatagcacaatataacttaaaataactaattgattattaagatgtctacaaataaggttttagaggtaaccaaattgtatctcaaatcatgtaatttaaaaataaatattttttatgtaaaagtaactaattagtatcttatcaacatcataagtaacaaaaaagttacttttaaaaatccaagaaactaataaaaaaaagaatttgtgattaattttttttcaagcatattattttagaattaaggtattttttaatgatatgacaaggtattattatagttgagatttattaaggtatttttgtaaatagtttatattttaattatattattaaaacatttcctaatattaattagtttttttttaatcaaaatcattgaactatattgtgcatgaaagaaaatttcgtaatgtttatacaataaactaaatgttactaaaaatatatcttaataatattaagatactatttaaccttattttgtaaacaatttggtaaagtttatttttgattgtgttcaatgagcaataatgatttgtgcatgatcacattccaaaataagcatttgagcactctttgagaatatattttaagtggagttattaagtagtggtgtttgagatatttattgtctcaaattaagcttcattataatttataaggtcatctcccgttgtaaaagttaagctatgttatcatttatattcttaaaaaaaaccacacccttgaacaaaaaaaaaaaaaaaaa

SEQ ID NO: 131602 - DNA, 546 bp, Cannabis sativa
tctaccaaatcatgcccctcaaactttgacatgtactaaatcatgccctctgaactttgatccatgttatattttttttactaaaatttgacaaaagtctttaaattcaacaatcttaatagttcaggggcattttcaacgaccttaaaagggggcgtgatttggtacatgtcaaagtccgaggagaaaaagtcctaattagcttatatgtggattacaatattgtggttgagatcactatttgaaacccacctatttcgatgaattttacactactttctaaggctattcaaaaaaatttacaaaccgccaaatctaaataaactgtccaaattaaatcgaataaaccgacaaaaaatacaactcaaataattttacgaaaattcaaaccttcgatgaatatattgggagggttgaacattattcttacccgcccaaataacatgaataaactgaataaatcgatttacatattttttactaaaattatctataatataatatataaattatgtttaataattaaattattttacatttaaagtt

SEQ ID NO: 131603 - DNA, 661 bp, Cannabis sativa
ctctcaactcaagctatagagttatacattcaggttagactttttgatacggtatcaaactagcacaaattttggaagcataggtacgactcaatacaaaaaaaaaatataaacttaaatttagtatgacatgaaaaatatgaatttaagcacatgacgatacgtcaaacacaaaggcacagcatgaaattacaaatataaaaaacacaaattacatccataaatatagtttttttatacttaaattatttatttatacagttaaaaacatataaatttatttttttaaaaattatttttaaatatatattatgtgttaatttaatattgtaaaaatatattaatattttatataggctgaattggactttatatttaaaaatagattcttacaccacatactgtttttttaaatttatttcttttatactgcagtacgacataatttatttttttactgtattttttatttattgtatactatgtataatataaaattatgtatattgccattttatgctattttgtcaccaatattttatcttctttatttttttgttattttttttaaatgatgattaaagttgatgttgacctctcatatacattattatttgtgtatttcattttttttttaaaatttaggcaacagcccatcaca

SEQ ID NO: 131604 - DNA, 577 bp, Cannabis sativa
aataccattttaaatctctgactggaccctttattttcttaaatgataaattagaccttgtacatttcaaaatagtaccctaaactgattttttttgtcaaaataaaatttaataataatccgatctagagtttgtataacaaaactaggtacaacttttgtgtttgttcgtgctagaaattatcttcaaattggttatgttaaaaaaattatcgaaaattgatctcaatgtactattttgtactattacagggtctaatttatcattttatgaaacaaaggattcaattggtaactcttacaaaactggatctaaaatagtattaacccaaaaacaaacttataaatatgacattctttttcttcaatttttaagaaaccctgtaaaaatctaaacaattaaatatgccatgtagtaaacaaaattatagattttaataaacttgtggcagtgtattttcgtcaagttataatgagattattttataaaggaaaatttgcggcaaaagtccccaaaaggttcacgttgatgctgattagtccccaaggtccgaaaatagcggcaatagtcctcaag

SEQ ID NO: 131605 - DNA, 816 bp, Cannabis sativa
ttttttttaaaaaaaattaattctgtatttaaaataccattagcggcgaactgtccgtcgctaatagtctgccgctaagggtatcataaatacccaatccgaaccctttcccccattttccctttcttctcttcaaaatcaaaatttcatttccccccatttctccaccaccatcccgagcagttgacggcgccaccaccccgagcagttgacggcaccaccagcggccattaaaggtaatttttttccagtttttgtaagagttaaatttttattttacatttgggattatctagtttttaggttttagattgatatatatatatattacgttttatatacaaatctatatatttaagattttaaatgtttttatagatctataaattatatattaaggtgtataaattatgagtatttattttgaaatatctgtgcatatatataataatttgtgtatattataatataataatataaatatagagcaaattagtatatatctgtgtttattgaaatatatatttgggtacaaatatatatatatatctgtgtataaatgtatatatttatacagataattttagggtttatatgtttagatatttattttttttatttgtgtgtatatagaaatttttaatctgtacatatatatgttttatttatatctatgtgtattattaatgtgtagatattctaaatatatatatataagtttgatatttttttatttatatatatatgtatatataaaatatatagtatatattaatgtgtatataatttatatatattgtatacagtgatatatat

SEQ ID NO: 131606 - DNA, 738 bp, Cannabis sativa
gctctgcctacccacctaactgtttctcattctcccgcgactcttttggcggcgcagcctaatttttatcaggcaacgacgacaccgccgccgtatcatcaggcttcgaattctgacgctttacgtgactatttgcaatactctcagctactccaaagctcaggagactttcatggtcagcaattacagcaacaacaacagcagcttaatcagccatcaagcttgcttgaacagatgatgatatacaattctcaattgggttctcatcttcaatctccgccattaatgattccttcttcatcttcttcacctgtgttcccttcatcttcttcttcttcttcctcctctgtttcacatcctctgtttttctccggccaagtacaacagccgcatgggtatttccaatcggctccggagaatcaaaatccggcgagtggctccagttttccgggaccgccgtggcctaatcctcccggctacaacaatccacgtccttcttaaaatcatttcctcattttttttaatattttttattttcaaaaagagcaaattacgaaaatacccttttgtttagtttctttctcatgtaatttttttttttcttaggaaaacattttgttttaaatcttttttcattattgtaaaggacaaagaaatattacgaaaggggacagagatataaagttaaaggaggaaaaaacaaaggactataattattaggagttttttttttttttt

SEQ ID NO: 131607 - DNA, 625 bp, Cannabis sativa
ataaaactgacttatctttccaatgatgtttcactctttgcacaagaagcgacaatcactttcaatgcaatccaaagggaacctgacagccatacaccagcgaagggcccaaagcaaagcttttgcttcagccaataagggggacagaataccatcaaaaggagaggacatagcagccacaatatcgcccttactattggtaactgctgctccaattccaaccttatgcatttgatcattcaaggcagcatcaacatttaatttaaaataacctgatttgggagttactagagtagaactgccatggctgcaatttgaaaaccctttgggaagagtgtgagcatgaaaatcctaggcatcatcataatcttgtagaagacctgaaacctgaaaatcagccgaggaaaaggaaatcttgcttttgttaaacaggctgatattacgacagttccaaatttcccaaataattccgaggaagaatctgagatcatttttagacaagtcttgaaaacctcttaaaaaaaactcacaaatatcacaattcctattaagcaaatataagcctttaaatctagagtctttccactctcttgaagctctggaacactctaatagagcatgggta

SEQ ID NO: 131608 - DNA, 647 bp, Cannabis sativa
aataatttaatattaaaaagaaactaatctaaaataaccgcacttttacggattaaattggattagatttgagctattatgcagattaaattggatgaacaatcctaaaattaagagcatgtatattccgaacattttttatgagtgataccgttactaaaaaaataactataaatattcattttataaatattatactattatattatactattatattatacttaatttaactatttaattaaaaacatatatgtctcatcctttatatcaaaaatatttacttcaagcttttttttttttttcctattttttagctctcaactaatagaataatcccaattcatataatagtacatataatgtaaaaatgatttttttttggtaggttccactttattgaaagatggaagacaccaaaacataatggaagatagatatcttccaaacaataaatttttttgtctatcctaaagacaagatgctatggaaaaactaaacaataatgctaatttaaaatctgtaattgtaaaagtattcatcttgctttcttcatcacaccaaaagaataggtcacataaactattaaataaattggtacgtaacaaacttttaagaaagatgcgtgttgagattaaactcactta

SEQ ID NO: 131609 - DNA, 1136 bp, Cannabis sativa
  modified_base (30)..(32): a, c, t, g, unknown or other
tttagcgttttagaaagttcatatttaggnnnttaaacaacatacttgtgagttgatctaaaatcctggtaaaataaatatccaacatttttatagcacgtttttctattgtcactatttaataaggggtgtacatttgtgctacattttgttcaagccaatataaaaatcaggttataaaaatctaagtgtaacccgcctcattaaaaaaaaaataatagcccgccaataaaattagtcagtttggttgggttaacccgtccaaacaaagcactaatatatattttttttaatttttacattcaattgttatattttagttaattttaataatataaatatatataaaaaaaatcctcttaatcagattggtcgagttagttcgggttgattgggcatgttggtattattttaacccgtccaatatatagattgagcgggttatattttcgtcggggttttcagtttgcattttttgttaggttatctcaatttagtttgggcgggttattcaggttggccagtttacaaaaatttatgtacaactctaatatgttatgtgtaacacgtgttgtttcgagttgtaagtttcccatgattagttttaataaataattattttttattatgtatacttgatttaatttgatttatatggctgaatgattctaagtttttaattaataaatatgtttaaattatatttttatttgataattatttataattatcaaataaaaattgatatttaaattattaaatgagataaataataaaattagaaaaaagacaatttatttcatttaaactaaattgaaataaagtggaaaaaattaaattcatgggtcgttcctatagggttcgtccatggcttggattttaggtgttgcatttgatttctcccaaaatacgtgaacgcggaaaaggacgacacgtggatatgtaagaaccatcacttatgaaaatcaatttagtcttagatgaagaaggaacatcccagagaaggtgcctcccggaggagggcataagaagtatctttactcttcgggaagccagaggcatgctaaggcagttccgggaggtatagagatctcttgaacagtcacttcgcatttaatgccgcatgggggaagacg

SEQ ID NO: 131610 - DNA, 571 bp, Cannabis sativa
gaaaaattactcatttatttataaggaaaaaacataaatttgtgccaaaatacctctcaattttgggtttatttatttttattttcgtaaaaacaaactaattatatagatgaaagtaaattaggtctcgtagagtcatcatacacaatggtatctagtatagcggaagtcttaatcccatcaattacattttgattaaaagcccacttaactaaattgtgagcaacaaaattaaaatatctagaaactttcaaaaaattacattccacaaaagagttcataagactcctaaaataagctacacaattattaattttccaccttaagtttaactccttgacaactttaataagtatgtaagaattacattccacgataacaaattgcaagtctttctctagtgcaagttccaacgccaacatacaagatacgacttccccactaagaccttctccaataggtgtatattttgggttaaatttggtccaaaatataccatgaagctatatttaacccaatttttgtatttgtgttttaatgcacaagatgcaaattaactataaaagtcaat

SEQ ID NO: 131611 - DNA, 1075 bp, Cannabis sativa
  modified_base (44)..(53): a, c, t, g, unknown or other
gttgattagcaacgagctacacaacatgtttaaaaatcacgtannnnnnnnnngttagttagggtgttacaatctagatcttggtgaaacatattccaacaagtttgcaagatactctagtaaaaatgactaatactagtgcagtataacaaattgtgctggtaaaaataacattttttgtaatagatttttttttgaaaaccaaaaaaacttaaataatgaacgatatacaattaattattaataatttgcaataatatatttaaaatatattgtaaattagttaactatgttaaacacagagaataaaaaataaaaatatttattaagatattattgtcgacctaataaactattaggtgcaacaatattttttatttttattttatatatataattttaaaagagaggtgcaccaaaaatctaataagcatactaacaacttcacttgctttatatttttttattttgtgttttgctattttttataaaagttttttaaaaatatgtattgggaaaaagttaatatttctattaaagaaagggaatttatattgtacactgacttttttaattttattacgtttttattgtgccacagaataatttacaattttactgcttttttaatattgtgcatcgattttcttttaaaacttttattttgccaattttattgttacgtgtctcttaagggagattgttattcatttttattgtataaaaaaatgtaaaagtgattgaatttatgggtaatatcacatctgtgacatgttattattttttttaaatgtcacatctgtgataggtttattatttttaatttttttttaaatgatgataaaagttgagacccataaaaattgataatagtgtagggttccctcttctctcacatcattgtcacctttttcccttttctttttgggattatttcacaaatacacaaaaataataaaaaagttacaaaaatactgtttttacggaattttaaatatttttacgatttttttaattttatttagagaagaaacgatctttttatgttgtactcttattaatttgttgttgattt

SEQ ID NO: 131612 - DNA, 1075 bp, Cannabis sativa
ggcaattatctttggtgaggcacatatcacctttacagaggaggacgccaagcacgtgcacattccccacaatgacccattggttatcgaagtctagatcataaacaaaagagtgttgggagttttggtggaaaatgatagtttcatcaacatactgttaattaagtttgcttttcaagtgattaggttacctaaagctaatttgattccatgcctaatacaattgcaacactttagtggagattccctacttctaatgggcaaaatccaacttccagtcactctaaatggaggtgtagccagaagttcaaatgcctctgcattcaaacattgtacgttcgtggtagtagactctgcgactgcctacaatgctatcctatggcgccccatcctagttgatttcaaagcaattacttccatcaagcacttgtgcatgaaaatctcgtgtgacaacgagagtatagagtagttagaggtcatcaaaaaagcctcataaagtgttacaatgtctttgcccaataaatattcatggtcagagaagaagtcaaagatgctcccagaacgaccatcgagccaaaaaaagagacagcctgggaggaagttaaacatgagttggatccccaagttggggtagaaagaatgattgaaccattggaagatgttgcagaagtcaacatcattgagacagaccccactaaagtcatcaaagtgggaagaaatttatcttcgatggtgaaagagaaaattgtgtccacagtaaagaaaaaccaagacatattggcgtggagacatgcgaatatgatagggatcaatccgaacaccatttgtatgccctaaacattaacaaaaatgcaatgccaattcaccaaaaatgaaggccactagatcgagtaagggaaaaagtaaagaaggtggatgttggaaagttaacttccattgagttttactgagaagcattatactctatgttgttggaaaattttgtgctagtcccgaatgttgggttttatgccctaaataaaactccatttcaatataatctattttcttcaacatcaataaagaaacataagta

SEQ ID NO: 131613 - DNA, 681 bp, Cannabis sativa
gggtccggggtttgagtctgggttcgagtttgagtctggattgggggttcgggttcgaggtctgagtctgggctcggggtcatgtctagagtctggggttcgggtctgggtcaggatcggggtctgggtcggggtccgggattcggggtcaaaagtttgggtctggggtccaaggtctgggtctgggtctagggtcagggtatgtgagcaaaaatataaaatataatatgttagcaatttttttttctttttttttgaaaattgaaaattacattttgattgttttctgtttactagttttttgaaactctattttttaaaaatttggccaaacgatccctagtagtttttaaaagctgtttgtttataaaaattgaaaatagattttaagttatgaagtcaaacaacccaaaaatatcatgatgaagaatggtttcatcaattatgatttcgaattgcttgacaaaatatgaggtaatcaaagagggcataaaccttattgtacccaagtcgagtacatagtattagacctttggatataagagctagccatggcttctgccaaaagtcagtacaagaaatgcaacttttatcagcgtacatttgtattggctaaaatctaactttcaccagcacacttacacgctgggaaaagtcatttttgtcagcacttttcatttt

SEQ ID NO: 131614 - DNA, 837 bp, Cannabis sativa
ttttttttttttttttttaaccataacttatttttgaggtattatatgttatttgtttgtactcattttgttgtggaacttgttttatttttaatttttgttttagtatttttggaactgattttttttttatttttttttaattataaccgatttttgagttattgtgttattggattttactcattttgttatggaacaagttctattttaattaatgttgaagacactaattccaatgacgatggaaactctgataactattctgacgacaatgacaacttcgatgacttttttgattattttcttggcatcgatgactcttctggcgaattcccagcgacggtgattgttccagtaactttcgggtgacagtgacttttttaatgacaatgtctgcctaggcgatatttgttattaaaaattctgtcaactttatttatggtttttatgttttgtttcccatattttaaaattaaatttgtttattttttaatttcatatgtttttatattattttttatgctatataaaaataaactttaaattttttttccatatttatgaaaaatctcattttctttgagcactaacaagtaacaacaagtgtgttgttgaggctccgagggagaacaaacgatcaaaatctaaagtttgctgtcaaaaaaggtagaatctgggctaaatttttttacaaaaacttactggatgctcaaagaagttgattatgcaagaattgtttaacgtagattgattatgcccaaacataaattcatctattggcaggtgtgcaaaatgttagaattatttatttgtggactaatataataccataat

SEQ ID NO: 131615 - DNA, 815 bp, Cannabis sativa
aaaaaatgctttgaacactttttcgagaaactaattcaaaatagcctaggttgacaatatgtcaactagggcactgggcccagcaccaggtgtcaacttgggcgctgggtccaatttcaagccacctgaaagtttttcttggtccctaaaaatagttaaatcttaatctttagtaaaaatggagaatatgctatgaataatttttggaaaaaatcctcggaattggtccgagttgaaaaaatgtcaacatgggtgttgggccagtgtcaacctaggcactgatcccttgttctggcacccaggatgggctgcttcttccccaaaagtacttatttccccatttttgatgaagacaaagaagatgcatgagtcaaatttttgatccgatgcttagaagtggcctgggttgatagattgtcaacctgggcgtaggggtgctcgggcaccgggtgtctgggtgctcaaaaatgaaagttctctgaatctgattctaatgccatgttcgtggtatgtctagttcatgttctgatgcaaagttcaacccatttccactaagactattccgaaaacagaaaccctaattgaggttgtcaacctggacgttgggtgaaaccctaggtgtccaggttgatttttgaggtgttgattcgtgtatttttttattcccggggcctggacctgaatgcttcatgtcttcatggtatagaatattgaaagatagtgagttaaaaacaactcggtgggatctaaacacccatttcggagttctcgaagtcaacctgggcacatggctagggacccttcccaggtcaact

SEQ ID NO: 131616 - DNA, 1051 bp, Cannabis sativa
ttgttcatttctctctttctctgtttctttccttctctgtttctttcttgtttttcatgttcattctttgaacaactatggcaaggagattcaattctcctgacacatatatataattatttttcttcttcttcttcttgaagtcaaagttgaacaggtctataaagaaagaaaataactcgtaaatgtaaaaccttggtcatttgttgaatacattccatcctcggcaaagcataagactgaaactcatttcgtcggagccattccctcatcaaattgctcacctgccaacgtagaagctcatcgcctatcgacgatacacatattgacagaatagaagatatgggcatttgttagggttctctttgatttggtctgatttctttgatttgatttgatagaggcgggagattgaaaaaattaaattattttaccgctttatttttctcccatttttgttgggtttgccgctcgttcgaagttgaagggagaagaatttggtggggagtttaattggaccaaaagtccaacaatgttggacgtgtggtccattcttaaaattaaaaaaaaaaataaaaatatataaatagaaaccttcaactataacgtccattatcatttttctagtctaacattcttggacatgataatattttttttaagtccaactatgttggactataaaactccccaaaatatttttcgtgtccaacactatttttgttggactttataaagggacatgaaaagagtattttgtagtagtgaatctaagtatacatcccaaatcagagaacataatatacattatttatacaatgtacacacattcagtatacaaaattatgcacaatatacactaatttatgcaaacacacatataaacataaatccttatagacaacacaccttattgtatactatatacacacaaaatgcaaaataatcgaatactttaaaccaaaacacaaaaacttaaactagtaaaccacaaaccaaataataactattatgtatatattttaacaataatacattacaacaactacat

SEQ ID NO: 131617 - DNA, 544 bp, Cannabis sativa
gtcatggtaataatttattttcatgaaatatgaattgaaaacgatatttggttattggatggtttatgtgtgtttaacgattgattgtgatattacgaaattttctataataaaataattcaattttttatctagaattattttgtttgaaaagttagtaaaaaattaacaaaaattatccttataaggaaattaatttggattaaaattgaaaatgatataattttttgatgtattaaaaatttggctagggtgaaaccctaagcaagcgcggaaaagggcattttcttttgccattttttaatatttttcatgttttaaatttttttaatgaaataaaattcaaattttggtagattttcatgtagaaacttattttttaaatataaatctaattatcaaattaaaattaatttttattaattgaattgattttagatattaggagactttaaatttaaaaaattgatttttctacaaactttctattatggttattttaaaatttgattatttattgattttacttattgtttaaattata

SEQ ID NO: 131618 - DNA, 697 bp, Cannabis sativa
tccaaattttgaactgaattagcaggaaggggaatcttctcaagagcttgggctgcagtagcaatctttagattttgagttactgtaatagctgttggaaaagacttagcagtgattcttgaattacttatttgctcagttcgacattggtcaatgcgatgaccataacccccacactttgaacatttggtaggtaaccattcataatgaatgagaacggaatcaagaagtctccattcattttcaaagttaattgctaaggaaaaatcttccttaatttccatgtcaaccaaaactcgagcaaactttacttgtaatctctctttggtagtgttgtctatcataattggggtttcgtgctttagaaaattggttccccaatattacagacctagaccaagcaatttaatctaaataggggctattttaattattttatggtgtcaaaattaggaatccatagtcggattataactggcttattatcaaactagtatacatcccgtgcttcgcggtggatatataaaatattttaaattatatataaaaaaaataaattgtgtattttaataaataataattatttagtaaagttatattaaaattttaactgtactattaaaaaatttgtgacataaatacttaaaataataaatttattgctaataaataccagaattcgaaaaatagtagcata

SEQ ID NO: 131619 - DNA, 521 bp, Cannabis sativa
  modified_base (27)..(29): a, c, t, g, unknown or other
actaatcagattgtaaagagttttatnnngggcataaaacccaacagacatatgagagtctcattaattatactacattttgaattattatttaggacttccaaataggctgcaatcacattagggccaaccaggtcctaatttttttttgaaagaaaaggcctgggagaccatctttgccagaagcttttaatgggttaatttgaaacaaagccatttttaagtcctcagccgtgaaaggctccaaaaggaatctgttttcagcaaggcttacatggtttgggacacaacgataaagtatggccttgatgttaaatccccggttgcattttcaataaagatggaaaaaatactatatagcaatagcaaagatatcctcacctttggtgcaccattgaagcttctcataaaagcccaaaaatagtgttttttttttcaacatattgaacttcaacatagatttattaaacttaccgtaatatctattcaagttaatatcgcctagttaatcctagatcaaa

SEQ ID NO: 131620 - DNA, 1492 bp, Cannabis sativa
acgtgaattaaatgaaacatgatccattccccacgtttcatgaagcgaatataatttgaatttaaatataaataactgtcaacctatattcctatcaataggggaaaatcccacaaaaaaaaggggaggaagatcttttaagggaacaatagaaatacaatatattatatattgcattgaagactcagaaaatatctggaataagatagactcgtggagtgtgcagatttaattacaaaaccacgtaaaaaatatctagtgttcttattatatttttatttatttcttattatttctgtgataaatttattacaaaaagggcttattattgtttaaccaaaatttgcgttaacattttggtgctatcattgagagcctacgtgataaaacttagaaaaatccctccttacaaacaaaatctatccatggctgatcataatcaaaacgatggaagtcaccttgaggaaaccacacatcgtcttgggaaagaacaaatggtttctcaaagaccctatacttcttgaacaacacgttcaagaagatactatggtggaaataatcaaaacgtagaaggaaggaataaagaaatcaatactactacaagatatgtacccaaaagtgaggatgtttatgatcccactaggtacgtaccaatagtggaattggaaaattgacaactctggcaacgcttagccaaatctaaccaacgaaaggttgagttggaaagagaggctgcagcggcaagggtgactcgaggaactaatacatagaatcaacgtgatcttggagtaagaaggccacgaggcagacctcgaggttgaaggaccaggaggcaagaaacaaatcaagaaaatccccaaaacacccaggaggagcaacctgggggaactagggatgttccaatggatgaacaacaaaataaccaagaacatcattgagaagtacctcaaggatcccaaggatttacgaattaggggaatgagcgtaatgaagtgttagaggcttctcgtaggaataagaacatgaggcaaccccaaagtagggaacaggaaaacccttgtaataacgagagaaatcctgggactcaacctagaacaagtgggttttcactgagacacccccaacgtccttctcaatcggagagggaagggcatacacatacctaaatagagggtgtgtatttaacctttttcgaaggagaaggcctatgcaagatgaggcaagttctagctcaagacactcgaggtctcgagggcaaagtcattcaagaaggcaaatgcgagaaggaagcagacctcggcgttatgctaatcaagaaagcatgagcaatacgagaaattatccatctgagagacactcagatacgaaatttatgaccaattatgaacaaagacagcctaatcttagtgagcatttgaatcgaagacaacccgatcttcatgagcgattaaatcaaaatgcacctaacttacgccatcaacttaatgctaat

SEQ ID NO: 131621 - DNA, 1473 bp, Cannabis sativa
gcgtgtcactatatcataacttaatttttttataaaaaaagtacaactctaattaataaataaataaaaaacaaaaaaaaaataataattgtaaattctcacgccacctctttctctttctttctttcttttttatttattttttttgacagcacgctttttgaacagcacacatttcctaaacaattaaaatctaatataaaaaaataaataataaaatataaaataaattattccaaaccctacacaacttaatacacgacaacctctctcaaaatatctaaacttttcaaacttcttctcctctctcacagtcacagccgcacaaagttagggtttcacatatcttcttcttcctttctccttcacgagttgggttctaggatttttatgggttcaagttttctgctctcttctctttccaacaaccacaaacacatttttcttcatcttttctcagccacggcgacgtcagatgacaggcgagatccaccaacggaggacgacagtcttcctcgtttgtctatgtgtgtagtcattttaaatctaaccttctatattaatttttttttattgtctctactttttctctctttctctctctcttctttgtgcaggtgtgcagcgacggtttggggttagtgacggaaggtggtggtatggggtttgtggccgacgatggtggtctggggtttgtggccgatgatggagggtggggagttatgggcgatagtgggcgatttcatatactggatctgatttgtttttttttaacttttaggtttctttttttaatttgttcctaagtgtgtttatacccatttccattccattgtttgtatttgttaattaatgtgaatatttttagtttcaaagtaaagttttgtatgttgtctcttgagtaattgatttatggaaatcattcttgtacaaatattgtatttcatatttttgtttatgttaatgtatttttaaattgtatcattaattaaattattattttaaatttataatatataatatgaattaaaaaaaataatatttttatataaataataaataatatttataccttaaaaaaataatatttataaaaataatatggattattattaaattattattttttatataattaaaaaatagatatagtgacactttttgagagtagctgttacttttatagtctgacaatgtttgactctaaaatcttatagtgacgcgcttggagtgaagctaaaagggtttagtgacctaccctgaagggtcactaaatactgcttttccagtcaccctcattagtgacgcgcggtgaagtgtcactaaatggttttagagtcattcaatacgagtcactgaaactagtttttgtagtagtgtaacacttaagaataaatatccattacctaggatcgataatctttttgatgaactttaggggaagacggtattctcaaagattgatctccgatc

SEQ ID NO: 131622 - DNA, 691 bp, Cannabis sativa
gagatgactcactgtcgatgggtagtgcagataaacccgccagatcttctatataggggcgaaatcactagttgttagagaacctggtttgatgatttcaactcatagactcatgttaaagaaaaaactctaagagaggaaaaggaaaaaaaaataaatattggactaaaccctcgctaagtacaacgcctcatacttaggaggagcttagcctttaaaagaataccacaactggggcagcgtcccactcctagaggtttctctttaatcaattaaacaatccccactagatgtaacgtcttgctttcacagagctttctgtaattaatgattcttttcttttttatttttgtgatccgaggaggaacacttacaatagcactttagatttataaatttggtcgttgtattcttgtgagaccttaagcattcatatataactgtgctttaactcttgcgtgcaaataatctgtatgtgcgattgttgaacttaatgaacttaccagccctcgcactagcacttcaatattaagaaactcgattactagggataacgtcatttcattaaactatcaaaatactaacttaggtgtgcaaaatgccacaacaatccttggcactttttgtgtgtcactatatctctaaaaatattaataaaaaagaaaaaaaaaaggatatagtgacactttat

SEQ ID NO: 131623 - DNA, 1771 bp, Cannabis sativa
  modified_base (34)..(67): a, c, t, g, unknown or other
tttactaaactttatgtgtttatttcattgtttnnnnnnnnnnnnnnnnnnnnnnnnnnnnnnnnnntgttagtaaatctagatcctcataaaatatatccaacaaaaagatcacattttaccatgttgcaaactagatttgatgaattgagaatgttagatactgaaacaactttgtctgactgaattttatgaaaggttatctgatatttctaatgagttctttgccttaggtgaaaaatagatgaatatgtcttgattcagaaaattattcgtgttcttcttggcaggtttgacacaaaattgctagtaatgggagaggcaaaagatttttgcagaatgaaggttgaagaactcatgggctctttaagaacatttgagttaaataaatagatcaagaaaaaggttaagccaaactctttcgttgagaaaagtaaaggtattgcctttaacgtttttgaaaaatatgtttctgacaatgagaatgatgataaaatggctttgttaacaagaaattttcaaaagtacatgaaaaatgttagaaataaaatgaatttctcaaaaaatctaaaaggtaactatgcagctaaatcttttgttcccaataatcaaaagggtattcaatgcagggaacgcaaagggtatggtcatattcaatctgaatgtgccaataccttgaacaataataaaaagggttttaatgttacttggagtgatgatgattttgaaaatagtgaaaataaaaatgttgctttaacaagtgttttaccaagttttttattggaaaaaagaagttttgtttttaaacactttgactgatgacaatgataaagaagttatttcagattcagatgagtcagaacttgatgaagaatcattggtagaatcttacaatgtaatgtttggtaagtggttgtaaatttgtgatgaaaatcgttctttcgttaaatttaacaaagagttatctcacaacatcaaaggtctggaagagaaaaataaattttgtgaatttgaattgatttcaaaaaattctaaatttgtatctttaactaaggaacttgaaaaattgaaaaaaaatgttaaagtgttaaatctaagttctaacatttttaaagaggttcgaaattcaggacaaacgagtcatggtggtttgggatttattaaggctcaatctaaattaaacactaaatttctgaaatctaaaattttggtttctagatgttctgacattactttggaggattctaattctacaacaaaatgtaatgctgttacaaaaaagaagcagtttggtaagtttggaaatcccaaaggaaataggtatcggttcattcctatatgccatttttgtggaataaaaggtcacattcgacctagatatattaaaatgcaaaatatgtttaattttaaatattttagaaataaatctgtttctcaaaaataaaaatgggttgtcaaaaataaatgtttgattattttttcttgttttaaatctattgcttctcaaatgtggtattttgacagtggttgttctaggcatatgacatgtgaaaaagactatcttgacaacattagaccaatgcaatgtgaagaaattacttttggtaatggtctagctggaaaagtcatagggatgggaactcttaattttgaaggtctacccaggcttaaaaacgtaatgttggttgaatgactaagtgctaatctccttagcattagtcaaatttatgatcagggttggaatatgttttaccaggagctagatttacta

SEQ ID NO: 131624 - DNA, 1412 bp, Cannabis sativa
ataagtaaatcttattatattgaattgggttttatttagggtacaaaacccaacaggctcaacaattgaacttttaatttctgagtatgtttgctgctattgttgcttggaaattgttgttggatgtcattactggtattcgagaaagtttggctgagattttgaaaaatttgagcgagattcaaagttttaaaggtttgctactatgaaccggttaaccggttctattggtattgtagaactggttaaccgtttcactgggcaagaccttaggaaccagctatccatttgggaaatatgatttgccagtttgggtagtttttagagccctagttttgatttttcctcaatatttagggtatttccatgccataatgaagataacgcgatatgcattactcaactaaagctataatgagcaagagagagctaaaaatattttcaccaaattctacttaactcttgatcttaaggaaaatggctatattagtatccaacatattcaattaagtgtcaatcttgcagacttattcacaaagttactatgagcatcaatatttaagaaggtcacatacaagattggaattcatcgtttagaagatttccacgaatgcctaaatgagggggagttaatttacactacagtctttttcttttgaccaggttttttagcaaggtttataatgagatagtttttatggacatccaagaaggagtgttatgaaatattatttatggatgtccaaatcaccaaattaattaccagcattaatgtttggttgtattttcctttattacattgatttagtttcctattcttttagtcatatttttgtataaataggggttcaccccattagaataaacaactgagaaagtctcattcactttttgtttctcttgtcatcatcttcttcttttcttcttatctactttaaattattctatattattttataatattattagtgatgatcaactattttctaaaattgctggcaaggcatatgtaaaaccccataaatatttttttttatgagatatagaactcaatatttttatgaatttgatttgtaaaaaattatacattcacatgatctaattatcactataaaatggtatagtaataaaacaaatgaatattaagagatccaaccaattaaaagtacttacatgtatatatatatatatacttagataatgtagccgcccttcgtgcagtataaaatcaatgtggtatataatttatgttaatttattaattatattacaattttaaaaattaactttttacattttaatttatgtcttgttaattctttttaagaatttttaagaaagctcaattgacaaactcgatcacaatttttttttatttagtatttttttttgattaaaagacagaaaaataa

SEQ ID NO: 131625 - DNA, 823 bp, Cannabis sativa
ccatctagaaccatccattttgagtaagttagacatagtggcctctctattagagatggccataggatttgaactagtcatggttcccctaacataggaacattccttccattaccaagacaccaacacacacttttcgacacatactcttgagatttccaaatgctacgccacacaaaatttatattagatccaagctgagccgaaaaaaagttaccatttggaaaatatctagttttgaacactctagaggctaaagaatccaaccttgttagaagacgccatccttgctaatcaagaaaggcaagattaaagtcctgtaggtttcgaaaacccataccatcgatcccctctcttatgcttacacaatttatcccaagacatctaataaaatatgcatcaaaatattacctagagtataaaataagattattattatttaagtattatgaataggttgttaatagagtattttttttattattcttcaaatatgcatccaaatattacagagtgtataaaataacataattattttttgaaaaataatagatcctagttcacataagtataagaaattgtaaaaactattttatcactttatgtaattgatgactaagtgctttagccattaaataagttacacaaacattttttttaactgttgcagtaaaaaaaatatatttttttttcattattattgttgttgttgtatcaatttttcttaaaaaaaacgtgttgtaacattggttttttaaaataattttatcattacatgataaaaatgaataaaattgtataagtatacctctctctctctctc

SEQ ID NO: 131626 - DNA, 1814 bp, Cannabis sativa
  modified_base (843)..(850): a, c, t, g, unknown or other
tatatctcatgttatttcaagtaggcaaatattagatagaagaaattatatggtatacccattttattttacttgttgtaatttttacatttatttttatatcttttaagatatacctactttagataatgtccccattagaccctttagattaatgtaaattatatgctaaacttaagtagagagtgagagtgtattggacaatccactcaaaaaagtgtgtatatattaataaaatataatatgagagtatttttgattaatagatacaaaaaaaaatggtatttttcaatttatccccaatatgtaatagggatgggatgggatgggatccaaagagtaaataattatagggataattaaaggtattactttttataaaaaaatatatatatttttacatttaaataattttttttttatatttttaaattttctatagaaaaacatgaaaactacataacatgaaaataatatcaaaacaacaacaaaagataatacacaaataacaaaaaatcaacaacaaattatacaacataaaaaaattgtattttctttaaataaaattaaaaaaaaaattgtaaaaatgtttaaattctctaaaactgtatttttgtaattattttattatttttgtgtatttgtgaaataatctcattcttcatatatttttattttcttattcatcgcaagattttaagtcttatttcatttattttttatttgtattttattgttttggacttttgctcctatatctaaagtcgtatttttttttaataatgattaaattttattaaactaaatcatccaaaactaaagatgcaactaccataggtaaannnnnnnnactaaaaatacggtcagcctcaaaaagagaagatcgtgccaagtcatattttagtttgttatttatgtaaactaaataaaaatggatagagatgattgtgtagaagtattaaaacggatgagaattccattttcaattgagtcctagcttcaagcaaatagttctcaaattaagtggaactgcaaacataatggtaatgatgaactttaatagttctcctataagagtgtactgtaatatattattggaaaagaaataatagtttttttagtgtgttaaacttaaattctagttgtgctacttattgttgtgtgtagggttttttttttttttttgcatttaaatttttaataaaatattaaataatttttaacattaaaaataaaataattgatccaaaatgatcgatccaatctgcattattacggattggattggattgaatttcaattgttatgcggattgaattagatataaaatttaaaatccgcacttagtacgaattaaatattgtttgaccaaaaaaatacagattagatcggataaacaacccaatctttatcatctttatgtttgttgattgtgaaaagtttgtattgattgatcttatacatgcattcatcaatcaagtagaatcatgtagctgcagccaatagatggatgccatgtggtgcacgtgtggagagttgaagggaagaagaggaagcggttgaccaatcagaattcgccaagtgtcgcatgtgctggagaagaaacaagcaccaagcgggtgctgactcatatgctggaacgaatccaggtgcgacatctggagctgactagatggaaaaggcccacggtctgggctggaagagtagacattgggctgggcctttgggcaaatttttgggggtaagttgaaaaatgcctcttttattcatcaattaatcaaatttacctttaattttatatttatttgaaacat

SEQ ID NO: 131627 - DNA, 1279 bp, Cannabis sativa
aacattgggtacttatgccgctaataataaacattgggtttatgccgctaacaaacttaaaactttgggtacttatgccgctgtttaccctaattattatgcaatgtaattattaaagtaataatgtaaagaccgcatatgattaatactttgaattattaaataattagggtttactcatgagatttaaataatatttataatatgcatattgtgaagatttatttgagtttgatataattaatgatgctatttcgtatgaattccttgttcctctgttgtgtgtttggaagtagtgaaaagcggcgttgcggcctttagagagtcgcattttatatgttttaaaaattattatcggggtaccattgttaggttttggttatcgaggattttgtcagaagtttagtgtgaccattttgcccttgttgtgcatggttactttcgttttatgttaagggtatactagtcttttactttggggaattttgtcattatgtggggatattagttgttgtaggttatgtttatattaatagaaataagagggtttgtatttttgaagaaaaacctagaaaattacttctctctctccctctttctcttgaattagtaagaattggtgtgttatttcaaggtatggaaccctagtctcttccttttttgttttctttttagtaaggaggggttttgacttttgattgtaggaattttgatgttgtggtaacaattggtgtttgaattagattctggaatttatctatggttgtttagggttgatttaggttgtctttgtggattatagtggagttttggcaaggtttgagtttgagaactcaaaccttgacctctaatggtgtctttggattttgagttaattgttgagttcttttggttggtttgggtctatttgagtgtttacaggtatactggacagttttgcaaagtttggcttggttttgaagtcatgaggtcgattttcgggttcccagcacataactggaattccggttctgggggacctgtagcaaccggtcgaccagttggtccccaggaactggacttccagttgggaaccggtctgccggttgggtttttttccagaaccctagttttctccatttttgtgttgtttagggtgttagcatactatttatcaatagggttatctttattttcaatttgaaatccccgataagtattttagtgtgtctcttatcgagttttgaacgttatggtttagggccctgtaaagcgccgagctgcactcccactcaggctg

SEQ ID NO: 131628 - DNA, 849 bp, Cannabis sativa
aatgcgaggtgactgttcagataagatttgatacctcccggaggtgctttgttatagtcttgccctccgggagtatgtgaatcctccataccttctccgggggcatgtttcttgttgatccttttgattaagaagacttagtcgaattatctcaaagtcttactccttaaatccacgtgtcacagccgcgttggtctacgtattttggacaaaattaagagcaacacttgggtttttaaaaatactgtaaaaatatataaaaaatttacaaaaattaatgtttattgcaattatctcttaaatataattgtataacataaagtattttttttaatattgtaataaaaatttaaatttattgcacatatttaaaaaaaataatctattatcactgtttttaccctaccacttatttaaaaaaaaaaaattctttctatttttttaaaccataaaatagaaaagtatttatatttattaaaaaataactattatgatgtcattatctaatagtgttactaatttttttttttttattttctaaaaaaaaaaaaaaaaaaatatatgatatttctaagattatgaaaaagaattataaaattaaaaatattcatttaaactaaaatggtatattgacgataaaatcacactaattttacattttttaacatttaatcacaaaaatcaaaatttgataaacctactaaactgaggttctattttgcatcctatactgcactactcaaatatacacaagtgtaaagaacaatttttagtaatccacttaaatttaattagtataatattataaaaaaaataatttaaagattataaaataaaaaaatttatttt

SEQ ID NO: 131629 - DNA, 502 bp, Cannabis sativa
aaaaattaattagtaaaattataaaattattcttttgaaaataaaaagttattatatttttaagggtaattattatattttgcaaatcgtattttgtctttttccataattcttcgatttaatttttaaagtttggagggagagattcttccttcatcttcatctctccttctcctcttgccaaacaagtaatttagcctcttcttttatcattctccttccacttatctctccttcctatcaaacatagtattagtgcgggtctaatggtgacaacccttttcccaatttttttgaaaattttaaaattatatgtgaaaaattattaacaaaatatataaaaattattttttatatatattttgacaggtgttggccccgttaaatgttgggcttgttccaccccatctaagacaaaggtgtctaaaatttatcaatgataggacttagggccagtttggcacagctgtgctgtggggaaaagcagctgtagctgtgctgt

SEQ ID NO: 131630 - DNA, 1018 bp, Cannabis sativa
  modified_base (977)..(979): a, c, t, g, unknown or other
tcgatcatagtttagttaaataatctcatgcagtagaataattcttttatcattgtttttaattttgtaaatatattttgtttttttaaaaaaaaaaatagaagaattattacaaaatcactacaattttttttacttttagtcacaataaaattggtaattaaaagtaaaaaaaattgtgacgaattacaaactattattcatatgttgtgactaaaaggtctatggctaaagatattagtcataaaaattacaatttgttatctaaatatatttttagccacaatacttgttgtggctaaaactaaattagtaacaacttgtaactaaatactacattttaatcacatgtaatattttattgtgactaaaagtcatatttaattacaaaaaaaatatattgtgactagaaaattatcactaaaagtaacaacttttgtagtaaatttattgatagatttttatcaaaatcttatttattacaattataaacacgtatttgtaattaattctattaaggaaaaagaatatttgagtgttaagtgcttgttatcttagcattatatgatgtatcaggtttcattttaaaatcaattcacaatgagagaagtagtccatgcatcttatatatgttatcattttttttgagccaaaaaattaaaattttattaaatcaaatcagctaccaagatagcttccaacccagcagggacaaaacccccgcgagaaacacagccaggaatagaaccagaagaacgagctaaaaagttagtcgccagattcccggaccgtttaacaaaactaattgaaataggaaataaaagagaggatttcataagagcaacacaatccgaaatcaaaagtcccaccggaaacaacaaccgcttcttctgttgcacggcttgcaccagcaggagcgagtctgactccacaaccacaccagcagacacacccccctcaacccaccttcccttcannnaactgagcgcctccttcaacgccatagcttcagccaaaa

SEQ ID NO: 131631 - DNA, 624 bp, Cannabis sativa
aatttttaattgtattacttttaaataataaaataaaaaaattagcataaaatttagtatacgtgcgtcgcacgtaattttttactagtatatatataattgagagagagtgtgtaagagaagaaatggggcgactgagggaattaggttaaattaggatatatataagtatggttttttttaaatgggtcgaagctcaattttgggattttttgtaagtaatttactgtaagttcataaaccaacgcaaaaacccttcaactgaaatgttgcgtttgagcaaaaccgactcaaattcaagcccacattttttttaaaaaaaatattcatctttagcgcaatttttgttttagtgtcagagtattactcaatgcaaattagttattattggcattggtgaaaaatcaaagaaaaaaagtgagggttggtttttgtgtcggttagccagtttgactgaatagttgaccgacgcaaaaatctcttttttgtagtagtgttgaaacaatagataattcatagcttatctatactaggtgtatagagctatgtaatcaggagtacaattctgaatctatagtgatgttaggagaaattaataagttaggaaatttactcgataaattt

SEQ ID NO: 131632 - DNA, 673 bp, Cannabis sativa
ttgaagactgaatgattttcctataggctagatttttggcagtaggaagggttgagtttgtggcatgaaaagcaaaatgtttcaccttggcagggagattaagatgccacagatttttccaccaaggcgaaggggaggaagaagagggaatatcaggaggggaagtagaagaaaggctaagatgataacctgatctgactgagaagactccagattttgaagattcccaaatctgatcatcaagagaaggggtgagaggaaggggaatggaaagaatttgctcaaccacatgaggcggatagcatctctgtaagttagctaagtcccaagtcatagaattagtgataaacgattcaactttgtcagggatggggaaaggggagtaacctgatggatacccaggatccaatgatcatgggtcgtggatgtgttctgcccgttacctatttttgaaataattcccttgtgcaataactcttttccccagcaaatgctacgccaaacgaaggatggtgagtgtcctagtgagctattgagaaaagatgagtgagggtaggacctagcagacaaaattttagacaccgttgagtttggttgtttcaagatgcgccaggcttgcttggcaagcaaagcttgattgaagtggaccaaagaacggaaaccaaacccgcca

SEQ ID NO: 131633 - DNA, 1244 bp, Cannabis sativa
agagagagagagagagaggggggggagaattatttaggttttaattaaaaaaaattatatatattttttatttttttttgtgttttaataataatcgtcgccaattgttttagctactattcaaattactcatttttcccgacagttttaaacagtagctcaatttttttagtgacggtctccgaaaaaattattttcaagaccgtcgcgaattcaaatatttgtagtagtgataccatgatcagttgaatgaatgactcaggaaagttcaatccatgtaacatttcttcaataaagtcccacttcactgtatcataaactttctgcaaatctaacttgattctgcaggtagcttttgtcatcttccttccataatagcgcacaagatcttggtaaatcattatgttgtgcgctatgaagcgaccttgaacaaaccctccttagttttaggctaccaagttaggaagtagacacttaagtcttaagcaaattagtttagtgactactttgtatattacatagcagcacgctatcggtctgtagtccttcacagtgtttgggcatttaagtttaggtccaagagtaagaataatgttattaatttctttcaatacgcagtctgtcttaaggaaagaaataatggcatctgctatctcttccccaatgattttccattttttttgaaaaaaaaaaaaatagctcccaaatttatctcgaccaggggcttttatacctgggattactgaaatcgcctacttaacatcatctctagtaggggtgtacatcggtcaggttatagtgtatttttaccaacccgatataaatatcgagttgcaaatatttaattggaacccgtccaatgaaaaaataaaaaaaaaattaaaaaaaaagtgtaattaccctcccaattattttgtcgtttggtcggattaacccgtttaaaccgatctttattttttattttttttattgttgttagcttttggtgttcaaataattaatttgaaaaaaataaatgtacgtgtatagtatatgcctttcaaaattaaaatagttatagtttaaattaatgttaaaaaataaatatgaattgaataaacattaaagtattaaacaatatttttcaaaaattagaataaaaaaaatatactcatatgtaaattttaaatttcaacttctatattcaaatacaatcaaaattaccaactataaattctaaattttaaaataaacactataaaata

SEQ ID NO: 131634 - DNA, 590 bp, Cannabis sativa
acccatattttataatatatcatatatatatataataactaagactctttttaatcctataaaataaaaatataatattattttaatttaattcaaaataaatatcatctaactaaataatagaattcggttatattcttttattttatatcttttgatttaaatatattatcctataatatatttaattcaaataatcaaaagataattatcattttattttgatttatcttatttaataaaataatcaaaataaactaattgatctcttatatgtcaccctacacgtgtggggctaagccttaagcgtgtgggacatattttaaatcctattttttttttttttttaattttaccataagattaattatttatttaacaataaatataattgattaatttttattaatttcttatttcacattaattaaaataaatatcattttacactaaaataatatttatctctcttcaaatattattcaagaataatattatatttaactagttaatatagttctatcaaataacactaaatagttaaatattatttaaattattcaattcataattgatataattattcaaaa

SEQ ID NO: 131635 - DNA, 730 bp, Cannabis sativa
tctgctacaaatgcgtgtccaagcaatggtgctcgcttatcgaaagtcgtgaattcatcaagaaccaccttaatcgctccatggaaaacaactctaacatcttcgtgatcattaatttcgaagcttcaatatgagtttcgagttatgagacagttatttggaacccatccacgagaaagtataaaaaggtacctatgtctgaacttaataaggttgcttatagtctttgttgtcacattggtctccagcgttttcgatacaatcatgtgaagggcgaacataaatttgtaaggatgatcatacataactttgatgatttatcattactttatgaaatttatctgtatggcctaaacaccaacatttggaagagggttcttgattttccttactaggtggccattgtcgggaagatattcttgtgggaagttctatccattagttggtgtaaacagaacttgacaacacgtaatcttctattattgttgcatttgatataaccattgaaacatacagccaaattctacttgccaacataaatgctaaggacaatgtccatctctcaatagtggaattgggtgggtgactttgtgatgttgcaaaattcagaagacattatgagtggcttgttgaagcagagtatgttgagttccagattatgatggaaccatcacatgtgactaggtctttcaaatatttaaaatctctcaagtatttcaagtgggccaat

SEQ ID NO: 131636 - DNA, 634 bp, Cannabis sativa
gacctcgccctgatcctccacctcttggacttcaatgtccccttcattatcttcctcctcagtagcaggccaggcctgttcagcgctcggcatcgtggcaagccgagccacgtgaggatcagttgaagcaattctccgcattgtctatttagtgcgcgctatcatcctatccctagacggtgtttgattggtgtgtctagcaacggtcacgacaaagttggctataggtataccaacggcagtaggacttggtcggtccacggatatagtatcaactatatttggtcggacgatgtatgtccagctagacggcaaatatcgtctctaccccttcttgagctcccagatgaagtgtccgtaacctgcacccgcaattaagtcgagatagaaatggtgttgcaccttgggttctggggaaggtgtgcattcgctacttacctcctagtcctcaaaactcgaattggaaagaccgtaacttgatgaggacggactagcataaagaggaggttgatccttgtacgaaaattggagaagattctagtcgatacgatgttctcctccccaaaactcaccagggttcatctacaaaaggtaggacactagatgagtatttggccgagatatcgaacaaaaa

SEQ ID NO: 131637 - DNA, 1078 bp, Cannabis sativa
  modified_base (39)..(65): a, c, t, g, unknown or other
tatataaaaatatgatgtataatccaattcaatataatnnnnnnnnnnnnnnnnnnnnnnnnnnnaatacggcgttccaaacgagctcaaaaagataatgaataaataaattgaaatttgaaaagaaaaatgaagaaaataaaagtatttaacattttcaagattatatttgatgaaaattataattaagggatctgttttaattactttaataattagaaagcaattttcactgtttatgagaacagaatagaatctaaaatagtatttagctaaattagagagaactaaaattgtatatccttaaagcataaaatcatttaagtacaaataattttaaaattttaaaatttatattaagagtatttggtaattttattttaaattttatatatattttaattgatctaatttactataacacaaatctatctctatatttattaaagaaaacattttataatacataaatatgaatgtaaattaattttacttaatactattatattatgataaaaaaaataatactaatggtaattttttttttttaaatttatcaattagtgagaatgtttattttttattcaaaataattcatgatttagttttttttttataattattttatagtattagatgcgttgataaaatataaatacatataaatgaaagcaatagtaaatctatttgtattctatcattgtattctattttttttaaaaaaaatctatttgttttttattttttgaaagtttcatgttttcttcctaaaaaatgtgatatgtataaaattgaaaactattatataaatgtaatattattgttgtcttgattttctgtttttgcactaattacatgagacataaaacgattaaaatatgtataggttctcattttacttttatttaacaaatagaaaaagtataaaaagatggaaaaaattattttgatgtgatttaatatatatgtgcatcaaattatatttttatatattgttattaaaaaaaattataattatttgagatataattattttaaatatataatttttaattatttcaaaaccgcgtgaagcgcg

SEQ ID NO: 131638 - DNA, 759 bp, Cannabis sativa
ttataaaattttgattagatattttaaaaataaagttaaaaaattgatgtgagtgctgtcagtacttatttctttagagtactcctcatagctattttcaatagtaatatgcatttttaaatttcttttctacttgtttatcttaaagcattcacaaattcaaaaaagctaccataatatttttttttgtcatgttataattttttttactaagcattacttctattcacaataaaaaaaattacttgttaataaatataatggtattttagatttttaaaaatataaactttataatatgacttatttgttcatctgttctcaagagtctatcatatcacactataataaatatcactaaatatgatgtaacaaattcatgtacaatatgagttttttgtaattaaattaggtgagatataatatttaattacaccaataacaatcataattttatgtagtattagacaccactgatatttgtatttacttattttatttatacgtattgttatattcagtgctcaataatttaaaaaatttccttttatttctctacccacaatttcaattcgctacaaaagattaataacgaaaatctagattgttataatatttagggccagtttggcacagctgtactatggaaaaaagtagttgtaactgtgctatgagaaaaaataactgtaactgtgctgtgagaaaaaacagttgtagcagaactgtggagaaaagctgaactgagtgtttggtaaatta

SEQ ID NO: 131639 - DNA, 1106 bp, Cannabis sativa
  modified_base (1063)..(1070): a, c, t, g, unknown or other
gtcccatataatttaatataataacttttagggagtttcgttagccaatcgcaacgcgacatatttagaaaatggtagcaccactggtgtctaataacaatattttatacatatatataatgaatattaattaatctgtagcagttagcttcaataataataattaattaattatatcattataatgcgcacgtgagacactaaataaacttattaattactattacaacgttgaaatattattactagtaataataattgaattaaggttttttattgaacaaataattcaattaaggtttatttctcttaaaaaaaaatgttacttagaatttttacctcgaactatgacatatgtattattattatgtcactaaatttttaacatgctataaattgttcctgaactatttacaatattgtaaattggtatcaaattttgtcaggtgataaacaaaaggataacatgactattaattagctaattactacatcattatcacatgtataatttaatattaaaaattaaaatatatgtatttttaaatatcattaaacttaaaatcaattaataattgaaaatattatgtaaaacttaattaaaaaaatactacaagaaatgtcacttttgccagcacatttttgtactgataaaagtttggtattgcgttggtaaaataaaatttacttctatgtgttggcaaatcaacgttggtattaagaacttttgccagcacaaaatgaaaagcgctgacaaaaataaatttttccagcgcgtaaatgcactggtaaaagttagatttcagtcactgtaaatgtacgctggtaaaactttgatctttttgccagcgcagtagcaaattgtgctagtaaaagtgacatttcttgtagtgaaaaattttaaattatatatatttttttaaaattaattacacacatgacattgacatgttgacactgacgtagtaaatggttaagcagattgtgtcatcattttgtttgccacttgtgacaaaatttaacaaaattaatgaccaatttactgttggatattattttaccnnnnnnnnagatctactcacaattatgttgattaacaccctaaa

SEQ ID NO: 131640 - DNA, 642 bp, Cannabis sativa
  modified_base (588)..(594): a, c, t, g, unknown or other
agagagggagagagagagagaggcgtgaaaagaaaaagggagagtaggagtgagaaaattaattcctattttctctaccttcagttgcttactttctatttttcaggcttgttaatttatgatataatctatcctatatatagtgttataaataaacccttttaatcatttatttaaaataaaagtaaatatctaatttgattttaattagaatctaaattcaaatataaatatctaacaactaaataacaaatatcagttagatcttttattttgattattatctttttaattaaacaattatccatccaataattcatttaattaataagttaaagataattagcttaatttaatttaaattattttaaccaataaaataattaaactaaattaatcatggacctttacatgtcactctacacgtgtagattaggcctacacgtgcgggccatgttttaaggtctaaaattgatgtctcaattttttcatgcataaaatttattatttattctacgtataaataataatttattaattctcattaatctcttatttcacaaggattaaaataaatattattatttnnnnnnnaatatatttctctctttaatattaattaagaataatattatatttaac

SEQ ID NO: 131641 - DNA, 526 bp, Cannabis sativa
ttgtaaaacacagggtctaaaatggtatttacactactacaatttagcattttagtgacacacataaaaatgcacgtcactaaagagttagaagtaatttctagtgacacgcacaaatattagactctaaacatttagtgttagtctcttgtaatatgtgtcactaaagagtaaaacccaatttttattttttttattttttttatttttactaatttaaaaaatgttggcctagagtgacaacgcgaatgactaaatgtatcccactacacatggtgtgttactataaaataattttattttttttaatgaatatacaactgtaattaataaagaaataaaaaaaataaaaaagaagtattaaatgaaaagcacttttttcctttccaacaaaaaaaaaataaattttttttccttaaaaaaagatttttttttttgaaaaatacactgccataaacgacatgataaaatttccttaaacttccaaaaatcatgaaatcaattccaaatgaatctaaatgcaaaa

SEQ ID NO: 131642 - DNA, 1313 bp, Cannabis sativa
tgtttattttcattgttttaaaaaatttatatttaggatgttaattcaacatacttgttattaaatctagatcatggtaaaatattcccaacaatccatttgtcgtgtctagttcgagttctgaaggttttagaccagctaggcccttgagcatgtctcgtattttatccaactatgcttgcacataaggatttgttgcttccggggcctggttgattagcgttctttgattgagttgcagccttggattggctagagcatggccgaccatacctttggagaaggtatattcaaggtcggccaaccctgagtttgtgcttgtacatgactgggcagggcttggtcgcccacacttctctgcctggctagtggagtttgtgtgttgacatggagtagatcacactaattactagagtttaatggatccaactgtctgaagtgattaatttcacttctcaaattgttgctttgggtgtttccacccgctcccgatccttgtcggttaaaaattgatcttcgggtgactcgctccccttagggagggagtgctcttctgtggccagccacaaggacaactggaggagtctggctggccatggggacctctagaggagtctggctggccatggagactcctattggtagttggccaaccacaagatgtatagaggggctgttgttcagcctgagatccttggtcggcccccatgtcgctggttgccaagatctggctatttttgtcgtttaacttttgaggaaaggtttgtcatccctctggcaagggaagatctgtcctagttcttgagcaactaggttgatcaacatgtcgataaaccctccctgatctatcaacaagtcttccttgaagtggatctctaatgagatcatgtccttttctatcggttctctggttgaactgcctcattagattgatggcctctctgttacagagatctaactctgcctggtgagatcgaaggatgtactattggtcatccatccatctcaagaattcgtatctctactaagcaagcacatctcaataagcatcgcatggttcttcaaggaattcacgtctctgctgagcgaatacgttgcaatcatcagcgcgtatttcttaaattaggccagctcggcagatggcccctttaagtttggctaactcgagatctcctctgaagtccacgtggggctcactaattcgtggtctcgtctctcctacatagtatttggggcaaaacccagttgctgttcttggggggtgccccccaaggattcttacttcagttggaggcgcctgtggagggtcctcc

SEQ ID NO: 131643 - DNA, 819 bp, Cannabis sativa
aatagtgtccatatcatcaagccaactttttttgataaacacccttaacaattttttatttttttttcttcgatgctatttgctaacgtaaatctcatacgtacttgtcccatctcccttcaaaatccttacttcccactgttttgcaaacttgcacattttgccaaaaaaacgtctttatgaattttatacagcagtcatttggcaaatattttgccaaccattagtctataaaacctcacgggctctcattttgtagaagctactcttcttcctctgctcagtcttccatttcctcttcctttttaaatctttccttatatgtttcagctaatagtttaacttgcctgagaaatcaaatcatcgactgttttgtcgccatgaaaaccaaacctacataaacaaaaacaaagaactaggaaataagaaaaccaagttcacaagggagtagtagctaagctcataaggacactaagacgaattaataagttttaatatgattattgaggtagactattcttataatgggggtttttttttttggcttttgggatgtgaatccctttgtgatcgtcaaaattcatttttccttaatatgttttttaggttaaaaagaaaaaaaaaaaagtaaatttgttgaataatgagaaaaagtgggtttactatataacatatttcacctagtttgttccttaattttattaacaaatcaattaatgttttgtttactcaagtgacttttaattctaagttgtttattagaaaaaaaaaattaattagtaattttttctccttaactttgacatgtactaaattgtg

SEQ ID NO: 131644 - DNA, 843 bp, Cannabis sativa
aaactaagaaaaagggaatgttgattacattaatggtaataaataaaagatttggacatccacataattaatactatttataacaaagttgatattataggttatttcttgagcaactagcgatacacaacatgtttacaagtagtggcagattcaaaatttaaagtgagtggaacataaatttttttataaggcatgagcaaaagtaaactaaaaaaaatattgcaatctaaaattatgtttataaatattatctatcgtaactaactaaaatgtatatgctttttttcctcgattttttttagggaacgactgcaccccctcgtttttgtgggtgtgcccttgtttgcaaaaaatctttagtaggggcaacccatttgttgcttgggttgatcccgccaattattttctaccaatcaattttttattatttactgtccaaattaagtaacgatccatgtacgcctatgattatgctttaagaatatgatattttctgagcatttatgataatatcaagtgttattcctattctgatatttctaatttctggagttttagccttgattagaaaaggatcagaaaaattttctagttataaatcaggaatagaactaatgggggatgcttagttactattttgaatctgttattatatatttgctctagtttttgttgtttttgatgttgaaacgatttttctttatctatttcgatgtattgaggtatccgtatttataaaagctttaattttcgtacttatcctaattgttggttcaatttatgcatggcgaaaaggagcattggaatggtcttagctcttgaatattcatatgacaataa

SEQ ID NO: 131645 - DNA, 1063 bp, Cannabis sativa
tggccgaagcaattggtgtgcgtgaagctttgagttggatcaaagatcatgcatggcaaagagtgatcattgaaactgactgcttagtggttatccaagcactgagaagttctgttcaaatgatctgtccttttggtcaagttatttctatttgtaagcaactcattactgatttgccttttgtctcagtgttgtttgtgaaacgatcagctaatgtggtagctcataactttgcaagagcttccatattatttcctggtcgtcgttttcggtatggagtctgttcctaccgatttgttaccttgtttggtaactgattttgttggttaataataatatcacattttccattcaaaaaaaaaaaaaaatttattaaattaacttattattactaatataaatttgtgaatgattttttaaggggggccatggccacctctcggctacatgtagttccacttctagtttttttatatttatttgtgttaaaagttattttcaagttaattatattaaaaaattatcgaaaattgaattcaagatttgtcttcaagttagttttcgtcaacatttatagttttttatactttttatgcaaaattatgttttttttttcaataatatgaaaaaaccaagtaagggtaaccatgtcctcttaactagaagagtaaccagttaccataaaatggtaattagttaccttatattattttttctatatttttttttatttttttttctaaaaaatatcataaaattattttttcgacaaatcttaatttttacaaacttatactttaaaaatcataacaataaaaattctaaaagaaaaaaaaaagaactttttgggtatcaagttgataaatactcaagtgttaagagacccaaactctctttaccgggccacttctatttttcagttagaatttggaaagggaaatttcatttttaatggttaaaaaaataccttttaacaaaatttagactcataattaatttatacaatttaatgctattattttcaatttctacctaaaatgcccccctttcattttccttctct

SEQ ID NO: 131646 - DNA, 1567 bp, Cannabis sativa
  modified_base (47)..(55): a, c, t, g, unknown or other
ttattttagggaagtttctagtgggctagggtcttgttcagaccgtnnnnnnnnngtcaataaggtgtatattgattataaatacaccttataatagctaggtttagtatatctttcatacacttaaaattgtattcatatttttaggaaagagtgtctttgttttgtagagaagagttgtttgactcttactctgtgtacttttattttgtattatcttgagtctgtattcaagtctacaaagaagaagaacattagtgtaactatcgggagaaggttttacaaagatttcgggagattacttttcaattcttgcatcgggaggaagcaagtactcgaccttcgagagaaggttttacaaagctttcgagagattaattttcaagtattgcatcaggaggaggcaagcactcaaccttcaggagattgcttttcaattcttgcatcaagaggaagcaagcactcttccaggtgatcaaagtgatttcgagctcttggagttttatcaagattcagttagtaggtggaacacatcaagcttgcggcatataataagagggagtctatttatgaataagttaattactttgtattattgagaccgatctaatcaatcttatctctgggcgtggccccctggactagtaacaatctgaaaggattattgataccacgtacaaaaccttgtgtgtttttacttttttacactgtttttaattcaagtttcttctagaattacagagttgttttctgtaactacggaaaagctattttcagtaccagtttgattattctgcatttaattacagatttagttaaataataaaactgggaatgttaaaatacggaatatgaattggtatcagagcaagtcactaaattcttagtgagatcatgaggttattctgtttaattttttttgtgtgagatgtctttgtttgtagaaggaagctctatctctcgaccagctctgttatatgagtcgaattattcttattagaaggtcaagatgagagcattcatcaaatcacaagatgtgaaaggtttggacaacaatacttacaggctggacgcaacctactgaaagtgataatgaaggtaatactaaggtaagacctgaactcaattggactattgaagatgaaaaattgtctggttataataataaggctttacatgcgatttttatgacaatttttgttggtgtcagtggaggctttattaaattaatttcatcttgtgaatctccaaaggaagtgtgagaaatccttcaaacttaatttgaaggtaccgctgatgtgaaaacatcacattttactatgttacaaactagatttgatgaattgagaatgttaaaaaactgaaactttgtctgatttttatgaaagattatttgatatttttaatgagttttttgccttgggagaaaaattagatgaatctatcttggttcgaaaaattgttcgtgtgcttcctaacaggtttcatacaaaattgctagcaatggaagaggcaaaagactttggcgaaatgaaggttgaggaactcatgggttctttaagaactt

SEQ ID NO: 131647 - DNA, 1244 bp, Cannabis sativa
aattatttctaaaaattagcagtataaagtttaaaatgttgagacgcctccatcacagaggcaccaattggataactttcttggcttcatctatggggcctcccaaataaggcttcaatcgttggccattgaccttgaaagtcctggtttctctccttaaacttccaccgtgccatatgggaatacttgaaccactgtgaacggtccagaccaccttgatttcaattttcaaggaaaaagcttcaacctggaattgtataatagagcttgttggccgggttggaactcttttctaattaagtttctatcatgccatctttttgttttctccttatatatcttggcatttttgtaagcctcgttgcgaaactcaccatctcatttagttgtaacagcctttttcctcctgctaccgccaagtccatattcaatgtttccattgaccagaacgccttgtgctctacttcgaccggaagatgacaagccttacaatgtaccaactgatagggagacattcctattggtgttttgaacgctgtcctgtaagcccatagtgcatcatccaacttcttagcccaatcttttcttgaccgttgaaccgtcttctccagaattaatttaatctccctgttggaaatttctgcttgcccattactctgaggatgatgagggggtgcagttctatggtgaactccatatcttgtaattagagcttcaaatttcttgttgcaaaagtggcttccttcatcgctaataatcactctaggagttccgaacctggtgaaaatatatttctgaagaaagtttagcactgttttactgtcattcaaatgtgttgctgctacttctacccatttggagacataatccacagctagcaatatgtacgcattattgtatgatgacgggaaaggtcccacgaaatcaatgccccacacatcgaacagttccacttccagtattccagtcaaaggcatttcattccttctcgagatattcctagttctgtgacaacgatcacatgcttggacaaattggtgagcatctttaaataaagtaggccaaaagaatccactttgtaataccttcgcagcagtacgattcccactaaaatgtcccccacattgtatgttatggcagtgagttaatatggagaacatctcctcttctggcacacatcttttgataatctgatcagcacaatgcttatagagaataggctcttcccaatagtagtgtttgac

SEQ ID NO: 131648 - DNA, 977 bp, Cannabis sativa
  modified_base (917)..(917): a, c, t, g, unknown or other
accaacaaaagcaaatactttatatgtcacttaaaaactgaagcaaaaagtcctttttgtagtagtgtggaggtgagggttttgagcttgaaatggggaagaagaagaagaatcaatggttgtgctagggttttgcaatgagacttttgaaaactagaaatgtgtttcagtgtggatgtagattggaattattactctaataaaaataataaaagttaatgttttttttgcttcaggggaaacagtcacaaattttttagcctctgtttataaccgaagccaaaaaaaattagcgtctttcttccactgaagcaaaatgtaaaagacaatttttaaattttacacttttatcctcagttcctcttatagcgtcattgtagtagctgacactaattattttcttttagcttcagttatccactgaagcataaaatatacacctattttttacctcggtcaactattatggtgagacgcattgaccgactcaaattaggcatttttagtagtgagtcgcccacaacttcagatcttcacgacatcttctgcaattatcataggctactccttcataatgaagctagccctccttcgaataggtacgcatctcttccacaattactctctgcataatgtcacttccaccataaattctcatatccttatccctagccaatttcatcccatactgactctccccctttctctttggcctcttttttcttaaaataatagttaatttattttatccctctgcacctccctgtctaattatcactacattacgattagtaatgcacttaccctctccaagcatcctttaggattgtatagggagcactaacacgagcctacacttatcataatttttcttggcatggcactacaaaacatcttatttttagtcacaacaaaanttgtgactaaaagtaaaaaagttgggactaattataaattgtcagaagaattacaatttg

SEQ ID NO: 131649 - DNA, 729 bp, Cannabis sativa
ttttggaattcactgtgttctgttcgatcttgaaaatttctctgcactccaaatgggataacatctgttttcttgaagctgaataagtaggatagggattgatcatatgttgccattttttttaagtggcttttataatctttggattgaaactcattgtacaatatgattgggttggttttgtttcaattagtgttttattgtatccatagaaattgttggctttcatattaagttttatgaacgataaaagttgaaaggttgatgtgttatgtaccagagttcactttgtttctaatggtttctatggttgattgattttataggcattgtttagtatttttttaacaatgaaggcattgtttaaaaaagtattgggcaacaccaaaaaaatttatcaggaataaagaacatgattttgtgacgattattattcgggtacggcacttttctttgaattctcgttggttatacattgtgtttggtgttgaaaattagctgaataatatatttataattttacttcaaattctttacactaggattatctcaaaactaataaatagatacaatggttgtttctccctccctctctccgatcaggaggattagaaatagtagaatttacgtggtatatggtttttttaaaccttttatgataaatatggcatatttaactatggactcctttatatggctttttttaactttggcaatagtttatgggat

SEQ ID NO: 131650 - DNA, 842 bp, Cannabis sativa
tttagatgaggtttgtatatataaatatgaaaattaatcaagtgatggaaatcctacacataacactataattaaagtggtaacattttataagacctatttgaaactaagtggctgtttttttttgttctgaagagagagaacacaaaaagtgtttatgtagtaatagtcgttatcacatgaacttgaatatgtgtggtgtatattagtgcaagagaaatgcgtcatccacgcgttaaaccctaaactttaaccctggtcatgatagagataaagtataacatttataaaaggatcaaactaattatattttaataggattttgacgattaaattatttgaattttaaattttttgacacttaaccacataaattaattttttgagagcaaaaatacctaaactcgcattctattttgctctgtacccacccgtccaaaaatcatagtggatggcaaatttttaatagcccagttaatattaattttaaaaaataatataaatatttaaaaaattaaaaaatcagaaaaaaataattttaaaaatatatttttttggatactggcggctaaaccgcccgaactttaaattttttaacacttaaacacaaaaatcgaaaataattttaaaaatataaatatatttgtttttatttttacttttactttttttttcctttttctttttctttcttctttcttctttctttcttaaaatttatgaaacactaatctctcagccctcccttccaagccctctctttctctctcttgtctcaccacccaagaccttgctggagccgaagccctcgccagagccatttgccctctctctctctctct

SEQ ID NO: 131651 - DNA, 1094 bp, Cannabis sativa
  modified_base (1030)..(1069): a, c, t, g, unknown or other
tgtgggggacacgtgtcatgagtcatttggtccatgcacatcacgcatgttgagagagcgcgtgaggcctaaattgttaaacaacaactggctatgtcgatgggaattgttgaggtgaatgttattattaaagagcctctcgtgtatatcattcaatggcatctcttcatattttcagactgggcatctcttcatatttccagactgttagatctcattgaatgtgttttcttagagatgatctgagttatttgatcatgagcacgggaatcaccatttgtgtataaataaggcaaggatcgaataaacacaacttttccattttcacttctgattccaaatttttgggagagaaaaccagaactgaaaacctaaaaaattattctgctaaatgtctgacgtacctacagagctttataactgtcttctccgattgcgttcaaggttgtttacggatgcacccctaattttagaatgttgatgacttccacttgtccatttactttgtcgcctggccactgtcgagaagctcttgatgataccatgctaagtatgaaatttagtgaggttatcactattgatatgcttcctaaagttggacaatcttgtgcgaaagaccgtagcaactttttactacaaaatctagggccttcttggaggtgactgtgttaataggttctgcctccacccatttagtgaagtaatcaacgacaagtattttactcctccttttccagtagaaagaaatcccaccaagtcaataacctaaactacaaacgatcatggactgttcatgagggtgattttgattgaagatgcccttgggaccttgacgtagctttgacactgctcacatttccgaacatagttaatacattagtttttcatgatgggtcagaagtacccttgccatataatcttttttgacaggcttggtgcaaaagtatggtatccgcaaaagcctttttgtatctcatgtaacaatgcactaatttcattcccagctattgttgggaatattttaccaggnnnnnnnnnnnnnnnnnnnnnnnnnnnnnnnnnnnnnnnntatgaatatctctaaaacaatgaaa

SEQ ID NO: 131652 - DNA, 1000 bp, Cannabis sativa
  modified_base (43)..(65): a, c, t, g, unknown or other
aaaagaggtaaaaatgatagattttaaaaaagaaggtaaaaannnnnnnnnnnnnnnnnnnnnnngtatagagtgtaatttcctctagtcaattagtccattgggctgaattgaaaggcacctcttaccacaataacataaaaggcccataaatattggtttgtgaagaaattgttatgtcattgttttaaaaatggctttcttttttttttttttttaagaaaagtgatatagtattagtgtatttgtaataaatttgatatttacaaaaaatatttaacataatatgatagttttcaaagctcacttaaaattgtggtgttttggaataaatttggtattttaaaaatattatttaacataatatgatagttttaaaaaaaaacgataaaattatactgtatattcactttttattttgtattttaattttgaagttttgtttttttatttttacacttcaaaatattttttttttatttttacagaattctacatagaaacccttattgcgagtaacttaaatcgcaaccaaaatccatatagcaatccacatagaaatagaaaccactttagaaacccaaatcgtaaatttgaaaaaaaaaagttaaaaaactagtaaatgagataatttccttttaatttttactttttttaattactctttaatttatacttaattttattatattcctattatgtgttaagaaccctaattttaataaattatatttgttactttgattataaaaaaaaatttatcaaaaaaaaaaaaaaagaaagtaggaatacataaggtactatttttacatttaaagaatgtttttttttttagatttttacgatttttcaaaaaataacacgaaaataacataaaatcaacaaaaaaactacataaaaataatatgaaaatcaaaataacatataaattaacaaaaaattaataacaaattaacaagattacaacataaaaaaaaattatattttctgtaaataaaat

SEQ ID NO: 131653 - DNA, 918 bp, Cannabis sativa
ttcttgcaaattcttaacacattcttcaatttatttctccattttagacaatttaaaaaccttaacaaataatactcttgtcttaatgttccctttgacaagtagatcagtacaatgatgtgacatacttttatttttaaatacacataagtttctattcaacaatatgccatatgtagcaccctccattgctgcttagaagacgtaattcaaccactcaatccattctagacattaggccataacatgcttccttgccattgtctaatgaggtgcataactctccaagagaatgggtgtgagaaaaagaggtgagagtgactttcaagctctaattcacaaacaggatgaggaggggaattaattctcatttgcctcttaatgagcttgtccctcgtgaaaaggtggtcatttaagacttgccaaacaatgaatcagtgctttggggtggaaagagagcctgaatcaagctctaactacacgacacttacataagtaacacgatcatcattatgtaggaagtattcatacagtttacttactttaaaatggttctcaacacagatagcctgaatctcattcagatagaacgtctccataagcctcatgagctttttctaatactaactctgcttaagcttatgagatcatatatcctagtcctttaagtatatgcaatgtacttatttgatccataaacaatcttgctttaaagttattgtcctaagatactttacaatagccacttttttctatttggatccattacttttttaatagaatattattgttgtgaaaattacacattttatgattttttttatattacgtgtgcagaaatataattttttcaaaaaaaaaaatttttttgtttttttttacacttcaaaataattgtttttttttttgtatttttac

SEQ ID NO: 131654 - DNA, 1305 bp, Cannabis sativa
caatgtcagaaatgtgatatatatgccttttgtgtttggtctatttttttttatcgaaaaaaaataactgtttttatgggtttaaagggaaaaaaaaatcataatttacactatttagaattaattaacatatatattttttttacaatttcttatatgttaatattatattctattcaaaaacattaaccatcctacgattttttttattattttctgtaaattctcattcgaaatctcctaaaaaatagaacctcctcaattagttccttttcaattttagaatatgtaaaaccgtctacacactaatctaaacccctaattgcactaccattagcctctacggattagtatagtcacaacaaatgtaggcagatttacttttgagtgtaatctaggcagatttattaaagtacttttttcttctctccatgatttcaagcaactccgccatatgtgaatttagtgttagcgacaaaaagctaatttataacttcaacttagcttctcctctctcgtaatgctttcatggcattcccagcgaagatgggtattctcttctttctctttaacacatttcaatctctctctctcttttttttttcatgccatttatatcaaacatttaaatatttgatttaagttactttctcaattggttttagcttattttttgttagttctaattttgttagtgtaaaagatttcactgatcacaaggtaaatactaattggtctcttttgagggataatttttcttagggatatattttctttcaggagtgttttggtatattgaataaagacaataagtggacgtagaagattaactgttatatgatcatcttgaatttgtaattatatgagttttttttctatgttattatgtctcatatttacatttctaataaaccaagaaataaatcagagattacatgagggatgttaagggaaatggtagagccaccatttgctgaaaggatatggtgagtaatcagtctgattatcttagtaatgtggacattgttgcactttgctgcaattaatatcgggaaagttttcactacagatggaagattgtttgcttacgtgctaaagccatgtatagttagttatatttcattgcagatggaagatttttaattgcaattcagttaatttttttaaatttagtgtgttaattgtttgacgcagagaacacttgtacaacctatgcaatcgaatacattcccaacataaagaaaccttgttttggtcctcaccctaagaatgtcattcctttagcctgtgatacattcggtgtgc

SEQ ID NO: 131655 - DNA, 633 bp, Cannabis sativa
ggggggggggaattgagatattcctttaatattttgtatattcggttaagcgtgagtttaggaaattagattagatttacagtttttagattagaaattacagctcttagtttcctattttctagcttactcttttctattcatttgtatatatatatacaactaaatatatcaatgaaggacaagcaattcgattcacgatttctttatatatatatatatatatttatgttgtatagggggatcaggattaatgcatatatatgtataaatttgcaatatggatgtattgtctacaataggttgtaattgttgagattgaggaatacaaagtacttattcataaaaaaatacaagatacctccaactattgattttttgagctttaattccacacgagctttggatctgcaaaataaaaggaaactgattagtatgggtaatcagtcttccaaactctctctactctctttagatgaatttactgtgagtagtgagctcggcgactgagatcttatatttatataagtaagaccttccatccaagtctcggtcacattaattatcaaaatattttgataattaatttaaaaaattaaatcggataattaaaatattttataattaaatctg

SEQ ID NO: 131656 - DNA, 829 bp, Cannabis sativa
catttatgaaaaaagcccatttttttattaataaaaaaaaaaaaactagttctgtagctctatccctgatggcgcttttgttttactatcagaacaaaaagcagggacacatccttattagaacaaagcttggtatgattcctagggacacatccgtctctattcaaagtcaagcaagatgtaaacgctgatcaccctaagtaaaatttgatgaacgtgtgccccaccaagtaacaagttctaaggatatcagcgatggagattgctagaaaaatggatatgaactcatctttggaagaaagaagaagaaaattgtaactaaaagcatagctaattaagagtatatacaaaaacatctctctctctctctcataagatttgagctcttactaaaacattatatacacttctacagcttacaccttatattatatacacttccaaggaagtgttcccatcctgtggcactcaaagcaatacacactacacttttcatatttttgtaaaattgtaactaagttccaacaattctgataacgctgctgacgactggagtggtaattgggaatcgagtttatgtgtcgttcttacatggaagatcaagctcgtttactttactctaagaatcactgtcttcaacttcgagaaaaggtaagaaaaacattcaattttatccttgataacctagttaagaaattgcatgggtggaaactgaaatcgttatctaaggcaggtcgtgctactttgatcaaatcagtagggcttgccttacctgtttatactatgcagacgaccaagctttcaaaaaaaaacttgccttgcgaattga

SEQ ID NO: 131657 - DNA, 1122 bp, Cannabis sativa
  modified_base (105)..(108): a, c, t, g, unknown or other
aatgtaataaacatatttaaactattagcatgtaaaattcatgcaaacattaatcacttcaaattctttatattgataactaatcagattgtaaagagttttatnnnnggcataaaacccaacaaatactgcattgcctatgaaatttatttctgctattgctatgcatgatccattgaattaggtgaattagagtctaaaatcagggcatgaggtagtcaagattgatgacaaggacattgaagatgaagtgcagtattggaactcgtctgttgtttgctatgtatgggggataatcctccaatatttaaggggttctataaaaggaagtgaaaagataattgtgtggataagattggagttcataatataggagttttcatagtgagattcatgattattgaacagataaataaagttttgactggagggtctttattatttgataagaagctattgataatgaaggcttagaatacaaatgaggacttcaacagaagacattaaatttatccctatttggatccaaatctctcagttgcatttcaaatactggggagggaagtcaatttccaagatagttggacaattaggaaagcctattaaagtggatgagatcaccaaacgaagagagatcttgaattatgttagggtaatgattgaggtgattatggagcaagccttctcgagcaacatatctttcatcaatgagaaagatagagaaattgaagtggtggtagtgcattatgaattgctaccaagtgtaaaaactataaaggaattgggcatactgaaacggatgcatgtgagtggcatgatgcatgcaaaaggcttgagggatgttagtgactagctgcatgcaattgacttgatgcatgtgagattcttgctacatgcgagtggcctaatgcatgcgagaggcttgaggcatgtgagtggtctgctgcatgcaagtggcatgcttcctatgagtggcatgctgcctgcgagtggcatgttgcttgcgagtgggatgctgcctacaagtggcatgaggcctgttgaccgaggttttcggcatccaataataataatttagagagctgtaagaaattaagaaggagattttttacgtggttgggg

SEQ ID NO: 131658 - DNA, 677 bp, Cannabis sativa
cattctgtgcaacagtaaaattctatctaaagagaattgagaaagcgaggaagcccgaattcctatactgacgctatcacagggattaaagctcaaacatcaagggtagacgtgtttcggtcctttcattgcatataagatttcgatatgtctgtagttatttcactttacataacgttcatatatgcttcattttcatatgattttttgtctaaaacttagcatcagaaccgttttaatctctgtcttgatttatatttgagtttcatttgtatatatattatgtatacacggtgtgtctgaatatttttgtttatgatttaaattctataaatatgggcgcattcttaatgggtattacccatgaatgggtaatactagaaaattttgagtttttatgattaatttttctatttaattagaaaaatttctcattttttacattttatgggttgggattgacccatcagctggaaaaaaaaaataaaaaaaagctttcggcaaaaaagtgataaaaaaagttaaatttgacttaaatatttttcatataaatataatatagtgtaaaaactaaaagagttagtttttgataattttttttaattaagtagctaagttgagcatagaaattcaaatttcttttttattattccctatcggaccaaaatctaatggtt

SEQ ID NO: 131659 - DNA, 847 bp, Cannabis sativa
  modified_base (208)..(211): a, c, t, g, unknown or other
  modified_base (315)..(320): a, c, t, g, unknown or other
  modified_base (786)..(793): a, c, t, g, unknown or other
gctgctccggcgccggccttgctgagttggagtttttctggttgtctgcagcgctggtttcgtggatctcatctttcgaggaggcagattttgtggtgggcggatgtagagaggagatcgagagagagtgatagagcgagagtgatagagagagagagagagagtatcgtttcagacgaaaaggaaagaaaaagaaagaaaagaaaannnnaagaaagaaagaaaaagaaaaaaaggaaaaaaagaaagaaaaaaaaaagaaagttatttattcttttatttataatttctttaattttaaattaattttatttnnnnnntttatttttttaaataattttttatgtggaccaataaaattgtgctacgtgtacactgtgtctagtccaacatggcacttaacacttaaaattgacggaaagggtaaattgctaacaaaatacgagtattgggggttttatcgcccaaatttgagttttggggttaagtgaaaccaaaataaaagttttgggggttttgccgccatttacctttattgtttacatcaataacaagcgctagctttgttgtgatattaatgaaataattattttttaatttttgtacttaaaattaaaaaacatttttatatatgaagctagaaagtaatgcttcttgtggaagagcttttcccaggctctaaagtcagaaaacataagttttaacaactagacccatagttctttatgtaaaataacactcatagaaaaagaagaaattacacttactatgggattttaaaagttnnnnnnnnaaatatggtacatttaagtttgaccaatttatatggtattttttttttattttt

SEQ ID NO: 131660 - DNA, 727 bp, Cannabis sativa
  modified_base (213)..(220): a, c, t, g, unknown or other
tggtcggccaaagggtgggacagccgtggcctaggcccccaaaaattaaaattaatttataatttttatatatatatataaaaaaatcaaaaatatagtatatatattttagtttagaaaatatcataaaaaaattatagcacattcagtaagagtgagtgagtttattggttttaggtgcttggttcgattctctctctctctttttttttnnnnnnnnaagcgtttatatattacaacatgcataacttgggactcgaatccaggacctctaacacacaccccttatggccacttgaactagcctcaagtggttttaggtgcttggttcgattctcaatgcactcactttttgactattttaaaaattttaggattatatatttatataaattcattattagtaatattatattttacttagtaaggatttagatgtattgggattttcttcttaaaaaaattaatattatgttatatatattttttataaagagcaattaatatgtttagtacataattttttaaaaattactctaggtgcaattaaaagaataaaaaaaatattataataataataaataaattaaatagttttaaaaataactaataagaatattatagcttaaaaatctaatggcaatattataataaaaaataataatattataatttaaataaaaagtatatttatcaattattgtgtatcttcttaaatttatacaac

SEQ ID NO: 131661 - DNA, 915 bp, Cannabis sativa
atatatggtagccctgaagcagaattgattgacgacattgttgaggagcttttggttaagctgaaccatatgccacattcaagttatcatgatgatcttagtaacactgttggaattcgtgagcatatcaaaaatttcgtatccctatacttcgataagcctactaagaaagattaccaaatcataggaatgtggggcatgtttggtataggcaaaaccactattgcaaagggtgtttataatcgagtgatttcccagtttgaacatcactactttcttgaaaacgttagtgaaaaggccaaaacacaaagatcatcatctgatttgaaggatgaactctttgctgggcttttaggagaagaaagcctaaagctcggaagaggaggaggaggagcagcaacaacagcgtcttcgggatcaacttttgctaaattaaggcgttttagaacaaaagtccttattgttcttgatggtgttgaaaatgaaaagcaatataatgatattttgtcccctaaagatattcaatttagcaatggaagtataataattgtgacttcaagaagtgaacaagtgcttatgaatatcaaagctggagaaatgtaccatgttagagcattgaatgatgaagaagcagatcatctttattatttgcaaacaagtactactggtgaaagctctgttggtatatcagaagaagatacagagttgttgagaaagaaagtgaaggattgtgcaagtggtgttcctgaggtacttttacttttgtgttccagtcttagttctcacaccaccatagaagaaaaagaaatcgcggttgaaaagttcaaatcatttccggatttgaatctgcaaaataagatgagagcctgttatgatcaactagatactgctgagaagaaaatatttcttgatatt

SEQ ID NO: 131662 - DNA, 655 bp, Cannabis sativa
  modified_base (622)..(630): a, c, t, g, unknown or other
cttgatgcggggatgcaacatatccatgctcaactcaactacattatccagcaaaacaaccatatccagagttacatggtgtaaaggagtgaatttgacgaaagtcaagtgaggcaattcaatcatctgattgacgtgtggagtcttggagtcgacgatccaaactacttggcataccctcctcgctttcatccctacgatcagccactgccgccaaaccccttctgatggggttcaggtaagtcctattcaccttgagtattatgttacattagggacaatgtgaatcgttagtttgggggagggatttaaaaaaatatatattttcactatctctgtttttagtgggttagttgttagtttagtttttagtttttttagctttcctgtgttgataattgagccaatgataattgattgattgaactggtgttgtttatttgtgcaatggattgaaatttaaattgtgtgcttaagtcataaactctttgaattaagttggatgccttgtgaaattttttttagatgtaaattataaatttttggatagtatcatttttgttctacttgggtttgtggaatgtttacttgtgatggaatagatgttgggttttatgccctnnnnnnnnntccatttcaatgtaatccattttat

SEQ ID NO: 131663 - DNA, 631 bp, Cannabis sativa
  modified_base (144)..(149): a, c, t, g, unknown or other
  modified_base (566)..(572): a, c, t, g, unknown or other
gcaaattattagtaattaacaaaggaaaaaaaaaacacgaataaaaataaaagattgactcagacacatgacatttataatggaatggaagaaaccatacaacttgaaaatagtgttggtttagcaaaataataataataatannnnnnataataataataataataaatccagcttgcaatgagggagaaaagtcaaggtcaacagtcacgcctccttggttgtatagtgacagaatgacgcttaaaggatggtaagttttttttagaataattatcaattttacctgttgaactttttatattacctaattttatctcataaaacataaagtttgttaaatattctctttaaaatataaagtttcccatgttagttgctgttctttaacggttaaaaatgagtacttttaacctgaattttgaacaatacaaaatacttaatatttaattttggaaacaaaaatactttaatgttacaattcttttacactgttattaccacttccgttaactcataaatatggagacgtgtaaggttcagatgcattatatttatttttattnnnnnnnaaaacttaatattcttaatatcataaactaaatgctacttgattcaaaaaaaaaaaaaa

SEQ ID NO: 131664 - DNA, 1206 bp, Cannabis sativa
  modified_base (1160)..(1162): a, c, t, g, unknown or other
tagtatatatcactttatatttatatatatttatataattaatatgtacatttatatatgtgcagtttagaatttatataattgtacgtattaacatatatttatatatttgaacaagttgtattgatgtattagtttagtaaaaacaaagtcaagcaaaacacgacttgaaaagaaattaatccaacattttcaaacttaataggctctccccaatatatatatataaatatatataaatgaattttttaacaggtgcacagctctgttagagaatttttgagttgttagagtgaattatgtacgcactaataataatttggttaatcctttgatgaaaaatttagctagagagaaaattcttaaaacatcaaaagggaaagtgactattgcatgtccttagattgatgaatcactcataataataatagcaacctgacctatagactggaaatccaaaaaatagattcaataaataataacaagttaattatgaagtgataaagtgagatcatgcgaaagcatgaaatcctaaagcaatttatgagttaatagaagtttttaacgagttccatactccaagtggagtggagtaccgagctacaagagtactcttgataggcttacttatgtgaatgtgagagtggggccgttttctatgaaattttaggcaaaatttctaaaacgttcactatactaggataaacgggcatggtcattaatgcacgggcttttgattatatccttgaaaatattgttgggtggtacaatattagagatagagttcaagactacgggtcactctaagagaatctaaattgtattcactacctagaggttcaaatcgaaagatatctttatttatgttcaatcttattgttgaatgatattgttagatgcaaatattggaacttttcacaaagttagtgaattttttaacaaaatgagagtgtcctagtgtgtgtgaaatatcattagtcccacatgggatatgagctcttttttactagggtatataaggtgcaactttggcatatgggatagggctccaaggagtactcaattttatgtgaatgggtgaggactgtgacaaacctagaaatttttctttgtgagggctttttattattaaaaaatatttatacatatattataatcannntaactagatttatttaattttgtggaggcttttctactatttta

SEQ ID NO: 131665 - DNA, 561 bp, Cannabis sativa
  modified_base (508)..(517): a, c, t, g, unknown or other
agagagagagagagagaggtgatatatttaaggttattatttactgattactgtcacgaaatagttgtttatacattgttctcatgtattaaaatagtttcttaacaaaattaaaaagttgatacattaatttcagttatggaacttctacaaattttagtacagagcaataatcattaagatgacaacaagcattatgctgattacaaatcaacaggggaattaatatcaagatattgcacttttgttgaactagtacagataataatggagaaactatgtaatagtgaaacaactcaatacaactaaaatactaactgaaagaaggctgccaaccactccaactcaaggataacaaaagtctgatgctaaagctattaactaaggaaaccaatttcacgcaatatccattatgtgtgaacacattagcaaacacagaatcacaattctcttttgcagctacctaaacaattgttgagttttgtgccttaaataaaacccatttcannnnnnnnnnatttactaattaataaagaccagaaataacattttatgttgcat

SEQ ID NO: 131666 - DNA, 593 bp, Cannabis sativa
gggtcccagtctcgggtccaggtccggatctgggtccgggtcctgagtccctgtcccatgtccagatccggatcgaagattggtgttgattcccaatctttagtaaatattataatacaagctaatacagactatttgttatgtattaaataatatacaatatacattgtattaaaatttttggtagtaataattaatacaatacattgctttatccaaacatagtgttatttattatttaatacaatatgacccttatacggcgtaccaaatagccctcaatgaactcaatacacaataagctcctagagacatattaaagagtcattcttttatgggaaacccaataaaacaaaaaaatcaaaacaatttttttttttatatatcgtacgaaaatatagataacagcaaccaacaacttaaataacaaccaatggaataatttaaatgtgaataaaactctacatagcaactcacatataaactattagagtaattattagggcaggtcaaatgaaaaattttagaaaaataataaaaaataatatatgaaataatttcaaaaaaaaaaaaaaaaaaccctacatattcag

SEQ ID NO: 131667 - DNA, 552 bp, Cannabis sativa
actctcaaaaaactctcaattttgttcatgaattaatctatggcaaagcctggtcctaaattataactcaattgtactaaccaaatacagctgcaccacttattatttatcaattatgaagttactcaaacttattgaagacttaaattttgatatgtgtactagcaggttaattaagaaagaagtggtgtaaaaccttaggaagctttttggtttatggatgagtattcctcgttctagcttcgacttacttaatttgtaatgattattgtaaagcattatgtaatagtttcatcattctcgagctagatattcagtaaagttgatgaaatgttaattacttatttaaaataacacatattagttacgagagctgcttagcatttattaggtatcatgttggtgcaattaactattaaattttagggtaaataccatgtattttgttatcaattagacctgtattttgttaaatgacaaaattgatcctgtattttctaaaatagtataaataggaccttgaattgattttttgtcaaaataaaggttaat

SEQ ID NO: 131668 - DNA, 1588 bp, Cannabis sativa
catttatatgattgaaattgaaaaatatggtattattaaaagaaaagatgaattatgaaataaagtggcaaaattgtaactagtgaggcccactactacgggcggccactagagtgatttgttgcctattattttttttttttgatacatgtaattaaattctaaaccctagaagaaatactataaaaggaatgagatgctctcattctcaacctatcttaacctagttttcattatttgccagacaactagtaaatgagagtcttcttccttagtatttcaaattccttatttttcttcctccattttcgagcctttagtgatagagtaccatgcccactcatagcaagtcaagtactcaatcatagtgtagaagattgtagttaaccaaactgaaggagagaagatccaagtttagatcttgataatgttctgcgaccgaaaggatgaagggctaaagatctgaacgtaacgagtcattattatttcgctgccatcaatgttaggttttttaaaatttatatgtgtttatttcatcgtattaggatattcatatttagggtattagattatagattatgatcaacatacttgttagtaaatctagatcataataaaataatttccaacatatccttgaataaaaatcgaacatgcaattctataaaagcaaaaattatacagttcaaggagtgggtaaaacttacttgtgggaagaaatgggggtggatgagtgtgatggtggttagccaagaaagcacgtgccaagttgagaactcggtcaatgctcgtctgaatgtttagagattcttgcgactaggggtggctccctttttggctcagtgggggtgcgtcggggtattctcttgctctaattcgtaaaagatggtggatgacaatgtcaaaaggatcgaacattcactgtgggtaacaagggggttctctgggatttctggtgtctatccctctcaaagatgaatttgaaaacttgaaaatgcagaagtggaaaaagtggtaagaggctctcactagatcgcatttaaatcgagagttggtgattcgcatgcctaagaatcaaggggcagatttcacctagagaaaagcaatatcgatccaacggttggggagccaaaaggataagattaaacaccccttgtggtagtactggaggcatttcttcatcattaatatgctccttaattttcgtgttgacataagatatctgtcattacaataccccaagcttcacgcgctttcaatatacttgtggaactcacaaatccacagaatgaggacacatgagcatttcaagatgtagccccgaaagtccttaatattttgcatttcgtgataaggaagatgaacagatcagtgttctaaaataatccatgtgtacaaaatgctgaaagtcatctagaggctagacgtcaagcttccgccactccaaagtctcgaaagccttggggtaaatgttatctatatttttagataagctacacgtggaatcttcaaggtttgattatgttgggttttatgccataaataaaattccatttccatgtaatctagattattcaatatcaataaa

SEQ ID NO: 131669 - DNA, 923 bp, Cannabis sativa
aaaaagtatgtttttaagtgcattgttaaatttttttattttatattctaaaaattaaatattaaataaaatttaggtagtttttattatatgattattatttttttggtaatgtatataaatatatatatatatatatttaaaaaaaattatctgatgtgataaattgaaaaattatatatatttagaagaaaatatgtagaattacatgggataagcaattattttatacttcttttaaaattaaaaaaaaaataaaaaaaggtatatattttgtacaaattatataaaaacctataaaatatataattttcacataaaattttgaaacaataataatttaaatttctaaattgtttacacaaacaaatatttctttgccatctgttttatttttttattttttgaaataaaaaaaaaccttctccaccagttactttttgacttatgtatagtaaaatttgcataaattgttactacaattataattcatttacaatagaattagttaaaaattataacaatatctatatacatattttcttaaatatatatgctataaattaaataataaaataaaattaactatcaattttaatttataaaataattttataaatatttaataaagttttatgctatcttcaatattatattaaaaattttactatagatatatataaataaatataagtttacattaacaaataatttagcatatacattcttctttgtctttatattttcaattaaaaaaaaactcttaaaagattttttttttttttttgagaaaatgactattatattaatttttagaaaaattacataacagtcataagtggaggtggaaattcctccaaccaagaacaatcagtatccaccgtaagagcaaacttagccaaaacatgggcataagtattagc

SEQ ID NO: 131670 - DNA, 701 bp, Cannabis sativa
atatataattagtatgataagtaactcaatattttttttttattttaaaaatatagaaataaaacaaatatatatttctcatattttaaaatattacattaaaagattaattatgatgctttttttttatcttcaatcaaataatgatgtacttgagaataattcttaaagttagaaagaagaaagagaaaaataaaataaagagtaagatggaaagagagacacatttaaatagtgagagagaaaatataaaaagaaaataataataaaaagaaataataaagcaaatatatatgtctgtttacttttattgtatcagatacatgtacatataattaaatgacccaaaagcaattataaatagggttttttttttttatttttaaatatggcttttttgtaagctgtttagaaaaatatggagaaataaagaaattttattaaaactagaaaaatgaataaaaaatttaaaatatgaaaataactgattagtatatataatctctctcaactaatgatttggaaagttgagagcccccatttttccagtcttttccttaagccaagattttttcctttgttttttttttctttcatgcaacaatcaaattcttttttattgaaaaaattagtaatagtctaattttttgtttgacacccaataacaaatttctaaagtttttttataacttttaatattc

SEQ ID NO: 131671 - DNA, 1138 bp, Cannabis sativa
ggaagaattcaggggtctttcaaaggtgagaagggccttcgtcaaggcgacccaatatcctcgctcctttttgttctcatcgtggagtacctgacgagattgcttattcagaagtctaaggagaagggattcgggtttcatcccctttgtaagtctttagggcttgtcaatctttgctttgcagatgatcttattattttctgcaggggaaatgaaaaatctgtcaagtttgttagtgaagcttttcagatgtttagtgaagcaacggggcttatggccgacaaagcaaaatccacagtgtacaaacaaaggctcctgaagattcttcgaatggatgagggaagctttcccctcaagtacctcggagtttatcttaggccaacaaaatggcgattctcagattgtggaattattattgataaagtccgtaagcacttgcataaatgggctagcatgaatttgtcttttgcaggtagggctcaattgattcattttgttcttctgggagttcgaaattattggataagtctgctcttgcttccccaaaaagttactgcagctattgataaatgttgcagagactttttttggggctccaacggtaatagaagcaaaatgcacattccctcttgggaaaaggtttgtctcccaaaaaagttaggagacattgggttttgagagggtaaaaaatggaatgttgctctgatggccaagtatatttaggctatctcgagttaacaagacaacctttgggttcggtggatagatgctatatacttgaagggtcagacattttgggcagcaacttttatataagatgcaagttggtattttaagaagcttcttcgtcttcgctcggtgataggtgaagaagatgtcaagaaggctgagaaaagaggtaattttaaaggaaatctcttctatctctcttttagtcagtctcacatggttggttttgcgaagaatatatggaataggataaatgtgccaaaacacagatttatgggatggcaaattgttaatgattagctattaactgggggcaacctaaaaattacaaatttttgtttgtatagaatttaaatatttttatgattttatttacagaaaatacagtcttttgatgtatttttatgtt

SEQ ID NO: 131672 - DNA, 670 bp, Cannabis sativa
attttaaattgatattagatttaagattcgaaaaataaaaatctacgtataaaaattttacctaaatattgaaattaaattccaagaaaaatcatgaaaaaatgaaaaaagaaaaggattactttttttttttatttttttattttatttttttttgtatttggcttggatggtatgcattgcataccattagcgcgcgcatgcggaggcacctgactgagttttgtcgagcatggaggctgttggcaggatttctaccctcggggaaagggtttggacaaaaccctaaccgaggaaacttggacaagcattgtccgaatgtgtgtcatgaccgagttttctcgagtgtgcgcgtgcataagggatgtatgcccaccctgatttttccaaaatttcaaaaattcataactaattcaatttaaatcgagatttagttctgtaaaaaagtaaattgcttaattttttccatactatccaaataaaataattccagattgtaaatttaattatttttcgtaaaaatttcataagtatcaatcaatcatcaaataaacacatagatcaatataaatcacatctaaatatacattcgtcgttttaaatccatatatcatgaaagtaaattgttaccatggctctgaggccaattgttggaatatattttactagg

SEQ ID NO: 131673 - DNA, 777 bp, Cannabis sativa
caattaaactctttatttttcctttattgtaactagcttcctccaataccagttagcttgggctgtagctttataattccaccaatccccatccctcacacacacattatgaactcattttacccacaaatgatcttcctttttagcaatagcccacacacatttaaatattgctgcaacattccattttgaaaggcttctaaatcccattccacctgaagatttagaatgacataatgttttccaagccactgtagtagtaccagttaaagtataatgaccattccacagaaaatcacgacaaatagctttgatttcacttactattttctttggcagcaccataacttgaaacaagtaggaatgaatcgccatcaaaacagagttgatgagcaccacatgaccaccaaatgagagattctgagtgctccaagttctaattcgagccaccattttctttacaagcatactacaatctttcgaagagattctcttgagataaatgggcacaccaagatatttgaatggaaactcatgtctttggaaccccaaagcatctaacaccctttggacatctgtatctttcatgttattacaataaaaagcagatttagaaggattagacattaaacctgaagtttggaaaaatagtttgagacattgcatcatgaagtagatactcttaaaatctccattacagaacacgaggacatcatctacaaagcgaaggtaatttaattttaagtctccacttctctcatggaatttaaaatcttt

SEQ ID NO: 131674 - DNA, 2455 bp, Cannabis sativa
  modified_base (1794)..(1803): a, c, t, g, unknown or other
aggaagaggaatctccctcccctcctgtgttctgcccaatttactattctgctataccacaatccatctcagtgcctactgcaatatcagtagtatcattaagagactcaaatatattctttgtcattgtcccttctgcctccttcattggcactacttttttccctttactgaccttctgaaacccttcatcatccagctgcttctctacattcattgctggtttcttaggcacccacacttgtttccctgttctttcttctcctcttttttcctgcaatctgaagttctatgtccaattccagagcaatcgtaacaaactaaaggcaaccattcatatttaacatctaaatccacttcatgatcaaactcatcaataaaattgattttttcaggaaaatattgtgctagagttacttgaattaggatcctgggatattgtagcctatccccattttttgtaacattatcgatttgtaaaagaactcccagctggcctgcaattttgaacagagaagcttctccccagtatttgatgtccagaccttttagctgaacccaagtaggcccattagtaacttcttctttggtgaaatcgtcaataggactccagggtttcatcaccattggcttacgatcaaaaaacacatacccctgctgcatcactttgtctctttatttctaaactttgaaatctgataaatgaagatgcctttggctagcaatccaaccttaacaacctcatccttacagattctcctcacgaacccttccactaggctaattggaggattagctccaataacataacaaaccacagatggttgccagaaattaacttcatcttcgatatcggcaaactcaatctcgaccttcctctttgttccttccttccctgtatcgttcttcaattgatcaaacgaaaattccaggttcctgactatgttagatatgagaatcgggggagaaatcctcttcccagaattaagatcttgagtagctcgattcgcaacagtaagccagtcagagaaatcttggcgaatctcaccctgcctaataatcagttcctctgattcctccggagagaagactttttcaacatactgttccatttagtgatggcactgttccattggatcttcagcttcctcaacttctagttcttgaatcccgagtacagtatccatagatcgagtcttaatgactctatccgaggatgagggaccagctttcttgcccttcgatttccctttcccggccattttcgctcttttcgccatagctccggtgaaacaccgaaagagagaggagcgggaaaagttttctttacatatatattgaaaagctaataaattaaagaccacctatattatagtatattgatattcgagtatattattttaataaagtggtatattatttttatgtgggtggtatatgaagaacgaaagacaaaattttatgtttattgtaagttttgcatcaggtttgatatggaatacaaatttaacattatggtataatatttttcagaacaatgataaattagctttacttttaggtatatgaattttgttatttaattctattcatattccagtatattactttaatagtgtggtatattatttttatgtggggtgatatacaaagaacaaaatgagaaagtatattacaatatatgcatattcaagtatattattttaataatgtggtatatgatttttatataggatattatacgaagaacgaaaactaaagtatattatagtatattcatattcgagtatattnnnnnnnnnntgtggtatattatttttatgtgaggtggtatatgaagaacgaaagataaagtatattacaatatacatattcgagtatattagtatatgaagaatgaaagaggaaaaaaatgtggaattgtagtttaagtttgaggtatagatatatttcattgggggtgttctttttattttctatgatatcatgaacgaaacgaaaaaaattaagtgcaccattaatattagttttgtggtatattcatattgttgtaagatatataatttttatgtgatatagtatatattgggtgaaataaaaaaacgtaaaatattagtttaagtttgagacatagatatatttgattgggggtatgttgtttccatatttaagattgtacttatatatttatattttttcacaatggtatattaggttaggattggggtacatttttatacaatttaaattttattattttattttctaaatgttatactgtagtacacaaaatgtatataccataatgcaaaatgtatataccacagactaaaagttaatattcgagcaattgtttttttatccaaacaattgatatatcataactttctttctctctctctctctctatctctctctttctatgttagcatgaaatatatgattcatattcata

SEQ ID NO: 131675 - DNA, 695 bp, Cannabis sativa
  modified_base (27)..(28): a, c, t, g, unknown or other
actaatcagattgtaaagagttttatnnagggcataaaacccaacactttatccatcataaaaccaattttatgatcatgtagctgaacccacatatcaagcttatgtaagtgaacagcccttggatcctcaccacttttcaaccgatgaaagatcaatggaattttattaaaagtccacagacttccatctatcacaacttgtatatcaagttcatgataaaattgaaagatgtatcaattagtatctaactctttaacataaacacctttaccgggttgccaaagagatgccatcatatgtctcattgcatcaaaatcaattgtccggcctgtaaggaattttcccaccaaacaccatctgtcatcaaaaatcaactcatccccttccttatccccagagatcagaataccttcttcctcttcctctaactgaagctgtgcatattgatctttcagatcaatgttacctcgactactcgacgccataacactggaaaaacaccaacagactaccaaacactcacaacaaacacaacactcacaacatgtcacaagacaagactttgtctatgcattttattttattttaaggcatattacacgtagctattaatatattgtaatatttttaaaattaatatttatagttaaatttgcttagtaaccattcatgggtaatacccattaagaagt

SEQ ID NO: 131676 - DNA, 708 bp, Cannabis sativa
tgctttgtccctcccattagccgccgcaacatggaggatgatattttggttttccttagctcacttgaatccggagagtgcttataagaaactcttggatgatttcaacatgacctaaaaccaaaaaaagtacatcaaaaccaacttggttaagttcctcgaataagaaaaaaaggaaaagaaacaaggaaagagatgagtaaatagttatacttactcgttatgtgttagataattccacattgctaatgtgtggaaagataatagaatatataagaggaatgggatactcctcccattgccaattggttttgagatggaatctcatttatcttattccaaattctaacactatgttgaaatcgagactgagagttggaaatctcttcaatgcgaagctagaagtgtagaaacagtagtcccggatatcgtaagaatgcttcacagtactaactggacaaaccagggagttggaatacctatcgaacctatagaaatcgatcttctatttatggttccgcatattttggggcttgatcttgtagaagtacaagatctcttccaaggttgaaacgcttaccttttgttgtttttcacaagacataccattcgacaagcagacgataaactcgtgggatgaattgaaatagtgacactccggccacagcgcagaattttgcaaagtagcttctgttggaaattatttta

SEQ ID NO: 131677 - DNA, 836 bp, Cannabis sativa
  modified_base (26)..(40): a, c, t, g, unknown or other
tttctgatcttttattaattagtaannnnnnnnnnnnnnnaatgagttttatttatggcacaaagtccaataatagaaaccactggagaaacccaaaccgtaaatttaaaaaaataagttaaaaaaatatatatgaggtaatttccctatatataatatatgtgtatattactttattttgtagagacaactcaatataatgacttgatgattatgatacatgttatgatattaaaactctaataagatttttttgttttgtattgttaaagctttattagtttaatttttaaattttcattataatgtttgataattattatgatagtttaaaccactcaaactgcaccatatcacatttttgcagtgtgattttagcggttttaagattgtggtgcagttgcagtttgaaaaattattaaaaccgcatttgcagtttagtttgaataaatagctacaatccacaccacccccaccgccaacactcctattacagtttaccaaacacgacttcactaccctttcaaaaagaaacaactgcactacacgacattacgattaatgacacacattaatttgaaaggaaaataaataaaagctaagaaaatctcaaaagtcataactgataagctactttaaatatatacaaaaggaagaagacttgttcaaataatatgaggaaaatggagaaatacaacaatacagaaaagacattaatcgaggtctacatcaaataaggtctaaaccccaaaacctttgcaacatgattgttgtaaagaccgcttagtttaatttgaaaattagcagttaattatgtttaattatgaaaattattt

SEQ ID NO: 131678 - DNA, 674 bp, Cannabis sativa
  modified_base (26)..(47): a, c, t, g, unknown or other
tctttattaataagtaaatatgattnnnnnnnnnnnnnnnnnnnnnngggcataaaacccaacactaggtcatggtctgggcccggggtccggtccggggtctcgatcctagttctgatgcccgtgtctcgagtcgaggtcccccatctagctccgagccctaggtctcgatccgagtacaagacccagtcagggttcaagtccttgtccgagtttgggttcgggttctaatctcggtctgggtgtagatctgggttctagtctgggtccacgttcgggtctgagtctcgagttccgatctgggtctgggtttcgaggcccaagtctaggtcccccatccaagtttgggtcgtaggtctcgggctgggtccatgttcgggtttgggtcctagtcctaatatcgatttcgatttagtgtctgggtttgagtttgggtctgggtctgggttggagtctgagtcctggtttgactatgggtatgggtctggatccaggtctagattcttgtttgggtctggattcaagtccaggtacgagctcaggtctcaggtgcgggtctaggtctgtgtatgggtcacggtctcggtcaggatctaggtcgcgagttctgatcccagtctgggtccaggtctcggtttgagtccaggttagtatcaagatccctatctaggtcc

SEQ ID NO: 131679 - DNA, 817 bp, Cannabis sativa
ttgattttctaagtatagaaaatcaaatttcccctctcaagagagaaaccctctccagtctccactccaaagccctcaatctgattcctttgaattttcggagcaaaatttgtaagaatcgatctctaacttctttctgcgatattattatatgctcaattttacttttttaattattgataaatcaaaaagcaaattaatttacagattttctttcagtgttgaaagaaaagcaaattaaatttttatgtttaattttatttccatagatctatttatatatatacgtatatttatatgtttaatgaaagttcagcgataccagaatgcaaatgcaaaatttcgatatctttgaagcatcttctactgttcttctgttttgacaaaatttagtatattagttagatttttttgggtggaattgatatctgtttctaattgttgggatggaaatgaagaaatattaattatatgaatcatagaagtgcaggagtaactctgttcttagtattagagaaatggtacttccattcactgaatttggtcttcatggtatttatatttgttcttaacttacattgttgatattactattgttgcagtcattgcctggcaaaaaggagggctcaaatggaatcatccatggctgatgaggacagaatttcgaaattacctgatgcactgatcactcacatattgtcttttcttcccactgaagaagtcgttcgaacgtgccttctttcaaagcgttggaaactcatctggtattcagtccccactatctttttctccaatgataaaaatagggatgatcttg

SEQ ID NO: 131680 - DNA, 914 bp, Cannabis sativa
  modified_base (721)..(721): a, c, t, g, unknown or other
aaaaagatggaaatcccatatttgtaagaaatttttacataaaatgctttttttttttttctgtttttcaacatctatacggtatcataatttcagttatcatttttaccatatttttaaacttttatacggttactttttaaaaaatttcatcatatacggtttttgattacataatttaactgtcgacacgtttccctctaatatgtcaaatttcaatcacttccctgccagttaccattatctaacccactccctcgatattattgttatattttgaatttcctattctacatcattctcatcttcctcttcttcttctttctgatcatcgagttcttactcttttttttctgcttgtttctaagacttttctttgtttttgagtaatggctgttactcgatctcgttcgagttcattgtccccttctcctaagaaacccaaaaaaagtctattaatgaatctaaaccaaaatcaggtgctcaaacttcttcaaaaccccctaagcggaaatccaaagttgtggttgctgttcgtgagccttcatctaataatgctaggaaagctaagaggaagagaattgataatgatgatgattttgattttgttcgtcctaaaaatgtatttttgaatttattttttgtgtttttcttgttgatgatctgttgttttcatgttgttgttcattttttatttgactgttattttgtttgtttattntttgtttatttctttaattttttgggtttaggatttttctatgttgtttttatgttgtgggtttcaatcgtatttttttcaaattattattctatgttctatgttcttagtttttttgtttattttttattttgttcatatttcttcaattctattctaggttctatatgtagagattttttttttgtattaa

SEQ ID NO: 131681 - DNA, 1005 bp, Cannabis sativa
tacacgtgtcctttaaataggagtctggtctcgagtttctaggtgagagaaagctcactataacaggttccgctttggattaggttacccaaccttggactccaatattgggggaaaaatcattgagtgttattgttagcactttggggaagccgataatggtagataagcataccaaggatcgaacacgagtccaatttgctcgcgttcttgttgaaatggacatatttgataactcggattgcatttgttggtttgttaatgaatatgggcagctggttgaacaagaaattgaatatgaatggttaccagttaagtgtaatcattgtaaggggtatggtcatataatggctgattggaggaaaaaagataagccattggatgtgaaaactgggcagaaggttgaagttgtgacaataaaactagctgggaataaaagtattgagggtcaagaagaatggaaacatgatcaagctactggtgtggagattactgctgctattacagcagaaaatgttgctgctggtgtggttaattcagctgctattgcagtaggaaatggtggaaatactgctgccattgcagcagattttgttgctactgaaactgctgaaattgcaacgagtagtgctgaactgggagggaaaaaaagagctataaaggctcataatgatgcttggcaggcccctaaacacaaagggtcgggttcatctaaaaaagcaggagttgaacaacaacgagttctaaggaattcattcgaatttcttggggaaaatcagagagaggaggtaggtgaagaggggtcctttttagtttttgatggatagtatcaatattggaagttggaatgttaggggtttaaataaaaaagagaagcaggaagcggtgttggatattttgagattaaataatgttggagttggagctcttgtagagactaaaataaagggtgatagattggttgagatgatgcaaaagaggtttgttaattggagttattatact

SEQ ID NO: 131682 - DNA, 503 bp, Cannabis sativa
aagttttaatctttccctatgcagctcaatttgaagatgacttacacatcctcccgagccaagtctactgccctgaaaactatcaccaccactaccaatttgtagaaggaggtggatgcgaccaaggaggtcgaggtcgtaatggcagagctgggtgaggtgaagaaaaaattctagccgccaataatcgagtcgaggagctgaagaaggagattcaggagatgccatttaccgcctaggtcgaggcggataacgaggttctgtcctaggaggtcaatgatctcaaggatgagagggagggtctccgtactcttctcgcaaatttaaccacggatgagacgaacttggaagaggacgtcaaatccaggcagacgagggaggaagagcttttgaaggaggtcgaaaattagagtctgtcgccctggaggttttctacgaattctggaaggctaacccagaaggaaactttgattacctcagtgataccaaagaggcatatctta

SEQ ID NO: 131683 - DNA, 794 bp, Cannabis sativa
atagaagggtaaaaggactaatgtgcaattaaacttattacaaattgcatgtggataaaaatgtaaataccaataattaaaaccagagtgacacgtggcattgtcagattggctgatgtggtaaactgctgccacgtgtcgccatttgatcagctgtaaaaaggagcaattttgacttttgggctgaagaggaaaagagagagacgaggcccactctcagagcaggagcgtgagacgcacgcacggccagggtgacgccgtgcgcctcacgcgcgcgtggaagggagagggggccaaatggagccgctgctactgttgcttttgccgagccaatgggcgagcgccacgtagcgctgatgtcagcaggggaagaagaacagggccaaatgggcttttgtccttttgtgctctcttttgggcttcaaaaataccacttttctcttgtttgggccacatttttattatcattttttatttatttctttcttttttataaatgctattttctcaatcaaacacaaacaaaattaaatccaaacaaaatattctcaacacagacatgaaaatatttattttaaaatctaattaatttgtaattcttttaataaaaataatacatttttttatctttttatttctttttctcaattatgccataaatattaattattatttataaacaaagataaaactaattttaaagaaaatattttcaatataaaaatatattgcattaattttatgaaaatattataaagaattaattttattttgtatttttacactataaaata

SEQ ID NO: 131684 - DNA, 723 bp, Cannabis sativa
acctttgtccaaaagcttatttcccttatctttgagcactaagggaactctcataaaaataactttcactactaaaaaatctaaaattctcgatatttttacaccgtcgagtaaagaattcccgacggtctataaaatcgtcgcctatacgagcatcgcaaatactcggtagaataagcgacgatagaaaaatatctttataaaagaattcccgacggtttaaaacagtggcctatagtatagctgacggttttaaacagtcgctatatatagtggattgcccaaaaaaaattatcgtcttcatcctcctcaaaaccacttctcgcatatatcgcattcgctgtaaaacttttacagcttcatcctcctccaccgttgttgtgctcttcttcatcctcgtaaaaaatttcttttacacgtttcgaattgcttttcacttgatggtcattgaaactttcttctcattgcaaactttggattatttcgaacacacacaaattaatatcaacaaacaaaatcatggctagctaataaaaatttaaaaaccaaatcagagaatgttgtgcttacctttatgctaccacgagagagcggaggagagggacagagtgagagagagtagaggagaaggacggtgtgactcatggtcgcaaaagagagagagagccaagaaatgaaatgaaagttacaaatgactttgaaaaatgagatatgatttttttt

SEQ ID NO: 131685 - DNA, 851 bp, Cannabis sativa
tagggtatatcataaaaataccttataataattaaaaaaaaaattaacaacaataatatataattagataatataatttaatattactagatagtgaaataatttttttaaaatcttatttattttattttttattacattaaaataattaaattagctgagtgaaaaacggctaaattacttagctatattataaacacaagaaaagagcctatatagatatagtagtcgtgtagtcaatattgagagtgtcaccctaatatttaataatgggtcaagaaaggttggcgaattatgtagaaaaatatatgatatgtagagactagactatagagccaaaccaaaaagaaaaatgagtgattattatgcctaaaataataccctcttcaatcttcatcacttaattattagtatacacatttgtagtagaagattataatataaagtctttgaagtatacgtgcgtacgagacaattcaacttttgcaaacacaactatatatattattatttagacaaaagtttatgcatgcagtcgtccaagcactcatatttatatataaataaatatatatatattatatttgtgttttttctttaccttccatatatataacatagagacagctacctatgaggttagcctagaagcaataaccattgaaatggtatctaatagctcactaatcgagtgctcttacactaaagataaagggtaagtaatttactaaagttgttggatgtaaaaatgtatcagtaggagcaggggcagacccacatagaggcgaggtggggcagtcgcccaccttgaaaaaaaaaattaggaaaaaaatatatatgcattttagtta

SEQ ID NO: 131686 - DNA, 751 bp, Cannabis sativa
atatatattgaaatccctcttcctttttgaaagactaggtgcatatatattttttttaattttggcactcgctaaaatctatcttccccgaatcattctggcttccttacatataacattcttttggtatacatctccttccccttttattttattttatttatttttcttatataaacatgcattgttattttttcattgttacattaaacaaattttttttgagcctcactttctctctcgaatttctaaaatatcttttaagaatgattatggggtgatttctagtgagggggtatttctatgtccattgttgttttttcatctttaaatccttgtgtaagtttgcttttctttcttagctatttatggataataatggaaaatattcctgacgacctactagtttaagcacactacaataatttttttaaactattatccactcattttctaatcaaatgatttattgaaaatatgattaattaaattttttgtaataaaaataaatttacaataaataaacatacaattatacaattttagggtcaccattttgttttacaaccattttcaaaatgttacatataatagtgtcatctaacaggtattaaaataaaagcccaactgtctcaatgattcgagcacttcaggtccaaccacctcaatatgtataatcttcctttagctttaattttagtaaaaaaaattctaatatgtatgaaagtttagggggcaggatttagtacat

SEQ ID NO: 131687 - DNA, 2186 bp, Cannabis sativa
  modified_base (2123)..(2126): a, c, t, g, unknown or other
aacaaaacacagggtccaattggtaacttttgtaaaacagagggtccaagatggtatttaccctaaattataattaggacttttttcatgaatatagttgcagtaatttttttttttttatgtacaaatatggtacctaatatgaataaatcagttttacggtatataagatttttttttaacaaaattacggtagtaattaaccaaccactccactaatctccaaattcgatgagtgtaccatttctctctatactatttccctttccatactcttttcttgattaaaccactctttgtggtctagggtttactcccttgtatttgtgtatattatacttgctcttccttgtcatatctctttgtttttgttttggttgtagctggctaagacgtcgagtatggttgggaaagaagttgttgaacaaatggattctcatattgcctgtaacttctctattgcgctaaaggctaatgctgaagtgggcaaagacttcaacgaaaagttcgtcgtggtaagattgataactaagaaagtcattttccatgatttactccgtttgatgttatcaataaaatggagatggctcaaggctgaaaacttgaggaggtggccaggaatactttcatatttcacttcatgaagaggcatgaagcagaacttgctatgaagaacgccccatggtagatttgtgatggttttatgattattaaacaaatgtcagaagagagtctgtggcgttctgtagatttaacctcacggccaatttgggtgagggtctatgaaatcccctcgcgtttttggtcgctgaaaaatgctaacgtcgtggctaataggattagtttggtggtgagtatcgataggatgtggaaaaatggcttccccactaatgagtatatttggttctaagtcgttttacagttgaagaaacctttgctggtgggcttgtttctccttatggaggaggcctgtggtgctatttcaagtatgagaatctacctcacgtgtgttacaaatgtggagtgggacatgaaggtgttcttcatcgaactaaaaggcaaatgatcgtggatgactttggatgaacaatccccatgtatggaccttggatgagactcggctctcgcataaaggattgtttttcaaattatcaatcctacgaacatgatagaatggaacacaaggtggcggaagccaatgttcatgaagaaatgagaagaaatatactgcaaaatgatggagatttaaatcagatcttttgggaacttagattcatcgagaagctattgcaaaagcctccgttggggttatgattaatatagaaaatgatggagatggggtattaccaaatgctctgttgttgaaaggtggatcaatccagaatgctgacgtggatagtacggaagagggtacgaatggcctttcgaatgtgggtggtggtaacgctaaggtgattgggaatgatgagctgttaaagaatgtggctcaggagcccatgattcttggtggtcctagtacgaagaatattgttaggaaactgagccttaatagtgaagggcccgctgaggagaaaactagccatctcatgatggtctttaaaggtattcttcacccaaatcataggtcggccagcaaagctactaaatctaataataaaaaatgggtcaaatttgctccctgatttctaagtggactagttcttcgtctatttctactaggtctggggttggaaaaaagaggcaactaaaggatattgaaggcccttgtagctggatgggagaccttttaatttcagggaaggatgggaaagggaagaaaacatgtctaactagctatcccaacaatcaccttactattgattcgaaaccaggttatgaatcagctcatttagatggagatggtcagaaaacctgtactcagaaggagaatgaggagtatagcgagtccatgacagatgcagaaacagtgcaaaaatgagcataatgagaaggatttttccaaggccgaggaggcgggcctatacaagcccccaaccccccatgttaatcctttcatggcattgtcgggggcttggaaagcctcgggcattaaatgtttgaacttattttactaggatctagannnnctaacatgtatgtttgattataaactataatctaatatcctaaatataaatttcttaaaa

SEQ ID NO: 131688 - DNA, 625 bp, Cannabis sativa
aatataacttatatgtattggttatacctgatttggattgattaagagctcctaatcttttcattatttcaagtcaattgttaccaattgtgaaccctatgtttttcgtcagttttatttgaatcatatcttttttctaactattataaaactaatataataagagcacttgtgtttatgtaatttggagccaaatatcttgaaaaacacgtatacagattttggcctgtgctcctagagcataattttggaacacattgtaatgactcaaattttttactgagaattttacttctaaaagttcactattttcaaaatcattaacgaatgaaagagtaattaattaccaaatattttatgggctggtttggtatgccgtataaagatcgtattgtattaataataaaaaaatactatgtttagataaaatattgtattatattaattattaaggcagcaaattctaatataatgtgagtcgtattatttaaaacataacaaatgacatgtattaactgttaactcaagctgttaggtctctttattttgatgattaacaaatattttattattatttgttactaatgatttgttgattttttagcaaaattaaaagagaaaataa

SEQ ID NO: 131689 - DNA, 965 bp, Cannabis sativa
agagagagagagagtaccggaaggggaagacaccaaactgtacgacggcaaacgaaaccttcaccttgagatagcggacatgggagtggccgaactcgaaacactaaaggcagggggagctagtgagggcgatcgtttgaaggtcgatcgaggttgggagcagagtggagactggatcgagttgctacgatttgggggtcgggggttttgggtgaggctactgtttgtttctgtctctgtttcttttatgctaaaaatattacactcaataaatattattatataaattcttattataattattttttaattcttgatttttttttaatggtgtgtttattatagttataatattatatttgtaagttttttaaaattttgaattgtttatagtattaatgagacaaattttaatatgtaccgaattatattatcgatggttgacaattagattgttgaatttaaagacttctatttaattttattaattgtctaacatgaatgaaaattcagaaagtacgagttggtcaagtaatacatgtcaaagttcgaataaaaaaaatactaattagaatttttttttcttacatcttgtaaaaaaaaacccttaatctatttgatgatataaataggatttgcccctaaattataaactttgtagagttttgtgccctataaaattttttattgcaaaaatttcccctaaaatatataaattattccaaatatttccttttagttatattatgttcatttttttatttaatttgttgatttaacattaacatgacaatactattaataaattaggaatatgtgcatgcacttattaaagcaatgtttctatgtttaattctaataaattatacttgaggttagctcaagtggtcataaatgggtgtgtgttttggaggtcttgggttcgaatcctaagtaaaacatgattgtaatatataaacgtttaa

SEQ ID NO: 131690 - DNA, 715 bp, Cannabis sativa
  modified_base (515)..(525): a, c, t, g, unknown or other
aaactttttgaagatttttgtcgcaaatttccctataatccactaatctactttgtttttatctttcaaaaaattaatatatatttatataggtatactctaaggggtattactcatgatcgagtaatacaaaattttgactttagctttattttctatctaattagaaaaatctcttattttaacattatatgggctgtgattattacatcgactgaaaaaaaaaaaaaaaatcgaccaaaaaaattaaagaaaaaattgagtttgacttaaatattttgtatcaaaatatatttttgatatgctttcaaaaaaaatatatttttgatatagtttaaaaagagatatttttttatattcttttttattaagtagctaaattaataatagaaatttaaaatttttctttattatattcgttattaattaaaattcaatggtttaatattttaaaaattaatatttataatttaatttatttaataactacgaatgaaatatatatatatatattnnnnnnnnnnntatatatatatatatataagtaaggcccaatgtaaacactattttttttttggagagatacaatgtaaatacttttaattactataatatgtaataattaccacacatgcactaataatttaagggaaacttgcaaaaatactgtaatttgggttaatttttacaaaaatactgtcacacggaaattttt

SEQ ID NO: 131691 - DNA, 2056 bp, Cannabis sativa
  modified_base (2008)..(2011): a, c, t, g, unknown or other
gagagagagagagagagatggatgtttggtttttatttgtttaagggtaaaattggatgagaaaatagtgtgagaatattttgcatgatgcaaaatatgctagcatatttttagtaaataatttaattttaagcatataatgtcaaatttccctttggattattcaagaatttacaataaatatatcagtatttggagtgaaaacctctatttttcttttattttcttgattaatggattttatgggtttccatattaggatatttttcgttgctttatatataaataagtattttttttatttaaatatttatcttttttagtaatattttattttatatataagaatttatgtttaatatcaatctgtttcttttttctcctagattagtgtttattatttttttatacgtagttttttttttgtaattttatttggttgttttattttgtagttttactgttgttttagtaattttttatgttattattataggattgaaattttaaatacttacgttctcattgaaaaaaatagttgctttccaactattctggtgttggtctggtacgtagttcggtccgtaggtgttgaagatggaggctttgtatgttttttggggtgtgtatagcataaaagaaaaaaattaaggtgtggatagtttttttgtaaaattttctgtgtagtagtaaaattgtaaaactgcccttaaaatctagtatttttgtaaaatctcctaataaaaagtaacagaaggggcacatttctacaactgcataatattgaggaacatttttaacatgtcgtatatcataagagacattatttagtagtgtcataaatctataggtaaaaatgttattatttttttaagaaaaaaaaatatatttctaatttataaaatatgtattttgacatttaatattggtatatttttgtgtttttagatctttaataattatgatctgagttttttatgatatattattattattgaaatattatatatttatataattttttgaaaatttatgaataatttgtagtgtcgcaaatagcttacaattaacttatgaaattttttaaaagctcagacccaatccatgccgcttgtatttgataaataggagtgttaatgggtcgggtcggatctgatccggctatgatctgacctgatccagatcatgtaaggacctgcctcgccccgccccgctagattagatactcggatcagattagatgcgacccgacttattccgatcggatctaatccgacccgactatttttattttaagaattttaatattaacttataatttgatatccattttaattttgtactattattaaatacaataatatgtttggtattgacatgtattaatagattgtgtaaagatccgagtttgagtttgagttcgagttcgggtctgggacgggtcctggtccaggtccaggtccgaatcccggtccgggtctgggttcaggtctcggtccgggtacgggtcccagtctcggtccaggtctgggtccgggtccaagtccgtgttcgggtccgggttcgggtttgggtccgggtttcagtctgggtccggtttcgggtgcaggtccaagtccaggttatgggtttcgggttccgggttctgggtccaggtctgggcctcgggtccgggtttgggtccaggtctgggtcaaggtctgggtcctgggtcctgggtcctggtccgagtcccgatcccgggtcccgggttcgggtccaggtccgagtccgggtcccggtccaagtctgagtcccggtcccggtccaagtccgggtcccagtcccggtccaggtctgggtcccagtccgggtcccggttcgggtccctgtctcgagtttgggtcccgagtcccgggacccgggttagggtccgggttcgggtctgggtccgggtcccgagtctaggtctgggtcccaggtcccgggtttcttgtcccagtctgtgtctgttgggttttatgccctnnnnaaaactccatttcaatgtaatccggattattcaatatcaataaag

SEQ ID NO: 131692 - DNA, 1084 bp, Cannabis sativa
atactaattattatgtaaccaaaatgaatagaaaaaatataatcttggggaaaataattaattattaaaatattaatatagaaaactttatgaaaaataaaattaagcatagtaaaacgttatcttaatctttcatcggctcagcagtttgaatggtgaattgactgtactttgggctcatccgttacatataactggattttctatttaatgactgataatctttccgtagttttttggagaaacaaacaatgatcctgcaaaatttaatttaaatattacttttatgattattaagataagtttcagtgggcttgtaattgcaaaaaagaaaatattacacatttatgtatataaatatatgatatactaaatgtgaaaatatactatatactaaatagaatagaatagatttcaaaaagaaaaaaaaatagaatagaataacctatatgtttgttgatataataaaaaataggtaactttcatcacagttgattcatagaaagacgtgacaaggaaaacttgtgtaatcttttgacaaacaaaggaatctttagtgcttataaagatacaaatatatcatcgaaaaaaatctttttctaactaacatataatatgaccaactttttcaaaagaaattatagatgaacctttatcgtaataatatgtatatataaaaaaaattattgggactttctcacaattttgtcttcaatttctcttaaaattgaattataagttataactatttggatacaaaaaatttaaaggagttaaactaaattgcaacgatgagaagcaagtttcaaacatcaactctaactacaacaaattaatataaccaggtataaaaatacattccaaattccacacatatataatatatgaatgtatagtatgtgaaaaagaaaagaagaaaagaaagaaaagggtaatagagatttacctcctgaatgtagcgtatgaggctttcgtcaataaatttgttcctacgttggtctgtcacgtaaatataataagagtaatttgcggcaaaacccccccaactatcaatttacttgcaaaaaaccatccaacctcatat

SEQ ID NO: 131693 - DNA, 564 bp, Cannabis sativa
  modified_base (505)..(506): a, c, t, g, unknown or other
caatacttcatgaggtcatgtgaacacttagtcttgctagtggggtagtaggcgtctgtgtacttcttaagcttataaaaacttaacttttggcaattggtcctcattggttgaggctttgcaccgttgaaaaacaagatctcctctggagaaggcacttcaaatttgttggcaaagagcttataggatgaaagtattagttggaacagagcaatcccaatgcatgcaataaaatttacgaagtaagttcttagagcgagattttcccgattgaaatatgggaccgactctaggtactgaacccatccgtgctcgtgaatgcggactcctctaggatagccatcctatgccacatcaatcgtggaacgttgagcaatttggtattagtggcatatgattcgagcatccactatgaacaaaagtaattttccttttcgtacatctcccaaatggagtcattaaattcttgagtgggaggtgggacttgttggaaatattttaccannatctagatttactaccaagtatgtttgattaacattctaatatgaattctaaaacaat

SEQ ID NO: 131694 - DNA, 849 bp, Cannabis sativa
tctacaaatattgtcgcttttaaagactctgtattgttgactaaaagcgaagtcaataaaagtattttcaaattattttttatcaaattaatattttcgatataaaagaaaataaatacaaattaaaatataaaaatttctacaaaatatatttatgattgtaataagtcaaatcataacattattattataattaaaattttaacaataacttatttagaaatagattcggcttacaattacaataacttatttagaaatagataatttcaaatgatctctctatataagcctaatgattttctagcaaggttatgcgcatgaatattatcatttttttaaaatgtggtgaacagaatcattaggaaataaagacaaagagttttgcaccaattgaacaagatccgagaaagaaaatctattcctccatttgtgcttgatattgttaagcacaaaacaagatctattttttttttttttttctaatcaccatgaaagtcaagaaactatcgaccatattttaaaaacaaataaaaaagaaaagtggttgcttatcaagaaaattcagtttatgtcattatagggattaggcaaaaattagattggatagccaaactaggtactccttaaagacctagttaattagcttcgagatttagacacaaatcgttcaaattcagagttacaaaaaagaggagtttttaatacttctttcaaaatttatgcatccgaaaacacatgaatatatttttttttcaatatttttcataacagtatttgttataattacagtatcatccttgtaaatttttaaaaaattccgaatagtttacaatatcgaaaatagag

SEQ ID NO: 131695 - DNA, 1031 bp, Cannabis sativa
tattaatatgattacaaagttaattaatataaaaaattattttattatatttattttttaattttttttaaattaacgtataattgggatttacaagagagtctgtgtttcttacattaattaacaaacaatgatattataatgtatttcaaaaaaaaaaaaagattctaacttaacaagaaagaaaaaagaattaaaataatttaaaaaataattatttttttactgctaacaaatcaattacagtctttagaaaaaaaaaaaattgttcgttcattttgttgtgatcaatattcacaactttaaaaagaaacgaactcttaaaagaattttttttacttttttttattatgattacaaacaagttgtaaaaagtactagttaagattttgtttagtgcttttaaagtcaaaaaaatactagttaagattttttgcatatataatttttttagggtaattttctacatatataatactaataacaatattctttttgccaattaaatactaaatgaaaggatcctagatgaaatccaccatatataaagaagaatgattgttcatattcatgcatcatcgagaatgaaaaaaaaatgcaaaattgcaaaaggcaaattaatctattcatgtaaaatatttaatagattctaatgagaataaaaaagttaaagaatatcaaccttcaattattttgacaaagcaataactttatttttttttctttctttaataaaaatagttgttgtgatttttttttactgaagactattaggttttcattatgagaagaatatgaaaatataacatttaagaatgtgatttaattatttttttttttaaaaaaaaaagtgtaaattaggtattataaaagattcattaaacaaaaaaaataacttcccttattttttttagaagcgcttcctaaaaaagccagtgagtcattgcttctcttaaaagctcttctcatattttatccaaacatatctaaaagtagctttgagacttcaaaagctcttctaaagccatgcc

SEQ ID NO: 131696 - DNA, 664 bp, Cannabis sativa
tattttatcaatattattgttcttgtacttttcattttgagttgtattttgactttggtctttctattgaagcacctataaatttccaacacactaagggtcggcctgatgagaagcactaagggtcagcccaatgaggagcactaagggtcggcctttgtgatgagcactgagggctcagcccaatgaggagcactgagggtcggtgcattatgacttgtcttggtaactggggattttggtcatatataagtcttcacgactttggccatgagtcctcgcgactttggtcatgagtcctttgggtgtcttcacgtcatctatttctcttagtgaccttttgatatcttgaacaaaattcatgcatatttattgatttttagagggaaataatttattactttacataaaaatacaataataaaattaatgataaagttattattttttttttttacattttattaaaaatactaaattttgcatcaaatttaataattgtacatactaaaaatagatgcaaatgcacaattttacattatagtatacctatatataagaaatttataacttggcataaatttatccaagttaaataataacatattttatgaggccaggaatgtgagtattgataatataatcttcccaatcaatggagttg

SEQ ID NO: 131697 - DNA, 773 bp, Cannabis sativa
tcaaccaaagcaaataaataaatgtagttctaccctcgagatattagcgacagtttttagttataagcttatgtctaattatgggtccaagttcttatttcctaaagaacaaatactcaaactctcttcgtaccttatggcaactttatcatcattgaagactcattgtggtactgatactgtacattaaaacatagggtaaataatctaagccacgagcagccattaagatttaagataagaagtcaatctcatagcaatactcgtggaaaagaggctaaatctacttaagtcttaaactcaatttgaacagcgtggttcccaatctaacgctgaacaattaaaaaggaaaaaactccttacagtggagacaaattaagaaacctacccggccgctgtgttggagaccagagtcccttcagtgatgaggaatccaccttgggtggatctttgcgtgtagtactcagccaaagccggtccagggattccattcaaagctctgcatctagtcatgggcgcaagcaccaccctaccaacaataacagaatctcataattactccaaattctcacaaggccaaattcctcaaaatacagatctctaaacccagaaaacataattaaacactcccttctcctccccaaatcgatcgggctaaagaagctaaacaaaaaaacactgaaaccaagcttgatcgggtgaattacctgtgagagagattgaagttggccatcttgtaaggggaaaacagagtgatcctttctggtgaagtg

SEQ ID NO: 131698 - DNA, 1360 bp, Cannabis sativa
caaagaacttctcgatgaccaaggtgttttacataccacacagcaaggaattggttcgattgttgagaattattttcaaaacattttctctactgctggttttgatgctgaagcagtacagtatgtgttaaacaaagtgccgtgcaccatatcagatgaaattaacagattgctgctggttccatatactcgtgaggatgtttttaatgctctatcttctatgagtgatgatagcagccctgggcttgacggaatgtcggtcatgttctacattaattattggcatattgtgggtgacttggtgtctcaaactgtccttcaagtgctgaataatggtgcggatccttcttgtttcaaccaaactctaatcactttgatccctaaagttaagaagccgaactcaatgtcccagctacgtcccatcagcctttgtaatgtgctatacaaattagtctctaaagctattgtgattcgaataaaaccttatctgtcaatggttatatccgaatctcaaagcgctttcctccaatcaaggctcattacggataacgttttggttgcttttgaactcctccattccttaaagcacttaaagagaggcaaggaaggatatgcagccattaagcttgatatgagcaaagcctttgatagagtagaatggcattttgttcatagcatgatgattacaatggggtttgctccagcaattgcagatctcatttaccgatgtatcagcacggtctcatattctttttcggtcaatggttctgcacgtggccacctaattccaacccgaggtatacgacaaggagatcctttgtcccccttcttattcatcatatgcgcggaaggactttcgagactttttcaatttgaagagcaaggtggtaatttacatggtcttagtattgcaagaggtgctccgagtgtatctcatttattcttcgctgatgatagccttgttctctgccgtgctaatcacaaatccgccatggctatcaagcgatcacttgcttattactgcagagcttcagggcaaagtctcaatattgataagtcggttctctctttttctcagaatactcttcctgctattcagcaacatatacaacaggttcttcaaatggaaatcaaaccttgtcatgagcgttatctaggcttaccttcatattcaggaagagataaaaaaatactttttggagaaattaaggataagctttggaatttattatcagcttggcaagagaagctcttctccattggcggcaaagaagttttgctcaaagcggtggcacaatccatcccaacttacgctatgagctgttttaaactatccaaatctcttattggtcagattgaa

SEQ ID NO: 131699 - DNA, 778 bp, Cannabis sativa
tccctccccttgacaattcagatgttccttggaggaacttctagcatcttttgctaaagcatcaacaaaagtaataatatctcgggaaataaaaacacaagaacaattaaaaatttacatctgacaagttaccaattttttaactaatcacatttatctaaattgggacatactgttttaaaaatataatatcatgttaccacgtctaatatttcgatacatattttgaatgcatatatcattactttatcctatttattatttgtcaaaataaaaataacactaattgtaaataatggtagagaataatttacttgtttactgcatagagaaaacaacatatatttatacacaacttaaacaatttattatgggaaactaaaagaataaaagaaacttattagcctaattttttactaatatatatgttgatcattgcccaactttttacaaaaataatcaatggtaccccattaaaaagttttgtgaagatgacccttagttgctcttcaatcttcacatatcctgtaaaaattaaatctggttgaatctttttatgaacaaaatgacaatcaatttcgatatttttaatctgttcatagaacacaaaattagacgcaatatgaaaagcagcttgattatccaatgaaaatttaaataaagagaagagagtatcattttctggggattaaaatgttaaagttagtaacatcatattggtgtaagattctcattcttcttcatttttgagactttttctaaaggaaaaacaaagaag

SEQ ID NO: 131700 - DNA, 1025 bp, Cannabis sativa
  modified_base (681)..(683): a, c, t, g, unknown or other
ttgtcagacatagatggaacaacagcaaagtcagagtgagaggcccgagctcttttcagcatgctgcgaaccgaagagccaagttgacaggactgcctagcaaaagacctcttcctggtgggggaagggatagcaggagagtcattgatatggaggctggataaaggaggactgctcagggaaaccagagatggctgcgggtacatgggtgctttgcctttggaagtggtaggatgggtggtggaagtcataatggggtgagttgggagagggcagtggagggtggagtgcacagtttgagactgagtggaactggtaatgttggaagtagtagcagtggtgagttggagaaagttagaggatggagaggaagtgacagtagtaggggaggggacagccatggtagacacaatgaaatggtttgtgtggtcttgaaggctatggtgaccaaggttggaaatggagggttgttcctcgaaaggaatggaggtggatagttcaaagatactcttcttataaatggagttggcaggggcacggaggacatctttgtagcttaaactgggaggaaaaggatgatgatcacagtgatggagaaacttatcacacttgttgaaggtgtggtcaagcttaccacaatgatagcaataattttgaataccctcataaaggaacttgagnnncttagtgagggatagtttcctgaaatggacattcattccacggtggaggggtttggtagtgtcaagaaggacacgaacacgcataaagggggtaacagaatcatacagaaaaatgagatggacctcaatgagatcaccaatagtatcagcaacaaactgtgccagaccataggatcgagaaccaaatgggataaaatgaacctggacccagagaggaatgtagcgaagttgagagggaaggatagtgtcgaagccatcaggaatagcaaatatcatgagggatcgatcaaagtgccatggctggccttccatgacccttcgacgatcaccctcacagccaaa

SEQ ID NO: 131701 - DNA, 1096 bp, Cannabis sativa
  modified_base (263)..(266): a, c, t, g, unknown or other
tatagtgttaattctgagagtgctaacagttagatccaaatctataataagtgttagattaaatgttcgcattagactaatattacataaggagtgaagagataattagaagggtaaaacaataattttgaccaactctaattatgaactaataattgaagagaaaactacttagattgattatatcaatggattacaagtaagaattctataaatataattttatattgtcaaagagtgtaatttcatatttatagtggagnnnnaatagaattaataaactagattattctattgatgagatcgataataattaagtgtttattagaacttcgaaatataagtctatggtcataaagtcacatctatataatattgtataggggaaggtttaattgatgagtaaatttgagtgagaattaatttctataagaaataaattgttaaggaaaaatagtattttgtaaaattattgttttgaataattataacaattatgaattgtataattaatactatttaactatttagttttattagataaaactgtattaattagttaaatttaatatcattcttaaataatattaaaaaaaattaagggggtgcatcgtataagcacccaataataatactgcaaaaactaaataacgataataaaaaaaagaattaaaagaaaaagaacattttgaaacctagttcttcaacccctctctctaccacctcactttctcttcccccttcttttcacatggccttatgctagatctagtttgtcgtctccaactattgatggcccaaacgagcaccacgagggaggtccttgccctaaaaaacctctgctccagtaattctcatcaaagagaaagaggacgaaaccccgagtcgtcgaagatgtcatactccttgtcgtcctcgcagaattgtagagccccgtcggtgatggtgctgcctctcaacgctggactcaatctggagatggctttatttgtgggtttgttattgtttatgggtttaagggttcgagtttgtgttttgttaatgagttagggtgtaacgccctaaataattaggcacgctacccaaaatgcttatg

SEQ ID NO: 131702 - DNA, 665 bp, Cannabis sativa
gtcgtcgttttactgagagtgatgttcctcttgctcttcaatccattattttagcggatgtttctgtctaataaagattattttcattaaaaaaaaagtacacattttataattgtttaataaattaattatagtgaaatttatcaaactaaacaatgtaaaatactaaaatttgtaaaataacattacttaatttactctatacaaccatgacagtcatacagtgtaaatctataatcgttttctgaccgttatgctcgtttatggtcgcacaatataattcatataaacagcattgatccatcgaatccaaaaactattttgcttcattgtaatggcataaatgtacttcgacatgagagtaatattccacttttcttcccttctcgaaaaacaatattaataccaccataatccttatagcaagcacacttgctctcaagaacgtagatgcatctttcttcggttaccactttctaaagaaaatctcaacacaatttatcaataacaatcgttaatttttgaggtaaaatgaaaatactcattcaataattttaaatacccaacaaaatagagtggacaagttgggctcgcctggcaaaagaaaaatgtcgactagtccatgttagactatatatatagtgtatgtaatatagcatatacaa

SEQ ID NO: 131703 - DNA, 892 bp, Cannabis sativa
gtccaagggttcccaagcccttggacattccaaaataaggcgatcattgctcgcggcgactcagtttcactaagttcgccgcttgtaaatccgttctaaaggtcaaatcagagatcctcgaaatgccctttatatcacaaccccgaccttctatgtgcacatcctctatcatcacctccttagtaccattaccccctttgttcttggatcgtttaggaatcacctttcttctcttagatgggccctccatttttttcaacgaagcaaaactatgatcataacttatgggaacatccattaactttggcagtggatcaagattattgtttagtatattcggtcgacaattaggagcatgattagtttgttgttgttgcaaatttccacccagatcaatatagctctcttccctccaagaaccatctctttttgaacttccctgtccagtattgttcaatcccaaatccaattcgataccagtagtctttatgtaattaggggcttccaaatcaatacagaacaactccaacttgttatctttcacattgttcttacccttccccaatatttcagtattaatattaagggaaagagaagaactcaccaggggcacctgagtcggtttcgaattgaaggtgtgtgaagattcaccactagcacccgaactataaccagtaggcaacatcatcgaagaggcattctgtttttcaggaaatccaggaggggctttaacatgagttgtattaccacacgggtcttgaatgaatgaagtagtgaagtcgtattgttcattaactttgagccaagaaccataccctggttgttgcttccccatccatcttcaaagagtttaattggttctgcacaaacccgagtatcatgtcccacaaaa

SEQ ID NO: 131704 - DNA, 1327 bp, Cannabis sativa
cttgtttttgaccattttggagagaatacccgaagtagaatttgcatttgagtaatgaaaaccaacgcaccaggttgattgtcaacctgggcactggccaagtagtaggtcaacctgggtgttaggaccaattttgatgcccttattgttttctttttctccctaagtttacttgtatctttgttatttctgatgacggaaagaatgcccaaaacactttttcggaagcaagattggaaacagcccaggttaacaatgttatcctgttttttgcactatgatgtggcatctagctagatgacgtgtatttcattttccaacttgggcagatggttacgctccgagaagcccccaagacatctgaccaagctcaattgtgtgatcatctcacatacatcgacctaggcgctgagtccagatttaggcttctttaaagtttcgattgctccccaaaaatacgtgaatcttaatctttgatgaaaatggataatatgcccagaagacttgttggaaaactcctcagaattgacccaagttgacaaaatgtcaacctgggtgctgggccaacaccaagtgtcaatatagtcgcaggttccttgaagacttgcatacttgaagatttatagcgtatctctaataatgatccattttcatgtactctaatcggtgtatgcaaattgactgctagtctgatgatgcagcatactatgtccaaatattcccagcttcctcttcgagttggttttttataagtaacaaatcactctagacagtctatcatggagcgtgtgatatccgcccaggttatgaaatcttctacgcatgtcacttagatggatgccacgtcaccatgtgtagaaactaggataacaagtttgtaccccctgaattactactaacctctataccatatccactcaacacctctagcatgctagagtcggtagggttagttcatacttataagtacaattagttgttataccacatacactcaatacctcacatgtactagtgttggtaacactatgtcgtacccccttgtactatatcacatagactcagtacctccaccatactagtgttggtagtaataattcatataatctaacatgtataccacatgcacatatgtatatctttatactaatcttacctcgctttgaattcaggtgtactagtcaacctgagtggaaatattgcttgttgaacagaggccacatgttaaatttacgcaaaaatcaataagtgttactctacacacttttaaagacttgaacttagaactagaagtttccctattgataaacagcatggtaatacccta

SEQ ID NO: 131705 - DNA, 1034 bp, Cannabis sativa
aagcaacaaatttatctcttttaattgacttttagacccttaaaaaaataataataataataatgataattttgtttttctttaaaaaaaaaaaaaaactgattctttagtacaaatgaaatggaatcgcaattaaaaagaaagaaattgactcatcaaatacaagatgttgactaacacaagctagctttggataacaacacatactctcactctctcaccacatgaataacagcaacacatctattcactacaacaattacaacaattagaggcagaaggatccgccgataataacatcatttttggccggtataagtgattattagcggagtcctgctaatattggcccgccagtaatacctggtcagtattgctaattaatagcggcaaactaatacattcaccgctattaattagtaataccgacagacctatagtgatggaacccaccgatatttatgccgtcagattttaatatctgacacattaatagcagcaggtactatgccggtattgccttttaaagaaaaaaataaatattatatataatgtttataaaatatataatttataatagtattaataatatatatataaatatttaaaaatataatattaataataattttatattaaatcaaaaataaattaacaataaactaattattacacacataattaattgataattctctaacataccaaataaataattatcgtccacagataattaaaaattaaactaataattattgtccacacataattaaaattaacttaaactataattcatcaagcacattattattaaaaaaattctgaactaacggtgttcaagtttaaatgggttgtttgtgcattgtcttgagcttgtgatattggcagtgaagggtatggctactacaaagataaaatctttgaattattacatgacaatcgtgagatttcaatccaagaatatttgttaaatcattgttcactttcttcttcaaatttgagcaaaatctatcgagaaactttacgtctttgat

SEQ ID NO: 131706 - DNA, 563 bp, Cannabis sativa
atacgaactaaaaatgcacactcaaagaaaatcctagaagagcatttcaaactataaaaatatgttgaacaattaaaatgagaaaaaagaaaactaaaataagaatataaacaaaaaaaaaaaaattggaagtgacggactgatggcatgatagagaaatgaaatcgtgtttaacactcaaaccactctcaaaatagttaccgtgtacacgtgtcaaaaagaattcaaaaaaatcgctacttttaccaaattaaattacatttggtacatatggaaataaatttaaaaaaagatctcacagcataattttctcttgaaaatttaccttgtctttattaaaatattttaaaattacttttatttatttcaaacaaaaaataaatatattaaatttctttttttgaaaatggaattatattaaacatttcggaagtcaaattaaaataaaattttttatatataattttttttaaaagcaaaaaaaaaacccacacaggacacgttattttattatggttttttttttatcacaattatttttattaatttgtattttttttttt

SEQ ID NO: 131707 - DNA, 718 bp, Cannabis sativa
ctaaacttggaaagaaagaatcatatataaatatattatatgtaggtcatcaattcaaaatgatgaaatttttcatacataatgaccaagcatgttaactatattcagaaacaaaatcaacaaagttttaagctcaaagccattcatttcggccttagatgtgctatttaatcgtctagcgaaattacttgtgaagttgaattgtcttatcacgtttattttgtttaagagtctctttagtaaacgtgttgtgttgtattttaatgtataacattttgtattgggttgagttgtaacgtatcacttgtacaagagtgtacacataaatataagcaattcacggtggcagttaactgtgaaaaatagatgatattttaaatttgcaaacagttcaatagtttggaaggttttaccgcaaaaatttgaactttaagagttaggtgcaagtaaaacgatggttgagagagtttagttgccaaaactctatcatttaatacaaaactatatttggtattgacttgtattaataggtcatataaaattatattatctttataatatattatctttataataaacaaaccctccatcttggacattgaactctgccctagacatcggatctggattcgatccctagacctcggatccagactcggctcttggctcaaacccaaacctgacctcagcccccgaccccacccatggacctcgaact

SEQ ID NO: 131708 - DNA, 750 bp, Cannabis sativa
aggccttcacggaattgtgcaccaagagtttcagttggtgcctctcttcagatgttctatccctactttggagataagggatagagcaaaccacatcctttctttgtcaactgaacaaagaaatattattcgattaaccagtgtggaaaacttccggatacatggcttgtatccccccgcttctagggttgcgagaatgccagctgctggtgttgtaacgccctgtcccacagggacgccacgtgtgtgcttttacaaattaatttatagttaatctattagtttacgaaaagtgcggcttaattaaaataaaaacataatttttataaaagaaaactaatgttaagtacggggatcccctgtataaaaacttttacaatttgttccaaaagtggtattacaacatcgaattatactttcaaaatacagtcaaaaggagtggatcctgtccactggaaaccgaggcactgcggttgatatgtacatcgttgggagacctctgacttatggctgatccactttgcccttccctttatctgcaccacgaagcactcgtgtgtcacaaagactcagcaagcaagcaagtaaaacacaaacattatataacacgagatatcaaacagtgcatagcatacaatattattattcacaataaacgcttatacaacacatattcaagcattacataacaactattcgtctaataagacaaactgttcttgatgtctcataaagcatccttaccactcg

SEQ ID NO: 131709 - DNA, 693 bp, Cannabis sativa
agacttctaatgcagtgtcataagttccacacgacaaattagaggaaatgagtgtctctccaaataaagcaataaactaaagtaatttatctaatcctatccattagcaattttcttccctatctctccattttggatttgaagttcaagtctagttccaattttaataaaattttatttcctaaattatttacaagcatgacattcattctaaaactgaagaaatcattgctaaatttatgataaggaacataatctaataaagttttgacttaagattacaatcctgattattaaatattttctaattggtgcagtcatgtatactacatatggtactagagaaatagtacttgagaatggaacaattagtggagttcttgtatttttcacgttacattcttgaatgatccattattattttttccaagtagttatcttcatttaacatcttcttttgcttctaaatttgagttttttttttcaaaaaaataaaaaagaaagaaaagaaaatcttttgtagttgagaacccaatactaatactgagacatggtgatatttatcatgaagaagaaagaattgaagaggatgatcgagataagtgaatgatattaagaggtagtcccacattgctaatgtgtggaaataaattgtgatatataagataaaagggctactcctcccattgccaa

SEQ ID NO: 131710 - DNA, 515 bp, Cannabis sativa
  modified_base (472)..(479): a, c, t, g, unknown or other
atttccgctggaattacaacaaaaaaaataaagggaataattgattttaaaataatgatattaaaaaaaatatagccagttaaattaagagccaaatcaggagattctcttcactctttaactgaccacttccttattttctctcaccgattacgttacatgagttgtgaagttaataaaagaaaaataaaattaaattcaatataggctctacaaataggatgggtggagaacataaaaaaggatcgacactttgaaagaaaaaaatatgagagagagagagagagagaaaagaaacactgagaaaaaaaaaactagaatacttttttggcaacaatcaacaaggttcaagggtaagtattcatggaatgctctcattcctattcttttctctgtttattttgatgttcattatttctcccattgtctcttgattcatctatgaaatgcctgttgggaattattttaccannnnnnnngatctactcacaagtatgtttaagatcggaagagcg

SEQ ID NO: 131711 - DNA, 1258 bp, Cannabis sativa
  modified_base (711)..(713): a, c, t, g, unknown or other
aatatattgaaattggattgaattatatcatatctgatccaaaataaaaattaggcgggatggagcagaattaatccgagattcagtaagtatctgaatgttttggatgagaaataatttgtcacatcggagccccaacccgctccaactataaatctttttgacatctctaaatataatattactattagtgtaactcaatatatatcaaatcgtttatagaaaatcactaaatattataaagccacaattcatcgtactgttaaataccatgaatacttcataataatattcttctatattatataagctaaggctaacgtgttagtctttttctttttcattcttttttttaaagctaacgtgttagtcatgcatgcatatacaatattatatttatgttgctctaaattaacgtgtcaacgtgtgcctgcatgcatggattagtttttactacgtgtgatcaaattaaagcatccaaggattgtcccaatatatggtctttactctcttcaaaattatttttaaaaaaataatgatttggaagaacaagatacgacttttattaagtttcatcatataatttttatatataaaatgtatctatttatcaattttcgtccgtttaacaaaatattttaagaatataaaatatttcgttaaatttaacagtattaataaaaaaaattataaatatatataaatattaannntatttattttaaattaattttaaaatatattaatattatttattttccaaatatcgaagctcacttcataattaaagggatgtttgaccattgtcctgaaattcttactatttacccggagctaagcaaagataagaaacctttcaaatatttcaaaatgtggaagtgaaatcttgagtttcagacctgtttagaagagatatggaatagggatataataggttctcctatgtttcaattagttcaaagaatgaaagagatgaaaggctagtaatttaaaaaaaaaaaaaattaatcgggtcaaatttatttagagatatatataaaagtgaagatgctcgggctgtttagaatctggtgcaaattcaatttgaattacaacagaatcctcttaacagtaatatctacagtgtaaagtaaaaaaaaaaaaactacaaatcaacagcatcatcttcgtcatcaacgggaagggcagcctgtgaggaggaaccagctgcatggccaggaggctgaaatggtggaatcggtggaatcggaggcagatc

SEQ ID NO: 131712 - DNA, 542 bp, Cannabis sativa
atttagaggaactataccacaaaatcataattacttatttttcaaatgtaatttttctcaacaagttgtgaaccaaatctaaatttggattggttgcaattggtcctctgagttcagtgaatggactcgtttgatagaagatatgtgcaaatatgtataagtaacgatagttgtgtcaatttttttagcaacaatttgttatatttagctaaataaaaatattttttattttaatagttattcttatagagtagaagtaattatagatatgataaaaagagatatagtttatagaatagttttactcaaaagaaaatgaaagagagtgagaggatttttgtgaggaaagtgtgctccttgtaatatagctgggctccttctgcttgaaggagactgttgattgtatttgtgtttgtgattaataaaggatttcttttttgataaaagaagtatatatatttaaaaataaattataatattttcttaatgaatatttggaggaaattacactctatactatttttatattgtcttcttttatt

SEQ ID NO: 131713 - DNA, 974 bp, Cannabis sativa
gagtggagtggggagcttcttatgcagggagctccacctatgcttgggcctctcctcatgttggctctccctcttaaatggtgtctcgccttggtagttgggctcttattttcttgctcatacacttttaaagtgtactttgaaatttttcctctcattaatctagagatctccaaaaattatacttagcaattttggggagtcaacagactagaataaagaattcttctcatgtattctatctctttggatcagtaggacactgttccttgaataaaagaatgccatgtctagaaggcatacgagctcctttggagttagtcatggagaagtgatctagccctagtttggtgctcaaagccctagtttgtgagttatgccatcttttttgccaaaaagatcacacaggtcgcctatcaccatagaggaccatttggtggtctttctttcttgatttatgtatcttgatgttggacaaacacatatgaccaagttcccattagccatttaatggtggcgagttgtgccattttttgggtcacaaagatggcacagatcgcctatcatggttctccaccacttggtagcttttctcacttgttttatgtcttttgatattggaaagacacatttggccaagtatctccttccctttcttaatttgaaaggaagttcttgtgcaatttttactccatgttcgagtattagcctccttgtaccttgatgagtcaagttctttagagtgaaaatccttgtgtgggcccatgataggtttgatatccttaggtgtgagtccccacgctaagtgattggtttgatatcccaaccttatttagttctcgctagtcttggtcaaagttgttatgtgtaactttattgatttcacaaaaatcgagtataataatgttgacagatatcacttagtaaacacaatcaacatttaacaaagagaaatgctaaagggcatcagtggt

SEQ ID NO: 131714 - DNA, 715 bp, Cannabis sativa
taaagaaaaccctaattttactaattccctcaccaccttcttcctctcttagccacactctcccattctccccccttttattaaaaaaaaaaaagaatccgaatagagtttgtctcattttcacgcaccaacacaaaccaaaaacaaaagatgctttaatattttttccatgagccgtcgacacaccctgaaccacgaagcaccagaccgtcagcgatagtagactccagcacctgatcccttattcaatttgttctccttcgtgtccaataaggtcaccattttctccaagttgttcatggcatctgagttttgaaggtgtgatcctgattgtgatgggttgtgattttgaatctacaatcctcgctcccctactccccctttcgttgttagatctgtgattttttaatttttttatgtgggtttggttgtttcacatattttcagatctatttttttaaaaacaaaaaaattgagatctctaatgattgtatttgcatggtagtggttagggtggttcataaaatagccgatccaatccaatccgcaaagtgcggatattcgcacttgtgcggattggattggataggaaaattcaaaatctgcacttgtccggattggatattgattgacaagtaaaagtaaccgatccaatccaatccacacatatttataacaaaattaaaaaaattatacatacaaataacattttaat

SEQ ID NO: 131715 - DNA, 3247 bp, Cannabis sativa
ttaaggagtatcgctaaccaatcgaaatgcgacatgtcgcaaaggtgctaggcaccactgatacctaatagcaatgctcttttacaaaacacatatatttcaaaaatacgtgtaattaataataggtacaaaaaagtataataaatattgtaattattattagcttaccgatgatgttgctaggtcatttgtaagtcgtaatattatggcactatgacgaattatggcgggataataaccatgttcaaagcattcgaaaatctctttactacttgtaactgtgtgattataatttgcatgagaaaaataagcatgcacaattagaaccggtgctcccactgaaatccaaccatttttaatatattcttctagtgttggtgtatatccactatagtaccattttgcctcttgtaaaaaacctctacacatatctacccactgcacaataaatacgtaattagattcgatcgacatttagtattattaataacttttagtacatatttattttattgtatatttaaagttgttatattgctattaatacaatttaacaatattttgtatgagtgtcaatcgattcagggtttaatgttgaacaacaatacatatacaaatacgctaattatatataaaacatatacttcttattattatagctaagttaattaggtattaatacctaattaacattaacatgcttctctatatgtcatttaattaacaataagaaataaataataaataagtttatatatatatatatatgatcataccgttttcttaaggtattgaatgttgatggagatgtgttggtctcttaatacctcaaataccatttcattaatggtattgtgtaaaacaatataaggcatcttcatatattctggtaactcatttatcatttccatatcccatctgcatataaacaaaattatacacacttaaagaggactgatcttgagaatatatgagtctaaagccatttaaaattttaggatcctcactttcgaaaaaatatttgaaaaaaaagtattataagacttaaacctacactattgtgtaatatccataccaaccaaactgtgaatctttgtttttacttaaataaactcctaatgatgtattttattttttattttaggcttccaaaaagtgtggaccctaagtacggatctaatccatatatgcactcaaattgcacacatttattacagaggaaaattgtattaatattgtatacccatttcatttttatctctcttttgttagtatttaatttttaccttttttttcttgctcttattctcattattcactgaatatattgaattgcgaatgcgattcattgaggttgattaagttatgtgaggattttttaggtacatttctcgtaaaaatagaaatatattaatgtgtagctatttttgattaactaatagaaaaaaaaaatattcctcaacttaattaaactcttattacactacacagtaattaactaaatgggatatatgtctaaatatttatttattattaataaatttatatgtatatgtatatatactaacctctcaatagctttggtgaaaagctctaattcatccaatgttccataaacatcatatatatcatcaattactgttattagctcaaataatttggcagttgtttttctaaaataactgaattttggctcaaatcttattccaactttccataagaaacattccatcaatcgatctcttgcaaaattcaatttctccccaagtttagtatgcctccaccaccttaattatatatatttatataacaaatcacttcatcagtataaataaatttaatccaaaaaaaaaacccttcatttaattatgatatcattatcatcatcacctgaatatatgttttagatcgtcatgatgtgttgattgtatcatgttgaaatcgagtttagcaaactcaagcaaaataggattcatgtcttgttttttctcatacgcgtcgatgaaccacttagcttctgttcttgtagtcctccaatgaagtgggagctccaaagcgtgattcactatttcgatatcataatcataatcattatcattatcaatcattaactttctttcttgtgatatcattataatgtagttctttagatattgagttgtgaaaattctaacttcttctaaaatactttcgccttttttctcatagaatgaagcttcatataaggccaatacttccataatatcatcactaatcatgttcgctttgatttttcctatctcttccttaaaatgattaaaaatctctgcaaataacacatgatcggatgaataatttggttaatttattaaactaaatcaaacgaatgttaattaatttataaaaaaatgtataattctcaataaaaactgtaaatgattaattcccaaatctttgaaaattccaatttttttcatttgaggtacattgcaattttttttttttttttttgtaaacaatccttcaatatatatagtaggatttgtttagtaggccgtataagggttgtattgtattagataataaataacactatgtttgaataatacaatacattgtattaattattatgaccaaattttttaatacaatgtaagttataatatttaatatataataaatggtatgtattagcttgtattataatatttacaaatgatataggatcaatcctaatttccgacccggatccaaggatcgaaacccgagacacaaattcaaacccagaccaggacttgggacccaaacccgggacttagacctaggacttgggatccaaattctgactaagatctagctagggacccgggatgcagaccgaatttggaccaggacctgagaatcagacactagactcgaccccaaacccaagactcaggacccaaggctcggacttggatctggacttgatacttgggacccagacccggactcgggatctagagttggaccaagaccagggacttggaacgcagacccgagactaaggacctggccccaaacgcgagccctagatcggacccggaccacagaccacggggcccgacccaaactcgggaccccgggctcggactccgaacctggagctggaccctaaatcgggacccaacccgagacctagactcggacgacagaccggacccgactcgtagtcagtgttaggatcgagtttattgaaaatatattataattttatacaacctattaa

SEQ ID NO: 131716 - DNA, 600 bp, Cannabis sativa
  modified_base (518)..(528): a, c, t, g, unknown or other
cgatctagggttttcaaaacccttaggcagccaccccagcagttctccgaccacccaagccacctcgactcctctctctctctctctctctctctctctctccttagtcctaatgatctcaaaacccttcggcagccaccacaagcgacctcggtggttctctaacaacccccaaccacctcgacagttctccaacaacatccaaccacctcgacggttctccgacaacccccaacacctcgacgacacctctctctccctcgatgctctcgtaagtcctttcctctcctcatttctctttatcaaaaatgatattttatttttccagatcaaggtgttttgtgatttggaaaacacctattttggtttaacaaactatattttggtgttttataatttgcatttttttctgtttcaggtgagctttgattggttttatgttgtggtagttttggtgaggtgttggtggttttggttaggtgatgatggtttctagggaagagagagagagagagagnnnnnnnnnnngagagagagagagagctgtaaatgaaaaaaactgaaaaaaaaaaaaggaagaaaaaagaaacagacgaaaga

SEQ ID NO: 131717 - DNA, 674 bp, Cannabis sativa
  modified_base (582)..(586): a, c, t, g, unknown or other
aaaagtgaacaaaataaaagtgtcgctcagcgattaacaaatctgagcccatattattccgaagatccaaacactccaagtctaacgatctagatatgtacaatattcactaagctccattactcagtgttgttctgccctagcctttatctacacatgaaacataaatttgtgagtcgacagacacagtaagaaaaatataaaacataaacatacaacctaaattgtaatataggcgcccatacacctcttcacaagcctgaaccgcatcaaatgtgtatgatttttaaatgttctggacatgagtacaactagccataatactatatgcactcagtaccgcgaaagtactagtgtaaacgatcatccaacccaagaactatcgttgaagaattcacaatgtaatctttcaagccagcctcaacactcaggaatagaattggtattaagatcttataggatgaacaaatttatgtattacagtgtattctcaattcatgagacaatgtaatggagatagggttgatcacaaactcataccaccttgaatggtgtatgcgtgtgagatgaggagagagagannnnntgtgtgtgtgtgtgtgtgagagaggcttatattctaaactttatgtatatatgtcattatcttaaaataataaaatttcataaagaaa

SEQ ID NO: 131718 - DNA, 512 bp, Cannabis sativa
tggtacatgtcaaagttcgggagataaaattcctaattagcccataatagcagtaaaaatactttattttataattttttcaagtgtgaattcaaaaacatgtaacgacatattatttaactacgtatgaaataaaataaaaaaatatgtcaccatgtgtttctcagttgacacttaacggacttaattgacatttaacatctaaaaaaagatacgactgcaagaaataataaaataaaatacttttgatgctacttttttttatttaagtttttgactgaaggccttcctctcttagggctagtttggcacagttgtgttgtgagaaaaagcagctgtagctgtacttgagaaagatgtagctgtgctgtgaaaaaaaaattgctaagtgtttggtaaatatatttttaaaatagttgtgagttagaaaagttctatataagtgtttgtaagctaaatgattgaataattgttaaatatacaattactaaaataggtatgatatttgttat

SEQ ID NO: 131719 - DNA, 921 bp, Cannabis sativa
gaaaccaaataggcacggaaaaaatttgtcataagagatgaaatttgaaatgggatgtgaggtaaaaaactcacaaatgtagtcggagatgaggtggacggatgattgtccacccagactttttggtgacattggggccacttcgaggggctggaatagcctcgggtggtggctggatgtctacacgggtagtggctggagtggccacatggtggggcaatggtgaagggtgtataggccggggtgccgcgactttgaaaggggcctgcgaaagaccactaaatgagccattattgttagaaaaaaacgcatcaatgttatcattagaacatgtatttttaagaggaaaaatatgttcataaaaaatgacatctctagagtgaaatatttgatgtgtttcaaggtcaagtagagtataagctttcataccaaccgggtatccaatgaatgcacaagcccaagatctcggagaaaatttatgccttgagttgtccaaggtggaagcataagtaaggcaaccaaaggtacagagatgatcataagagggtaacctgttatacgacaactcaaaagaagacagaaggttaagtaaaacagatggtgtgtgatttaacaagtaaaccacggtattaataaaataactccaatacccaagagataaacgggattgaaaagcaagagagcgggcgacattcaatatatgttaatgcttgcgtttaacaacataattttgttgtggtctttctacacaagaatgataaggaagaatgcctttagttgtaaaaaaaaaaagatgacaagtttagttctttcgtattatcacatcgcatgcctttaatagaaatggaaaattgattgagtatataagcataaaattgaggtataataatgttgacatcagatttatttttaagcatataa

SEQ ID NO: 131720 - DNA, 1625 bp, Cannabis sativa
tttatttatataagaatagataaaaataatgttaatgagaattagtatattagaagttctataactaacaacttttggaaatattacattttttggaaatattttgtaaaatttaatatgtaagattatttaaaaaattataaattcattcttaattatttatagtttagtggcttttaatctctatattgatttcaatcattagttatacttaatagtaatgccttctaaatttactataggtttatttttaaaaatgacagggaaaaaatattaggataagctagcatctatgagttaatcttaatatatttacaagctatacttaattttagagagtatatgtgtaatagaaaaataaaaacaatacaaaaatagaaacctaaaatattatcacttgtatgtaatttatttatattgtgaagtaatatatatcttgtaagaggatatatgtgtaatttaatatcacaaaacctaaaacattgacacttttgtttatgttatagattatagatacatgttagtatttttttttttttttaataaaatcaaaagatttattaattaaggatttcgtgcaaaataatagaacatacttcagcggaacaattctccaattgaagcacacaacttgtagagaaacaatagtctcttcccaagcaatgagctaacttatttgcagatcgtttaacaaaacacaactcgatatatgggaaaactaaaagcaaattacggacattgaataagtaaaccaaattgagataccatagaaaaattactttggatagcttggacacagaccaagctatccgtttccaaaattacgtggtcttatggatgatatgcaatccaacttaaagcttctttgatgtctattatttccacgatttcaggttgaacacgaccaatcttcctcttagtaaaagcttctagcatattaccatgatgaaactgaacctcctgatcaaacaaagctccatcatcattaactttgatcttatataacataggttcattccagtgcttagaatgtcgctctccttcattcaacggagacaaaaaaagatcctttctactttgagcacatttatactgatcaattgagcacatttatactgatcaagcatgtttttcgctgatgcaataatatttgaaaccgcccaactcttttgatgccaaacaaaatcattatatgtcagtttttttaatccatgtgaattagtgtcattaatttttcacaattttttttcttattatactttcttcaaatctactcattttaaggacacagttttcatattattttttatattattttcttgctaatagttttaaaatagtgattatttatttttatatactgaagatgtaaaatgtaaaattatatatatattttaaaaaattatataaacgtagaggaatcaagatactatagttattatgtaccattgatgtctaacacttttagaaagtgtcttgaaatttaataattaatattaaattttactaaagtggcatttggttgatgtaataaaaacataagaatagaaatggagaaatttgattttctatacttagaaaatcaaaaaaaaatttccctaaaccaaaaatttaaaacctaaaaa

SEQ ID NO: 131721 - DNA, 980 bp, Cannabis sativa
  modified_base (952)..(954): a, c, t, g, unknown or other
aggggaacatcatcatttggatcaattgtatgccttcccccaggaaaatctcttgtgtcaccggggtgtcatctgggccaccagacgggcctgcagctccctcaacaccaaacacaggaggatacaagccatacctttgaatttagcctcacaagccaatctaagtatgttcctcctctcaacaaggaggacaagaagtaattagctctatccctcatctaaagagtgggaatggagcatgtgtaagtcgacaccctttgaaagtggtaattgacttgcggatgttctaggcgataaagtaagtctgagaatatcctccaacctttgataaagctttgctattagtgttgctcaaccactagtagcccagctggctaaagtagaagtacctgtaccgaccttacctcaaaatagacttcagatcaaagaaataccagatctcatagggtgagggttgaggctagcccaattctgcatagagtacaaacaatgtcaaaaggtactttatgcccttcggagtgatctgagttggacacaacctaaagtaaagggctatgtcttggaagtaggggtgcaggggtagcatcgctccctacgcaatatgacgctctaaccaggccatccacttgaattctaggcaatgtgctagttggtctctggtgggcctatcacacccaacttctcctactagtcatccaacctttattttgatcaatttcttggcaaaaatagaagaatggggaaatatccaccggtacagttgatccccatggccgaaaaatcaagggtcagcagccttttccaaaatatagtctatcccgaccttagagagatgaccaagactattcaaaggtcgcccgacctcattgtaagaacccaagaggttgtttgaaattatggtacaagctttttactgccttagtgtaggcacaactgttgggttttatgcccnnnataaaactctttacaatctgattagt

SEQ ID NO: 131722 - DNA, 900 bp, Cannabis sativa
ttcaagcttgttccaaattccttttgttgtcttttctgtgacgagttttctcctcacactgttggacaggtacatgatgaacatgtaataagccatctcctcaaattttgatttcttttctagtttcttctcacccaataatttctaccaccaagatctttggtgcactaggatcccttttaggctttctcttcacaatacgaatcccatgttctatcaaatttctccaattcaaatctcgccattaacgacattaattgttattcaagaattgtagcagaaagaatcttgattctacgttcttgatcggttaccaaagctctgatttgtgaaaaaagtacaactaatgtgcataatcaaaatcaactaaaacataatcaacaaacaattagcaatgacaagattattatattgcaaacaatacttggggtaaaaacaggatgaacagagtattaaaactaagaacaattaaagatgtaaaataataaaatcaacaaagatatatattggttcaagtcctctagatcgaagtgatttatggatctactccagttctggaacaccaccaaatctcctttattaattaagtaagaacagggtacaatacagtcgagatcgattctttgttggattctctcaaagtttttattaaaactcaaacccaatctctcacttttctctgtacctctctctctctctctctctacctctcaatctcttccttcgaaatcacctctcgaaactcgtctgttgatttccttctcaaatgataagtgttggtatttataggtgggggttaagatcccaaagtcggtggctgtaaatgctaagttgttaagttagttatgttcggttttgtgccctaaataaaacccatatcaatataatcagatttactta

SEQ ID NO: 131723 - DNA, 698 bp, Cannabis sativa
  modified_base (98)..(101): a, c, t, g, unknown or other
  modified_base (492)..(505): a, c, t, g, unknown or other
ggtctaaacttcgagaagcctctcctggacatttcagccttcactggaagtctggatacacgtgtccttcaaggaggggtctggtctcgagtttctannnnagagaaatctcactataacaatctactcttttccctttgaaatttttgaagatatataggattttggtgagattttggtttgtaattgttctgtataaatgaattagtgttagaatatttttaccaagcttaattgttagatattgtgtggttctaatgcttgtttagttgttattggttggaaactctcaagtttgagttcatggaactcaagcttgagcatctatggtgattttgcaattctgaggtaattaagtgatttgactgtttagatttattgtatacttgttatcagggtcgaccctagactaacgcaggctaggcccgtgccgagagcccctcattttaaggggccaaataaaaaaatgccttttaaaaaatatacatattnnnnnnnnnnnnnnttaaaaataccatttatctttgggttatttgcggcaaaaccccctaaagtaggaaggtttttgcaactaacccccaattctaaaatttttgcggtaaaactacctaagctcaagttctgttagcagttagccatttccgtccatttttggctgttaactgccatggtggaatgtccacgtgtacacagtgtac

SEQ ID NO: 131724 - DNA, 765 bp, Cannabis sativa
ttgagatcagttggagtcaaatttcacaatgcttaagggttttgaagtacaatatggtgattttggaagtgccaaggctcttgagtaagaactctttccatatccccttcacagccaaagaaaaccatgaaaaatttagtctctttttcagttattcttgcagggaaccgtccatcccaatggattttcatctgtttttgcagggttgacagataaactggtttcctagtgaggacacgagcaaggagacaatgatcttcattcacatccaaagtgggggattcttcctcgtcaaaagcaagtattgattcctcctcttcttctaaattgataatacctttcattttatgagttgagagatccatggtataggcaaaagttgataatcaggagggagaaaagaatttgtgaggttgaagatgattgagataatctatagaaaaccagaaattagaagaaaaccgtgaaggaaaataactgccttggagcaaacaaacgggagacgctctttatttttcaagctttaaattttttcttttctttttctattaaaggagaaaattttgttaaataaagtagaacaaatgccataaaaatcagcatccacaacacaatataagatatacttacttatattaagtttttgttaactgcgttctacatataattagttatatttttaatttttatttgtattatgtgtttttaaaattttataaattaaaggaagtcacttgttaatcttttattttttttttaaaaaat

SEQ ID NO: 131725 - DNA, 550 bp, Cannabis sativa
tggaataatggcagaagaggcggctcggacgtgctgctgatgagatggagacgaaaccggagcagtgggaggagaagaagccggttcttgaacgtgagaagacaccacgagaacagtggtggaatcgtcgatgatggtacttcgtggtctggaactggttcttgcgtgttccattggagctgcgtgaggatgcaccacgggagcagtggtggagtcgacggtgacgtggttgacgacggagacgggagggtctgacggagaaggcaccatgggaacagtggagtcgtcgacatgctcacaaggtgcagctaagggaggtcttcgggttctggccatttgaacgtgtttgatgaagaagatgaacgttgcaggcgcggaaaacgaggagggagacacaaatccgtgaaaactggatcttcatccggaaaaaagaggatctagtcaaagaagagagagagagagagaaaatatctgataccatattagaaaaatgattttattgtattgaatgaaataaagtgtacagaattagtttatatagggggagaat

SEQ ID NO: 131726 - DNA, 517 bp, Cannabis sativa
aagcataattctattccaaaaataataacaaagaaggaaaataactataaaaagtgacccaaaacgtaggctaaaaatagcctaacaggtggtccggccgaccctcttggttagccagtttattttgtcattctggttgatcatttttccccttcatcaatttgtaagttatacatgatgatgtggctcactaactgataggttgtactccacgtggcatcaattttttcctgtgtgtacatgccacatcatgtgggcaaaaatttgaataacatttgcccccaaagtccctgtacaggcgtttgtacatatatgaattttccagcttcagttttgattgttgaagtcttaactgggccgtttatggccggtcaaatacttgggctatcatgtgactcacttcacaacaaagaatggattttttgccaatcatgaaattcttttttgttgctcacattcccactagggaactgttggtcttttgtgtaatgaccgctctagtaatgtggattagtaa

SEQ ID NO: 131727 - DNA, 1396 bp, Cannabis sativa
  modified_base (1075)..(1078): a, c, t, g, unknown or other
aatctttgtaattgtggactaagtagattgagctctgactaaatcactatacttttttgtgttcttgttattttttgtcttttgttcagtttgttagtagctaattttttgagtactcgctaccgtaagtgattactcacaaattttatttgagtattcttaatagcattaaatattcgcacgacttttggtgttatttaaattcttccggtaataatttttaatgaaaaacttgaaataaaaaaaaaaaatttactcttgatatcgtatattatttgacacttgacagtggattaaatattttccaagttgcagataagagagatcgtgtcactcaaatatcatgaatatacatattcaatttagaacttttaatattaaattaatgccccactaaaaattagagaatattagagagagtgagaaaacaaaagaaaaagcacctacaaaatatacaaaattttcgtagtacatcgccttaaggaagttttggtagattttcttgtctgttttggtatttagaaaagtttgttatattagtttttttttcaagtacgttgtagctatttaggactaattataaatttttagaaaattctgaataaattagagtaccgaaaataaaattcaaactattatttattacatggataagaaaaaataatcacgtatgcaattaaataaattttgtaagaatttacacaagtatccctacacaagatcaattttgagatttcttttaactaagtgaatgagcacaaacttgacacctattgttttactatgtttcttttaatttgactttgctttaccaattttggttttgtctaaacaagtcttcgaaggacaacacaaaaattagagaaaagattcaattagagaagagaaaaccagatttaatcttgaactggtttcagagaaaatatgcaccaaaaagaaacaacaaatcaagtaaagagatcagggtaagagagagcaagcacaacgcaaattttacaaggttcaccaccagaaatggggctacgtccttggtgagctgcctaagagaaaaacagtcacaatccactatcaagannnngtttctgagctccaagacacatggatggtctggtagctcaagctcttcaatccaggtatgtacaatctttctcaaaagctctccttttcttttctctcttaggatcgaaccgatcctctcacttttctctctttttctctaacttttcttctatcttctttctgtctaaacacgagagaaactctctctttttagatctagatctctcatcttccttttttataggggtgttcatcaaaccgctcaaattgctcgcaccgcaaaaaaattacggtttaaaattctttgcggtgcggtcgcggtttgaatttttcctaa

SEQ ID NO: 131728 - DNA, 1248 bp, Cannabis sativa
  modified_base (984)..(1002): a, c, t, g, unknown or other
taaatagaaaattgtagaaaaaatagaaaaaaaacgtggataggacaatagttaaagatcgtgggttttatgtttttcaaagaaacgtcttcttcaaagatcgtgggcttcatgtttttttagagaaacatctttttcaaatcgtgtagaagtttgaatatgtaaataaaaaaaaaattgatataggatgcaaaaattgaatatgaaagagagaaattggttgagtgatatgtaagaataatgacaccatcatcaatgaaaattgtgtgtgcaagtggtattttggtaaataaaagtaaagaaaaggaaaaatcgttgcccaacccttttagaggtatttttgtaaataaaataacaatttgtatttttcatgtaatttttttaaaaaaaataacttaaaaaattataatcacgctaattaataatttaaagaatcaattaagaatattaatatataaattgaacatatttatagtacgaaatttcaacttatcagctaaaatatcctcaagtttcaatttgactattaaattattatttcatttttatttatgccgttcttttccgttttataattaattgttgtgttgtttttattttatttaatattagtattttttattattattttgtgttttaaatatattagtattttaaatcaactattatttttacgaaaaatcttaatttaagaaccaaaatataagattattttttaaaataagagttagaatataaaatcaaaaataaaaagtttcacaccaaattaatttaaatccaaaatccaagagcattaagataataattttataaagggaaattatatttccaccccaataaactataaacacaccctatttagaatgaaatggaaattttatttacacccccaaaatgtctaaagacaccctattttgaataattttttttatatataaaatttacatctttaattgtactaagttttttttaatttttttcttnnnnnnnnnnnnnnnnnnnaatatacctatcaaataaaaatatgacaaaaaaattaaaattaaaaattatatgtaattttcttaaaaaaatatatacatgagttagaaaaaattatgaaattgaattcaaaataagtattgaaattaaaataaaataatgtgaggaaaaaaaaattaaaaaatattggaagtaattttcaaaaattatttttttttttttaataatgggatgtatttattattttatgggatgcaaatagaactc

SEQ ID NO: 131729 - DNA, 1048 bp, Cannabis sativa
aattgtgccacgtgtacactgtgtgcaatccaacatggcacttaacacctaaaatggacggaaatggtaaattcctaacagaatacgagtatgggagttttaccgcccaaatttgggttttgggggttaagtgaaaccaaaatgaaagttttaggggttttgctgccatttaccctttttagtttttcaatagttgactttattttgttatttattttttcagtggccatgggaatgaaagttgctgttagatagaggttagaatattttttgttcatattttggctttaaaatgagaacaatatcattctaatgataactacggaccataaaaaaattgtaatgatatcatgagaacaatttagttaactaatgtagatgcagtagaactcatgttaactttttgaatatgtctaggtttcagttaagttttcactaggaaatgcataaactaataagtctataatctcatttttttaatatgacatagaactaaaaaaaataatgtgagggtttaaacaagaatttggtgtctataatattttgttcattctgaacctgatactttctactttagattttagtgaactttgtaggaaacaaaaacatagaagcaaatggaaagagtaggttcaggaagtcctaaattttttgattcataaccaatcaagtaactaaaaaacttactaaagaactttatttcgagttattatttttaaaaaaaaaaatccaaagaacccaatattattgtttttgtcttatttttttatttggcattgaaattactaaatgaatgtatctgtctattgtaaatgaaagtaaattgttgttgtgctatctaagcaaaagataaggaaagttgttgttgtgtcgtcttttgtttctttttaggcttcaatactgtttcattcttacaagattgtttgttgtgtcccttttgatttccacatctgatttgcaattgcaactcaggtatattttggtatctgtctttcttaggatggccagcatgtaatgaccgctttagtaatttggattagtaaaggca

SEQ ID NO: 131730 - DNA, 1113 bp, Cannabis sativa
agggggcacgatttactacatgtcaaagtttagtggaaaaaattactaattagcctttaattgatgctactgaactattagtatatttaaaacgtcatatatatttcacagttaactgcctatattaattacttatgtgtatacttttgtacatgcagtacctttatattgagacattatttaaaaattatatcaaattatttcaaaatttataatattttttttttattattatattttattaaaatatacccatttttgtaaatagatttctcaatatactctcaccttccacttaattctaacacataatttatattagtttaagaagtataatgaaaatatcatctataaaagtaaatatatcttaaaaaatataaaaataaaagtaaaaattaaaacatataaaattaaatgggtataccatatatttttgagaaaatttaattctatactcactttagcttacttgtttttatttttacctttatttttatattctttaaggtatatcaatttttatagatgatattcctattataacctttagatttatataaattatgtgctagacttaagtataaggtgaagatatattgggcaaattactcacaaaaataggtacatttgaatgaaatataatatgagagtattttttaattaataaatataaaaaaaaggtattcctcaacttatccctataattttctagggaaacttacaaaaatacagaaatttgggttaacttttacaaatatactaccacacagaattattttcagaaatattgtgttttataaaaataacagtagaacacaaaacagaacaactgaaaacaactaaaaaataaccgttaaataacagcgaaaacttaacacagtatacagtataaaacttacgcattattttttaaaataaatacattatttttttaaaaaaaaatccgtctaaagtgaaaaaataaaaaatttgagtatgacgtgtaaataatccaattttttaagaatagttctcaacttctcccaaagctcagtatgtgtaattgaagggaaatttacatggtatactaacttttattatttttttacataaatactgtcaggcggtattttt

SEQ ID NO: 131731 - DNA, 1144 bp, Cannabis sativa
tttgggtgattgttgatcgtttgaataagtctgctcattttattccaatcagtaaggattacaagcttacgaggctagctcgactttatgtagacaatatagttcgactatatggaatttacatacaataatagctaccaagacattataaatatggctccttatgaggccttatatgggagaccatgcagaacgccattgtgttgggcaaaactagatgagcatgtcactattaaaccccaaattatcactagtacaccactgaaaagataaagggaatctaagaaagacttatggttgttcacaatcatcagaaaagctatgccgatctccatcgacgggaagttgagtttgatgttggtgattatttcttcttgaaagttactcctatgggtggcgtaacgagatttggggtgaagggtaagctagccccgaggtatattggaccttttgaggttatcgagaggattggagaggtcgcttaccgattaaacttaccagggcagttgggacatgttcttaatgtgttccatgtatctatgttgaagaagtatactccagatctgtcacatgtaattgagtataaggttatccctcttcaagaagatgtgacttatgaagaataacctgtcaaaatcttagcgagagagctaaaactgttaaggaacagagacattccagtggtcaaggtcttgtggaaaaatcacaaagaagacgagactacttgagagttagattctaagatgtatatgaagtatcctcacttgtttaattttcaacttgaggttgtactttaaacttttcgggatgaaatttccttaaggaggggagaatgtaagacctcagtttgaccgagtcaaaaggagaagatatatataataataaatatatatgtgtgtgtatataaaaaatatatatataaacaatcagaaccccctagtatcctctatctctctctatcttcatatcaaaagaggaaaacccacaaaactccatcaccggcgtgactccgacgacccatctcctgccaccgtctaaccccacatgtcggatgtaacgcccgtattttataataataaatccgaaatctaattttaataattaatatattaataatcatatggatcgggatcccgagtatcaa

SEQ ID NO: 131732 - DNA, 841 bp, Cannabis sativa
attccatccactaacatcacctagcataaaaaaaaaataccaaatccattactttttactcataaaaatcagtttctttccaaaatctgaattatttaaaaaatgacgaaaacactaaaattactaagtaacaacatcttctaactatggagaaatcaacaattttagagtttaaaaggaggatcagtaataaattctaaaacctatataaagattgtaataggctagggtaaaaaggggaatcacttgcttactgaacgactactaagaacattatgtcccttcctttacttttttcctaagctttacacactttgtgacactaaacctctcttaccaaacaccattgacatacaccgttttcaagaataagtaccattctctttctttatacttattggtttattatttccaagaatcttacaactaccatctttatcaaatttgtgaatattaggtctcccatgagccttgtgttcataagtctcaatacagatttcgcctaaaaatttagtgttgtattattgtccacacactcttgagaacataactctggtgtgtcaaatctaattaataaaaacaaaagtagacgcaactccattaccattgcgacatggaggtgaactgctataaatttatggtgtctattttatttatgacagttttatttagtcaaattaattcattgcattcctcttaatttttacaatattcttatatcagttgatgaaaaatcgcgtcaacaaataaaaacatatcaaaaagtcgtattttatgtaataaaatcttaaaaattgtaaaaatatttaaaatttggtacaagtatttttgtaattttttt

SEQ ID NO: 131733 - DNA, 752 bp, Cannabis sativa
atacaaaaggtagctcactactaaagacaattaccaaaataccccttcctaagccaacacatcattgggtttaccttgcttaccccttctagtataagtaaacttaatagaaggcctcacattcgtatcatcttgacaataaaaaattagagcccaaagattgacggcataaaaattgagctttgaataacttaaaccacaactaaagaatcagtctcaacaatcgcactaatttaatgtttttccgcttgatctaaatgagtgcctccttgataccaactccttaattattatactatcaactttatttatttttttaataagtgatatgagttacatgttatgtattatgtgttgttcaaagattttataccatgctatgttttaaatataataaattaatatttcgacgattattaaattttgttaaatttagctaatttaaattttgttatcatttttagttcattaggtgttttatcgtataattttgttcatagtttttgagtttgcttttatgatttaaaatgttatttacatatagggcgattaagtgctaattcaagtacatcacaaaaatttttatttttttattcacttaaaactttaaatctacacaatatgtagtttctctatattttatttagagattatttatgtattataaatgaaaaatgagattaagaaagagaaagaatatgagaaatttacacaaattattatttttggtaaaaaatttatacatttacgtt

SEQ ID NO: 131734 - DNA, 1025 bp, Cannabis sativa
taatgttgtttaaaatgcctgtgtctgttggtctttcgctcactatacctctccgccatctccgtatataaagtccccataagtaggtctcgatggagattcccgtcaatattaaaataatgctatgtaataaaataatattagattgatattaattaataaataaggatataaaataattataaccaaaaataattaaaaatcactcacccttattcgattaagcacttgatcattatattgtttgggtacttcggaaaaattataatgatgacctggacacaaaatggatacttgctggcccataaattgaacgtaagcgctggcttcagtcccaactactttgccaatttcaagatccaccttaagctctaatggcttaccagcatccctccctctttgttaaaatttagtgtttgatgtaaggccacgaccctttctgaccattggttcagctttatttgttcgagagaaaaattaatctattagtacattaaaaatttatcatgtacttatagtaagaataatgttagatttgggaaaatatgaaacctgattcgcaagacgagagtaccctagaaggatcaggggggtccctaccatcaccatccccatcgtggtatgtcgctagacttgctgacattgtactttactttgaagatgaaaaatataaaaatgtaaaaatttacaaaatgtgaagcagataaatcaaagttgacacgaatattaatacgaatgaaaaataaaacattatttaatcattagagtttttttacaaacaatagtaagaataaagctacaatgaagaatcactatcatttccatcattcaccaagttttcattttcatcctcaacaagttcaactagtaaatcatgtatttctttaacaacataattttcatcaagttcgtcattttccctctcaggatcaactgactgattggtcgattcaacaattattggaggttcatctgattgcataatcaactctccaagatcaaccgtcaacacaaaatttgaagag

SEQ ID NO: 131735 - DNA, 1864 bp, Cannabis sativa
  modified_base (1607)..(1632): a, c, t, g, unknown or other
gtggatgctactgaatttggctctacaaagtatccaattccattttaaccctgttgactgctatctgtaggtcagaaaagcccttcctgtttatctccttaatcctgctcttgaatcgtttcattttagcagtaacctgaaacatcttggaaccctttattgtcaaagaccagacatcttttaagcagttgtctacttaggatgtgatttccacattctaaagtatttgaaaggctattgcccactcaacaaaccagggtacaaagttagaattctagaagagtgatctaagaagcctttcattaagaaaaactacttcagcaaaaccaaacttattgatccaggattggttggtcattattctatcaatcttggaaaatattctatcctccccgggttgcttatttgtcaaagtgaaaaatttccacttgctttgacatcttctaattggcagtagttgacacagttcaagaagtcggtatctggataaaactttaccctttgcccgatcctttcatctttagctaatatatcattaaagtctcccataagaaactagttttcagtagtagcaatttcgaacaagttcttccataatagtctcctttcaactcgattattggaagcataaactatagttcgaaagttattaaaaccttctattgttgatacttttaaatgcattaattggctcgttcatctaatgatatcaatagtaaacctccaagggttccaagcaataacaatcttccccctgcataccatgctatgtgagaagaaaaacaccaactcgcaaacacattagagtacaagattctaagctttggagccttgaccctagtctcgagaagtccaacaaaatcaaccttttgaaaattaataaattgctttattaattgttgtttatgttacctattagctcctcggacattccaccataacaatttatccattttaaagagaggcttctcccccctctcctttcttgttcccttcatctagcacattctcccccgcttcattagtcaaagtctccatatcaagagcttgaaatgaattgctcactatagtgtcagcaactgatttttcttttccatccactttccttatttttgtcaccttgataaagccctcttcatcaatctgcatttgtttcctgttgtcttttttaatgacccattcctgtttccctgtggtatttttcttacaatcaatctgtagcaacatgacctaaataaaagcaagcaatatatatgtattatacttatattgaatgatatatctaaaatataatatataatgtgtgtatttaattattatttataaaagttttaacattttattttatggtgtcgttagaatatcttctccacaaaggtgaatataggatgacaactataaaaagagttatcataacattatctttttttaaaagtttaaaactgagagatttatataaaaatattagtaatagaatatttttatataaaatgtttagataaaaaaattaattttaataaattagatgtaaaatttataccttaaattgtaatgatcaaaagagaagtcatgatccatatagctaattatttccataataaaatgtnnnnnnnnnnnnnnnnnnnnnnnnnnttaaaataataagtaccgtatgaaattggttatacaattgtgcgatcgttataatcatatcatgcttcgcataattattataatcattgaaaaaaaattaatttgtgattattttttatattttttatttcaaaatattatttttaagtagttaacatttttaataaataagtaaaatattataaatcataatcgtttattatttttcaataaaaatagaataatcttttaa

SEQ ID NO: 131736 - DNA, 544 bp, Cannabis sativa
  modified_base (219)..(241): a, c, t, g, unknown or other
gtcaaagctgccgcgtgttgtatcttctcctcagttgggactggtccgagatatgtactcatatggttgaagcatggtgggtagtatccatgggggtcgtaaaaaagtaggatgatcgatgcttgtctgcgcgaggtgtgctactaataccagaaacatacggttgaccccgttcttggttcatgaagtagaagtattctgaatggttcatagatgggnnnnnnnnnnnnnnnnnnnnnnngtgaatttcgtgaggagaaggccttcctcatcccttttggtgatatattatgaacaaagcaaataaggccaggtaccattgaggagcaatttggaccagggaaacgtcaaagtagttttccacatctcgaaagtaaccatggagtggcaaggttgccccaacctcaatgtggtattttgtcgaggcacatgaattatctgggggagagccggcattttgacttttctttgtcaggactaccttcaccccttcaccaagagggtacagagagaggtaaccctgtgttgggaatattttaccagg

SEQ ID NO: 131737 - DNA, 931 bp, Cannabis sativa
agagagagagagagaggaaaattgatttaggtttttctaattatttttttttttggtgaagtgtcaaacaaagagataaacttaatctcttaataactaattactataaaagattttaaaaacaaatcaacacctcactaaagacaaaataagagtaaattaccaatttgccatctttcttcaccttaccgtaactttaccacctaggggtattttggtcaaacctaaaccctaaacaattccaacattctcaatgtctaactaaattgccccgctatttctaaagtactaacccattataaagtgactctataggacatacgtcacattccactgttattgggcataaaaatatgaaaatcgtaatatttcacatataccataattagcacaccaagaatttaaatataccttcactattgcataataataattagatgtttaattctgaattaaaccgtaattatctactaactctcataataaagctaagcggtgattacaattatccccacgttaaaaggattatgccctcgaaatctaacttgaataactccaaatattgagccctcatatcaaaattcaactctcaagtggcttcctccaccttactgtttctccatagtaccctgaccaaagttatggtcttgtttcgaaggactttatcttttctattaaggatctatactagttgctcttcgtatgataaaaatggttagagttctagattttcataacttaacacatgagtaggatccgagaggtatttttgtaacatagaaacatgaaattcgttatgaactagtgatagtgctggaggcaaggctagacgatatgtaactaatccaacctttcgagaatcttaaaggccctgtaaatttagggcataacttgcccttcttcccaaaacgtttaatccccttcatcggag

SEQ ID NO: 131738 - DNA, 984 bp, Cannabis sativa
  modified_base (58)..(73): a, c, t, g, unknown or other
tttatatgtgtttatttcattattatagaaattaatattaggatgttaatgaaacatnnnnnnnnnnnnnnnnagatcctgataaaataattccaacatatagaccccagggaaatctaagttagaaggcatgaggtccttccaatcaggcagttgcagatgttgagtctcctgcagaatggtggagaagtctcgttgttttttttctgaactcgaagcagaatatatttgctctctgcaatcttgcatttcatattgacttggtttctctcataccatatttcagcaaaaatacaagcagccatcatcaagacttcaaaagactccttccttgacagacctacactgaggttctccacgaaacttagcatgtccgtcccaggtatctgcgatgagtgacatggtatagagcaagagaaccaaattgctcggaccaaggggcactccttgaaaagatgactgcaagactccacttcctcattgcaaaaaggacaatcttttccattcaggaatggcgatctgttttttgttgggatacactcacaaagaactcgccaaagcatcatcaccagccgagggtgtatacccgatttccaaatccatgttcaaatttctcgattctcattgaaacggtgttgttgatccaagacataagcgcttttttcgactttagttctttagctagtattatccgaatagattttataccttgtacttctccaagaaaatcacatattcttagttgagttcctttatacagtgggatgcagcagttagggatcttcaaagatattttcattatgtatctctacaactatatcttaattaaaatttctatttttatggggttgattttatgtaattaagagaatcgtgtaattttatatttagtttcccaaattcatctcctatactgtaacaccctaactaacaaaggcgtattacgtgatttttaaacatgttgtgcaactcgttgctaatcaa

SEQ ID NO: 131739 - DNA, 2333 bp, Cannabis sativa
tcggatttgagtcagttttggaccgagagagagtaactaccctaattaggttgtatgttttgtgctttagtccctaatttggggacaatggttttgactaataaagaaaaggaatttcatatatatactatgtactcattgaattctgtctagaaaatataattgactaaatgcttatatagatatcaaagttgaatgcctgtgttcttttcttaattgaagggacactaaaccaaaaagtgttcaagactctattatgaatttatatatatgtgggacatccggttaaaagaatatattgagggagagacttgagtgtttggacaaaataacttaatatgctttaaatcttggaatcaatgattctaatttctaaggaagggcttattgggacgttgataaaaaaaaggggcctggtcttgaataggtggatgtgctctgcagtcttacaacagtaggtttgtttttacaagccaagatttgatgcttccatctgtttaattaggaaattttgctctgaatatttagtggctagacaattataagaaatcatttttatttgtctcaattcttttttctccagctctacacattggcatctaagtcttattcatattgaatttgttagctaacaatttcagattctttttcactgtgaatctgctacatgggtgtaaatttgtactaatgacaagcaatgttgtgagaggaaaatgacaagtaatgttttgtgagaggaatatgacaaacaatgttgtgagttgagttgagactaaatttgggtcctttggatttgtttgtgtaataagaaatgttgtttggctggggaggaaatgtaagaatgctctttttttgaactgctgtacaacatttgaaaaaatctacacattaatttgtatatcataaagttttactactatactaattttgggatcttaaacgtagtagtttatgtaatgcaattatattaagtaatagtgcttttcgggttcattttcttgtgtcgtggtgaaggctgagctggtacaagattattggtaatggaaactgtagttgattgaaacttcattattcttgactattataattattgtaattctacaacattaactactagctgtagctccaatactccattctatcatctattgctccaagcctttacttactgcagtgaactcttttgatatttgctttgttataaaaagttctttattatgctattttaacaatactttggataagttgttctaccagaaccaggttacttcgtctggtgtttctcttgataattctttgttacatacaagtgctctataccaataagagtatatattgttctaagaactgttagttgtaatagagttaatgacttggttgtaatagatttaactacgaaagtaaaatattatggtattttcacaagttaagtaattgtttaattaaagcaaagtccattagggttttataatatatttagtagatttaattaattttataagtggtattaaataacattattattaaattaatgttaagaaattcgtaggtttagagaaattcacaagtatagaaactattttactaaaacaaccatatctgcagttttataactccgattgaggtgattcctctgacgttggaaagataattcaaatatctataaattttgtagagatagctatatcaaaattcacaattttttaggtcaaaattaagccctaaagttacgagatggagagcttacaatttaaatttaaaagttagatatttatttatttaataatttatcatattattattgttattgttattattattattattagtcataaaactaaacctaataggagtcaaagtcagtatagtatgggtttcaatcaaccctaaaattatattgttctattctttccacccatctaagcaagactaaccctaaaagtttttaagtcatctttccattacatccttagccaaatctatagcactcttcactcttatctttgatcaccatcatctcatgtctattaatccaagaaactctacatttactcatttattgatcacaataggagaatatttgtaggtctcattttcttattttttttcagaatgaaacatgtctcagtaaaactgtaatatctttttaaatactcatttgattcttacaatattggtgcctatagaaagcttattgaatttcctataattcttatgaagaaattttttactgaatcagaatttatctatgtcaaaaattagtatttctacgctgtttgttgtaaatcgtttttttttttttttcatattttctatataagttgtctcagtaa

SEQ ID NO: 131740 - DNA, 606 bp, Cannabis sativa
tgctgttgtctctgtttcatcgagaggtctcatcttggtttgtaagaaaatctggcagttgtctgtgtctaaacaaagaaaaatgggagaatgaatacaaataagactgcattgtaagacattccaatgaaaatagaaagtcaagatagctaataaacaaacaaaaaccaccacaaaaggtagcacactcaagattgagaagtggaaacaaacatcaaagaaaaattgacagagagcgaagaaaagggaggccgtaattgcaaaataatttcaacagtcagccaggttatagtttatcaaattgacagcgtctaaatgttactttccaattttcttggtaagaagcattagagatgtacatcccccaaacccctaacgacagtacgaaaatgaatatataaaacctctaaaagatgaaaaaaaaaatagacaaaatagaatatcaggaatagagcccatatggtctgtttctgaaatgaaaagatgttcaaagtcatgtggaaggaagtatagaggaggcagcatgaaggtatgttcaaaatttagaaacttataggattttgttttgttttgaattctgtttggattttaatttttttttttttt

SEQ ID NO: 131741 - DNA, 1627 bp, Cannabis sativa
  modified_base (37)..(58): a, c, t, g, unknown or other
atgcaacataaaatgatttttgatcttttattaattnnnnnnnnnnnnnnnnnnnnnntgagttttatttagggcataacaataatgacatgatagagaattgaattagcttcaaaatgcaagttgagccgcatcaattagattattattgagtgatttatgggtattttactgaaagtatcttgtaatccagcgcctaggttgacatatgatgtcaacctggacgctgggtgagtaaaaaaaatgtccaggggatgcacttttgatgcctaagtgatagttttacatcattttgtctatttctgtgttttagtgaagctggtcaacagttctcgaagatgttgttgttctactgaaatgagagacttgaaactcttcatttctgagtagttttcccatgtcaaaaatgagaaatagtaaatttgacttctttgacttcatggatcttagttattgtgaaaaattagaaaagcagttgaaacaaaatcagaatcgaataagtagaacctagcgcaccaggccattcgtcaacctgtgtgctaggtacatttttgggttctcagggtgtcattttgatacttccaaggttcctggacttgaggaaaagatattcaatcctatttttgaccacttcaaagggaatgcacggattagatttggcatttgaatgatcgaaaccaacgcaccaggttcattgtcaacttgagcgatgggcccagctttgaggccttcgggttaatggttttcccccaagtttgcttgaatcttcataatttctgatgacagaaaaaatgccgagaacactttttgagaaactaattggaaacaacctacattgataatatgtcaacttgggcgctgggtcccaattctggtaccttggaagttccatttggtctctaaaaatagttgaatcttaatctttaatgaaaatagagaatatgttaaaaagaattctcggaaaacatcatcgcaattgtcccaggttgacaaaatgtcaacctgggtgctaggccttgcttttggcacccatgaagtattgtttcttccctaaaagtacctatttccctatttttgatgaagacaaagttgatgcaaaagttggatcatagatatgacgcttggaagtcaccctgatttacaaattgtcaacctgggcgctgggtacccaggcaccaggtgctttgggtgctcaaaaatgaactttctttgaatttgattttgatgcctcaaatatattaatggtatgtctagttcatgtcccaatgcaagtttgacccatttacactaagatggtctcggaaatcgaaaccctaatcaaggatgtcagtttgggggctggatgaaaccctaggtgcctaggttgactttcgggatgcaggttcatgtaatttcagctcttagggcccgaatttgattgctccatgtcttcatggcaaagaatactgaaagatagtgagttagaaacgagttattgaagttcgaacttccatctcggagttcccaaagtcaacatggacacaggattagggacccctccgaggtcgactgctatgactcaggtctactcaactctgtgacgtcatcttccttgtcacgtgtcaaatattgatatccacgtcaccag

SEQ ID NO: 131742 - DNA, 695 bp, Cannabis sativa
attagaaaaatttatacttttacagatcaattagtatctttctttgtacatgccttcaaaaaaaattactatgaatagttctggcacgaaaattagcggtgagtgctctccatttccattttgttatggattttaatcctcattctcatttattctttattagaaatagggtggggattccctaataaaaaaataaaatttataataaaaattcaatatataaaaatgttaaactacataaaaattataatgttacacataaattattattcaataagctaattattatctaaaacactccttattaggagcgggcccacgggccatccccatccctacctacctatattgcatattattagaacaaacggataatttcaaaaaaatacaaaaataataaaaaaaatatacaaaaatacggtttatatagagtttttaatatttttacggttttttaaattttatttacataaaatatgggtttttagtgtatttttacgttgtattcttgttatttcgttattgattttttgttatttgtatattatttttttatgttgctttgttgttatttaaatattatttttttgttacttagttttttgttattttcttgtatttttataaaataccgtaaaaatatataaaaaaaaaaatgaaagtaaaaatatatttttttttacaaaaattagtgt

SEQ ID NO: 131743 - DNA, 1414 bp, Cannabis sativa
agaagagctctagaccggctatcttcaaggcatgaactttctctttcagcttcgtcacctcggctgtaagctcctcctccttagccttcttctcctcctctacctgacgaaggactgctcgaagagatgtcctctcgtcttgaagactgttcacttcagcagataaagtctcgatggtctcctcaagtcagtcagaagcctcaagatccttactcagctcagctattttcttttgggcggtaaaaagcttcttgttggcttcacccagctcgatcagaacagctccgagttctgccctggaatctttagcatccttcctggccacgtccacctccgccctcgtggtattggacaaagccacgtccacctctgggagtaggtgtaggccaacttcagaccggcctacacaaaggaaaaacttgagtatttgagccaagtaaagaggattaaagaaacttgtcaagaaagacttacccttgttaactccttcaagaatcctcccactagcaactccagtaaagagtcattgtcaacaccggccaactgctcactaacctcaggaaccaactggttcatataatgagcgagcagctccttgcctttcttggcctccagaagcgccgacaaaggtggagtagaggtccgcaccagctcagacccacctctcggttggtcagacctctctgaaatcccttctcgagactccttcgacttggaaacttttggggtagaggggtttgcagccgttagctcctcagaaagatcgatgacctccccagcaggcgtcttttccttagaagaggttccctcaccgcctttagacttcttggctgggggagatgcgctgaaacttccaccaatcctcttcctcaaagcatcgagaatcttctgagacatgtctgtaaggaacaaaaaacaacatggttagaggaaacagacataagaaacataaagcataaaagtcaagaagctcaaaaataaaatgaagtagtatgcaaggtgatcgtccgaacaggcctcgaaagtccatctcacctgacatgcctcttattttagacataatagatttcccttttctgagtgtgggaggaggtggccgagtaagagagatgggctccctaatgcgaatttcatgttcagcaggcctagcctaggctggaagtttcttcctccttttgagcggagtctcccgctcttcctcagcttcatcttcaggattcaagggctcctaagcatattgcttggcccttgcacctcccttcaacttagcttcgcggttaagttgaatgagtgcattctttgaatgagctcgttcagcccatccagcaccagatttcctcttcctctccctcactggcttaggaatgaaatcctttggatagagcccatattcacaaagttatcctcggaggtc

SEQ ID NO: 131744 - DNA, 1050 bp, Cannabis sativa
  modified_base (43)..(43): a, c, t, g, unknown or other
taacggccaaaaaagttcaggggacacgatttagtacatgtcnaagttcagggaaaaaaattactaattagccttacaaaaataaacaaatttattattactatttatttttatttttttcaaaccttttatattctttttttctatcattttgtattagaatcaataataatttgaaaaaatagtttgagtttttttttttttttttttttatattttgtaatatatataactgtataataaaatatttaaaaatattatttataaattgtattttcttttttattaggagttcaatttataaaattagaataagaccttcaaaatatttaaagagcctgttcactattttaagagtttagacaattatatctcctattagagatggccttatgttattaaaattattactattattgtctttgtcaacaccaattattgtttaatcattttttttcacataactaataacaaaataaaacactccaacaacaaattaaaataaaccaaacaaaaaaaataataaattcaaagtaaaaaaaaaaattgtatacatagaaatattttgattatatttccttttaaataaaaatgaaatatacatttagtctactataatttgaaatatatttatatcacatgtattaaaattttaaattactattttttacattaaattatatgtattgtatatataaacttttacaaaatatatataaatatttgtagattgaattagattaatacttttacatgtcaatcaacatccaatcctcacaaataatacgaaattttaaattttctaaaaaataatataaattaaattaaattaattattttataaacacgcctaaagatcaaccccaattgaaattattactattattttattgggttgtttagtaacaagaccacacaacaataaagtctttgtcatgtagacaaataataattaatacataaatacttagagcaagtccaaggacacggcaaaattttatatatgccgttattttgtttcaaggagactgcaattgtgccaccattttc

SEQ ID NO: 131745 - DNA, 1422 bp, Cannabis sativa
ttttttttattatagtattattatatagttaaaatattctctataaacttttttaaaattcataatagaatacagtatcgaaaacatagttgttgattatttaatttatcatgcgtgttcaaaaaactttaaatctattttcggcactataaactattattttttaaaaaattatcataataatgttgtaattataacgaacaccaccatatatgttttcaaacacaaaaattaactaaaaaattataataagaagttgacattaacacttcgtttaaacattttacatatatacgtaatataattgttattacaagattatagaactatatatgaataaatatatcgataaaacgttagttttttttatcacagtgaagatgaatatccttatctgtgttctgttttgagaaatttttgatttttttgtacttatgctttgtggatttatctttagtgagggttaacaaggttgaataataagattgtctttattaaatttttattgaaaaatatttgactagtacttttctcactcttttaaggtttcacttttaaccatttattgatctttagttaaaaaatgttgtgtggatttttttttcttcttattattgttaacagtgcaattaatctatttttgttgattatacttcgtgaataatagctttatgtaatggattttttgcaaaataaaaatttatttatgggcaaatactattttagattttgtgttttgcaaaagttattaattggaccttctattttgttaaatgacaaaatggactctatatttttcaaaatgataaaaatagggccctgagttcaatttttaacaattttattttattaatataaccaactttaaaataatttttgtcacaaacagatacagaaaatataaccagttttgtcataacatctctatattagattattattaagttttatttttaaaaaaattagtttaaggtcctatttgtacaattttaaaaaatatatggtcttttttgtcatttaataaaataaagagtccaattaataagttttgcaaagcagaaattttaaaataatatttaccctttatttattaatggatatatctatttttttttgaaaggaaatcatattattaattaaaactaaaccaaacaaaattatttgatttaaatattttggttgttatgtgtcaaatttttattggaagcttataggttaatagttattgtttgactgttagtggcttattagattcttaattgaagttgttgttaggatttttttctattttctaatatacggcttggtaattctattcttgatgattttgctttttgagctatattttgtaattaattaggggtgttcgcggtgcgagtggtgcggttttttatcatttttttaagggttaatttcacaaat

SEQ ID NO: 131746 - DNA, 509 bp, Cannabis sativa
  modified_base (452)..(467): a, c, t, g, unknown or other
ataaaagtgtcatatattttttattttgaaatgtattgatttaagcataaaatattagggtttttaatgtatagtttttcaaattttccaatagaaatgctaaaaaatagtagtaatgtctagtattctcttcgatgtcatatagatattgatacaattaagtatcgattctcatataacttaaaataataatttttacagtatatcgctaattaatcataatgtgtcgcgcctctagctaggtggtattagggaccaataatgcttaatagtaatgctcattgtatgtatagtaaaaaaagagaaatattaaaaagcaatagtagtgtatctaatacccttttatatgtcaatattattattgatacaattaaatatcgacttctatataaattcactacaaaaaactgctacttttagtgacaatcttttagtcacaacataattttttnnnnnnnnnnnnnnnnttttagtcacaacaaaaaattacatgtaactaaaacatagta

SEQ ID NO: 131747 - DNA, 2241 bp, Cannabis sativa
  modified_base (2172)..(2174): a, c, t, g, unknown or other
atatctcccacaaagaatttttgaaccttcacttgtttattgaaataccgagctactttttactgatgggccatcagttttaagtttcatgtggttcgcttctcttcaatttcatcaagtgattaagcaaggattacatgattagcttcttggctatacttcaatcttctgtgggatggtggctcgagttctacgggcagcatagcttctcaaatggagtctgtccggttgccactttctcagttgttcggtatgaccatagaacttaagggagttcctccaacaatttttctttagcatcctcaagtcttttctttagtgtatccttcaatgtcttgttgactgcttcaacttgcccatttgcttggggatgtgccactacggaggaacttttaataccatggttcgcacagaaatcagtaaaggactggctatcaaactttttaccatagtccgaaactattttgtatggcaatacgaaccggtagattatgttcttcacaacaaagtcttccacttttttggacgtaatggttgataatggttcgacttctgtccactatgtgaagtaatcaactacgaccactgcatactgtacgccacctttgcccttgggtaattgtctgatcaggtcgattccccaaatgacaaaaggccaaggactttgcatctgagttaactcattcagcggtgctcgaggtatcttcgaaaatctctggcatttatcacattttttaacataggccttggaatcttcaatcatcgttggctagaaatatccttgccttagaattttcttagataaactctgcccgacagcatggtttccacaaaatccatcatgtacctcagacaaaagtcgtgcagcttcttcttgggtaacacatctgagcaacggcatggagaatccgcgtctgtacataattccctctactatgatgtaccgtgcagccttccttctcatctttcgagcctcattttgattatctgggagttccctaatgttgagataggttgctattggcgtcatccagtttggggatgtatcaatcatttaaatctcttttgtgccagtgatgttaggttcttcgagaaattgaatagggaccagatttgccctatcacttacattactactcgcaagccgagctaatgcgtcagcagtcgcgtgttcttctcttggaattttcctgagtgcataccttttgaactgtgcaagcacatcgtgtattttgtcagatacactatcatcttttctcctcgagcctcataatctccaaatacatgatttaccaccaactgtcaatcactacagatctcaatatgttcagccttcatttctcgggccagttttagatcggcgatcaaagcttcatgttcgacctcattattggatgcattaaatacgaatttaattgcagcgtgcaggtgttgcccataggtgtgagaagggtgattcgtgcactagatagttgatctgtagctacccatccacacgtagtttccaagtcagcttgtcttcattgttacttagctcaggtatttgttttgactcagggttgttctctgatacactttctttcttgcttgtgtatttactacaaagtctgctaaggcctcaaccttaatttctatttagggttggagtaatctcatattggcccaactccactgcccatttgagtaactgtctaaaggcatccggtctttgcaatatttgacataacgtttggttagtgtataccctaacagggtgaacttgaaagtagggccttagctttcttgttgttagaatcaggcaataagtgagtttctctaccaaaggacatcagccttagtcttttatgtaatagaccagatgttgaatgtttctttcccctctgatcagtaccacacttacaacatgctccgtgacagccaggtacatcccaagttcttctccatgcagaggttttgagagtacaagaggttttgcgagttgcatttttagctcttgataagctttttcacattcctccgtccactcaaattgtttatttcctcgtaggatgttgaagaacggaacacacttttctgttgatttttaaacaaatctgctgagtgcggtaatctgaccagtcaaactttaaactttcttggttcttattggcaatttcatatccaggagggctnnnatcttctctggattggcttcaattcctcgggcattgacgataaagcctagaaacttacccgagctga

SEQ ID NO: 131748 - DNA, 574 bp, Cannabis sativa
  modified_base (509)..(548): a, c, t, g, unknown or other
tgggttctggtctaagttttggttaggtttgggtcatgttgttatcctaggtctgggtcctattcctaaaccttgtctgattcttattctgggtctgagatcgggtttggatcccagtctgggttcaagtttgggtactgcactgactacgggtcaggtcgaagcctcaggtccatattcagatctcggtctttgatctcagtcttagatctcggtcttgttcctattcaggtcctgggtcttgcgctgggtcctaagtttgggtttggatctaggttcggggttgtgtcccggtagtcaggtcctgggctcttactctcgtgtcacgggtctggggttgagttttgggtctcaatactagtttcagggcccaaatttgggtccaagtccccgatctaggtatggatcctcgatatagttctgggtctaggttcgggtttggggcctaagttccccatctaggtttggatcctaggtcttcgtctaggtgttggaaatttattttaccnnnnnnnnnnnnnnnnnnnnnnnnnnnnnnnnnnnnnnnntaaatatgaactttctaaaacgaaga

SEQ ID NO: 131749 - DNA, 803 bp, Cannabis sativa
atttgcaggtttctcctttcatttggttcgtaagcatagtattgtttttatattttttttctgtccatgtgtatttaattttatgggtttttattaataatttgattcctaaatgattttagaaagctttcataatcaatcaatatatcttacaaaataattaagaaataaattttactatttttttttatacgatactaaggtcactcaatttttctttttatgaaacaacaaaatgaagaagaacttgaaagaaaaaaaaattgctttttgtacgagacaaaattgaaaaatagaaaatgaaaagattttttattttttcttttattttttgaggaagaatatattagtaaaaataatttatgtttaatctcatgaaaattgaatgccatcgtttccattcaattacttttttcttagaaaaaaaatgatttctattccttagtttttttctaaaaaattaaatattttcttttcttattttatttatttaggtggaccaattaaatagtaatttaaggtatgcatgagtgcactctattatttgacccaatcaaactaaattttaattcaatgcaccaaggctaataatattttttaagcaattttctaccatcaccaattaaattgaattataagggaagtattgatgtgtctagagggtctattaaattttccttgggtgattctacaatgcacctccttaaaatagatgtactgatacactctctacttgtttcggtatccaaaataatttcttagtctattttttttcatattcatgtacgttatacccagggccg

SEQ ID NO: 131750 - DNA, 1115 bp, Cannabis sativa
tttatgccattagaaaatgtgtacgagttcaactgtgaaaagttaaacccagtacttgcatcatttcttgtggacttcggctttgatgtaaatcccttagtgggattaccttgaaacaaggagatgtttctcacaaggtctgactcaattccttctatattttccttaaaaggttttctagaaataaccggttctgccccagcatatttggtgtatgacccagtcttactactatttagtagctttgtgtaaagtgatgaggtaggaactctagtgatcctttgttttgaaaatcctagaccattgttctccacctctgttgaattcaccatgcaaaaactaacatcaactaggttgattagaatagaactgatcattatttgagtcaggcactgttgcttaacctttgtggttccaataggaatgccactagattttgttgaatttgtttgaatggactcagattagtttgacattgcaatagcctgcgatgcttgagcaactcctctcgtaatagatttagcctgtcttttctttaggtctttggcgactttttcttttagagcctccgcggtttgatgagcccctgtgacctttatttcccttggaacatcagcttgagtatgggttccaataaaaaatgtcacaagaaattcatctttcttcttttgccccaagtcatgtgcaagcttgcggaaaaatattgttactttcggtgccattacttttcctgtaaaatagcacacctaattacaagagtgtaatattttaattctccacaaaaggagaatgggtcccactaggcgtgtcaaaaattatgttaagcaaaaatttcacatttaaaatattaaaataaatgcaaaaacacaatttcacctatgctgaatttatagcataagagtttattaatttaagttcgacccatccaagattataaaaaataatctcttaattacactcctttcgtttaaaggaaataccttttgattccaattacgatgaaactgaatgatttagaacaatttaggcgaatttggggtaaatttggaattacagctgaagtcagtcaatttaattaatcgagttgcctacataccttctttgtgaaggatcaa

SEQ ID NO: 131751 - DNA, 1631 bp, Cannabis sativa
tttacatttttacgttcaaagaatcttgttttacatttttacggttttttataaaaataataagaaaattatataaaagtaacatgaaaataacatcaaaacaataacaaaataatatacagataacaaaaaatcaacaataagttaacaagagtacgacataaaaagatcgtattttctataaataaaataaaaacaaatcgtaaaaatatttaaaattccgtaaaatcgtatttttgtaattttttttattgtttttgtgtatttataaaataatctctagtagtagctagtgagaaaaaataaatcatactttataatagtatacattttttttttaatttaatttacaataatgacgctactattattattgacgttacgtcaaccaaatttgacgtatctgacttttttgttttcttgtgtttttaaaagtaattttttagttattaatagtgttgataagaaactaattagctatatttacataaaaaaattatttttatatcatataatttgagatgcattttggttacctctaaaacttatttgtatagatcttagtaattaattagttattttcgtgttaaaaaaattagttacttttaagttacattatagtagcttataatttaaaatttaggtaactttaaaaattattttcgaaactaatgagttgtcatgtaatgtaacaaactactattttttatatacctttttgttatttaaaagctaattagttatcgtataatataatataattcaattaataaatttcttaaatgaatgttaactaatatattttttttaaaaaaattataaaacagtaacgtcactatattagtaactaaataattttttttttctgaacacagtaaaaaaatatatgtttcccacaacttaaaatattcacattgaaaagtaaatcacaataatatgtttttagggtcaaccaaataacgacgcagttataaattatttttaaagttaacaaaatgaaagaaaaagaggaaagagagaaatgcagtcattaaaagttattaatgccaaaacaaatgtattcaaacatgtcaaaatgttattaaaagttaaaattagatggttttaaaaattagatgccaaatacgatgtcaaatgtaaaatacccaaaaaaaaagtattggtaggactgacaatatgttcgatgacacgaaataaatggattttcataagtttcacatttaatatatcaacatgcatgttcgtgtttaagtttatagtacgtttaataattgtgttatgttcatgtttatcttaattgtgtcgtctcatatatttgtattgacatcaatacatgaattatttgttataggtttcataattattttttttaaaaaaattgtggtttgtcttgatatataatcgtgttttgatattgtattatcgtgtcttatgagaattttttttacttttagtaacaataaaatttgtaactaaaaataaaaaaattgtgactaattataaaatatctttcttatattgtgactaaaaggttcatggtgttaatacttattgtgactaaaattaaattagtgacaacttgtatctaaatgttatattttagtcacaaatagtgtaaagcccgcttagtt

SEQ ID NO: 131752 - DNA, 732 bp, Cannabis sativa
cttgtcatggaatgaagtggtgcttcataatgcttaggttgttccaaattatgtgccaatttttcacattatcaatgatgatgtagttgttgtataacctgcccacgataaacttcccttttaaaccagctcccaaaatatcatctcgagaaaaagtggcacaaatattgcataatttccttcaataccaagtagtgtcattcttaagctggtaattccaaaagctttgcccctttaagtaaatattattcacccattttacccaaagggtatctttctgcttgcatattgtccaaacatatttggcaattatggctttgttctatttgactccttcacgaaagacaagcccccccaaaaccttaggaagacaaattttctcccaagaaaccaagtgaaatttgcttcttgatccattgtggccccatagaaaccacatacaaagcctatccacttatttaacaatactttgaggcagtcaaaatatactcatccaataatttcttaacaccaaaagaacagagttaatgagttgagatctacctgcatatgaaagatgatggcttgcccaagtatcattttgattttcttgaaaatgactccacagtcttcaactttccatttggttggtctcattagcaccccaagatacttgagaggaaacaaaccctcttcaaattaaataatttgaaggagctgtttttttaagctaagacattccccccccccccc

SEQ ID NO: 131753 - DNA, 817 bp, Cannabis sativa
tggaagttctgtgaatctccttaattttcaagctttcaaggaaatagggttgcatgagaaggatctgcgactagtagttttgagtatctacgattttaccggagatacaattgcattaaaaggaatgatcaagatcccaatcaccctaggaaccacacctgttgctgccaagtcgatggatgacttcacaattatcgaccaatactcagcatataatgcggtgattggtcgtcctatcttgaaagagatgaagattttgacatctatctaccatcttaccatgaaattccctacccccgctggagtaggatttgtgcgaggagtctagttgattcgcgagagtgctacattgcaacactaaaactcgcagagaagaagtcagtcaatatgatatacatgttagaagcaccacctcctcgacaagaagtatttagaattgaggaaattctgcgtgaagaaaaataagatttggatccgagaatcctggagtataccaccaccgcccaagctgtacaagatacaattgaggtaccaatcaatcctttaaataataataaagttttgaaaattggttctaaactaacttttcaacagcaagaaaaacttgttacttttctcaaacaaaacctggatgtcttcgcctggaaacattcagacatggtcggaatatcgcctcatgtgtcattgattgaacattgaccccgaagtgcgaggtgtccgaaaaaagcactgaaaaatggaccctgtgaggtaccaagcgctgaaggaggaagtagatcgccttttggcatgtggcttcataagggagtcattctac

SEQ ID NO: 131754 - DNA, 932 bp, Cannabis sativa
agatattaactaacatttaactaagttgacatatttatttttataattttttgtaccagaataatcgatcgttatgtaataatagatcttaaaaaaaaaagtcgttaacttagactccatgtaaaaatagacgaaaagtacctatctaataatatttaaaaagaaaaaagggacaattaatgaaccagataatacattcaaaatcagattataaatgaaaacattatttctatacataccggactaattaacagtgaaaaagaaaaaaacactcccaatatgtcttgagttataaaaacgaggcaaacatttattagaataataaatacaaaatattgctataaggtatggtgatcttacactataatgtgatttgtgtaatgataatgttaccatagaaggtaataatattcatataaatatgtataaggcaggtaaaagtttgtttatggttagtcaaaataaattattaatttcctttcaaaaattaaatttcagagtataattaatgtttttggacctttcataacgtaggagttaggaccatttttattccaattcaattattcttaaagaactttaggtcaaaactagaacttataaaattaaatttctggaaggaacagtgcaatattctaacgaattgctcaagggtactatcatctaacattgttattattaatatgtttatttgtaacgtaagttcttaaattatataggttttggtaagttaccaaattttattttgtgataaattggtctctaaactatttaaattttggcaagctagtcctgaaattttatttttagtaaattagttcccaaacttttatgttctttgaaacctcactctttggtattttatttatttatttagttttatattaatttttaatatttttatattaatatacattatcaaattaaaaaat

SEQ ID NO: 131755 - DNA, 696 bp, Cannabis sativa
acacacacacacacacacaccatcgcttctctcttaacttaaaatttaccatctttgattcctacattgtaaccttaagagagctatctcaaatcccaccgatagtgatcagataaattcctatataaattccttaccttctaacttaaaaaaagagtaggtcattaccttctaactatgggggccaaacctctataaattcatgtgttcttttactttcttgttcttattgtgtaacatgtggtaagcatcaattttaatatgactcggctgtcggttggccaaatctaaggtcaacagattgtattgtgaggttaaaaagattaatgttgaagacgtgggtctgatattggcccgctgtaggttcgatgggtgtccaattatatatttttgaattttggtccgatgcagttcaatagtttgtccgataggtgtatgtattttatgtagttgatttttgtagtttgggtctgatgttggtccgacacagtctgatatgctacccgatcattattgcattttattgaaattgatcatttttagctgtggtccgatataggtctgatgtgggtccgacacttagtccaatgctatcatatatttgttgggttttatgcagtaaataaaactcatttcaatagaatcagatttacttattaatatagatcagaaataacatttagtgttgcatggttc

SEQ ID NO: 131756 - DNA, 1408 bp, Cannabis sativa
catgtattttaccaagctcaaaaccatatgggaacaacttttcaattacaaacctacttgtgtttgcaatggttgcacctgtggtggtgtcaagaaatttcaagaacaccaccatatggagtatatcatgtcttttctaatgggtctttcagactctttttcccaagttcgcagtagtatattgcttatggatccgctacctgaagttaacagggtctttcatcttgtttcccaagaagaaaaccagaaagttaacaccaatactgctgttgaacctaacccgagtatggcttttccctttcaaggagacaaaaccagcaacaacaacaaaaaggatactgtaggaaacaaatcgtatcatcccaagaaaaacagaatgttttgcacccattgcaacatacttggacacaccattcagaagtgctataaaattcatggttatccaccaagctacaacaagaacaacaactcaaaggatgttgcaacaaatcaaattcagaccagtactgacaacaataaaacgactgtggacaaccaagctctcttgcctcagctcactgctacacagtaccagcagcttctgaattttcttgcaacacaacaacctggtatggctaatattgacactggaaatacaacaggtaatacaggtatcgtgctttcatccatgtctaattttcccataaaaggattctggattcttgacacatgagatactagacatatctgccatgatatcaatcttttccaatttatttgcaatactgaccctaccaaattgatcttgccaaataataaccatattatgacacatcaaagtggcactgttggtattactaaagatcttgtgttagaaaatgtgttatacgttcccagtttcaaatacaatatcgtatcagtaagttgtttgacaaatcccaatcctttgtgtgttcaattcacggctaaccaattttccatacaggacaagaacaacaagagggagattggaaaaggtgaaaccaagaatggtctctacatccttgattctacacctactgattttccaatcctcaatgttgctgctgaagtttggcattcgagattaggacatctgtccaacaagcatctgaaactattaaataaaactctaaactgtaatactgctgttgttcataaaaataccccttgttacgtatgtcctttagccaagcaaaggaaattaccgtttcccaacaataataattttgcttgtaaaatttttgacttgattcattgtgacatttggggaccttaccatgttcaatctcactctggttataaatatttccttactcttgttgatgaccattcgagattcacttggatctaccttttgaaacaaaaatctgatgctttatttgtcatacctcagttcatatcttatgtt

SEQ ID NO: 131757 - DNA, 1672 bp, Cannabis sativa
  modified_base (1466)..(1476): a, c, t, g, unknown or other
ggttggtgggtgcttcgtttttctgggtagttctgggtagactaaggaagaagacgaagaaaaaaaaaaggaaaaaagaaaaaaagaaaaagaaaagataataatttatgatttgaaaataatttatttagtttaataaaattataatttagaccaattatttatcgacacgtggcattttgaattagaaaacggatccttagaaaaaaggactaacggacttacaaatattgcgaccttagggactattaccgccaattttcgagattggggactaacctgcatcaaccttaagtttttggggacttttgcagcaattatcccgtaaatatatgatctgacaatgaaaattattacataaaataaaaaataatcaaatttcaaataactaaaatagcaagtttgttgagaaattaatttttcaatttaaagtctacgaatatctaaaactaatttagattaataataaaattaattttaatctaataattagatttttatttgaaaataagattctacaaaaatttttaccaaatttaaattttatttcattaaaaatgatttttaaaagttaaaaaattgccaagtatgtcgagaaccaggctacgtgcaacctccatgtgcgtctaacctcggtcacgaggctgttcaaacaaggtcgtgtttgagaaaactcggatagccattgtctgaaaccgtgtctcgaccgagtgtagccttagatccacgtgcgtgagtgaacacatctaaatcatacaaatatcgttttaaatccatattttatgaaaataaatcattaccattgctctgaggctagttgttgaaacttgttttactaggatctcaatttaccaacatgtatatttgattataatctataatctaacatcctaaacatgaatttcctaaaacaataaaataaatacatataaagttgtagaaaactttactttggtggtagcagaatataaaggctcattatattaagatctctaacccttgttcctttctgtcgcagagtattaccaagatctgaacctagatctccttagatgatggaattcttcacaatcttccacattatgattgattattgacttgaattgtgtgggcaagtactcttcactatagggttcaaaaattttgaagaagaaagagaaaggaatttgaaatctaagagaggttcttccttttcagttgtctgactgattagtctgatgaaggttaggtagaataagagcctatcattatctatttataggattttttctagggttaggatatagattatatggaattaaaaaagataaaataatggcttaaaattcctttaagtggccgaccctataagtcgaccccacatgttttaattttgccatttatttaagaatttatcttttctttcacaaatgccatatttttactctaatcctataaatgtcaaatctatctatttaataattatnnnnnnnnnnnaaataaaattgtcatttaactaattaactgagtttacaagccaatattatctcaactagtgtggggaccacgagcctatataatcaagatcccaataagtagatttgaaatttacaaagtaaatttcataacttattaattcctccggactccactatagatttggaattgcaatcctgattacatagaacactct

SEQ ID NO: 131758 - DNA, 892 bp, Cannabis sativa
gagagagagagagagagatgagctattagacttagagctaggattttttacttgcacttaatgacttagacttaggatttcagggttggattaaggctctttatattggagagcttaaacccttccaataggtaaaataagctattatttacatattaaattagtaaaatacaaatgactaaaatggccctcgagaatagatattttccctctatttttgcgggctgttaaggcccaattcgcaacgtggcttgttgtctatgtgtgaagttgtgcaccaaaatcctatcaggctaatgtccaactagccatgcacctgcaggatgcatgctggtcggccctatgatgtctagaacctggccagcatgtgcttaccatagagttggacaagggtggccgaccagcctccttgaggtggctggtttgtcattcatcatcccgcttgaatgctcagactccttgttggttaaagtgttcagtaaatgacttgtccttcatgttggctagttgtactgccatgtggcattgatgttggccacgtagacatgccatgccaggagggcaaaaattaggataacagagggcctcaaggaaactctttccacagtaggacgacccaggcactcaagtcttactgcaatggcgttggtgtggtcaatcaaagaatcgatttttaaattgaaatccagagttacaatttagtgttggaattgcaataactgggaatggaatgtttggaaattcttgaatcctaatttttagaagaagttggatacataagtcattatcatactctaaacaggttcaacttattttcagttctgagttttagtatggactctcagaaattataagtaaaagaaacaaaattgaaaaaaaaaaaaaaaggaaa

SEQ ID NO: 131759 - DNA, 670 bp, Cannabis sativa
accattgtaccaccattacctcaataacttcatttatctaaacaacattatgttctaaaatttctttacattaaagatagatactaaaagagtctacatatattgagattaatgtattgtttattattaataatattatacataacgtttgtttataaaataatttataaaataactatgttttacttagtacttccaaccatttctctactctaatatctaaaatacttcatcaaaattctattttctttattttactacacatatacattaggctatatatcaacttctttatatttttctccaaaccatttaaataatatacttacaatacacaaaataataaaactattatatattacatattatttatttatttatttacactacaaataaacaatatacattatagaaataataaaaaattatagttaagcaataatactaagaattttcttaactacatttagctaaatactatttataaggtaaacttttgagctattttaactcatctattagatatgcttttttgacatttctttttaaatcttagctattgttttgtggaataagactattctgctagttaaagtgttgtggcagaacaacaaggttgaagaagcgacttgggacttagagtcgaagatgcgggagcagtatctcgagc

SEQ ID NO: 131760 - DNA, 503 bp, Cannabis sativa
  modified_base (457)..(457): a, c, t, g, unknown or other
caactacaatccgaataaacaaggtaagaaatcgattttgaatgcacaagaatctcaccataaaagaaaaatattttgtcaactaacttggctaaaagactttacacataccaataattttgtaaggtatgtgttaagtctttttggtaaattagttaacaaaatattactacaaataattaatgtagattttattatgttaatttcgtgcctttaattgctctttttttttaatgtaacgttctattctcagctggttgtatttgtttggaaatctttttttgaattaaaaagaagaaattttctttatgtaaagttacctattttcgggaaatttagttttttatttttctaattgatgatttctcttttgtcttgattaattagagcagattaaataaattgtatttgataggtttgaagtctaaatttgtgatcttggttcaatttgaaaagnttcctttttggtcctgatctgctgttgcagagcccgattctgatgc

SEQ ID NO: 131761 - DNA, 747 bp, Cannabis sativa
ttttttttttttttttttatagtatgattatgttatagttatttaaaacattttgtaaaaatttataaaattataaaaagaaattaataccttaaaaataaaattcaaacaatttattatactcgtatctcttttagtttatatttgtgcaagtacaataaattatttaaacactactatttatattgtaaaaatatatcaaataaaagaatgctaggggataccttatggtgccaaatgctaagcaccttggcaccataagaggtgacttgtcattattagtacaaattaatatcgagttatacacagtttaatttaataaataatatataagaaaaatattaataaattgattgagtatgatatgggacactatacattgtctaacagcaatgctcctcaaataaccataacttaaacaaaacaaaaaacttcactaaaaaattattagtattgtagaagctcccaatattttttattgaagtattaatatcagataagtatctaacacttttataagtgttgttttacaattggttagcaatagttttttatatctatttttttaaattatatgaaacttaatacttaattacgctaagaacatgtctaggtacattttaacatttttctttttattgaatttttctcaataaataaataaaaaataaacataaatataagattaattaggattttttctccgaactttgacatgtaacaaatcatgcccctgaactttttttg

SEQ ID NO: 131762 - DNA, 1076 bp, Cannabis sativa
gagtacccaaaaatcttagagtaatttacgtgagacaacctgattgttaaattatttacggatatattgttagctatttaaataccggtctattctaaatatatatgaaacacctataccgaagtaattgaatttctatcaatccacgcataaacattgtaagctttcttttttattttttatttatttattaaattcaattaacttcacgtgctccaattttgttttcttacttctcttcttttttacacatacaatactaaatttatatattaaaaagatttttcttttcatattttcttttcttaaatttaaaatacttttttgactatataaataattatttagtcttaaagattacattattttaatctactcattaaaataatcattttaatatataaaagtaaatgtattttatcattacggtagaaaatgatcaaaatttaaagtaatattttagtttcttttttatttagttaactaattagtaatcaatatatttttttaagagaatataagtattgtattccaattaaacttattttataaattaattttgatagacttctaaaataatttaataaacatcatatgagttacattaaaaaaattacactaattttatttcttaattatgtttaaaattaatgtaaactatgtttgaaaaaagtaacaccaaaatatcttaaacaataaaataacataatataatttaaaattttaaaattaaaattataattttaaaagttaactatgaaataagtagccaaatatgtttaagacaaaattatcttgaaataaagtttttctttttcaaaaaaataaacataaaataaaattaatatatgtgggaagtatatatttttttgccgttttcgaaaaaagacgaccaatattaaaagtaactttttcgtttcttttttttttataactttttaacaaaaatcataataaaattttaaacttataaaattcaacatatcaagtacattataatttactataaagtctttagttatgttatatttaaaagttaccatatgatacactaataaaaaatttatttaataaaa

SEQ ID NO: 131763 - DNA, 1201 bp, Cannabis sativa
ccagtttggcacagctgtgctatgtaaaaaaagcaactgtagttgtgctgttgggaaaagcagctgtagtagaactgtgaaaaaaagttgagctaagtatttggtaaattataaattttaaagtacgtagtgcgagttattaaaattctattataataatgataatattttaatctagttcattataatcacaaatatatatataaatatgttatataaaatttttattttctatataattctttttctatagtataagtttatatgtatttgataaaaataatttttaatattttttaaattatatttttatgacttgtaaaagaaaaaaattataagaaatatagattgatattgtttgtttataataaaaatataaatataaaatattttttaaaaaataaaataaaaaaattagaaatttaaatattatttctttcaaaaaaaaatacttttattttttgtaatatgcaataaataattaaataaatttttagtaaaaaataatttattatagtcttttaattaaaatagttttttcttaaagttaaattgtattagttttactgtagcttttttaattgtttaccaaatattttttttagtaaaatatattatttgaacactaatttttttttgtaatttatgtaaaataaatataacataaacgagacaaaaaagaaattggactacaaaaattttgtacatgctaaaattaaatagtagtagcaccttatattttctattttttaaaaatttaaaaattaatgacaattaagttatattttctggcttttttttattttagtataatttgttttgcaacttttatttatttatttattttaatttaagaagtcttcagcagcatcaatcaacttttcctttttattgtttttcgctttggccccgcttgtgtagtgtagtgattttgaatcccgaaaatgcccctgttttggagaagtaaacattcaaagacagtggcatgtacgcgcttaaagttttgaggctagaatgaatgaccacgcatgcgtgggccgctgtgaaaaggctcattaggcctatgttgttacgttgagttggtgtggtttgacttccctttattagctaactagtgaacaaagccgcacttcgtgcggcatgtataataatttcaaaatttttattcacactaaaaatatttttttttgttaggacaaca

SEQ ID NO: 131764 - DNA, 551 bp, Cannabis sativa
aaattttaaaatataacaaccaattaagaaaaaaatgtagaaattattctttttgaagtttaaaatctactaatatctaaaattaattaataaaataataattaatttttgaatgataattaaatttgagattcaaaaaataaaaatttacataaaattttacccaaaatatcaaaattaaattccaagaaaaagtatgaaaatttgaaaaaaaaaatggtaaaaaaatatatttggctcggatagtatgtattgcataccatccgcacacatagatggggatgcctgaccaagaaaccttgatggaggaggctgcgtgcatgatttctgcgcgcggatagggccttcagacaaaatcttgaccgaacatcctcagacaggtcctatctgaatgtgcttcaagaccgagtgatcctcgggtgtgcaggcgcgcacataggagtgcatcccaccccaatttttccaaaattttaaaaaatcataactaattcaatttaaatcgaaatttagttctgtaaaaaggtaaattgctttaatttttccatactatc

SEQ ID NO: 131765 - DNA, 1465 bp, Cannabis sativa
tcggctgcgaattctcagaggtgtcatcagtcagccactcggctgcagcttgagccgtggcgagatctgacacccgctgcctttgcagctcttgtttaacccacggcttgagtccttcaacgaagtagaaaagtctgtcgacttcgttcatatccttaatgtcgagcatcaatccggagaacttctttacatagtctcggactgtcccaacttgcttcaactctcttagctggcgtcgagccaggtaggcgacattttctggcagcaattgggcattcaattctttcttgaggtcttcccaagtgtcaatggtgcatttgccactctgaatgtcttcatacttcgtcctccaccacaacttggcatccccggacaaatacatggtagctgttgctgcctttgcttcttcagagtcggtccgcacgaccctaaagttatattactgtgtgtctgaaactaaaaagaaaaaaaaaattaataatatttattaaaagagatatgatgttaataatgtcaaataattaaaaataatagatatttaaaattttttaaaattaataacattttatatttgaatattaaatatttttttgaaaataaaacataatttaataatttgcttaatattatataattaaaaacacttaaaaaattaatacattcatgtgtataaaaaacaaacagtctaaatatttaaatattcagattttagagatggaatcttattattcaaatatgcattcagattcagaggtctggatcttaaaaaaatcgaatgcaccctaaatagtttgaaacatataatcatacttatttttcactatgtagacaacactataattatgagtaactatatgttcgggattttatagaatttatatattaaacatacaatcatgaatgtaatcatgtgaactaaacaatgtaaaattatttctgatattttattaattagtaaataaaattatattaaaataagttttatttgatgtataaagccccaactgcactaatataaaattaaaagtgcattttaattaatctcatccccttgatatccagatcaagtgtagtatatgacattatctttgtgataggatcttacaggttgtattcagtatcaaccttctccaatattacattccttagtcacaaaatccatgtgaaatttctatctatatgtttactcctcttaggattttggattctttactctttcgtaactacatctgtgttatcaccaagtaacactagtagttaatttatgtctagaataatgctaaaatctgtatagaactttcccaagtctgaatatttctgtagtagtcttctgggtcactttaatattcaacctcactggtagagttagagactccgaataggtttttatacttctccaaaaatcattgttctaccctagagtaatcaccatcccaaatgtagatgtaaagaccgcttagcttta

SEQ ID NO: 131766 - DNA, 631 bp, Cannabis sativa
tggccagtatcctattgaaagtctcaatgggaatgacagatgcaagagagacccacctgtctccccatgatgtagaatccaggacctgagcctccaaagattgaattaagacatggtttagacacatcactaaaggttgaccaagcctgttcaatggctcccggtcaacttcatatccacctaaagggcagttagggaggacgaaacaagtgtggtaagtccttcacctaataggcgtaccctcctcaacctcagatttagaaacagaactatcaacccttggtcaacctcaagtacctctacctaaccgacacctagatctacatgctcacgaggttgtgtggcctcctctacaactctgactctaccaattatatgtaccctggaaatatgagggccatatggtgacactctacgacatcattatttcatcctagccataactattagtcggggatcacacaaagggagcaaggggacaaacaaaattctctctcacacaagcaaggcaggtgggacctatgatacagcggttgtcacctcccaagatccacactcaaaatcctatatatagaaaagacaaggggaggtgagcaacccaacaaagctaagacaaattctagtcaatcgt

SEQ ID NO: 131767 - DNA, 638 bp, Cannabis sativa
aaatcaatctgttgaaaaaggtatgatgggagtaaagaaaatttgagttttgagttcttaacaacaaaacaaactaaataaatatttatactacaaatttcttgttcatatataatcttttagagaaatgctaaaatacattaatagtgcctagcacttttcaaagtgtaatatcactattggtacaattaaatattaggtgtcatatattttaatatattatttttatgcagtattgttaatcaatcacaatgcgtcatttttagacaggttttcttaaggtgatgaaagacttaggataaaatttgaaacgatgcctttttttttattaaaattgaaaataaatattaattaaattttgacataatatcaattttaattttcttatctttatatattaaataatttttgccacacaagtgaagtcgataaaataatatttaattgctaaaagcatctcaatagaagtgttatatattttaacacttttgtaaaaaaataaaaagataaaactaaaatcaatagtgtgttaaaaattatatatattttttcaaggggttattttacaaatacacaaaaacaacaaaaaaaattacaaaaatacgattttacgaaagtttaaatatttttacgatttt

SEQ ID NO: 131768 - DNA, 711 bp, Cannabis sativa
ttgttttattttttttagtttattgttggaaacataaaaaatcataatttattttattttgttgttagttatgtgaaacaaaaataataaatattaaataatttaatattagaaagtaacaaattcaaaataatcaatttgatctgcacttttgtagattaaattggattgaagttattgcacgaactagattggattcaaaatatgaaatttacattttgtgagaattggatgcactacgagcaaaataatgcatattaaatttaatgaacactcttactttcaacagatcgccaagctcaagaacatcccagctcttatagtagattgttaggaaacaattgattcaaatggatacaatcacacacacaattgtacattaatttgtctcacagtttttagaaccagatagagagagtgagagagaatgaataatattttattagtataatatggaaatgggtacaaaagattggtcttaatagtgagacttacatacatttatagtttttcttaattttattaactgaataaccgaccacaattaaccattgtgaatggaaaaaaatgaagatttgtaaatgttattttgcctgattgattatttggaagaaggtactttctttcactcttttatgttttgagtttttaatttttaaaattatgttttcaaaagtgaaaatggaaaatagttttttgtcattttaaaaa

SEQ ID NO: 131769 - DNA, 731 bp, Cannabis sativa
ggagggggattctgacctccccaactacctccagcctcaaccatatcaccctattattttagcgggtgtccatactataggatgagcctgtgatttcataagtgaagtcggtcaggtggtgattgtaatcatatactcaataccacataacatgagaacttattcatatattttactgctaacatgcttcttatcattcattttatagtcatactatctcatttatactactaaagcatataaaagcttactgaaccatgagtcgagcatgtatttgatgatgattgtacatatctaactggcctttggagaacgaaactagcaactttgataccatattgtaacgtcctactatctacgacacattacggttttttcttaattattgtgctaatattttctaatcaaaagattttaacataaaagtgtattaataaaacttgcgtaataattaaaagtttactaaatataaaaaaaattataaaataattacaaactgagatcctgaaatctagttataaatcgtacataatataaaatatacgaaagttgctatctaacgacataaccaaaaagatgccagcagtgtcttgaagattgcaaccatccaagcttagacgactggatatgtacaatctttactgagctctgctctcactgtagttcagcttggttttgcctttacctacacataaaaatatatctgtgagtcgacagacccagtaaaaaaa

SEQ ID NO: 131770 - DNA, 644 bp, Cannabis sativa
tacaaatataatttgacttaaaatactttcgattttgatattagaaaataatttatataaattatattttaagatcatgtgcctttaaaaatcatgtaaaatgcatcgatcgataaaatcacaaaactcattagatttcactccacttatttattgatcaaaaaacaaaataatataagcacattaaatacgaccagaagactaatataaaatatttacaattaaaatattgttatataaaatatttataatattttaagtatttaaatttaaatttaaattttcttatataaagtccattagggttttacaaattgtttggtgagtttaattaattgtattggtagtatttaataaaaatattatgaaactaaggtgaagaaattcgtaagttttaagaatatgcaggtttagaaactattttagtaaaataaccatatctagagtagatttccgattgagatgattctagtggtgttagaaagataattcaaagatctatgaatttgtagaaatagctatattataattcagagattttctaggtcagaactaagttctaaagttacgtgatagagaacttatattttaaatttaaaagttagatatttatttatttaataattcattttattattattatt

SEQ ID NO: 131771 - DNA, 593 bp, Cannabis sativa
tatgtcttgaaagaaaacaatgtgagtttttaaagcttggtggctgtttcttctcatctcttaagttcaaattttcagtacctatttctaagttttagtagaccattgatgtgttagttaagcattgaaatcatttcaagcttaacttagaataaaaagaacaatcatgtagtcatttttattttttgtgaattcatattttattttaagcacataaaattagattctttttattaaatagaaggtttgtagtgtcgttttttttttcttggttagttcatgtcacttgtagcgttcatgctgcaatatgcaagtgttggccatgtagttccagctttttaaaatggctaaagttttattggcaatttgtctcgcatgattttaaaaatgcatttggtcttttgatgtttggatcttctattacacctgaatgtgctaagcattgttttatgacagtgagctttcctagtaacggtgtagggactaattttctattacttgggacacggtctaattatatcttgatagtatataaaaaattgttttttagtatttcatactgatagttctctcaagaacaaatattctttatt

SEQ ID NO: 131772 - DNA, 606 bp, Cannabis sativa
  modified_base (561)..(581): a, c, t, g, unknown or other
tgggcaccgggtgcctaggtgcctctagtaagaagtgttctaattctgatttcagtacctctagcatgcttgtgacatgtcttattcatgtctaagtataaagtttgagccatttgcacgaagacagacctgaaaaacttaaattttagcccgggatcttaacttgggcactgggtgaaaccctaggcgtccagattgacttttaggaggctgtttagactctttctagttctcagacttcaaacttagattcttcttgactctttggttcaaaatactgaaggatggtgagttagaaacaaattggcgaggatccaaacactcattctagggttgccgaagtcaacctaggcgtagggctaaggacccttcctagagttgactgccatgacttgggacacttaactctataaatatttttctctttgtcacgtgtcaaacattgatatccacgtcactagggctaattttcgtgtaaacaattatacccatatggacttaaaaaaaaagcatgataaactttcaataagattcatcatggaattgttggaaattattttnnnnnnnnnnnnnnnnnnnnnacaagtatgttgattaacaccttaa

SEQ ID NO: 131773 - DNA, 694 bp, Cannabis sativa
  modified_base (76)..(79): a, c, t, g, unknown or other
ataaattgtgaattttgtgactaagttacggacttttagttataacataaaaatgttaatttataattagtcacannnntttcacttttagtcacaaattttgttgttactaaaaataaaaatttgtatggtgttatcttatattgatcaaatatgacaactacatagtaaaaagatgagagtttagaaaatgatctcataacttaccatacatgtcataaaagatactatgtggggattcacagccaacataatatccctcctatgttgatatccaacaccaactagtccataaaggtcttccttgtatttaggaatgaaaattcattatagaaattattttacatctcaacaaacaaggatttgggaaagttttaagtatatgtaggataaaaactatttttgtacaacaataatatctacataagacttccaaaatagttggagctgcgacgacattcattaattaaattaaaattgatatcatatagtaacattcatatatatattaataaaaatgttgttaacttatatgatattaaagtgttttacaatttaataatatcttttaaattctttattaatgtgattgtgaacactttatgcggtggtgataatttatatattaatgactacgtacaactagagctttttcaaaaaattataaactctatattttttttatttttttttt

SEQ ID NO: 131774 - DNA, 1157 bp, Cannabis sativa
tttctctttataatatattcttttagaccagtttttaattattaatttatgattgttatataagaaagaaagaaaacaaatggattaatagggagataaaaatgtgatttgatagaatagagcattttaatgaattaaatttgtatagtggcctttattggattttatattttaatacataattgtagggttgatttattcttttctttttctctttttgtagtctaatatttatttatttatttactttgtgacaaacaaatgtgcaagatgaaatttttgcttctatttatttatttcgtattctttgttaataaaatatgcttgctcccgtctattgagtttgattgtttagctttggtctctggctatcgtgatttagattctttgttagagaatattgatagtttacttcttgtatatagtaaactgttaatcaaatttaaccatgtgtatatatttctaattttttcaaggtatatttgaaagaaaaataaaatgaaatcatttcttgattatttttctatctaactataagttgaaaaaaaaaagtaaaagtaatttcttgatcataatgttcttatggagtagtgctccaaccttatattgttcatatcatattttaataatttgtctgactttcccgattctttttttcttttcttgttacattttttctttgaaattttctgttgatgggctctaaagattccaatgctaaaagttaattttagtgttgaaccaatactaaaaaagttcaattatttcaatcacaaaattaaaagttacacaaaaatatacattcttctttttatatgagaaatgctaaaaaacattgtcaagcactctcttatgtgtcaatatagttattgatctaattaagtatcgggtcctatgtagtttaatataatagcttttaagaaatattgttagtcaatcgtaaagcgacacgtcttaagggtgctaggcaccactgatatccaatagtaatactctttttatatatatataaatattacatatatattaagaaaaattaattgtttaattattaaaaattaaggtgttgtttggtaacacttttgtttttcaattttttaatcacaaaatgaaagtaaaatttttgtttttaaaaaaattatttttgaaaaacaaaa

SEQ ID NO: 131775 - DNA, 511 bp, Cannabis sativa
attttgatttttttttttaaaaatccactgttgtatttaaattattttttttatcttttcaaattatgcatgaaaatagtatttttgtaaaataaagcaaaatatcggggcgttacagaaaaaaaaaagaaaagaattataacactttgcaataataataatatatatatatatgttacacctaatttttgcaaaaaataaatacttattattttttcttcatgaaggctcacaagttaaaaatactacaccttcaaaaatacaaaagtcaacaaggaagatatcgcgaccaagcgacaaaagacgaaacaaagtgtcacatgatattattacaaagttgtagagactttatggaattatgtgtgtcgtatctacaagaaaaatgaatattaatgaggacaaattttgttagtaaaaatctatattttcgttagtattcctcatcaatgaggacatttcgttggtaaaaagtcgttgggaatagttcgtcggtaaaaacaattatcaacaa

SEQ ID NO: 131776 - DNA, 631 bp, Cannabis sativa
gtaaaatacaactttctttgtaatttccatttcctctctttttataagaagccccataaagagaaagacagagaaacataaaaaaatattaggtgtaacaatttggggcatcatggagaaggacagaatgaaagtatgtccaaaacatatcaaacttatctaccctgaaaacgaaaaatgtcaggaaaatctaactttactactgggccttacaattcccttttctgttattcactaggtaatgctgaaaattgaaagtaaaatattagacaatgcaacaaaccacatggaattggttattctgaaccaagtatttgcaaaattataataacaacacatactatatgttacactatgaaatagtgcaggggcttattagtaatttgtaaagtgcttattagtaatttgtaaaaggtgtgaaggactgtaaatatgtaattgtgaggctatttttagatatggaaatagaaaatataactttggttccattggagtttgggactgattcgaagagtacattttaagaggtttgtcctgtctcgaatagtcctcttcgagtcaggacaaatctcctaaaatgcactcttggagtcagtgccaaactccaattttctatttccatatctaaaaa

SEQ ID NO: 131777 - DNA, 1919 bp, Cannabis sativa
  modified_base (1131)..(1134): a, c, t, g, unknown or other
gtaaaaaatatcgatcattaaaatcactatatatgaagccttgttatcgtatacattgctcgtgctattggccccctacaattcaatcttggctccgccccttctctataggttagcttttttaataaaaagaaaaataaaaaaaaaatatatggatattactttttagtgacactttaaatttttagtgactcacgttataggagactaacactgaaaatttagagtctacttatgtgtgtcactcaaaattactcataactctttagtgacttgtcactagaagaccaaattgtagtagtaatagttgtatggttttaccccttaaattattattatattttttttttatataaaataacctttaaactatagaaattattgcaaatgttttcttcagtttttttttttttttagtgtagcgtaatggtattttacaatcatatattaacttaatagattaaaggttctgggttcgaacccatgacttctcccattttcccatccctccctcaccactaagaaaaccttagtggcttcaaatgttctcttcagttgcactttgtttattttttaagataatttattgacgttgctatgattataattacattaaacatttaaacactaactctaaaattatagttatacagtcttagatcttaacgataaaagtattatcaatgctattactttttgttgaactctcgaatgataatatattaattttggatcaatcttacatcacaaatttgtatttattacaaagttagaagggctttttttttgaaaaaaaattattcaaggtaaaaatctattttactaataaaaattaataagaaatgctacatgatacccataatgcctaacacctaagaataatagttgcactagtggatatggagctacaagtcccacctaaataagaaataaggtaggaataggataactttctatccctaaatgttaaacggacagagatagagataacatccccgcccttacggagatccatttaattttttttatttattttataatattatttttaattattatacattatcttgatgtgttttgtagtttattattagtaaatttttatgaatttttattttattttaaataacnnnntttattttaaattattaacatatataatactttagtggttatacgcatagtttagtggtttcacacttcttttcacaaagagaaaataacaagttcgaattcccctcaaaaaaaaaaaaaacatatataatattttaaactttatacaatctgtatttttatttatattttttacaaaataaatgggttctttgtccccacccgccccacctgtgatagggaatatgtgtggataaaagcgaggatgggtattaaaatagttaacggggaatgatgttgtcagcccaaaaatttatgaaggctaatatatatataatttacttatttatattttttattatttttacgtgtaattttaaaaaattagttcggaggacaacaccctctagcctctcttagctccgtcattattaactgcgatgggaacggaggagaatttttctacttattacctgcctaatttctatctctattaaagctttaataatatatcatattgttattagtataatttaatatccaatttcatttattttacttcaataataattatagaaaactgctaactatttatacgaggatatctaataacaatgttgcaaattaggagtgttcatcaagccgcctacaccacataaatcacctgcatcacaccacacaaactgcctgcaccacaccacaccgtataaaaatgcagtttaaaatatttgcagtgctattgcgatttgtatttttttcaaactgcacaatgcagtgcgattttgaatttaataagggaaatttga

SEQ ID NO: 131778 - DNA, 1157 bp, Cannabis sativa
  modified_base (449)..(457): a, c, t, g, unknown or other
aaggcagccacctccacataaacagaatgaccccgcacagtttttgtgttacaactgtaacaagccgggtcatatggcacgaaagtgtcggaacaagcctagcactgctccacaggctaacttgaccgaagaaccttttacaactatgatttctgagatcaacatgattagtggatcagaagggtggtgggtagacactggcgcctctcgccatgtctactatgaccgtgctatgtttaagacatatacactgttgtcgatgacaagaaagtgttgttgggagactcccacaccactattgttgctggaactggaaacgtggagctaaagtttacctcgggaaagaccttattgctgaaggatgtaatgcatattcccgagatgaaaaaaatcttgtttttgtttttttgcttaacaaggttgagtttactcaaataattggggctgannnnnnnnncatcactaagaatggtacttttgtggggaagggttatactactgatgggatgtttaaatttaataaaatatcttcttctgcttacatgttgtgtgattttaatatttggcattctagactttgtcatgttaataaacgtatcattaagaacatgagtaatattagcttaatcctgaaaatgtcagaaaaggatttcgaaaaaatgtattttttgtagttaaacaaaattaactaagacatcacataaatcagttactaaagaaactaaacctttaaacttgatacattctaatatatgtgaacttgatggaacgctaaccagaaatagtaaattttattttattacattcatagatgattgttcagattttacttatgtgtactagataaaaaataaaaatgatacacttgacatgttcaaattattcatggatgaaattgagaatcaattcaataagaaaataaaaatacttcgtaatgatagaggaacttaatatgaatcgaacttgttgattaaattttataattcacatggtatgatacaagaaaggactacaccatattcacatgaaatgaacggtaaagctgaaagcaaaaataaaacctttattgaattagttgtggctattttgttgaattttggtgctgcatctcattggtgggtgaaattttattaactgtttgttatgttctgaataga

SEQ ID NO: 131779 - DNA, 744 bp, Cannabis sativa
agtttctaggtggatggtggaaaatggagcctcttccaacagccttttcagatcaatgcttgaaaacatggggctccaactaattgacttagcaccttgcacataggtaatgtatggcgttttttaccaaggcattgcacctatagtttacatctaactgcccctaacagttggagagaatccaacaacaagaatgctaattgcataattcatagtaataaacgtcccattagccttcaacactatgattggttagccctgtatgacctaaaggcagtaacatccatctaccacttatgcatgaagttccaacaacgcatgaggtaggatatttgaatggagaccaacagtctgtttgtcactgttacaacttgggtttgtccaaagccaagaaagtgaagaagagaagatgcctgccaagagctgtaatgatgaccttaactaagggaaatgaagtctagcccaaagcgaggaggcatacatagatccttgctttagggatcgtgtagaaaacttttcacctatagaagaactagaaaagtggatgttgatcccacttttccaactagaaaactgtagattgggaaaggattagcactggaaaataaaatcagtactgataaaatttccaaaggcaaaccttaacctctttgcattgtcacatggagacattgtcaaaatagacccttccgtgatgaaccatgcactaaatattgatccaaaattttgacatgtgcaactgaa

SEQ ID NO: 131780 - DNA, 1262 bp, Cannabis sativa
  modified_base (45)..(56): a, c, t, g, unknown or other
tatttaataaaataataaaataaaaataaaacaaatctcattaannnnnnnnnnnntatttgatgctaattattcgagagtcacaacccttctagagtaatatataggtatactgatattgagtattatttggtcgactttcaatttctgagtgcacctccatagctacgacccattctcctttctcctctctcagcttcttgattgaaatcaagtaatttctgctcaattctcctccctgaagtgaaatcaaatcctgcagaaggagatttatgcgaaacgaactcttcgttcaagcttgccaatcttcgacatagcaccgaatattgcttcccctctttggcacgatgatagtacgacctgcaacaatatcaaaacgttcatcaatttccaatttccatcagattctcgataaacaaacatcaacaacaaaagcggtttttcaccatggtccccaacggaggcgtcgaaagccaatcgagaagccatatccgactggagcttgctctaaagtctttgggtatcaatcatgacggcctttgcgtacttctcctcctgttccatgtagatatccatgtgacacattgctactttgtcgttcaagcttgacatccaactgtaagggtcctcccatgtctgatcatggaagctaaagctttggggcttctgtggtggcttcggtggcgtaggtggattcgccaaatatgggaataaacaattaagagattcaaacattcaaatcataaccgataaactatcaatcacctataaactttctctccatattagcaatcacccataaactatcaatgattaaaagaaattaatgaagtaacataacaacttaccatagacgaagaagagaactgaaacttgcctagaacccaccaatgacagagatggccgatgaacagaaaaagggatgaggaaactgaagttgtacggatcaaggagagggaatgagagagaagggcatcgattgggaagagaaggctctaagtgtctttttttttcattctttattggattgtcgaggatgaaattgttaggattgtgatttgggagaggggaggggagggtagtagtgtaatatttgagaagcattatggacgagagaggaggtggcagtggctcatttgtggccgtgagaagaatttctttatttggtaacttgaccttatttagaataagattactataatcatggtattttaaaaagggaaataagatatttttgttaactttttaaattttgttacttt

SEQ ID NO: 131781 - DNA, 545 bp, Cannabis sativa
aaccgctcttccgatctttcatcttatacccatgataccgcgcaatggatccatgttgatactcagaccaacattacaatcccacaccaacccgacaccaacacaccatccttcacaacccttcttaacgccactatgagtaatactagtgctcaaaaagctccactagcttccaccccgagtcacacaaacacctcacaaaactctagtagctccaaatattgccctgtccctttgcctgaaaacatccccctccttgacactagtagacgacttgaagtaatgaacctgacctaccagcctgccactccctcgggctcaaaggtttcaaaaaagagaaacaaacccgactcaaaggataggatcaaatggcaagcaaaaatggtgaacggggaactccgtcgaaaaatcaagcgctctcgctctgacaatccacaagtcactgaagtctctcctgaaagcgcaagcctggccactgagcaggcctgcctgctgccatgaagcttgtgagctggaatgcacgtggaattgggagtgatcgtgca

SEQ ID NO: 131782 - DNA, 573 bp, Cannabis sativa
atataatttaaaggacactattacaaaaagaaaaattatatctttagatttttctggtctatttgtggttaaaaaaatcttggtaccaaaaagtataattaactcgaagacgtaggttttaaaagcaccaaagatgtacgagagactcatgtcttcgattatatattttatttatttttagattaaaaaattgatacttataccataaattgaagccattgtttaacactcccgtaaatgagctctccaaactcacaaaaccctaaaattaaaatttgtaaacaaacaatacttttcaataatcaccatcgtttaacaccaccaaatttttgatcagtaccgtgtatagttttccaacaattgtagtggactttccgatcaccataataaagtgatgtatacctcaatgcaagctaaaaggcaacatcgaaaccctcaaaatcatcaccgttaaccgatcgtcgttctccaaaactcctaaatatacttcagcctaaactctctgtgacagtcagtagtcccgtgatccgtaaggggaaaacaccgggtaagctgtgcaatcccacaccgcct

SEQ ID NO: 131783 - DNA, 1903 bp, Cannabis sativa
aatctaaggtcacaaagtcaaactgtgggccacagggtaaacgagcaagttttgccaactcgttacttgggagggaatgattaggataacaccaaccaactacttagtcctaacctcaaggaaattatgactgtatttgtaagcttattcaatctgaatatacaccttccagcccttatgccaatttttatgaaatctggatgcctctggccggctgcttaaattagaaattgaaatgggacaataaaaaattacctatcaggcccatacaacaataaaaggtcaggccttagcagattttgtggctgaatgcatggacaaggagatagaaaattcaaaaaataatactgagctagaaaggaacaaggaaaagaattcccaccacaaaaggatattgaaggcaaactagtgttggagatatttcccttttaacgaagctttatcttgtaagaaaaatcagtgatggagatattttccttttgaagggtggagagctgcaactttatttgtaggacacatgctttagattgactggagtaggtttgttgcaaagtgatccaaaccgcgtgagaggactcatgctgagctagtgagctaagaataacttcaatcatggtaaatcaaaccaactgaagaggagctggtccttcggctgccagatagtgaactcagggtttggagctttggtgacaagaagtgatgttggaggaatacctgtaagaagaatgtcatccaaaccatggccaatgaaaatcaaaaggatccgtgatttccatgtaagcaattttagtcgatcgagtttgaccataagagaagaatatagagtgttttggaagggattccaggcaaaaatggtagaagtaggggcataaggagtggtggtggtgggcagatcattggtggggtggtggcagtggtgttggaatcgatttctttttagggatccatgaagagaatcatcaatgtcaatctaataccatgaatgaacttacctatgctaaaccatctatgagaacaaaatagagagaaagttctcaaggttttgcaaaagttaattactctattatagagttgcattatttatattaagaagcaatacaagaatagttaagaaaagaataggaaacactaaaaaggatagcactaatagatacatgctatttgctttggtacaaattgcaacagaaaattaactgaaataaaaggctacctatttacaccaaaagtagccctgatgacgtggacatcaatatttgacacgtggcaagacaaataacattctagagttcagtagtcccgaatcatagcaagtcaacttgggaggggtccctagccctgcacccaagttgacttcgagaactccaaaatgggtgtttggatccctccaagttctttccaactcactatcttctagtattttgaaccataaagacatgaagcatccaagtccaaggtttgggagctgaaaatacacgaaacaacaccacagaaatcaacccggcacctagggtttcacccagtacccaagttgacaactgaactagggtttcagtttttgggacggccttagtgaaaatgggtcaaaatttgtactgagacatgaactagacataccacaaacatatttgaggcatcaaaattacatttagagaattttaatttttgagcacccaaagcactatgtgcccgggcacccagcacccaagttgacaaattggtaacttgggctacttccaagcatcaaactgaaaatcttacttgagcatcttctttggcttcatcaaaaatgggaaaacaagtgatttcgaggaataaacaaaccaacctagaggccaaaacaagggacccgcgactatattgacacttggtgttggcccagcatccaggttgacattttgtcaac

SEQ ID NO: 131784 - DNA, 2268 bp, Cannabis sativa
tctctctctccctctctctctttagaacactatagaatcagctagggttctggatttcttcttcagattcatgtaatttacaaaaagttttaagtgatctcaagctctaggtaaactcccaacactttgccttttagtttcttgattttcaagttactgaatttgcatgattttgggtatttgagttctatagtggctgttgttgtttgatattattttctggagtttaattatgctatattatgttgatttgagctagttttggtggcggttagtagggttaagaaagttttgagttttagaactcaagcttggttcttcattggcgatttttgattcgaagcttgtgtagttattttattgcttggaatatatctattggggtataatatgcatgtctagaaggtttgataatgtttagatcgatttggttaggttttgaaatttttgggtttttcggtgtaaaccggttactaggatttgctgctggactccccgaaaaatttgtgttgtcgatttgtattagtttcagagctttggttggttaatttcctgttagtttagggtattaccatgttaagttgcagtagataggtttttagtttaaaacctaagtccccggttgtgatttatgtgtcacttatccatgttgtgatcgatgtgatttaggagcctgtaattcgccgagcagttgttctactcaggttggccgttacacctgaattcagaatcaaggtaagattagtataatgttacacatatattattacatgtttagcatacatgttgtttatgccacttagagtacattgataacagtaataatatacgtagagttgtattgattactgataaatgtatgttggctgaaatactgattgatgttgtcacatcaatatggcgagagtatgactgacatattgagtataggctgacattatggtcgatggtattgtcgtataggatgacagggatagggttatggtcgggtgtatgggcgcctgattattacccgggatattattatgtttttatgttatgcttttcttactgagtccgtcgactcacagttgctattttcatgtgtaggtaagggcaaggctaaggctgaggagccgtgagagcgagtagatgaagattgtacatgtcacggcagttaggtctggagcgtacgatctttgggacatcaaggcttttgttgtatagtcgctaggcgacaaacttttatatatgtacagttaaacttttgtaaatgtttttgtaaacaggaccctaaaattttataagtatgttgatttatgtttttaattaaataagtaaaattttaattaatcacaattttcgataacctcgttgattagcaacgagctacacaatacgttaaaaatcacgctaacatgcctagttagggtgttacatttgaggtgtgggtaccctagtgacctaaagggaaacttttggaaatgaattaaggacctagaacgggttacgtcaagtagtttttttttttttttgataggaggttacgtcaagtagttaatcgttcatttattattacaacatatggcctgggaacgttgatcgttcttcgtacaagtcggcctacacacctaatttgggaacttgaggtaagaaaagtataactgtaccatatggcatgctaagatacaattattatcgcgatgattcgattgtgatcgagataatggaatgatgattagtgttaaagttaattaatattattacatcaaccgaaactgttattaggtttcttaattattggttgtcttattagacaatggtaggcaatgcgatatatggatgaccataagagcctcaaatatttctttactccgaaatacttgaatatgagacaaaggcattgattagagttagttaaggattacgactgtgagatcctttaccattctgggaaagccaatgtattggtcgatgccctgagcaggaaaggtctcgggtaggtaactagtatgattcagatttcacctcagttagcagaggacatggtcagatcaagcatcgagtttgttgtatgcaaacttcataacttgatgctgcaatctgatttgttagaatgaattaaagttgctcagttaactgattcagaattagtgaagatcaaagaagaggtttcagctggataggccagagattttacagtgtcagatagtgggatgctgttgttcaagaccagagtttgtgttccaaatagtgtggaacttagaaatgaaattctcgaagaggctc

SEQ ID NO: 131785 - DNA, 627 bp, Cannabis sativa
tcggatttggggggtaatatattgatgtttttggtgtgatttttgatggagaaagtaaagattgatgagtgaaagtgggttttgggatggattgggatttagaaatttaagagaagatgagaaaattgaagaatggggatgagaaaacttgatttttggctgagaatagatgagagccagctgaggagagtttgaaaaaaatttgaatttggtttagggttgaatgggggggaaatagggtatttatagaaaatctgttagctggtcgcgataagcccaagggctggtcgcgactagcttaaacttgaaaattcgatggctctggaaattggggtggtcgcgactcgggtcgcgactatggaaaagggtcgcgaatagcacaagggctggtcgcgaccactgggagttgaattttcatttgtttttgtaaagtcccaggtagcgaccagggtcgcgactaccaaaaagggtcgcgacccaggaaccaggtggtcgcgaccactgggttcgcagtcccgaattttttttttcacgtttttcacgattcaactggaaaaaataatgtctggtacttaactcaaaatttaaaatacaagaaatactaaaacatatactaaaaacataaaa

SEQ ID NO: 131786 - DNA, 807 bp, Cannabis sativa
  modified_base (426)..(431): a, c, t, g, unknown or other
gcccagtggccgcggccagatgtagtgccgccgcgaccatttgggtcttacagagacgcctaattttcgagcttatctggccgcggtgaggggtagtgcccccgcggccatataagagttacagaatggcctattttttgggtttatctgggtgcggcgagtcgtgtttttgccgcggcgaggagttcagacgtgtttataaagggcaatttccacataatttcaaaaacaactctctcattctcaaccctaacctccacaccgagaatacctcttccacactacttttcttcatctaatctcattcaaaacccttttccttcaaatctaaccataaatcttcatcccaaatccttctaaaccattattcctctcatcaatcactcattccttctcaaatcaaccccaaatccctaaaacctcacnnnnnnttcaaaaaccactattcatcttcttccttctcaagaacttcaagttttcctacaatggacgttgattaaaggtggattctcattgaggtaataattctaagactctctatacaatttttattgaaaaaaatttgtggattgttggagaattttggaatttttgttgaatttttgggatttttgctcaatacattgttcaatatagttgttgtgagtaggattgggtttgtttgtgagtgggttaattcctgagaagtggatttttaaggggtagtgctgccaaaatttttaaaaatcttgagtgttagaaaatttgggtgagatgggtcctaaaagatcaagagtgagtgaacaagggggagcttcatcatccaac

SEQ ID NO: 131787 - DNA, 787 bp, Cannabis sativa
taaatataaataagtttgcttttttcgtctaaaaatcttagtttatttaaattatttatttttttatcaataatttcggtttgatcattttttaagataccaaattataaaaaaaataaaaaaataaactttgaaaatagttttttagggataatttcagttttttttttaaataaaattaatatttttttaattaatttaattttttgattagttttttaataatttttattctttttttccagaagtaatagaatattataattactttaaaaaattaaaatattataatttttaaaattaatttttttttaaaaaaatgggcaaaattttgattggtcaaagttcacggagtaaaaatgctaatttttaatagtaaaataaacataacctaacagaaggggcataattatgtagctgttatattttagggagaatttttaacaagctgcaaattttagggtaaaatcatgaagtgtcgaaagttcaaggggcagaaacgctaattattgtaataaataaaagacatttgtataagcaaatgtgtttttttttttattaaaaataataaataaattatttctaggattgaaataaatttttaattttaaaaaagaagcattttaaaaacataattgacaaagaaaaatgattatagaagattataagaaaatgaaaggattaataaaatgttaataagagagaaagattaagattcaccataataattgtgtatatttagttgtttcattagcaaatttattttgtggttatcaaaataatgaat

SEQ ID NO: 131788 - DNA, 500 bp, Cannabis sativa
agaaaagaaaagaaaagaaattgctgtaagaagctactctatatgggaaagaaagatggaccacacacacgtgccaagtaaaaaaaagggaaaaaacaatagttaaacaaaaggaaatacaaaataatattttttgaaagagcataatatttttgaaatacaaaataatatttaacataattaattatggtttaatatccctaatcaaactcaatgggctaagaagcacgatgagtttagtgcaaagttcttgaaagcgagaagacacgaaaggcttggtcaaacagttagcaatctaattcgtggagggaatgtaagtaagagacaaagtgtggttgttgactcattcgcttacaaagtgataatcgatttcaacatgcttggttcgagcatggagaaccgaattggaagcgatatgaagtgaactgatattgtcacagtacatggtaggagcagaacataaagaaatgccaagttcagttaggagagattcaatataa

SEQ ID NO: 131789 - DNA, 577 bp, Cannabis sativa
ttataattctataattaaaattattaaaaaatataaaataatatattaatttagttatagagtgtgatgtgagatatataaattaaaaataatttttttaaatgtatcctatgttttcaaattattaaatttaaaaactattcaaatgttcttttactattttgctttaagattcctaatcaatttaattttctaaaattcaaaaatattaattacattatagcccatcatatttttaaaaataatttttcacatacaaaatttaaattgttgttttaaattactctaggcaaatatctcatacaaaaataacaagggacatatattttcatttatttttgatttaatagtatttagataaaagccattttgcctcatttgaaatttggtatagcttgtaaagtcactttagaagtagttatttcccttactttagacctaattcttttactcctatgttattggtgtaccttccatattaaccatcctaattttttttattatttcaaaaatatttgaaatttttataattgaaaattattcatgatttgggtatttttaaaaaaattaatattat

SEQ ID NO: 131790 - DNA, 934 bp, Cannabis sativa
  modified_base (477)..(491): a, c, t, g, unknown or other
tcatcaagaaactggtttcttcacaaagaaagtggtttcttcatcaaggaattagtttcgttactcacactactacaaaaacctcttttgaagtccatcaaaattggacttaaaatgtctttctattctagctttatgttggacatagtattcagggacataaaaagtgtattttcttagtccaatattgttagactagaaaaacaattcacgtccaagtgtgttggactaaaaaatgggacatgatgtaaatatgtatatcccgtcaaattttcctagacttaaaatacaatgattttttttttttaaaaataaataataaataataaatttacatttattaaaagttataattccaataaagattaataacctttttttttttacgttaatgctacacaatatacaaattaaaaataaatttgacataataattattttttttctagacttatcttataataataataataatannnnnnnnnnnnnnnataataataataataatagttgtgtaattgtattacaaatttaaattattgaattttatgtttttttttctgggacaacgtccaactatatgttggacttataaattctctaaaacatttttctagtctaataaatttggacttaaaaaatagactaatttttttaaaaaaataaaaatatggtatcatgtccactataaattttctagtccaatattattagacataataattattttttttctagtccaacaataatagactagaaaactccccaaaatattttcatgtccaacaataattttgctagacttaaaaaagggacattaaaagggttctttgtggtagtaacaacaataataaagattatgaaaacaaaacaaaaatgatatacaataaaaataattgaaactagttttatcaatcaaccaaatagagaaaaa

SEQ ID NO: 131791 - DNA, 593 bp, Cannabis sativa
  modified_base (564)..(566): a, c, t, g, unknown or other
cattcatctcaaaatatattttttttttctctttcaaaaaaattaagggtaattaattacctttttaggtaactaaaaaaaattaccttatattgttttatctatactttttttcccataaaataaataacttttttgaaagtaaaaaagtcacacttaaacttgtgcctagaaaaccataaaaatgtcagatcccggagctaaaactggtatttatgcacaaataatttgtgaaaatgtatacatgaatcaacttttgtcctattacatcaacttttaatctaaattagtaaaaaaaaaatgttcagtattcataaataatacattcgattgtttaccataaaataaataaatatatctgcttgggggttcaaggaaagttttggtaattttaataattttatacatatgatgacatgtttttgataaaaaaatgggcctttttttgaggccctacacaatctgcctatgcctagtaactgggccttactactgcaaaagtgggttttcaaattaaatattaggcgaattagtaatttttcctcccgaactttgacatatacnnnatcatgccccctgaacttttttggtcg

SEQ ID NO: 131792 - DNA, 1129 bp, Cannabis sativa
atataaataaattttctttatattgacaaagttcttcctattaataccctcttgattcaaaatcaatataatgtttgtaatcatattatttatcctgtctctataccaattttttaaatataaaagatgagatgagattttattttaagatgtaaaattctaaattttttatatgttgaaaagatagtgtagtatataaaaaacacataacaaactttacaataacatgaaaatattttatttttatataatatttttaacttgaccttaaaatattgcaaatataaccgaaaaataaacttcacaacaacataaaaataacttatttattctttttaaacatttaataatttttgtttttgttgacttttcaactttttcagttttttgtttccctttttaacgttaaaaattatgaaaatattgatcatattgcttaaaaacaacttattcttcttaaatttagatgggatgagtcaaaatgttgttggtgacacaatgttttttctctctctttattcttctcttggccaacacacttatctctttaatctatttttcattactcttatgaaaatatgacaatgcttgattttgtgttgttatttggttgcctaagcatctttttatttcaaaaatgtagagaacaacgtaaacgaaacatgataaccacgtgaaaaacaacatagtaatatattaaaattttaacacactcattgttctcattatactactctaaaattcaatttagtaatattctttcaagatttttcataaaattatcgaaaaacactcaaaatgtatgtgaatcaacaaaacaacaacaattgatgaataaaataattaaagcaaaggaaagatcaaatttgttcccaaaatatttgggcaagtcagtgttcatggcaatctctcatttgcccatcttctcttgtcggtgtgtaaacaactcataacaaactttaaaacaacataaaaataacttagttcaacatagtactttcaagttgaacatgaaatgttacaaaaataacacaaacaaagcttcacaataatatgaaaataacttatttactcctttaaaatattttgtaatttttttttcaactttttagtttttcattttcttttt

SEQ ID NO: 131793 - DNA, 1792 bp, Cannabis sativa
  modified_base (1726)..(1727): a, c, t, g, unknown or other
gagcacccgtgagccaagcccagcaagacattataaaatatcgataatcataattaccttattatataaacatttatgcgattcacaattctctatatgacacagacctgcatgttacactcacatgcgtatttatgtttatgtgagatagacctacgtgttgccctcacacgcctatttatgtctatatgatatagacctacgtgttgcgctcacacgtctatatacaataaggccttagaacgattcatatcagttctagttatcgagtccaacccggttatgccttgcacgcataaccctaattctcaatatactcatataattatcatggcaaagcatatacacatcacataatactaaggtaataaccctaggctgctaaaccgcttatgttagggtaataaccctaatccggtttctaattacacacatataatatttcagcataagtgccaccgcgcatacctctacgtgcaactactgtcttacctgatgtatcgcaagtgaagagattccaaatccaccgggtgctcctgacaaagtgcccgtaatcctagtcacaaatttcgggatttacaagcatagggttaatccctaaatccactttcacatatcataaacatggcattcaaaatacagataattaaacaaagctcgaagaggagctttccaacgatataaagaacgccccaaatggattcccgagtcaaatttatggccgaaacaaaatcaggaaacacagactttctcactgccaaacccagtcgcgacgaccaaaaatcctgtcgcggcgactgggttcagaacaccctaaaacctcattttaagtcctaaaaatgctaacttttctagaaattcgaacctcaatcaaaccataccaaaaattcaaccaaaaccattcataaactcagatttttaaatcaaaataaaccaagctaactttgataccaaagatacacaaaaaggaaatatcaagcaatctgaccataatcaccaagttgagcatcaattatcaaagcatttaaatcaatataatttgcccagaaatttctgaacataacccctaaaattaaagcatcaaatcacaccttaaccaatcaaaataatcaatatcatcagaaaagttcctagcatgaacatacaaacattaatctaatcaaaaacaccaaaaattgagaatttctcaaccacatgcatttcatcaagtatgaacatacaacacaactccaagaacattaaaatatcattaattgacaatccgaacaaaggaggattaagagcttaccgcaaactcacatgtcccaagccacaaattacaccaattcaagcttgattccaagattgttgaaaatgacaagcaaatagaaagggagagtagggggggtcggccagggctggaagcaaccagaaaatgggttctaatctcccaaaaaattagtttttgttcaaaaaaagaataattggtcacatgaccaaaataccccccaagaccaatatatcacaaatatgaaaacaaggacaacatagtcatttaaaatcacacatataaaactcaatatttttaggttttcatacttattaaataatgcaaaattttaaatcccaaaaatgtactttgggtccccaacccggttctgcctaaaatacccaattgtgactataccgcgccaacttgtaagaaaacacctacaaaggacaaaacaagtatactatataataatanngtcccataagcacgtaaatatattaatttcaggattttacccttctcgggtcaaaattaccaaaa

SEQ ID NO: 131794 - DNA, 725 bp, Cannabis sativa
ataataataataataataatcccctattattttggggccctgtgcaactgcccaggttgcacaggttattagccgcccatggaagtgagacgaggtagtcgccctctgaaaaaaataggataaaaatatatatatgcaatttaattaattacaacatatatttgtaataaaagattacatttatagacataatattaacttaggtgtaatatttaagctgaattatatataggatttaggttagtagttcaaatctcaccaaaagtttttttttttccatcaagggtattttttttttctcttcaaagtttacttttaaaaaaaaaaaaacacacaaattacgtccctcactttaatttctaggtccgccactaatcaggtcagatctaatttgattatgatcctaattagttaattatctgactcgaactaatcggatcaaatccaaatcttttcatccgtttttatttatatataaatgtaaattaatgtgttaacgcagatttttgttaactaaattaaaatctatttcgtgatggatttgcacagaaataacaatagtaaaaagaaaagaaataatagtaggagaaatttcacctcctattttttgtattgttgtaaataattttttatttataataacaattgaatattctaataaaaaagtttttttttcacattttttgtaatacattaatttttgttgtacactaatgaaaaaaaaa

SEQ ID NO: 131795 - DNA, 749 bp, Cannabis sativa
gaggtttgtagccaaggctgtggcccaaagccaggaccgagttcgaagttggagtctgggtctaggttctaagtttgggtgcaaggtctaagttcggggcaggggccgagatcgagttcggggatggagttcgagtctaaggtctaggttcaaggtcgagttcgtcgagtccgagttcgagtttgggtttcaagtccgtatccgaatttggagctgaggtttgggtctacagtccgagtttgagtccaaggctggggccgatttcgggatctgggtttgattggagtctaaaatattgattaagaaaaaatattatttttttacttatataactgaagaaagctcatttaaatatataatataatgtacattataaaactacacttcttctacaaattgatgtgaactattgttttaaaatcctattgaagtgagtagcaataattacaatcaaattttcaagcatgaggaacgatttttttaaaattttaattttgtttactttcactaaagtaaatgactaattagatttattttataaaatattttgacaggaacttcacaactatactagtgaatgtcttaacatcatctccaatgagagatatgaaaattatgatatatttgaatcaatttttaatattatactttaattgtataattataaaatttaatacaaaatttaatatttaattagtaattttataaaaaaatatattaaaaaaatagttgttgcccctgattttgcc

SEQ ID NO: 131796 - DNA, 715 bp, Cannabis sativa
taaaaaagagggtaaaaataaaagaggactgggcccttatttgaaagatatgttatatatttaaaaaaaaatatattaaacaaggattatttaaaaaaaaaaatgcaaaaataacaaaaaaaaaattacaaaaattagatctgcatacgggttagattttcaggttttcggatggtcgagtttgggtttttgaatttcaggtagtttaaatgtgtaaccgaacccgattttcgggtggtcgggtctggcaggttttagaacgggtatggcaagtttgttgtggtcaaaatttcaaatatttttacgatttttaagtttttttttacataaaataagttcttatgatgttttttttatgttgtactctttttattttgttgttgattttttgctatttgtatattatttttttttatgttgttttgatattatttttctataattaattgcatatgattttttttgttattttagtgttatttttatgaactctgtacaaatataaaaaattatatatttaaacgtaaatgtataaaaatttaccaaatatagtaatttacataaatttcccaattaaccgaggacatattttgataccatcttttgtgatgtgcgaagtaataataagtagggtcttttttatttttatacttctaaatattttttttttgtatttttacagaattctatataaaaatgggtaaataccattttg

SEQ ID NO: 131797 - DNA, 666 bp, Cannabis sativa
tagcctgtgtcatctaatagttggactgtgtattttcgttgggaaagaaataatccttctttggcgcgggcaatctcaaagccaagaaaatactttaattgtccaagagctttaagcttgaattgactgtggagggagtcttgtaattgatgaagaagagaggaattgaggccggtgatgatgatgtcgtcaacgtaaactagaagagcaataaaggtatcaccagctcctttggtgaataaggtatagtcggcttgagattgagtgaagccttcgagtatgagagcattcgaaagctttttgtaccattgtcttgaggactgcttgaggccgtatatggatttgtgaagtttgcaaacgagatctgtttctgcagacaaagaagtgggaagagtaagtcctttaggaagagtcatgtatacttcctcatggagatctccattgaggaaggcgttatttatatcgagctgaaacatgtgccaatttttgatggcagaaatagcaagcaacattttaaaggtaaccattttggctacaggagaaaatgtgtcaaaaaagttgaggccttcttgctgtgtgtatacctgtgctacaagccgtgccttgaaacgttcgacagaaccagcctatggcacgtttgttgggagggagcttgacataagacca

SEQ ID NO: 131798 - DNA, 1135 bp, Cannabis sativa
catcttccatatcggcatcttgaacttggggaagggcaaggaatttatatacgccgagaattggtgatccccttgacctgtctagctcaaggtctgaaagttttggacgagcaaggcccttaatcatgtcccttatttggtccaactatgcttgcatagaaggatccgttactgcaaggacttggctgattggccctccttggatgggctgcaagctcgaatgtgtcagagtttggtcggccatactctgggagagtatatggtggaggtaagccaactttgtgttatgttgctagcctttaccggccattcccaggtagggagattggtcctagccagccaagcctatgctgggcaattgtccatggttggccagccctgtacttggtagggcctggctgtccgtgatcccctagttggctgatgtagtcggtatattgacaggaggtagatcgcaccagttgatgtagacggtattagtaatacatctcagattattttttgggtgtttccactagtttttggccctagttggttgaagattggcctttgtgttgcttgtttccaaatgcctcgggaagggagttcactcccctggccggttagagatgcactagcagatgactggtcgactaaaggttggtggcttctttcacttgattttgacatattattgatgaaaatgcattactggcaaagaatcttacttgcctcctctttagtccacctctgccactccacaatggcaatggtctccaatgatggggagcactaccatccccttataacagtggtcacctaaggcgattcctaggtagaaaaaaaaaattctcacttgttttttactccttggtgtcgagggaacccattcaaacaattttccttccatggtttgcgaggagtgaccactgccatctccttgtggcagtggtcaccaaaattggagagcactgtcattttcttgtggcagtggtcacttattcctctttttcttgtggttttagtgctattttgactttatgcataaactcaagtcattttcatgcccaaacaagtcaagtccttattggtttccttggcggattgagatttctacaataaaaacactcgtgcgggcccatgaaccctagtttgg

SEQ ID NO: 131799 - DNA, 651 bp, Cannabis sativa
agactgagttgatcaaagtgactcttccagtaaaggatatgttccttgaactccaaactctaatgcgagcgaccattttttccaatatactcgagcaatcaactgctgacagtctcttcgcacaaatagggatacccaatatttaaaaggcattcgacttcctataaaacccgaagcgtctagtatacccacattaaatttacagtaaatatcatgcatttattgttttcctataaaacaaataatttaaaataaaaatattttttcaaaatggcataaaataatatcttaagtttaatttttttaaataatatcttaatgataatttgacctggatatgttataattacaatgattataatttttgtatttgctcatgctaaaaatttgcttttagatttgttatattaaaaagaaaaattactaaaattgagcttaattagagtattattatgaaatattatttatggatgtccaaatcaccatattaattatcaccattaatgtttgattgtattttcctttatgacatataaatttagtttcctattcctttagtccatatttttgtataaatagtggttcaccccatttgaataaacaacttagaaattctcattcagtttctctttctctcttcatcttcttctt

SEQ ID NO: 131800 - DNA, 609 bp, Cannabis sativa
catttttaacttatattttttgttattattatttatgtaccaaattctatatttttattttgcttataacttaattgtgctataaattataataaatgcagatttctctgaggtaagaactcatgccaacaactacactctattgtttactactgcattttgcatgttaatcacaatttataatatcttatgtttttatagtttttttttcactatgtacaataaattacaattttaagggaactttttcttttttatcaaatgctaatactaataataataatattaaagatggctttttggagaaaaaatttagtatttttttctatatatgaaaacatatttttatataatatcaagctgaacaataatatataccataatagagtatcttaatttatgattgcatactaggagtcaacatcatatttttattgttatactaaatatgtatatacctttcagtatataaataatttatatagtgcaatcaaaattattattacttaactacttcttggtatatatttcccaaagttttatatactttttgtatctaatatataaatttaattgtataactacttgttggtatataattattatatt

SEQ ID NO: 131801 - DNA, 1122 bp, Cannabis sativa
aagtaacacagaatgaatcagttgagcttttcctacaaacgacagatgtctactcgaccaagtgtggagtctttgttttatctttttgattataatcccagtcctctgctttctattttgttggcctaagaggaacacccaagtactttagggaaaaagtgccttcaacgatagttgtaaatctctaagaataatttggatatcaccattattcatgcctccaaagtagacttgagatttttttgcggtaatgtgcaagtcagacaccttactacactcatcaagcacctgtttaagaaccagaatagagggagttgaacccttactaaacagaatcaagtcatcagcaaaacacatgtttataatttttcagccccttacacataggatgaaacttgtaggatgagttagtagcagccatttgaagacttctcgtaagatactccattatgagaacaaatagtaaaggagagattgggtccccttgccttaaccctttctctcctttaaatttgccttgaacttgaccattcataataatggaataagatgtagctctcaaacacatcataacccattgtatgaatttctgagggaaattaaaggtagccagcaagtcctccaagaattctcaattgacagtatcataagccttgcttatgtatattgttatacccaaaatttaactgccacctcaatgaaggacatgtgtcaggaggaagggaatgtgaatcaatgtgattgcttttatggaataactcattaattacataagagtcagagtatatttgtaacgcgttgactgtgaggtcttaggcgaggaatcaatgtacaaactggcacttagtatattagcgagaaaccatatatcgctaaatgtgaatagtgaggtaccagagaaagcgatacatatcaactgtgaaagtccttagcatgcaatgagcaaactaagtgtaaaagtcagatcggctcaaaaaacaagtaagcgagctgaccatctcgctacgggaagacttcttatagctttattcagctaacgggagcgagacttacaaccctggcgagtcagaagaattctttataaataactgcgatcgacacaagatatacatcgtcgacctc

SEQ ID NO: 131802 - DNA, 661 bp, Cannabis sativa
attttcttcttgttctaattccttagtatgttattgctaatagtctcggtctccaccatgatgatgaccagtttttattaagtacagtatactgcgtgtgaagaatgtcctaacttaatttggttatacttataggagccaaattcccaatatatgtcctaactaattatattataacaactcatttaatttgctatataaccacttaaaagactttacaatcctactgtactgtttatatctatgtataaaacaaaatcataacccggtgatgtaacactctcagggagcttacaaataatttcatttctcaaccttttttaattttttttttttctatttctcattttactatctaatccaaaacaaaatataaatatatctattcaaatactacattaaattctaataatatatctactcaaattctatattaaaatctaataataataataatatattatagaacaagttttattataaaaggtgaaagataaatcaagttaatcattccaagttctttgtgcaagcaaaataaaagcagacagtccaagatgggaattttgggttttctttataggtaaatggcggcaaaacccccaatactttcgttttagtttcattaaacccccacaacccaaatttctgcgggtaaaccccc

SEQ ID NO: 131803 - DNA, 534 bp, Cannabis sativa
ttctttttttttttttaatttttgtaaggatctaaaaagagaagttttttttttcactgaaatctaagagaagttgtgtagtcactaaatgagttaagacaattttctcctttatttgactactaattgccatttcatttccagacacctccaataaagtagatgcactcataatgcttggaagaactataagccaagccaattatagcagcaaaattgctaggtgaagtagagcataaaatcaagaatgatgggaagaagacaaaattttgtgtgtggagaaagtgtagaaagatgtagttttattttatgaaagaaattcttctttctttctgtaattgatatgatggctttaattttttctatctaattgattctaaaaaaaaatcagtaattattgtcattaatttaaaggtaaatactattttcgatcttgtatttttcaaaagttataaattagaatttattttgttaaataacaaaatggattatgtattttttaaaattgtacaaataggacttgttgggttttat

SEQ ID NO: 131804 - DNA, 902 bp, Cannabis sativa
  modified_base (834)..(840): a, c, t, g, unknown or other
gccgcatcttggcttgtaaggtcacggtcgtagccttgttcgctgaaaaaaaaaatggaaattaactggaaacaaagaatcagctgagtgttgaaattttaaaactcgtttgtaaggccgcgaccttggtgttttttttgtaaactcgaattttcactataaaaagggggttgatggcaatctttgtataccattcgaaaactgaggtgaattttgagtgtagaagaatagcaaggagcataaggcaccaatgaaggactccaacattgctccatctcatcaactctatcttttatgtctttagataatttcttttgttttagaatgtcttctaatagctgaattaattctcttaaggattgttatgtgaaccacttgattttattttatagattaatgtgatgattcaatttcttcttctctttattcaattccatacaatatgttctaattgtacaattattgactgatcattcttaattgtaatctatgaatttaaattaaattctgaaaaatatattccattttgagagagtgaaaaaacactatctcgttgaaaagttaagtgagatttaaatatactatgatatgaaaatcaatttaggatgagtgtatctagagtatttgtatgatttttactagttgatctgcttaatgctatttttgtgattaaacttaccatagaaatatagaaagttttcagatagattggatttataagtcttaaccagattataaatttcttaactaaacttatcaattgaatagaaagaagagaaattaggtacttacattatgaagtaataaaataaatggtaaatactattttggacnnnnnnntttgcaaaagttatcaattggactatctattttattaaatgacaaaatagatcttatatttt

SEQ ID NO: 131805 - DNA, 2780 bp, Cannabis sativa
ttgtttccctcaggtgttatgaggacaatgcttgcatcgaataatttgtcagtgtagcttccatcaacatgtaatttccatgttgattctctaggtttttactgctgctcttgctctcgcttcttctttggctcatgtttttttcttcttgagaatcttgagagagatttttcaagagaggtatgcttgtacattcagccacaaaatctgcaagagtttggccttttatggccattctcagttgagatatgtcataacaaattagccgaattaatggcccacttgagtagtcagccagatgctttgagttttcgcaaaacctaccacaatggttggtcagtgtacacctttattgattgagcttggatgtatggcttcagctttttggatgctaggagtaagttataagtcagcttgtccatgagtgggtatcgacttttgacgtcgttcagtctcttgctgatgtagtatactaggtgttgtataccgtcttcttctcttattaatactggactcacagcatgttctgtgacagcaaggtacacgtccaactcttcattttccaaaggttttgataggaccaaaggttgagcaagttttttgtagctcttagaatgttatatcacactcctctgtccacttaaattttttgttttctctgagaatgttaaagaagggtatgcaattatccatggaattggacattaatctgctaagtggagcaatatattctgtcaagttttttacttccttgattgttgtgagcgacttcatatccaaaagggcttggatcttgtctggatttgcttctattcccctggcattgactatgaagctaaggaatttgcttgagcctactccaaaagaacatttgagggggttgagcttcatgttgcacttacagaggatcttgaagcattcatgtagatccttcacatgtcccctacctttttggactcgaccaacatgttgtccacatacacctccatattacggctaatgaggtctttgaaaattttttataagcctttgataggtggcccccgtatttttcatcccgaagggcaagactttgaagcagcataggcctaggtgtgtcatgaagcttgtgtgctctttttctggtgggtgcatcttgatttggttgtaacctgagtaaacatccatgaagcttaggatctcatggccaattgtgcatccaccagttgttcgatccttggaagtagaaaatagtcctttggacatgctattttcaagttggtgaagtctatgcaagccctccacttttcgtttggtttaggcaccagcacggggttggatacccaaagttgatagaatgctttggtattaaagtcatgggccaactgccttttcgacttcatctctgagcgcttaggcacgttctttgtctagcaacctcctttcttgttgtacatgtaggaagtttgaatcaatgttgagagcatgggtcatcacaaaaggatctattgtgaccatgtctccatgtgaccatgcgaagaggtccaagtttgtccttagaaattttatcagtattgaatttatttttggtgctagacccttccaaatctttagtcttcaagttgaaaaggtgggatccacctccacttcttctagttcttttataggcccaaagttgtctacaggatccccaaagcaaggatttatgtctacctccccgctttgggctggacttcattgccctctgttgggctctttattagagtttttgatgagcatcttctctttcttggctttaaataaggccaagttgtaatagtgacaggaagactgttggtctccccttaaacatcctatcccatgccttgttaagaactttaggcaaatgtggtagatgaatgttaccgcctttaggtcgtacaaggttggataacctatcatggcgttgatggctgagggcacgtcaattactgcgaactgtgccattagcattctgattattaaattctctccaactgtcatgggcaatcagatgcaccccatgggtgtaatgccttggccaaagaagtcgtacattacttgtacgcagggtgccaaattagttagttagaaccctatcttttcatatattgatctgaaaagaaagttggaggaggctccattttccaccattcaccgtgcaactgtctattcccgatttgtgcagtaatgaccaaggggtcattgtgcgggaaattgacttgggtagcatctccctttgtgaaagagatagtggaatctccaagcattggttgcttggagcccctttctttgacagccaggatatcgcttttaggttcatgacgaagtgtctaagcatagtgctcctcaaccttactggtctcgcccagaatatggggtccgcaataatgacccctaagtgaccgccactggaggtgacatagagtcttcgttctggatagcttatgcctaagattggttgttttgcatataatgacacatgtgaggattattcttccttatgaggaattcaatctctctcttcaagttccgacactcgttggtgtcatggccgaagtcattgtgaaattaaaagaacttcgatatgttcctcttgctcatctcccttttcataggagatggcttcttgtatgggatagtgccctaagtggccatgtagatggtctcatatttttctgttaggagtgtgaagcaagtgtacttctcctccttgtctttctggtttcatggcgtgggagaagtgttgtacttccccttttgccactatttcttccaaagtt

SEQ ID NO: 131806 - DNA, 679 bp, Cannabis sativa
  modified_base (607)..(609): a, c, t, g, unknown or other
ttcttacagcaagtagtagaagaggacatgtggtcttttgctaaatttttattttggtttcagctacaataataaatataagctttgattaagataattttatttttaattatgaaattttaattaaattaagattatgtaaattattttaattttaaaaatatttttttaaaaaatcgaaaggggaaaactaaagtaaattcttccgaaagcacttcaaataaaaaaaaaataaataaataaaaaccttattttttactttttattcaaacattgttagaaaaactttttaattttaataattaaaaaaaaaattatagaaaagatcatggtatgttaaattgtttaagttatttgcaatataaatacaaaatatttttcacatttcacagagaaatggtcaatagtggctcgctagattagcgagatgaaatatgagttaagtaataaaaaagatacacaagttttataatagttcactcctcctgtcacgacagtaatacgactacttcgagtttttattagtcaccagaattacaagaaaattggctaaggcaagagtttagatttttagagatagaaagtaatgggaaatttgattttctannnttacatatacttaatattttttctctaaacacataacatttaatatttgtgggatatgacacattttaga

SEQ ID NO: 131807 - DNA, 919 bp, Cannabis sativa
catgtcccatgttgtcgacacgcaagatgtctgtcaatgcggttcaaggtgaatgcagacatcccaaccataggcccattagctgttttacgaatatagaacgcacgtaaagcctgcaagcttgtgcaagaatatgaacaggcaactcgcactcgataagtcacataccttgctgcacttaatataagaatggattaaattgttcttcacactactagaaaaacacactttagaggcattttttaaggcttttcagcgtcgattttggagaaattcgctaccgacgttgataagagcgacgttgtagggttgaaaacaaccaacgctatagggtaccctatggcgtcggttattagctaggaactgatgccataggggtacatatgatgtcggttcctagcaagtaactgacgccatatatacccctaggaatcgacgccaaaagccataaggattttttttcagtttattgaatttaatttaatttatttaaattatatattattttatttaatttaaatttaaataagatatttattttttgttaactattatttaaattaattttaagattggccaaaatacctaattttattttatagaagtaataaaatattacacaaatattgtaaaattagtccaagtattaaaaagttaataaatctaactacaagttgacctaaaaaaataagctagggaagaaaaattattaggcctttcagcatcaatcgtccaagccatcgtgaatcaccgccatgaaccgttctatccattgtcactatattggtaacaattcagtttttagattgtattgctgcttatttccaaactattaaaaaaagtaaaaatttatattgttttatatatatatatattatttattattataataaatactataatcaataattaaaactta

SEQ ID NO: 131808 - DNA, 760 bp, Cannabis sativa
ccatacccataccgagatcggaacccaggacctagacctggacccggatctaaacccgaacctagacccaaactcaggacctgaaccctgacccaaacccagaccaaaacctcgtctgggacctagaccttgactgggaccaaaatcgttaccccaacccagacccaaatagggacctggactaagactgggacccgaatccaaactcaaaacattaacctgtactgggacctagactcggacccaaactcgggatccaaacccgaacctaaacttggacttaaactgggccctaggatccagacctcgatgggggacctgggccaaaaactaaaacctaaacccagacctagaccaaggatgcagacctagatgggggacttggagcaaaaactaggccccagattcgcgaccgagacccaaaactagactctagactcgagatacgggacccgaccctggacctataacccaggacctaactaccgggacaaaaccccaaacccggacccaaacctaaacttaggacccgacccaagacccgggaccagaactggaacaagactgagatccgaatctggacctaaggctttgacctgacccgtagtcagtgtttgaatccaggacaatgacccggatccgtacacagacctagaaccggacccagaactggatccagacccataattagaatcggacaaggtctgggactagaacccagacttgggacagtaaagggacccaaacctaaacccaaact

SEQ ID NO: 131809 - DNA, 564 bp, Cannabis sativa
aggcagccctgctagcgaaaaggactactgcaaaggttgtcacactcgcaacggagttggagcaagtctgggcgacaaaccgcaaccaaccagcagctggaggaggagagtgcccgctagtcccgcctgatctgaaatatgaaggtcgttcacgacctttataataaggggactgtggagcggatgtctggtgcaggcccatcctctccaccaagcagcgtccaaccctgatccttcggccgactcgattcaaaatttgtttgttcaatttatttggtgaaatatcgcattcaaattaataactaataacttcatggtctctcatcaaattaaatgaaaagatatatatagacagggcaggtcgtccaattaaatgaataattataatttggtccaaagccaaattaatattcatggtacagcacaacactctatctaattacagttaccacttcattttactaaaatcctatatatattaggttgatattacgtgcaatgcatgtataattagttttctttttaattaagtttaattagatgatgttaagtacaatacatgta

SEQ ID NO: 131810 - DNA, 1449 bp, Cannabis sativa
  modified_base (1101)..(1105): a, c, t, g, unknown or other
tagttagggtgttacattaactcttgcctatcgggacattatatgtcactgagttgaaaaccttggaaattacttaggatacgattgttttgtattttcacatgtcattcctacttgctaagtgttttataatttccaaatgtgtgtatgattttgtattgaaccttatttgatttctatttgttcatatttttagtttccaatatgactatgaataacctgattgtatcaatgttgattgacaacaagctcactaaagataactttgtcaaatggaaagagaacattaagattgctctcatacgtgaaaactcactgtttgtgttaactaaaaaagctcctgagcaaccaggtgagaatgcaaccaaggcagttaacaaaaagtttgggtgttggtagaatgttgacaattaagcttgatactttatgctatctagcatggttgataccttgaagacaaggtttgccaacactctcacggttgtagaaatcaggaatcagttaactgaactgtttgggatggaatcagatcaagctcattttgaagcaaccaagaacttcatcaatgtatggatgaaacctcatcagaatgtgcaggatcaccgactcctgatggttagttacttctaagaagctgagaatcatggggctatcattgattaagaatgtgaagtgagtttgatcatgaatagttgaactctagcttttctaccctgtaattaaaattaggtattcaacaatttaacttttgactttcatgagttgatcaacaacctttagatgtttgaaaatttgattggaggatgcgagaaagagagaaacaaagctcaaaggtggcgtttgttggaggtaatgaaatggagtgcaatggaaaggaaacaattttcattccattcctttatttggttacattttaaagtattggaatgacattccaatggaatgctctttcaaccattttggtggaataactgttctattttaaaaaggaaggaaagaccattccaatgtaacaagagaaaaaatttaataattttttatgtattttaaattttattccattcaattcctattcttatttccattctcattcctattccnnnnntttcattcctcccaaccaaaccccacctaagttctagtaaggctacgactggtacggcaaaacctgagtcaaacattgcctcttattcgaaacctgcaatgaagaagaaatggaagaatagcaagaaacatcttaaagttgttaacacaattaataagggtaagaagaatactaatccaaatgcaaagaagaaaatgaaatgcttttattacaatgaaaagggccactgctaaccccagtgtcctagggttttgacaaagaaacaaggcatttcgaaaaatattataaattcatgtattttagagcattattatccccttgggttattaattctagatctacta

SEQ ID NO: 131811 - DNA, 500 bp, Cannabis sativa
tttttatattatttgttaaaaaaattgtgtaaaatttgatttgaacaaatagctatacgactagagatgcacagaggatagaaaattagtagggagtgctttcttatttatttttattcccgttaaaaattttaattcttatctgaacttatattttattggtgatggagcagggaatctccaaactcaggcatgagtatagacaaattagacttatagctagagtctagctagttcagctcaaaaaatgtttttcctttaaaaatatatatattttgtactaattttaaaagggaaatttataaaaatactgaaatttaggttaatttttacaaaaatattattacacggaaatctttacaaaaatactgtatttttgtaaaacaccagtaaaacacaaagcagaacagctcaaaacaacagtagaacaccagtttaacaccagtagaataccagttatgacttaacacagtatactacagtatgaaacttataaaaaa

SEQ ID NO: 131812 - DNA, 991 bp, Cannabis sativa
tatctcagtctcactctttgttcgctagaagatttgggtacacatacatatataaaaaaaggtataagcattgatattagttactatagtgattaaatagtattttctaaatgtgtcattttgtgtttggctaacgatactctctaacagttattacattaaattatatgtaatttgatacttagttgaactaataataatattaacacgtagaagtatattagggtaccaatggtgccttttagtattcctctaaagctattaataataaaagaacatttctatatagagcacaagtagttaccatcatcttttataagtgttgtcttacgattaattagtgatattttttaaaaataatttttttaaattatataaaatttaatacttaattacaccaaaaacaatatcaccgaaaaaatgttttagtcactcataataaatctacccaacaagttagcttaatagtgttatgtataatgagataactaaagtatgttgtgttttctttgtgttgttcttgctaattcacataataaattattttggagatttacattaataactatcgaaggtattatatgtaagattttaaaagttatttataatgtttttttttctacatgactaatgtgagacagctattgatatgcatacaaaactttctttccaaaaaattaattatataaaaaaatataataagtaacaattttttattagttggtgatgtaagttcgtgcgtgttatgctagtctagcccatatttattcgtgttttttaaaaaataagtcgtatcattaattagtattgtaagttcgtgcgtgttgtgctggtctagcccatatttatttgtgtttttcaaaaaacaagtcgtatcgtatcgtgccacaaaaaaatatgagtcgtgtcgtaccaatatttttaaaaggtagacccagcacggcctgtaggcctgatattttcgtgccgtgttttgcttgtgttgaaccat

SEQ ID NO: 131813 - DNA, 604 bp, Cannabis sativa
aaggaagtatttttcaatttatcccaaagtcaattgggtttggtccttgggccgaaaattagagtgttttgagaaaacaattacaacttttatctagataaaattttgaatatggtatttctaagtaaagaaacttgggcgtatttctaaaaactaatattataaatagtagtaaaattttaaaatataatagttttgaaaactaaattaatttatttttttcttaaaaaaattagatcaatcaaggttgggtctgccttcacatttaaaattaaaactagtaaactaccaagaaagttacccatgctcgaacccccaacacactaccagttactagttactagttactagttaccagttactagttaccacaaggccacttgttcagtggtaattttcttgaactttagttagacaataaacaagtctctcattatgggttgaatcttaaaaatcaaatacacactgcactacaagaaaaataggcttttataatgtccacttcttgttcttttcctatagaagtgaaacaatcccataaatttcaaaacataaataaaaacaaggggtaagttgaaaaatacctcttttattaatcaattaa

SEQ ID NO: 131814 - DNA, 555 bp, Cannabis sativa
gtggttaattatacatgttatttataattttttttaacattataaaataaatgttattaaaaaaattattggttgttaaacaataatataataataatttttgtgaaagaggtacctgctgttgaaaaagaaataacaatattaattttcatatgaccaaaaatgtacataatctcttttaaatatttatataattttgtaagggaggccccaattccgttgtcctccacctttaaaaaattaaatttgtattatattatatatattttttttgaaacaaattgtattatatattaatcgacatgtctaattaagtttaacaaatatctctttgtgatattgaccttactcttgtgagttattacttgtaaagagccttgaattttcataacatgtgtttatctgattatatattcacatgattatatattcacatcgtctacttttataatcacatatgcttattcacagggtcggtcctgggcataggcgggctaggcctgtgcctagggccacttagtccagggacccaaaaaaaaaaatttgcccttttaa

SEQ ID NO: 131815 - DNA, 1073 bp, Cannabis sativa
aaacaatcttcaagacaatggtatcgcaaactttcggatgccctaatccaagaaggcttcgttcaatctcaagctgactatacattgttcaccaaaggatttgacaacaatttcattgctctattagtatatgttgacgacattatcatcatggggccaaatctatccttgctgcatcaacttcaatccactttgcgtagcaagttctctttcaaaattcttggtactctcaaatattttcttggttttgaaattgctcgtgctacagaaggattggtcctctctcaaagaaaatatactatgcaactccttaaagaaactgggtattctggcagcaagccaacaaagactcccatggacccacgactaaagttagatgatcaaccactgatccatcatcataccgacaaattgttggtaaattactctacttaacactgtctcggcctgatataacttatgccgtcaacctactaagccaattcatgtctttgcctcgtacacctcacttacaagccgcacatcatctgcttcgatacctcaaaggaagccctaggcaaggtctattatactcaacctcatcctctctgcaacttcgaggtttttccgatttagactgggcttcctgtccaactacacggcgttctacaactggtttctgtatcttccttgaggactgtttaatttcttggagaaccaagaaacaactcaccacatcccgaagctccgctgaagcagaatatcgtgcattggctgccactgggagcgagattacttggctgcaatatttacttcaagactttcatatacctcaaaggcaacctgccttcatcttttgtgacaatcactgagtgatacacatcgccaacaacccaacttttcacgaaagaacaaaacacattgagctcgactgccatttcatccgtgacaagatcaacctctccaaaattcgactaagtcctatcaacaccaccttacaagtagctgacgttttcacaaagcctcttgcttcaaccaccttacattctcacattcgcaaaatgtctgtccacgatgtgtacagtccatcttga

SEQ ID NO: 131816 - DNA, 815 bp, Cannabis sativa
cttgttaccattcagatcgtattgttagtgagcatactgctcctcttgaactcaagtctattgttgatgttgaatgtttatgaatgaataaatcatcttttgctcaaaaagaaaaaaattaaattagtaacaacttatactaaatactatgttagtgttgtgactaaaagtcacaatttaatcacaaaaatattatgctctgataaaaaaattgtcactaaaattaaccgttttaattttttgtagtgcatgtaaaagcacaacacaaaactttataattatttaaattcaatgtatgcgaaatttaaatataatcaaatatactttatcaaaaaaaaaatataatcaaatacacgttcgatttgaactgtaaatataataaaatttttattgaattatcaaatgatacaacagcaaaaatattaaacaaaaaaacaaaatattaaccaaaaatatatgggacgaatgtgtaaattaaattattgactcaaacacaaaagatgatgagcaacacaaatctcatatctactgctaatatacgtatacatatacattattcaaaaaccactcaattaatcataatcatcaaaccattaatcctacaacatggtatgtatgatcactcataataataattcaccacaaaatataacaaacgaacttgtaaaaacaacaacaatatttaagtatctcaaaataaaattgcaattgcaccaaaaacattaataacaccaattgttgccaccatgccattacgaaaagcactagaggcatgcattgaagaaactgggttatcatccaatgttgaagtagac

SEQ ID NO: 131817 - DNA, 1295 bp, Cannabis sativa
atctcaatagttcatggagaatttttaacggtcaaaaaaattcaagaagcatgatttggtatatgtcaaagttcggaagaaaaaattgctaattagccttaagaattttactctctaattatgatttatgtattgtcgtacctgaattttttaataagagttcttgaactattcacaatattatgatgagatggtcattttattaagtttatcatgtaacaaacaaaatactaatatagctatttaaaaagaactgttaaaagatattattagtatctaatactctcatcggtgtcataccgttatatttttgaagcagtatcttactgctattagtgtaattaaatattgaatctcatataacttaaaaagatagcttttaagaaaaggaaatttgcggcaaaaatctctaaaaatgtcgctttgatacaaattagtctcaacctctaaaaataatggtagtagtccccaagctcgaattttttgtaagtccgtcaatactcaatttaacagctttattaagtgctgacaaaaataccacgtgtcaaaagtttattggtccacatcataattttaattaaaaataaataaaaaaatgcaaatacaaagtatatacaaaattaattattttttttctttttcttttctttctttcttcttcttcattttcttgttgttcttgctacccagggactagtgaaccaccacccacatccgacgatccagaagatgaaccagtcacaccccaactctcacgacaaaaaactatgctccggacaccctcaccctaaacggaccactactccattatccccatgcttgagaacacgaaagcctcaaatatctctctcgttctccttctctatattgtgttgggaataggtttgttcttccatcggcgacgagatctgactagatctggccaaagctttggccgacgactgtgccaagggctggatgttcttcctctggtaacgagacttgaccgtaccgaggctgagatgttcttctctcctcgtgatctttggcccctgtatgtacccacgtcgtcaaagcctcactatcgatggctctggtctgggcatttcgaagccgagacaacctacagattttttattttggatcaatcaatgggagagcagaaataatgatgagcactgagattgcaaaaataaaaaataaaaagctggctagttctgcagatcggatgggcagtgagcttatgtggccatggtgtctattttccataagaagaagaagacgagagatataaataataaaaataaaataaataa

SEQ ID NO: 131818 - DNA, 1109 bp, Cannabis sativa
atttgttatcttttcgtgtattattaaaataacaattttttttttcaatagtattactttatttataatgtatacataaaaatattatattttagattatattattttaggtaaaaaaatttataaaatatttacaaaagttgaacaataccgcgcgaagcgcggcttagttctctagttaataaatagaagaattatgagtgatgaattaatttttccctacttagctaaatagaattcttaggcggtataaaacaaactaaaatgagatataccgattgtattctcgtcatctaatctaattatccaattagttataaatattataaaatattccactttattttttaactttattttttaactgcaaagaaaaaaaaaataaagttattttaaaaaaatttaatatattttttataatttacgatttaaaatctttatatttacaatttaatatattattttattatattaattatttgaaaatatttaatatactaaaccgtaaattttattttagagtctacaagatgaagaaggaaatcaacaaaacacattcattgtttccaatctttgaactgattcccctgatctggaatatatttcaccaatgaaaatcaaaagacaaaaactataaccagaggtaagcagaattgaaatgaagattgagctgagcaactgcacttttacatgtccccaaatgaatactgtgaaaaggagcaattaatgtaagtaaaatcagagaagtcttctcaagtgatgaaagaatttgcttgtactgatcatgctataatagtaatgaatttgaacagctgattatagtcacatcaaaaagtacctcatggaagttgcaaacaggaactttcttagtgactctcctgtctggaacattggctggctgaaatattttatcataatccaaataaatttaaggcatttatactaagaaaatgaattaagctaaccatttatcaaatataacaaaaaataattaattttattcttcaaaagtagcaaaaataaaatgatctaagcatttatagttaatgtttaacatatatcttttggctaagcaagcaaaacctacttgcttagtctctttgtaagta

SEQ ID NO: 131819 - DNA, 700 bp, Cannabis sativa
aaaaaaaaaaaaaatacgcccattcaactttaattttagctagatctaccactccttagatgagagtgctttaagatctacaggcgaactaattgtttttattttactttttaaaattaattaatatagtagatgaatctgtattattgataaaataatatcttataaaccatgtgaaaaattaaataataaatttaaagatttttttttaaagaaaatacaagtaataatcgattatattatctatatttttgtatgcattcaataaacggttttttttttacatgtggcacctaatgttacttctaaatttcaaaaataatgtatattttcattttaaatattattaacgtggaatgtttagctgacgtggcaccattttatttttttatttataattatttttgggtcatttacttatattacatgtatcttatacaataaaagtaaaaagacatatatattttcttattgattatttctttatttcatttctttttattattattttgtttttatcttttctctttcactatttaaatgtctctttttctatcttactctctattttcatttttctctttattctatgtgatattttaagatatgagagatatatatttgttttatttttatatttttaaaataaaaaaaaactattaagttacttattatactaattatatattgattagttact

SEQ ID NO: 131820 - DNA, 573 bp, Cannabis sativa
agagggagaaagagatgaattagggtttttaaattagggttttctatttaaatttttgatttaaaaattaaaaaaaaatgagaaaagaaaggaatgaaaaagaaaaagaaaagaaaagaaagaaaaaaaattgattcagattttttttaaaataaaaaaattgtttttttatttacattttttaattttaaattaattttttaaataagtttttacgtgaactaataaaattgtgccatgtgtgtatcgtattcacgtagatgtacatataaacaattcaacatgacaattaacacttaaaatggacgaaaactgtaaattgctaataattttaaatttgaattgtggaagttaaatgtaaataaaataaaaatattgagagttttagggcaatttactcttataaaattgaggctagtagctataagacgatgtatctgttagaggttttaggttgaagtttgcttaacaatgcagttactttttctacaattgtttttgggaaattttatttacatctcaaaaatttttaaaggcaccccattttaataattttaatttaatataaaattt

SEQ ID NO: 131821 - DNA, 1107 bp, Cannabis sativa
  modified_base (990)..(994): a, c, t, g, unknown or other
ataataataataaaaaaattaaatctaatacaattcaattatatttttttaaatatatgaaatttaatatagttttaagtttatgtataagaaaatatatgtagctaaatttattaaataataaaataagtaaataaatttagatattttaaattatataactaataaatttgttataaaatataattaattaattgacttaatgtctaatttaattttaaattaagatttatgtattaaaaaataattatctaattttattgatatttttaaattaaatttcattaaaacttttttttttcaatgattatttagattgaaacaatagataatttatatcgtatttattctaaatgaataaagtgtcctatgtaattatgagtacaattcagaatttataatagagtcaggaggaattaataaaatagggaatttactcggtaaattttagaactacttattaggagtttgattatatagcctcatggtccccacactacctgagataatgttatcttgtagactcaattaattggttttaattaatcaattaaaattctaagtaagactatgtcttaattatgagttccactaagtaaagataaatttgagaagaaaaagaaatttagggtttatttgttaattatgcgactttagaaaatcttattaataaatgagttaaatggtaattttatttgataatttttcattattattaaatagaaaaaattaatatttaaaggcttagaactaaaaaaatggtattattgagaaaaaataagtcaatccataaaatgccatttttgacacccattgggcctctatagggttcgactatggtcgtttctaaaaggcatatttttatatcttttttaatctatcttaaatgtttaaacttaacccttaagaaaatattataaatagaaaataaaactcttaacttaatatgcaataactatatgcaatacatgttggattttgtgccctaannnnnactcatttcaatataatcagagttctaattaatagagatcagaaatcgttctatgttgcatggttcacatgatttattttatgattatatttaatgtatgaattctattaagt

SEQ ID NO: 131822 - DNA, 1426 bp, Cannabis sativa
  modified_base (537)..(537): a, c, t, g, unknown or other
ggtattttttaatgatgtggcaaggtattattgtaattgagatttattaaggtatttttataaataatttatattttaagtatataattgaaaaaatccctttcttttaagggggtgctggtgcattatagaattttccttacttttatctttaaaatcatcttacttaacattccttacaattttgcttaaaaaaaagacgggtgattttacaatgtactcccttaaaagagatgtattaatacacattctacttgttttagcatccagaagagttatttaatctaatttttttcatattcatgtacgttatagttatttaagttatcctacaaaattttgagaaattccaaataatttataatagagaaaacaatattccaacagtctattttacatgcgtataaaataaaatagtcacgcatgcaacacactgtttgaacgtagttttttgcgtgttaaacttttctaaatttcttaaaattttgcaagatgtcttaaataactataatttatatgaccatgagaaaaaatttnactaaaaattatttcgaatactaaaactgatagagatgtatcggtgcattccttttaagggtgtgcattatagaattttcctaaaaaagactattcgttgaaatttaatataaaaaaatacacgtaatacaattgataaattttataatacaccttcttaaaaaggatgtacggaagcacccctatctacttttatattcaaaatattttttagttatttttttctcatggtcatgtatgtcatagttatttaagatattctacaaaattttaaaaaatttggtaaaatttaagacgccgaatataaggtttaaacagtgtgttgcacacgtgactattttattttatacgtgtatgaaatagattatttgaacactgctttctatattgtaaattatttcgaacttctcaaattttgtaggatatcttaaatgattataacgtacacgaatataaaaaaaatggactaaaaaattcttctaaatgctgaaacaggtagagggtgtatcaatgcatctcttttaagggggtaaattgtagaagcacctaatacaattttcttttgttaatttcacttttgaatatatattttgagaaaattctataatgcacccctttaaaaagagtgcactgatgtatccatatctgttttggtatcccaaataatattttagttatttttttctcatggtcatatacgttatagttttttaagacttcctgcaaaattttaagaaattcagaaaaatttaacatgtcaaaaatggggttcaaatattatattgcatgtgtgattattttatcttatacatgtgtaaaataatttgtttaaacactgctttctatactgtaaattattctgaatttcttaaaattttataaaatatct

SEQ ID NO: 131823 - DNA, 1396 bp, Cannabis sativa
  modified_base (1265)..(1270): a, c, t, g, unknown or other
tgaaattatatttactttaaaatatttctatttttttggttttttattttttttagtgaaactctatttagttataacctcccaattagaatataatttagatcaagtatattcttagatagaaattctaatgtatatatattaaataagagtgcagttaagaggactcgaaccacccaacccaccacaataaaaatgctaaacccaaggcaccaatacaaataatggtagcacactgcaaaatatattaataataagatatgtactataatacgtttgttttcaaaactaaatgtgtgctcaatagggaccgtgtaaaacaacagtcttcttgccatttataccaacgttgtgctgtacttctgcgtaaatttgttggctagtaatttatatatgttcatttacaaaaaattatatatggtcttgtttttgtctgctttacgtggatactggatagtatcatttattagtttgggcctttctgcgtaggggccgtcctattcttcggccggactattcagctaatgatgtttttagagaaatgtgaaagagaatgtaatagcaattttttcgaaacttacaaaaacactgacttttaactcaatttttatacaaataatgtcatagacagaaattacttttatactgtcttagttaaattttttttaaacactaaaaaaaaaataaggcatccatcttttacacccacggacagaaccaccataggaacaccaaaacaatcgaaaaataatcattaattccggtgagatttaaaaaaaagacaaagtgaaatcggcgttaaataaatgatcatgacaaaataactgtaaaacaacactaaaacaaatcaaacaaaataaaaaaaaaaacatgattaaaaaaattacaaaatgttctgcagcctcaatacccaatgcaatagcagttatatttgcaaacttaatctgaaaaaatcagaacaaaaaaattactaaacaacacaaaaataaatgtaaaacaataagcagatataaccacttaaaaaaacataaaaaaaccacacatctcaaaactttttttccaagtgagctcctcaaatgtattttgaggagaaccaaaataaaaaaaaataatcacaaaataaccatagagaaggaagaagaaatgtattttataacctccatcttccacacacacacacggataaaaccaccacaataccacgagaacacctagaaaacaatcattaattccagcaagatagagcaagaacagtgaaatcgacnnnnnnaaaaataaattatagaaaataaccataaaataacatgttgaccgaggttttcggcaactaataaaataataataatttagagagctgtaagaaattaagagagagatttttacgtggttggagcgt

SEQ ID NO: 131824 - DNA, 1054 bp, Cannabis sativa
  modified_base (1016)..(1027): a, c, t, g, unknown or other
aaaaaaaaaaaaaaaaaggagtgctactgacaaacttttattaaaatctcttagttaaaactctatgtctgaaaatacatgctgaaatattttttttaaattttttttatggcggtgttcgttatacttacaacatcattcctgtaaatttttgaaaattttcaaatagtcgacaataccgaaaatacgtttgaagttttttgaacgcgcgtagtaaattggaattagaacttctgtttttggtattgtaaactattcaaaaatttacaagaattattctgtaactacaacgaatattgctatgaaaaaaatattctagtatgtgattttaggcgtgaagactgattaagaggttgtaataggaagttgtaattaacaattctctaaatatgtaattttcactcttttcacatcaatgaatatttgaataaaagactttttcttctattttttttttttttataagaatcaatatttttatttttagttttttaattattaaggtataaaagtgcacatgggcactagatacactaagcacaaaagagatagaagcctcatttaattattaaggtatgaaaactaaaactaaaaatattgattcttataaaagaaaaaagaagaaaaagtttttcattctaatattcattgacgtgaaagagtgaaagttacatatttatagaagtgctaatgtcttctattattctctctttccccgtctttcgtttcttgttcctttccctctcaggttgacatttgtttagttcttttgctattgggtgtgctctgtgttatttgtggtgggtgtgctggtttgtttcgttattgacttttccttcgtgaggtttttcttgttgttgttttctcgagttcgtgtctcagtctttcggtctgtctggttaattagttattattccttttgtttgtggggttgggttgttgagtggtccgtgagtggagttggtgttggaatatcttttaccaagatctatatttactaacaagtatgtttttannnnnnnnnnnntgaatttctaaaacgatgaaaataaac

SEQ ID NO: 131825 - DNA, 857 bp, Cannabis sativa
gggcggttggccgagtatttcagcgacggtaggtggcagctgtagggttttttttttttttttttgcaaagtggttctcgactaatgggttgagaaagagagactagattatttttaggttttgaaaaaaaaatagtataggtattttgggtaaaataaagagttattagaatagtattgtataaaaaaattaataatgtattttttgtagaaggcatttttatcaagtataagaaatgaaacttcccttttaaaaatatatagggcatcgtgtcattgttacctatctttcaaaaacctagatggagaaaacatatatattatgagatatataagttaaaatacaataaataatatatcaatcaattatgatgatggtgattgagttggactactcaattgtatcaaaatctatgtcagggtaatttatgctaaagaaaatactttctttatttaaaataacaataataataattaaatatgataataaacatagactatcaatatatatgcatcatcaaaaattatatacattacttttgtatcattagacaaaataatgaaatgaaagagaaaaactcaccttgatagatgttcctatgcggttgctgcagagtgatataatgctgctatgcagaaaaagaaacgaaagaatatagaaaagttgtttgtttagggtttaaggtatataatatatatgagggtatataatatttgatggcttatttttaataataaaaaataaataaaaaaactaaaaaatagcattacctgtaatagtctacacttgaagaaattgggaggaaaacttctcccattttttttgagggaaagggagcccactagagagaaagaaa

SEQ ID NO: 131826 - DNA, 850 bp, Cannabis sativa
ttttaaaaattctaaataacttactgtactgaaaaataaaatttaaaattcaattaaacacctatatttttattttatacaagtacaacaaactatttaaagtttattttataatatatacagcgtggtatggtaaaaaattttgatgaaattccaaccttaaaaattaacaaaaattatgcaccacctacatataatttgctttttggtgatgtggcactgtcacaaatcacataaggatccagtcagcaaaggaaaaaaatattcatgacttgctcatgtgtgataaatttcatgcatatgaaacacggttctctctatctttaaagtcatataatgtgtattatatatattaatatatatgtgtaatgattcaatgtatgaaaatttaccaactatccatgtttctcataatgtgacaaatatacatgcatgcatgtggccatataaatccagtaaatatggaaatcatccctaacttattataactataaaaacaaatgcgaaatacatttttattatatagtacactctcttttgcacttatgcaatgaagaataagtttgaaagaaaaagtgtgatagaaaatttcaatagtaataattaggggtggccgttatccaatccatttcaattacaaaaatattagatattcaattacaatttaattggatttgatgctaaaagttgaattctaattggattggatcggctgaatgtcgatctcaaaatatcaaattaaaaattaatccaattcaattacatttatatatatttaaaaaattatttatataataaaaaatattgaaaatataatatatatttcttagattttttttgtatgttgagt

SEQ ID NO: 131827 - DNA, 540 bp, Cannabis sativa
tttcgcggtgcgggtgcggtttgagaaattgaaaaaactacatgtgcgtgttgatttaaaaaaaatagtcaaaaactgcaccacccgcaccgcgaataccgacacattatggatttagttattttgaaataataaaccaaagtcatagggtgcccgcacatgaaagggttgtgaaaactttccatgtccatgaataatagggaaatttgaaattatatgtatattagggactaaaattggtatcctaatctaaaactatacataatttgtaaactggaataacttttacttgaacccaattttactcccctcatttctaaactgactctatctctctcttcctcccttttctctctagcgtttgaaatcgcaccacccacgaatccccactcgaacaatgaacccaccgaacccaccaccccacggagggaacccatccactgagcacacaacgagcaaggtaaatttttttcccctttcagttttttaattttttttttcttattgattatggtaaaaatgttgttagttgatagattt

SEQ ID NO: 131828 - DNA, 907 bp, Cannabis sativa
taattttttttatcacgtagtgtaaatatctttctccacctttttaatagcttttgataatttcagaaatcacgtgtcatagatgttttatatattttattttatcttaattgagttattggtacatgcactagggctgaacctgggttaaggtgggctaagctcgcacccacagccctaccaatccacgaagccaaaaaaaaaatcaatttaaaattatatatatattttggtagtttttgaaaatatcacataatttttgaataaagggtccaataattataaggctcacccaatctcaaagtcagctttgatatgcacctcataagtattcccataaagatggtaacgctacaacaagttagctttctaaaaaaagcccctcacaagaaagggttgtgctatctaaaattcgaacccttgacatatatatgttatttatataattaaatataattttaataagtgcatatttaactatcacatagacaatactagaactaaatcaaagaatatatggacctttttattaaagtaacatttacaattacacgtacattaaattaaataattttaaaaaaaattattacgagtaaataaaaaagaatattaattattattattaaacaaataaaaatatatgaaatatatgtagttaatatagtttatcatcatcttgtactatttttggctccaaagctagctagaaagaaacggagccataactaggcggaatgggcagcgggcgcatggcggccgggaaggcgagctccggcgaagttcctctggttgatagaggcaggttgagttgggttgggagaaggaggcttgtttaggccagcttgcaaagaagatctcaaaatgttaatattattattattatgattattattattaacatcatcat

SEQ ID NO: 131829 - DNA, 604 bp, Cannabis sativa
gtttggcactgcagaaatgaagccagaattgggggttgtaggcctgacccggactcggctttcaaacgaatcaccctgaggtggcaggagtttagttgtttggtgggtttggaaagcgttcctgaacctgaacaactatgtgccaccccaagtccatctggtatcttgttcatggttgatgcctcggttgttggtaatgatgcaaggcttggaattgttcaggctaatgttccttgggaggttgctctttcggcccaggctttccggactgtgctgagtgttttagaagcagaatttgaagccattctgctgtgtttggaactgtgtgctgaattgcgtttggaagtggttagtattctctcggattcctagactgcagtcaaagccttgcaagcaaagtccttaccctatgcttgggggtcttatccaagttttgctaagtgtttgtctttgttaaactgttttaatcaatggtctgttgtttatattcctcggtctgaaaactcatttacggatcagcttgctcatcacgctcgagtaaatcgtgtttgtgtgtcgtctatttttatggaagcagctccccttgtggctgctatttagcctt

SEQ ID NO: 131830 - DNA, 1026 bp, Cannabis sativa
cacttggttaatggtgaattttgtgaatcttgaaatcttgtcttgaacaatctggaggtaggatgccattggaggtaggatgccatttttgaatctttggcctggtatgacccgctgagttggtttacgctaagttgagaatctgataggacttcaatggttttggtattcaacttaatggataggtctagcccagcgatcaatgcctcgtattcagcctcattgttggtaagtttgaagtcacatctaattgcccactggataacgtccccttgaggggaggtaaggactattcctagggcactctgcttactgttgcttaatctatctactcctaacatccatgtcgagtttgtttgctcgttcaaatattataataattctttttcttcttgtacctgtccaacacaagaaaagtcagcaataaaatatgccaatgcctgtgacttgatggctgtcctcggttgatatgttatgttgtattcactaagctcaacagcccacttggtcatgcgtccaaaaagttttggtttgtgtagaatgctacggagtgggtattgggttagcaccactataggatgacactgaaaatagggcctatgcttgtgccctgctatgacaagcgctgaggccaatatttctagctgagtgtatcttgtttaagcatctagcaatgtcttcgaaacatagtaaatcagttgttgctttccttcatctgctaggattagtgcagtgctggtcgctgcttctgaaattaccagatacatgtacaatgtttctccatcctttggttttgctaggagtgggggagaagtgagatagctcttgagttttcttagtgcctcttcgccacattccttcgttcacacaaagtctttggtctttttgagagttgaaaagaataagtggcaacggtatgaagattttgagacaaaacggctgagcactactatcctttcgttgagacgttgaatgtctttaattgactttggagattgtatattttggattaatcttatccggtct

SEQ ID NO: 131831 - DNA, 846 bp, Cannabis sativa
agggcataaaacccaacacttgagtgacacgtcatctttcattactcctcctgtaccatcctctatatatactttacttgcagagatgaacaaacaagggattttgtggtccagttgaatactcacagagatgactaatctgttattattcttttgaaataaaggacttcgagaataattaaggcgacgtgtcctgtaacgtgggtcctagtatcacctaactttctcttgagctactacgtattttgaaagaaattctaaacaataagtttaaatatataatattaatctatacatatatcttcatacaaaaataattattaaaacttaaaataattaataaaacatatttaggttgagtaatgaatagtattctataaatgtaacgtatgaataataaatttttaaaaaactttaaaattaagaatgaatttaaagcatttatgcagatgattttcgtacgatttttaaattttttttattctagagaaattaatgcgagtgctctaactttaagcataataagaccaacttcaatgggagatgtaaaaattgtgctatatttgacataaaaagtaattttgtggtaaatttatatcaaattttagctttgtgctttaatacaaaattgtaaaattttgatgtaaaatttaatatctaattaatattttaataaaaaaaaaaatctaataacattataattaattttattattattttaatatataagacaataaaaaatagagaaatgctaaaaggtatcagtggtgccaataccttcctacgtgtcaatatcactattggtgtaatttagtatcgggtcccatatagtttaatataataact

SEQ ID NO: 131832 - DNA, 507 bp, Cannabis sativa
  modified_base (467)..(481): a, c, t, g, unknown or other
acttaacaattctattaataggcacaaaggcacaaaggtttcaatgtacaaaagagccataaaaattaaaaaaaataaatctattgggagatccaatcactaaacacttgactcatttaagccaaaagctcgtttaactaaagaatgagtcacaatgttcttagaccttttacaatgagtcaaggatatactataaaagaattccaaacatgagcaatatcattaagtataatactaaactcattgaaatgattatctcgactatttaccgctagggctaatcgcatgcaatctgagaaggtagcaacaaacatataccccaactgcaagcaaagggagaggctgtgaagcaaagccttatccttcgcaacgtgaggctcaaaagacctcacgctcggaaacgcaccagagaagaagacatgatcatcagggttagatccccattttatgttggaaatattttaccnnnnnnnnnnnnnnntaccatgtatgtttcattaacatcct

SEQ ID NO: 131833 - DNA, 686 bp, Cannabis sativa
ctagaactatagaagtggttgcctaggagtttcctttggctacctgacccacacagtaattaagatatatctccttagattcaccaaggtaataaaaatttcctttagggttagcttcccaaaattcataaaagacctcaagggcagctgtttccaggctttccacctcctcacgagttcttcctccctagtttgcttggttcggatctccccctctaactttatgagcagagtgcagagactccccctctcgtctttaagctcatttacctccttagacaaagcttcattatcttcctgtagtttctcggtcgtaggcatctcttgcatctccttggtcagctcctcaaccctcgtgttagtggcaagaacctttttgttcacctctctgagtagcttccttcaagactcctccgaggaccagctccaaagatagctcattgtctgccctagatagttggtcacgcacttcaagaagtgatcggatcaaataatattggatcatatccttacccatcttggcctccgtgcttagtgccacggtcgtttaaggggtcctagcctaatcagacccgtctgagctcccccctctggaactctttgacttcgagaccttttgaattagaaggtccacaacaagccgctccttagaaaggtcaatgacctctttgttggaattattttac

SEQ ID NO: 131834 - DNA, 950 bp, Cannabis sativa
  modified_base (54)..(58): a, c, t, g, unknown or other
tgttatttctaatctttattattatgtaaatgtgattatattgaaatgagtttnnnnnagggcacaaaacccaacaaaaagaccctctagcacacattaagtacttcgagatacaaactaatctccaaaaaattactaatgatgagtagtgttagatcttccaggaaactttgtcagaaaaagctcaataatggtacttcaagcttgctccaagaagattcaattcttggaatgaattttcttgagaattctacactcaactctcatcctcgagattgataccatcacaactagaagaccttgttgatgttaaacaacgacaggagaacctttgaaggattatatttaaaggttcatggatgaggccaccaaggtcagaggcctaacagatgagggtcgttatatggccatacgggaggatccttcgattgagtatgatcttaaccaacaacatgaaggagttcttagaatgagtagatagcttcataaagctagaggaagccatcaaagaaggctagacaggacaagtcaacaataggcagtctcaaggtgctatacagtcctaagacatgccaaatatgcaggctagccctagcagtgccgaccagacctctagtggcaagtacaatggaggcaagcacaacaacaatagtggaaaaaaagagaagtacaatacttctcccatgccacaaaaccaaaaggaaaaggaggagaagtacacttgcttcacccatttaacagagaatcctaagacaatttatctagccactcaggctactgtcctatacaagaatccccttcccattaaaaacgagctgagcaagagggacatatcaaagttttgtcgatttcataatgacttcaaccatgacaccaatgagtgtcaaaacatgaagagtaagattgaattcgacataagaaagaataatccccacttgcattgttatgtg

SEQ ID NO: 131835 - DNA, 813 bp, Cannabis sativa
tttgacaaatataccccttacatcaaatacaacaaagatcaagactaaagaacataaaatcagttacaactgaaacagttacaaaaatcagttacaaaatattacaatagggctctgccctagatcagaatcacagatcagtataaagggaagtatttttttcttagatacagaacaagagatacaacaaggagtaaatagacaaaactagtagagaacatcaacagaaataacacaaagaaaaatagagccttttggctgatagttgtcatctccttgtgagctcctccttgagaatcacttgtgtgttcatgtaaaaagaaaagagagttttgttactatcgaaagagagaaaaacagagagaaatacatacagttgtaaatcaagagtgtaacctgttatttgatgattaatggaatcaagctgagggcttgacggagaagtagccggttgttttgggcgaacttcgagatcaaatttggtgtctccatctttaccattactgtttgtatctctcatcttaatccctatattgtttatatttgtatttgtgtgtgtttggtgttcttggtgattttcggatttgatgtgtagtgtgttttgccgagattaaagggagtgtttttctgggtttagtttcaggtagaaccttaggtttttctgggtttgtatttttgggtagaacaaaagaggtgtaagaaaataaaacctagaaaaccctaattattttgttgctgccaaaaacttgttgcgaaaattataaaacgatacgcaagtgcacgcaatcaagtagtatactcacgcaagtgagg

SEQ ID NO: 131836 - DNA, 594 bp, Cannabis sativa
ctttctcattaaagcatccaattggcagcaactagataggggaatcttagttgtgtacatagcatagatcggcatcgatgaagcaactgattttaaaagagttaatcttccggcataagaaagtaatttcatcttccaaccctccagtttcttagtcatactctctttcagtcttgcataatctttttttctccttcttttgaaaataaaaggattgcccaaatgtttcacatctcctcgaacctgctcaatcttaaggatacttagaagccgatttttcctctcacaactcaaattcttggagaagagcgccccggatttggatttactacaagattggccaaaccacatctcataggttgataagcacttcaagagagcacttgcatcattttcattggctcgagcaaagaggatggtgtcatctgcgaacattagatgagaaatcggggggctgaatgagagatcctgatgccatgaaccgaaccttggttttctgccttgattaatagtttggataacacctcttgacagagaaggaacataaatggggataggggatctccttgccttaaacccctttggggaaaaaac

SEQ ID NO: 131837 - DNA, 991 bp, Cannabis sativa
  modified_base (108)..(118): a, c, t, g, unknown or other
aaaatttacatattttgttgcacatgcgattactgatcttttagtcacaatacaatttttttgtgactaaatgtgatttttattcacaacaaaaaattacttgtgacnnnnnnnnnnnatttagatacaagttgttactaatttaattttagtttcaacaagtatattatgactaaaaatacatttatattataattacattgtcacaaagtatactgtgacaatatactaattttgatacaagtatattataactaaaaatatatttatattataattatattgtgactaaaaatacaaatagtatattattgcgattaattatacttataaccatgaactttttaattagttacaatatagaaatgctttataattagtcacaatttttttacttttagtcacaagttatgttgtgactaaagtaaaaaattttgtagtgaactattttttcttatattgtaatacaagatagtacggattattattttatattaatttatataatccacattatatttaaaatttatggtgatcataattaatacaatataaaattttatctaaaaaatataatatttcttgttatttaataccatattattattattatatatttatatatatataaatatatatttgcatagcaagttatttaaataagtgtatgtgactattttaaatgaatactatatattgttccaaaaaaaatgcagtctaaaatttgtgtacggaaatatcattatttatagtattaataattttttgaatgtacggctatagctcaaagaaacatattatgatatagcatatttttatagttgtacattattctgttttagatactaatttggctgcattctaaaagatattttaggaaatatatattgtgaagtagttataatataatgcatgtgaatgtgaatttatgattttatctactagctaattgttttcttttatataggtatgataataataataataataa

SEQ ID NO: 131838 - DNA, 957 bp, Cannabis sativa
tgacatgtccccaatgagatacatttgacctaattatcgttcgttttaaataagtttatgggtcaaagcaattgctaaagtcacaaattatgcccaaccattttggtatatggcatgtcccctttgtaacagaatatggggaaacttttgactgtatatatttcaaaaataatgaactcaaagtagttcctaggtaattgaatgacttactcattttcttaagtttcttttctttttaaattatatttttactaacaaaatttcttgcagatgcagaatagatgttgaacttactgattcatcagcttggcttacaacagttgtatttggggaaattgcagaaacattgttctcatgtaatgcaacaacactgatgaataccaaaattaaggttttcccactcaactcacaaatatctttttattttagataaaataatctgcttagttttttaaacattctcttactaataaattaaattattattttataggcaagtgacaacattcttaaagaactttctgaactttatggcaacaaagagataacaacttacatcaaggcagtaaaacaagattcaagtgaaggatgaaaatttaacatcacttcattccttaatacaactccagtttcaaatgaagaattaatctttaatgcttcaacttcccatcctaatctaactccacttctgactcttcctgaaaagaaacacaaagttatagctgacgatgaaaagaagaaatgtgaagctattgacaaagatgaaaagaaccacaagacttctaaataaataggccacaacttaagaacacttaaacaatcttttaagttccattaaagcatgaaatggatgtaagccaaaactttaaaagctactatcatgttgcaacattaaaaacttttgtcaccttaaattactatgaagtaaattattataatgtcaatattttacatctt

SEQ ID NO: 131839 - DNA, 1038 bp, Cannabis sativa
aaaaattgtaatttgcaataagttcaggtttaaattcctagctctaataccatgtaattttatagaattggttttcttaattttatttcataacagctgcataagcatatatattacaaaaaatttaacaattcaacaaaataaaaaccttaaaaataggagctgactaacaattaattcctagatttatagtaacaacctaagaataactttacacgatttaattcacatataaaaatctcttgtcaaagtataaatataaagttgggagaaaaattagcatttcatataaatatattagttttttttttaacgtaaagacccaaaaggttacaaagggaaagggtatgggtcttggctattccaacaccatgtgttatctaaccctatggacatttgtgccaaattatgagctgctgtattcccttgccgtcgagtatggtgaagggttacagtggggagtgaagataacatccgtcaaatagcattgattatggttccatagcttgaaagattatcatcagttgattgtaaatccgtgagtaggttgttgcagtccacttcgatatgatcaatattaattccattgtcacaactccatttaaggccttcccacaaaacccagccttctgctactttaggttgcatttgtcccacgcgactgaaagctattgctgcaattattttcccagtatggtcacgaactatcaccccacctcctgttttattctggtggctagacactgcaacatcagtgttgagtttgagggttcccactggtggtggttcccaagtcaaattttttaggtctgaggtagattggggctgttgcatctgcttgtcttgagctgcttgataaaagtccaagtaatcttgggcttcttgttcaatgcgcattggatttgagacttggttcctgaaaacagctgtatttcttgcattccaacacttccataacatacaaagaaaaaggttaaaggcatctttggaaaaattaagctgtatgtataaaatgatatctaacatgttcaagtgttt

SEQ ID NO: 131840 - DNA, 621 bp, Cannabis sativa
tttggacctggtaatcatgtgatgtgtggggactgcagtgagattttgattttcatgtgttgaagcttcagcatcaggattcgaagcctcatgatctgcatttcttgcttcttcactgttatgttcctcttgtatgtgaaagttatctctactgatgctaacagaaacaccatcaggtgtcacagatccatgatcgagtgagtcaaaattcatcagtggtgagtttgaggaatttacgtgatctggtgaagatgctgctgtaggagtggaatctgcggaggcttgagatggtgcagaaccatttttgttttgaggattagaactaaactgtctgaagtgagtatttggaagctgtgatcgtgactcattgtgtatgacaagttgtttctctggagcttgtgtatttaggaaaccagattgaaaagggaacatgctttcattgaatacaacattccgagagatatagactctccctgttgtgctcaagaatttgtagcctctgtaagagtcattataccccaaattaacacacctaaatgaatggaattgaaacttatggttctgatagggtcttatgcaagggtaacaagcagctccaaatgttttcaactgcttgtaatc

SEQ ID NO: 131841 - DNA, 709 bp, Cannabis sativa
  modified_base (621)..(621): a, c, t, g, unknown or other
ttactaaactgtgtaattactaattaccaccctagtaatttaccaccctagtaattaccctaccctagtaattaccctatcttagtaattaccctatctataattaccctatctagtattaccctatctagtaattacacagttacttccaaacacacaatcaaaacagaataaaagctacacaaaccagcatttacagttcagtaatagatcgacttacttatatattacaaacaaaatcaaaaatttattgatcacttttaaacattttcttcctatcaataagaaataatctcgctttagcgctattttaattagattattcacataagaaatcctaaatattttttgctaaaaagtataagtattccagttccaccaaataaaataaattgttgtcgcacgtagtcgcaataatcttgttaagcatgctacgatcacgtttagtattcaaccacgccaataaatcaaggtaagattctggccaaataacattacctagccaagacttaattacttgcagaagttgcttggaaaatagacactcaattttttaatttatatattggaatacttcttaatgggtattactcattaataaatttaactataaatattaantttaaaaatattaaacaattagatcttagtcccatagcgaataataaaagagaaatttaaatttctatacttaatttagctacttaat

SEQ ID NO: 131842 - DNA, 561 bp, Cannabis sativa
ttctttttatatttatattaatcgcagctttttttttcttttacttatactatttatttttcatctataaaacatatatatttttctttcttgtctcttcttgatttctttacgaccggttaacttttttcttttctttctttatcttcagccaattggagtactattttctattatatataggaacctgattttgtcccgttatggtaaataagggaatacaattcgtgattgtactgtagtcgtatgattgtattgttgcataatctgagggcttagattaaagtaagagtagttaggctttataaattggtagtcggttggtattgtatttaaaattcattatttttaaaaagttgatactgattgatgtactgacagttactatttttaaatattaattgttcggtatttttttttttaaaaaaaaaagtgacatgacatgacatgattgatgtctgataatacatgtactttttaataaattttcaaattatattgattatattatactttttttaaaaaaacaatgctataaatcttaggctaattaggattttt

SEQ ID NO: 131843 - DNA, 1201 bp, Cannabis sativa
ataagaatttctatgtagaattcctaaaaatgcaaaaaaaaataaaaaaaatgcaaaaaaaaataaaaaaaaaaaaaaaataaaaaaaaaaaactaaaaaataaaaaaaaaaaactgttttgaagtgtaaaaattaaaaaaccctaaaagatatacggaatttttgataaatttaatttttttttaatataataatgcgcattgaagttttgaaaacgctctaaatttaaaaaaaaaattagaacaattcaacataccaaaaaaatttaaaataatttattatacgcgtgtgaaatagataatttttttttttgagataaatacgtcattaatatacgaagtcccaataggaaaaatctcaaaagaaaaaagagtgcttaaaaagaatatattaatgaatatctttttgaattaagtacaacatggatacagctagttaggccaccaaacataatcatcatcaataaaatataaaactagcttggctaaagaatgtgcaacactattagtcatcttaggacaaaacttaaaagaaatattagtaaaattattacaataaataaaaatatctctaataatacaaccaaaataagagtgattcacatgatgattagagatagcgtagattttttttatttatgcttttataattaatttttttatttatttattaaaattgaaatagcaaaacttcaaaataaaaaaaaaaaaacataatctcaaaatgaaaacaaaatctcaaaataaaacaacttttataaaataaaaatagagcaacctcaaatcagctttataaaaatgaaaaaaaaaatctaaaaaaaaaacataaaaatggaaagaaaaaaaataataataaaaaatacatggtaatatatttttttggaaattcttatcatgcataaaaaaaatttgaaaggaaacttactatacaaattaagtttagtaactaattactacccaatataacttttaagacatatttatggaatctttattaacagaattataaaatttgggtaactatgccgatcaatataaatcagttacctaaacttatagctttccttaataaatcagttacctaaacttatgtattatatattgcagggatggacccactactattaatgtggctatagttattatcaacaaaaatattattttttaaaaaattaaatataatttttttaatttaataatt

SEQ ID NO: 131844 - DNA, 642 bp, Cannabis sativa
attagatcagttacttttatatgtcaatcaacatccaatccgcataagtgcgaattttgaatttttcagtccaatccaattcgcacaagtggggatatccgtagtttgcagattagattgaattgaattggctattttatgaacacccctattgaaaggtgtgatccatttattgttataagaaaaatgctaaaaatggtacctaatatcatttaaagtgtcatataaatatatatatatatcgataatgatataattaaagtatcgagtcctataagctagatttaatataatagattttataaaatttcgctagcaacctctaacatgtcatatcactattgatatagttaagtatcaaagtcttacgactacaacaaatatgagttccataatacatcattataagcttaataaaaaagtattattattttttaaaaagaaaacaaaaaaggcacataattctaaatattttctgttagaagtgggcttttaaatagtttctagtttaagtctagtgaaaattagccaaagtataggaaaattttaagagtttatttttttatggcataaataaataaagctaggtggttatgagtttttttttttgtttttttgtttttatatttatatggttttttc

SEQ ID NO: 131845 - DNA, 752 bp, Cannabis sativa
ctccaaccaaacgccaccttagttgttctatgtatttattttcataatattttgttatattttattacttgaaaatattgttattaggcttgtaacaatgatatttttatagaatattaaacttaaaaataaatgataatatttaatttttacatatttatcttcatattttaaaattaatattaaaaattaagtgtgtaattggatatccaattaaaaaattaatccaatccaattagtaattggatgggattggattggattggattttgaggtctaattagattgtatgatgattttttaaatctaatattaattggatcgaataacgaaaaaaatgttagattggattgaatgtacacccatgattcaaatgtatttttatatttattaatgtggaagaaattttcataattatatcaaatacttaactatcatagttatatttattatatttattttcagttagaatattaattgtaattaatttaaaaaggaaaattttatttaatatacataaaaaaaatacttatttcaaaaaatacccttaaatattttatacaatactccaatttcaaaaaaaaaaatatacaataccatttcatttacttctcactttacccaaaatacccttattatttttttattttcaaaacttaaataaacttaaaaacaaattctctctcccaaccctaaccataacagtcgccccctttcatcttcttcctccgcccactgctcctccccaagtc

SEQ ID NO: 131846 - DNA, 1092 bp, Cannabis sativa
gctatgatctcggcctcaagagtcgaggaagcttggaacacttcaatttggagtagtattgtaaattcatgcgtgttgttacggtggcccgacccatatactgtacttttcaaaatatgagtcgtcccctgtcatgcaataaaaaaaatataggttgtgtcgtatcgtgccaattttttaaagggtagatccggcacagccctaggcccagtatttttgtatcgtgcttttgctcgtgctggcctatttttgttaaacgagtcagcatgttttcatattcgggttcgaattcataatttactttatatttttttttaataattttgattatagatttataatattcaatgttatatttaaattttattattattttaaattatttacacatctatttactattaatattattaaattataaggttgtttgatgagtcgtgtcatgtttctttaaacttgtcgcatgtcgtgcatttcaggttagtttattcgtgcttacatgttgtacagtttcactcatgcttgtcgtgtcgtgtcatgcttaagcatatattttcgtgacatatcatgtcaatgtgtagcatcatgttgtgtcgtgtctaagtccatattttttcatatctggtcgtgctcgtgctattcaagctcttgccagttttgtatcgtgtcaaataaagtctgactcatatttacaacactagtttggaggcctaggatagcacacccacgcataaaaaaacaaccacaatagcagcacctaaaggagccatcaaacaataccttaacctgatcattgtcacaagacaaaggcatttccgaagcagcagcctactgggaatgttgtagacagtaatctcatggtccatatggggtgtttgttataagttttggtttgcatcgagatatgagcaaggaaatcacatgtgggagaatgtaaaactcgactgtacaaagattttcaaattttccattataagttttggtggcatctccattgggaaaattcaaatttggtgttaaatcagcaccaaaaaactactatttcaatactatttttttttttcaattctaaccacaacactaaaaattaca

SEQ ID NO: 131847 - DNA, 554 bp, Cannabis sativa
acttttgcggactagattggattagattttagctattgtacacattggattcaaaaaataaaatccgcacttcatgcgaatcagatgcactatgagtaaaatagtgcgaattggactggatgaacacccctacgaccactacaactcaaaattgtatgctataacccaattaaaagcttaaataacacaaaagctagagttctagggtttaccttcactagatacttcttgaatctttgcttaattttttagaaaataccaaggatgaaggctggttccttctagtttggggaagctgagtatagagagagaaagatgaaaggattttcttttttttttttccttaataattttaatttctaattgttgtaaaagaataaaccattctaatactaataatggccagctgccattcaagggacaagccacctaatcccactaagtaaatttcccaaaatgcccttgacctcttaagttaagtaattacaagcttaagggtaaaatggtaaaaagtcataaccccgctcaaactcggtattctaaatatctcaaat

SEQ ID NO: 131848 - DNA, 1295 bp, Cannabis sativa
aagtgcacaacttctacaataaattggttagcaacagccaaacactcatagatgtcgtagctggtggggctttatgaggaagagtgtgaatgaggcctttgaacaacttgaatagatggccatgactaaccaacaatggtcaacagaaagaagccaatctaaaaaagttgcgggtatgcatgaaactgatgccataacaaagtttacagcctaggtggaggccttaactaagttggtgactgctcaagcaaagcaagctcaagttacttatgagctatgtgggggaccgcacacttatgatacttgtctggtggatgtgaacgatttgccaatggtttaagctaagccattgggaattatcagaacaacaactgtggttacaaccaagggggtcattggcagaatttttaagggcaatttctaaattagcagcaaaaagggttctaccaatagagaaatcaatctcaacagagtcaacaacagaatcatcaataacaaggctctaactgagggtctaatctgtagacagatatgttacttcagctcatgatagaacttaaatcttccattaaggtcttagaaacttagatggggcagttaactactcaaatggacaaccaaaatcaaggtaattttcttagtactacagatattaatctgaaagagaagcgttaagcaatttccttgagaagtggaaaagaatatgagggaccaagggcagagacacaagtggttgaagaggaccaagatcaacaagaaccagcaccaacacaagagaacaagaagactactaacgatcttcagcaaaaagtaacttcacctcctatcagcattaatcatcatatcgaaattccctatcctcaaaggcttcgcaagaataacatggacaagcaattcaacaaattccttaaaatattcaagaaattgcacatcaacatttcattcatagaggccttggaacaaatgccaacttacttagagttcatgaaagacattctatccaagaaaaggaagttggaagaatatgagatggtagcacttaccaaggagtgcagtgcaatcctacagaagaaactaccacccaagcttaaagatctgggtagtttcaatattccatgctcaatagggggtttaatgtaaacaaaagctctatgtgatctaggagcgagtattaacttaatgcccatgtctatgtttaaaagattaagattaggagaagccaagcccacaacagtgactctacaaatggcagaccgttctttaactcatcctcggggtataattgaagatatttt

SEQ ID NO: 131849 - DNA, 596 bp, Cannabis sativa
gcctagtcatcctcctcctctgtctgtctccttctcttagttttaccctcaaaatcttgaccggccaaaacaccaaaatgccatcacggtccaaatcatttcgaccatccattcactctaccctgtctcttctctctccgcttcaactttatgctagccccttcttctcgatagtcctaaaatcgaacaccatcctcaactctagtaagtattgtttcttactcactttgattctcacatccaaaatcttatctcaaccccattttcggtgttaattttttttggcagagctttaggggctgtttggttgtgttttgaattttcaatttttaaaattgtatttttaaaagtgagaatacaaaacacatttttgtcattttaaaaatttaatggtgtttggctcatattttttaaagctatttttagatttttattttttactaaaaaattaatattctacaccataccaagacatgaacccatcccaccccagatgttacgtgcagtctatgatggcacgttacaagctaagtgatgcccacaagttggccaagtggtggcgcatgttgtgatgcatgcaggtggcatgctgatgc

SEQ ID NO: 131850 - DNA, 562 bp, Cannabis sativa
aaatggaggtagagtttgttccaacactttgttttttttttgggttttttgttttgttttttttttttcgcaattttgagcgatattgtacgatgttctatgtgatgccataagaaatcggaggttagggatgacttgattaattttggcgacaattaacgatttttttgcaatttcgtttacgattttattgttgtgcgatttgtgtgcgatatagttgcagcattatgtgattttgttatgtatgttttcttgtgtgacattatgcgatattgtttcttggttgtgcaattattgtgtgatatgatacttgtttatattatttttgtagtatgcgacattgtgcgacattagtagtttattgtacgatatactatgctaaacttttctatttatttttgtatttgtgtgtatttttttgggacagattcaactgtatttgtgtctatactgtatgatggcgtttgggttgtggagggtttcaattgggtaattaattccccaaaaagtaagacattgactctacactgaaaaaggtgcgtgaagttttgcatgaggagtt

SEQ ID NO: 131851 - DNA, 773 bp, Cannabis sativa
  modified_base (720)..(736): a, c, t, g, unknown or other
ttttattttaataatttttattttctataaaatatatacctttaattatactaatttatttttttttcttttcattattcaactaaaaaattaaaataagtattaaaattaacacaaaataataaaataaaaaatattaagagtatataaataagtttgcaaagtatcgttacaatcaatcaaaattatgttataatagaaaaattaaggttctggttcctaaatctataggttgcctttttttaccaggtccgccagtcttccccaagcttagatctagcttggtcggagttgtattttgttactacagtttgagttttgttactgcaattagtcttgtctctgtgacatgtttttattttgttgtttcttgtctatgtgacataattttgagtgttttagacttgtctatgtgacattgttttgttattttattgttcttcattgactcgccattaaatcgtttttaatagttgggaataacattcaagttttttgcgactgaagggattgttaatagtacagttacgtacttcacacaatattgaattctatataatttactataataatttttataaaatattgctaactaaacgtaaggtgatacttttaggtaatactagacaccaataataatacttaatagcaatattattttttaagaataaaaaggatgaagtagaagattcttacataataaaaataataataataatnnnnnnnnnnnnnnnnntaataataataaaaataataattactcactttatact

SEQ ID NO: 131852 - DNA, 637 bp, Cannabis sativa
tttattgacaatctttagtctccaattcttttaggattaatctataacagaataattaaattagtataaaaagtgagtggtaactttatttgccgatttgttttatgtacaaagaaaatttattgataaggccaatgataactataaatgggatgcgataatgacaaatctttaatatattagtcattacgagtgagatgtatataatgataacaacaactttaaatttagtgatgactacaaataaaatacgaaaatgacaatagttttgaatgtaatagttaatacaagtgaaatttagtcatgacaatggttgtaaaatcatatgattaggttttttacaaattatttttttctttctttagatttttattttgtgtgacaattaattcttcaatttttaattttcttttccaataacgtgtgaagatattaattattagtctgagttcaaaaaataaaaaagacaaattttaaattttatgcttacattagggggaaattgtttccctaaaccctaaataccctatattggtaaagtgagacaatattttattaattcccacactaccccctcattcaaacccctctctttcccctctttctctctttctctctttgtctcgcataccctcaa

SEQ ID NO: 131853 - DNA, 2466 bp, Cannabis sativa
aaaaattgaataataaattttatcaaaaaaaaaatacattataaatagatgaaaaattttgtactaaaaaaatatctaaacgatttcgatttactagtcgatctcatctaaattttataatttatgacaactttaattataaggtgcttcaaacgtactataaatgatcgatttgctacccttgtaaagacataattttttttattatttattattaatttaatttttaaattaatttaataatttaaaatttttgttttaaacaataatgtatggaatatactataaaaattttaaggttgtaattataatagtgaacaataaaataatacatgtattaataaataatattcaaatgaaaagttatggctctttgtcaaagaaaattatgcataataaatagacaaaaagttttgcactaaaaaaaatctaaatgatctcgattaccgttgatctcattcaaattagatagtacatgataactttgaataattatgagatttttcagatgtacagaatgatcgaatagctatcctattatattttaacatcaacaattgcacaatataattgttatcccaaattttgggttgtatgacatgcaatcaaaattgtaacatgtagcaagacaggtcatcataaaattatacctcgttgatacattaagattgtacatagaagtatttcccttaagggcaagttgtcgtctggtcggtagggagacaacaacttgatagagaagcgtgttgggtgcttatattgaagaatcgatatatgcttgatcagtataaatatatatattgacaaagtaaactattttaaatttttatgatagtatattaattaaacttattattatgggaaactcttatacactttttttaaaaaaatttataatttttgtatacaataaaatataataactgcacaatatagttgttatcccaaattttggccttgatgacgtgcgaaccaaattgtaactgttattcgcgttttttctattggacacatggactccaggtcagtaccgcagacctattagtgggaccctcagcaaaggagaagtgggccaatcccacctggatatgtcattcaatgaacatatcttggttttgcactcgtaaagccttccgccttcattaatttgtacctggaatacatgtccagtaccacgagactggagagacaaaaccatgcattctcagaaggcccttccaatttcttttatattccaacacacaaataaggaaactacagttgttagatcacaacagagtatcgtatcaagcttaaagggaaaacttcctataaaaaatattagcaactagcaataaccaaatttgtgataactagaagtaaccaagcttgtggtagttggtttgatccacatggaacaaccaggaaaaattatgactataaactagaaccgttattatgttccctacatgtcggttatcttcataaatagtatattaattaaacttgttgttatgggacaattttttgaaataaaattttataattgttatatacaataaaataagacgtgtgataagacatcaataatatttcttatacattgaatccaaaaatatgaaatcggcatttagtgcaaaatgaattggatgaacacccctattaagaatgataaagtggagataaaactcttcaaaaaaaaaatagtaaaaaattaagtgatataaaatcatcaaatgaaagttataatgattgaactcatgtcactcaacatgagttaggacaacttaccatatgtgctagaatttgagttttaactataattgttgttcctaaaattcattttgatcaggaactttttcttttttcttttctttttccttttctttcttcttttcttttttctcattaccagctaggattgaacatttcgagcgcgttcgacccgaacccgagcaacccgcccaaactcgaaccagtgaacccgcaattttttttaaaaaaaaaatgtttgggcgggttgtgttctacccggtacccttcgagcgggtttgcgggttgagtttttagatgtaccggatttcgggttaaacccgaacccgcccaccaacccgcatatttaatatattatatatattttttattattttttattacatgttatatatattaatcaaaaaataaaaagaattaaaaataaaaaaaccctaaaattgttatattatatatgtttaatttaataaataaaaaataaaaaataattatttaaaattaatttttttaaagagttgaccgagttgatggagttgactgggtcaacctgccaacccggtcaactcggccaaacccgccaacccgtgacccgccaacctgtgtcctattcgggtctgggtttagtttcatatttttgaactcgaaacccgtgaacccaaaacccaataaatctgcccaatgtttagccctattagcaacacatatttcttccac

SEQ ID NO: 131854 - DNA, 1860 bp, Cannabis sativa
  modified_base (1529)..(1542): a, c, t, g, unknown or other
  modified_base (1801)..(1815): a, c, t, g, unknown or other
aaataaatcaaccaagagaaacgtcacgcaaacacttgctttttcctatttgtggttttattcttttagtgcaatctaaagtggcataccactaacgatggttaatgtttggtgtcaacaattgttttaatttagataccaaatatttttttcaaaaatataaaaataaaatgataatcattttagtttagattctgatcaatacatatatgctactactactattaatattttattaaatttatttgtactgcaggtcttaaattatataaattttaatgaattaattcacaaattttattttccagcaaattagacctaagttttaataaattagtccttaaattttatttttttagcaaattagtccccaaatttttatttgaaacatgaagttctcactattaaatatatggtattttatttatatatttatttacttttgaatttatttaaatatttttatattgattacattatcaaattaaaaaaaaatgatatttttttttatttatatgtatgttttttaaatattccaaaataaggagaagaaaaataattcaagacatatttttttttttttgatatatggaaataagaaaaaaaatctatattttttattatatgtatttttgtaaaatcaaatcaagacatattttaaatattacaaaactatatatacatttaaactactaatttatctttttatgaacaacacttgtacaaaatatatttgctatcgaaaagttcctctgcacttcaagcaaatattctcatcaaatagtttcttaaatatatatatatataaaaaaaaaatttaatatgaaatctatttatatatatgtagtaaaatatgattttgtagccaaattaatatatattttttttataaattactaagtaaattatattataaaatttacttttaatttatactcgtaggtgaacttatgaaatttgaccatgtgttgatacaaaatttaaataattaataaatatatatacaattagaaaattattaaaattataatactacatattcataaattagtaataaaatatactataaatgttaaaatataaaaatgcgaggaggctaaaatttcttctaggcattatatcggtccgccagtatttataatacttctttttattaataatatacatgaataaagcatatttattttggtaaaaattaaatattatatgagtacttttaaaaaatatatattaatgtaattattttatcaaagtattaaaattaaaaaaaaaatatttgaatgtaacaaaaaattaattaaagtaagtaaaataaatacaaaatgataaaaatatcaatatttaagagtgagaacttgccaaaatatatatagtttgggaactaatttgtcaaaaagtaaagtttgagtaccaacttgccaaaacctatataatttaggaacttgggggtacaaataagccttatcaatataaaaaattaataactaacttttgtgataacttttaagtcacaacataaattttttgtnnnnnnnnnnnnnntttagtcacaacaaaaaattacttgtaagtaaaacatagtatctagatacaagttgtcactaatttagttttagtcacaataagtatattgtgactaaaaatacatttagtcacagaaaattgtaatttttgtgactaatattttatccgcggactgtttagtcacaacatagaaattattatttataattagtcgctgattttgttgtgactagctaaaagtgagattttttgttgtgtattattattattattattnnnnnnnnnnnnnnnattattattattattatgtaatatccagattaaaatagtatttaa

SEQ ID NO: 131855 - DNA, 508 bp, Cannabis sativa
aagagtggtttttagtgacacacactaaatgactctaaatatttagtgtttatcacccaaaatgtgggtcactaaaaatatggggtgtcactaattactaaaacccaaatatcataatcttaaaataaaacataaaaaaataaaaaaaaaaatgtagttgtattatttaaaaatataaaaaataaaaagtatatttcttttcttaataaaggcacaatatatactaaaggtttacatggaaaccctatcagtcccttcttcttcttccgctgttctttcttttcttcttcttttttttttcttgcaaacttccattcctcttcagatatgatatccgatcagacccatcccctcttcttgcctctctctttcttcttctccgtcacctagtcatcttacccttcctcatcgtcatctctctgccgttttgttgatgatcgaagatcccactaatggccaaggtcaggtcgacatctctatttttttttgtttctctctctctctctct

SEQ ID NO: 131856 - DNA, 1065 bp, Cannabis sativa
  modified_base (254)..(260): a, c, t, g, unknown or other
gtaatttttctctaatttcgtcaatacaaactctgttattttcttgaattgaccacatataaggtccagattcttgattattcggtctagacaaaaatatgtagtatcatttacttccaaatgttcatttaataaatttaaaacggagtctgtattgacgaaattagagaaaaattaaagttttacaaacattagatacttatgccgctaaaaataaacattgggtttatgctgcttacaaacttaaaactttnnnnnnntatgccgctatttaccctaaattttaaaataatttattttttaacttttgtttttcttcattttttttacattataaatttatttttcatattaaatttacgtattcttttttcttttataattttttacaaaacaatgaatatttttaattattttttctttaacatgaaaattatttttagaataataggttttttaaaaaatgagaaaattaaaataaagtaagtataagacttaaaaaatattaaatgttaattttattaaaaagtggggtaccttaattaataactatagtaaaaaaactaatatattcataaaaatatattagcttaatgattaattttaacaatgttaaggataaggggtaaaataatacttagtgggcaaaacaatactatgtcaaaagtcatgaggtataatagcacttattttgtcacataaggggcttctggttctaataaaagacaccttccatttgaggttgaagctcgtaagacaaagagaactaagttttcaaaatcaattaaagatgtaagcctttgattgttgctttttatttttttttagtttttttgcttgttatatctttgtttatttatttattttttctgagttttatttattttttctttctaattttttaagttttttcacattctatcatcgaggatgagtttctgatttagacttaaagtttaatgtagaagacaatgttagactttttatttggatttatattaaattttattgcttttattaaaacttgggttgattagatagttctttgctgtgttagcccatatt

SEQ ID NO: 131857 - DNA, 752 bp, Cannabis sativa
aaaaagagcaacccatagaatagaacaaaaatggcacttgataaataataattacaaagtgcaatttatcacttcttttagattagttttttggtgtctcatacgtcatacctgtccaacaacaagcatgtagcagcaagagaaaaacagctgagagtgagattcctctccatcctcacacaccagacagtccctagaagtcgagatgccaaattggtgcagcctgtctcccgtaggaagcctgtttttcaaggctagccaactgataaaatgatgtttagctgtgcaaaatctgtcccaaatcacagcaaactgtcatctttccatgaaccaatgctgcattttgtatgaacaactctcttccaataccaactagcatcattaatagggaccttataccaccacctatcatttcgcttatacacatcacattcaccaattttacccacaattatccatcttagttgagatgacccaaacatgctttccaatggcacaaagattccaaagagccatatcttgaaccccaaacccccttcttttttaggctacacaaatcatcccaagaaacattccccgatccattgaacaaattatttccttttcaaagataagcccaacaaatttgagtttttttattttttttattttattccgaatcactgttttaagtaaaattacaattcgagaccagtaaaaattgatataaaataataccgaatggattagaaccattctctgcacgtaagaaa

SEQ ID NO: 131858 - DNA, 951 bp, Cannabis sativa
aaaatagattacattgaaatggagtttatttagggcataaaacccaacaataatgaacgtactaatgtgacttttaactgcagggaacgctcaggtgagaacagcctagatggcattgacttgaatcaacttatttgtgaccttgcatgcggtagaggccctgttgttcctaacacaaaccgactaccaagtcagaggatggaaagagtgcaagaagaggaggatcctgaatgacgtaaacccgcataatcatgcgcagcacgaactgaggtaagcaatctacaatctcattctcctcctcgaggactaacagcctttcccccagtgtttacaatgttggaatatattttatgggtatctatatttactaacaaatatgttgattaacagcctaaatatgaattctctaaaataatagaattaaacacatataaagtttaagtaaccttacattagtggcagcagaataatatgtctccttccactcagatgtctaacctttgttcctttttgtcgcagagtataaacaagatctgagctcgattctccttcaagtgttgcattcttcacagtcttacactttctatgggtggtcatctactctttcactataggctcaaaaatatgaagagggggagagaggatttcgaaattagtaaagaaaaggaggctctcaagttttctagttgtttgacagaatgaaaactaggttattttggttggatgaaaatgagagcatcatattcgtttttatactattttaccgagggttaggattgaaattatatggattaaaaaaaagataaaataatatcaaaattaaacactaattgccagtcatgataatggaccccactaactataattttgcaattttttcaactatttatcttttattttactaatgccatattttcaaattttattcctataaatgtcaaaattattaat

SEQ ID NO: 131859 - DNA, 930 bp, Cannabis sativa
ggtaaaataatttccaacattgggctcttcaatttcggtttattggactaccgccaaattctattacgtctgcttctgcgaaccttgccagaggatggatctctctccgagttttatcacgagtcaactgacaaccttccagacttgtctgtctaaaccctttttatacctctgtttggtcttcgttatcttgttcttttggctccacaacagcttccgtctgtgcattgtctttcggttccacactatctttcgtctgtgaaccttcttctaggagctttgttccgtactccatttgcacacttattgtgtctttgttttctatttttcctacaccgcatggagacacactacccttcctaaaggtcaagtgaggatattctaactcattgaaaacaacatctctagcaatcacaacctccggtttacccttcttggaaatgtagattctataccccttgattcctaaagcataacctaggaaagttcccttcatggatataggttctagcttgtcaatagattggtgtacatatattgtacaaccaaatgttcttaaatgcattaggttggaggttttgttgtaccacatttcataaggtatttttaagtctattaatctattcgagctcatgtttacaaggtaggttgcgatgactaaggtttcccctgaaaatgggttttccaatccaaagctaaacagtaaacatctaattttgttcaacaaagttcagttcattctttcagcaacaccatttttctccggggtcttcactacgtttctatgtctggtgattccaaattcttgacacatcttgtttaattcaaagttaacaaactcatcttaggatatttttagcctattatcagggccggccctaggcataggcgggctaggcttgtgcctagggcccacctagtccaggggcc

SEQ ID NO: 131860 - DNA, 1360 bp, Cannabis sativa
atcagtatggcttctagatatgaacgtgggatgctctccttctgtcttattctgatgttcatggtaaactcccttttatatataagttctataaatgatattaagggttcgttaagtacgccgtattacatcgtattttatagtattatattgaattgtatttcatacaatatttttatgtaaaactatatgtggtattgacttttaaggctaccgaaatatataatattttagtataaactaaaatttaacatagtattatataaaaatatgatatataatccaactcaacataatataacctaatacaacgtaacaaacgagccctaatactcttatatattatgcacaaaatctcacattaattttataaataactgcatgcatgaaatgattatatcaatataatttcagtctacaacattatatgtttaagtaatctcacatattagttttattattgagtaattgttttcgaaatattaaagaaatagttaataggttgcgcttcgcatgcagctatttatagacattttaaattatatatatgtatggatatttatggaataataaaatcgtaaaataattttaaatttatttttatatatataattttaaaatatatatttatcaaatatatatatagagaactctaacggttttttttttaaaaaaaaaaaattcatcatacaatttttcatatacaaaacaaaacatcttcaaatgtatattatagtaaaaaaaattttaaaattgaacaatactgacacaaatagatataaaacagaaagaagaccgtaaatttattaaaaattcatcatataatttcaaaataaatgtcatcaccgtatctcacttatagtcactactacatttaatgatatcattactgtatttcacttgtagtcgatgttaaatttttaaccgtcacatcatagtttcattcctcatctttatgtatagatatagatagatactaccccttgccttgaatgatgtaaagaaatcaaatcattgaaaaaaaatattaagtaaattacaacaatcatgacacattgagtaattaataagtgatgaaaaaataaacaaaaaaaaatatgaataaaaataataattacttctcatcaatacaaatcatataagatctcaattcttcgtgttttttagtatcaagagaattcaatatcctacaaactctaattgtatcactatttaagtagtaaaaaaacactccatcaaataaactttagaaaaattaattacttgaattatgaaattaagatatatatattttatataaagtgtgtctatataactaaaattcttggtttttgagaaatttatgggtgacttttaattt

SEQ ID NO: 131861 - DNA, 559 bp, Cannabis sativa
  modified_base (495)..(513): a, c, t, g, unknown or other
tgattcacaaactgaagggtttaatgtgagaatagattttagcttagctcagaatgtgataacagttggcttataacattgagaaaatgtgggatttgtgaataaaaaactgacaacagatcacaaaaagtgagattgacaaactaataacagatcacaaaaataatgataataacatcaacaacaagatttcaatttcataaatagaaataatgcagagcaatgaacacggactaaaatattcaagagagagagagagagaagaaatatccttaaagagatggtcgagtgaagagatggtgtcaatttctcaggcgactgaagagacgaccattgattgttgaggccactaaagtagatcatcgattgaagatctagactagtcgccaagggctgaagattagaactggtggtaggagatgaaagcggctgtagaagaaagagaagaaagtgaaacgttattaggtttagatttttttttttttttataacaannnnnnnnnnnnnnnnnnnaaatcttgaaaagatacttagtaaatgaaatatattctagatagtt

SEQ ID NO: 131862 - DNA, 1111 bp, Cannabis sativa
ggcctgcctgctagagtcacggttgggcagccttcttaaggccaagtcgatgttgtcatttgatctcttctgcactcaattggctttgccccccggcgtaattgtcataaagcctttgtgcaattttgtcaatagctattcaacttctttcttggtaacactccttagaggaggtgttgggataccaagtctgtgtgttatgctgtgtaggatcagacaccctgcaaccatcccctaatccctggtttctggtaaggattttgtttagaggtatgttgttgtaagtgtatccatgttgtttgtgtagcatggctgttacttatgaaatataaggacttagttattcaaagaactcagcaggtgccaagtttaccttagtttttaaggcacaactgggtagttgagcgagtgtgttggttattgttttgcctttgggggcttgccttttagtatagcctttgagttgtcttaacagctttaattggccatcattgtattgagctttatattattcacccaagacataccctacaactagctgagagtcgtggtgcatgtctaggtggttagcccgcgcttcgtgggctagcttggggccagcattcagagcttcatgttaagcctcattgttagaagctttgtaactgaccttgttgcctcgtgcctcagttgcccctaggtgccagtctaactactagaaaaacccctttttaagtccatcaacattggactagataaatgtttcgagtcccttttgtgttggacataatagcctgagacataaaaggagtgtttttctagtccaataatgttagactagaaaaatatttctagtccaataatgttggactagaaaaatatttctagtccaacatcgatcgttggactagaaatatttgtagtccaacattattggacttaaaaagtggtcccacttaattgttggactagaaaaatatttctagtccaacaatgttggacttcaaaagcaatctcacgctatgaacccctttctagtccagctaatttggacttgaaactatatttttttgtttttttttttctaaattaaatgctgcaaaattaattttatttctttatttttatatta

SEQ ID NO: 131863 - DNA, 867 bp, Cannabis sativa
tctcaaactcatcttctctagattatttctcggttaaattctgacatacatacattaattattaatattatacgacctctcttattataatcaacaagttaacaacattaacctttcatgttttgacatatgtaggggtgtacacgcctagctataaagtgtactatttaagtgaggaaaatgcttaaatgcggcccaaaaatataatatattgttattagtatattttaataattagttcatatatttaataaataatataaaaatcaagtgtaatgctcttttaaattctacacattattatactttttatttgaagattgagatgatatacatttaccatcggaaaagttgtaagtaatcctattgtggtgataattttttttttcaacacttgtagaaaataattttttttacatgaagacataatgacagatattatgtgagattttgaaagattctttttaaaaattacaatgttaaaaatggattttaaacaacatgtgtgtgctttttctttttttctttttttcatttattgtataagcgtgttaaacaaattatttaaattttatttttacaataaattatttgatctttttgaaaaattattgaaatatttactataaataaatttaaacgattatgttaaaaagattatataattcatcaaaatactaaaactaaaaaaaaaacccctaatattcacctgaaaagctcagtttatttatttatttatttatcacgcaccagtttattcgaattgcaaaacaccgagagaatattataaggggctgtttggaataggttaatcctagtaagggaatggtaatgtgaaacattatcttgtttgtttggagggtttag

SEQ ID NO: 131864 - DNA, 508 bp, Cannabis sativa
  modified_base (87)..(102): a, c, t, g, unknown or other
  modified_base (467)..(473): a, c, t, g, unknown or other
attttgctgcacccaatgtaagattttcttaaacccttatgtgtttatttctttgttttagtaaatcatattaggatgttaatgaannnnnnnnnnnnnnnnatctagatcctggtaaaataagtcaaccatttatccctttactgataacatcatacatggactaacatgttttcctctagttgggaatttctctacttctgagcttcatgttagcacaccttttactgcctattttgagaagcagaaccttggccataattttctttaaaatctatcaggtttgctaaactgactttgaatctatatactttctgttatgggtttcaaaaatgatacttcatactattcaacatcttatagggaactattcttatcatactttgataactgttgttgtatgaaaacttagtcgaaggcatatacttgttttatgaattcttaaaatgttggaatttattttaccnnnnnnntagatctactaacaagtatgttgtttaaacaccct

SEQ ID NO: 131865 - DNA, 524 bp, Cannabis sativa
taaataaataagtaaataacaagatgtgcattagtaactcatcaaactggtcttgtttgaataagattttgtttatagctaaaaatataacttcactcaattttttttaacatattttaaggataactattaactattttatattttcttttattaaaaaacttttttcatagtatttaaatatcataaaaaaaaagaagtacgtaaattattataacttaaaaagaattattctaattcttagttgttaattttttacataataatatatatatattatatttttaaaatttttatagataggtgactattaagtgtgaagtgatcatctatatctatatgttatttttttattagtataattaaattaatttttaaataaaaataaaaacttaatgatttggactaattagggactgctatatataatttacttacacttaatacatacagaagtttcagaattataatttaaatattattatcgtaaaaaattgaacttaaatatttatttacaactaaga

SEQ ID NO: 131866 - DNA, 635 bp, Cannabis sativa
tttggagagtgtatgaaatgttttgtaatattgttttgttttgtttggagttcctgttgtttaaattcttctgcccatagacttgttgctaaagaggtggaaccttttgtttttccatgaactttctattttaattttataaagattattgttaattaagaaaaaaaaaacttgttgcttgattttttttttaataaaagggtctttaaattatatgagttacattgttaggattccatgacacgactcctctttcacacacctcctaatactttttatgaatcaagatctcttgttaaaaagtggttgctcttataatgtgttaaatcaattaaagtttgacacatcaattaatctaatttatattaaacatattaactatttttgttgactcaattagagttttaattttgattagtttgaaacatgagacaccatttttttaataggagatcttgattcactcatatattatggtaacttgagttaacttgccaccggtcatatttctatgtaatttgtttagggaaatttgacaatatatgctaaaaataaatggtacactaaaaatatgctaggatattttgcatcatgcaaaatatacttaaactatttttcccttacaattttacccc

SEQ ID NO: 131867 - DNA, 1026 bp, Cannabis sativa
acgtagaacccttataaagcgatcttgtttcaaaagctttcctatcaacttttgtggtgacaatctggttttcgagatttatccagggctcaaaacgcacagcttcatctaacgaaacaaagagtgtaacggttgagttaccataacggctatagatggtgaatctactttgtctatcgattaagaataagaggatctccaattgtaaaattttagaggatatttggtgagttggccatattatattgtaaaatattgagatgttataccattagagagaaatagatgctattctagaaatttgcatgtatgttatgctgtagcattgatgctattcattattttttaataaaaacctgaagctaaaaagttatgtaactaaaaattaggatatatattaaataataatgtgtgaaatcataattatagtatttttaaagagtgctatacattaaagtgttttttaaagtaaaagtgttaaaaatccgccaagacaatagatcaaacttcatgcgatagcccacttaaatcattaaattgctattgtggtatttttttttttttaactttttttgtacttccgaatactcagaggaacgttttcgttacgcttgtattcgtcaacaaaagcatcatttcaccatcagagtaataatatataagagtaattatttgtagcataaatatttaagtttaacttctagttgcaaataaatacctaaatttatatttctgtaactctgttggtaactaaccgttaaatgtttagtcattaaatcaacaggtcattttcttattggtatatttgaactaatttttttaaataataaaaatttaatggcttggactaattaagaattgtcatatgccaatttacttaacaagtattatttgcaactgtaagttaaatttatccacaaattactcaatatatataagggcattttacataaatgtatacattttcttaaataattacaaaaaatgtgcaaaaaaatacaattttaaaaatgtacacatttgaaa

SEQ ID NO: 131868 - DNA, 676 bp, Cannabis sativa
ctagatcctggtaaaatatatatcaacatggacatcattccctagacctcctcttaagcatttaacagattcgtctctgcctgggtcatcttggttttggtcgaagcaataatttcatccttggtcttcaaagtttcctacacctgttccctgagggccttctccaccagtgtgtcattctggagagtctccatttggctctaagcttccctaagcttcctcaacaccccgtccatgccgccctattctgagatagtgaacccttagtcaatcaaagtcttggaaagacgtccagcctctacaacaatctggttacaataaataataacatgggttggtaaggacattaaaaggagcaaaaagaaaaactcaaaaaatgtttaaagtgtagactcatggaggtaagggccacgctcatgtcctggatttggtagactgggttagaagaggcacataccgcgaatctttttgtaggaagctaagtcaagtcagcagcgaaatgacttaccatctcggaggcaaaaagtgtcaaagaagaacccaaatagcgcttaaaccagtcagtcatgatcaaggttcaagtcctagacttcaccaatgtattcaccccggaaagggccatcatgagcctcccttagccacttttttaaggcctctgcctctacctctcccttcg

SEQ ID NO: 131869 - DNA, 1176 bp, Cannabis sativa
  modified_base (1017)..(1021): a, c, t, g, unknown or other
gtgtggcagtaaaattgaaaagtattaacccaaattcaatatttttgtaaaatgccctttcaataccagttattgggctgggcttttcgcagagtctcaacagccgtgggtattcatctaattcaattggaagaagttgaaaaatacttttttttttatataattaaatttacctccaaataaagtttaattcaaatatacctctttttatgagtattgtacccaaattatccttccacaatcacataactaagacataatttcaaacataatagatttgtgttctttgtagatggatgtataagtttgtgggaaagttggaaaaaaattttgattaaagaaaaatgaaaactatcataaaatgataggggtaaaattagtagagtgattgaaaaaataggtaattataatagattttgaaatagagagtaaaaattaaagagtaaaattagtagaatgattaaaaaaataggtaattataatatatattctctcatttagtttacttgaatcttcgttatttctgatgacagaaaaaatgcccataacattttttgctgaacttgattagaaacagctcagattgacaaaatgtcaacctgggcgttgagtccctcttttggccttttgaaaattttgtttgatcctttgaaatagttgaatcttaatattttttgaagacgaagaagatgcacgaaagaattcctaaaaaactctattttaaatggtccaggttaacaaaatgtcaacctgggtgcagggccagccccaggtgtcaacatgggggctgggtcttatatttgtacccaagaattattgtttttcctccacaaggacctatttccttgtattttatgaagacaaatacgatgtaaaagtcagatctgtaattggacacttggaaggtgcctagattgacagattgtcaacctgggcactgggggctcgggggcccggggccccgggtgctcaaaaattaacttgctccgattctgattttgatgcctcaaatatgtnnnnngtatgtctagttgatgtcctaatgcaagttttgaccattttgcactaagacgtggtcccaaaaattgaaaccttagttgaggatgtcaacctaagcgccaagtgaaaccctaggtgtccatgttggcttccgagttgtaggtttgtgttatttca

SEQ ID NO: 131870 - DNA, 749 bp, Cannabis sativa
agcccccaactaactttctttcaactaatcctcaaatcccatctatctatcactctactacatgacaaatctatgtatctatactacatacatatagttatcttttttaaaaaatatgcatataagattgaataatttgccgcataaatacttatgttcaactttcagttgtaaataaatatttaaatttaatttttagcagtaataatgcctaagttataattctggaacttttataagtaactgattgttaagtgttaagtaaattgccacgtgacaatttctaataggttcaagtcattaaatttttattttttttaaaaaaaaatcaatttaaatattcctataaaaaaaatgacacgtggataatgactaaatatttaacggttaggtaatcataaagttacaaaaatataacttaggtattattaccgcaaaaaattaaacttaagtatttatttacaactgggagttaaacttaggtatttttaccacaagttaccttatcatataatatcaatataaggatgaattctcacaaaatgaccaaaaagaaagacttatttttgactttttataattttttttactaaatttattttacaatttttttttttataaaatactattttaggccatgattttacaaaaattactaattgaaccttctgttttaataaataataaaatagaccctatattttctaaaatagtaaaaataagatcctaagctcaattttcaacaattt

SEQ ID NO: 131871 - DNA, 1475 bp, Cannabis sativa
  modified_base (38)..(44): a, c, t, g, unknown or other
tcaaagcttatgtgggtttgaagctcaagaatcaatgnnnnnnngtatttcgatccttattcatagtgtatatatgtttgatttaattccgcaatttatatataaactatatgttttagtctatacatataaattgtctaacagttacaagtttattacttatatgctcaatttaatatatatagaaaaaaccacataaaatatgatttaaaaaaataaattaacaagttgactaggtcaacctgttgacccggtcaatcggaacccgtgaatctgcgaacccgcaagtccgaaacctgcaaacctgaaccatttcacgggtcggttcagggtacaattttttgaacccaaaaaccacgaactcaaaacccagtcaacccgcctgatgttcagccctactcactcctctcaggctcatgcataggacgggataccctcgctcaccccaggttgtacattatgttgattttgtagtactaaatcaggtacgcaacaaaaaatattttctgattatcatcgcaccacattctcaggataaccacatgtatatatatattaaatatggaaaaaaaaattgacaaaaatataatttacctctcaaagcctatcagggtatcctcgaatatttttgtgtattatatccttagttgatctcaaagtactcacaccgtagtctttcaaatcttccaccacacacaaagactagtgtaggctagtaggatatagtgtatataatttttttggttttattctcaatacatgagaagaacttctttttgagagattatagaaaagtgattactcttattaatcctttttagacttatccaaaaatagataatgcgtctcaattttttggtttatacgacaaagttaaattaaaacagatcaatattttatttgactaattatttaaatttaaataatttattaagtcatatttaattatttgaataaataatataactgaattagttatagatatttattttctataactgatcgagtgaatttctcaaccagttgagggaatctttcaattaccttaagggcccgtttgatacgtaggattggactggattggactgaaaatgattggactggactggattgacaagattggattatggtgaaagtaatcatgtgtttggtttaaaaatagattggactattttatttattttcttttagaaaatgaaaaacttaaattaaaataaaaataaataataataaattaaaattaaaatatatgataataaataaataaaaatgaataaatcacaacaaaaaataaaaataaaaaataattaaattataaaataaaataaaaaaaatatatcctatataatcaagtatatatcataaatatataataaaattttatcatattttttattcaataaataattaaaatagtaaaataaaaatatttaaataatataaaattttttatcttaaacactaatttaatataa

SEQ ID NO: 131872 - DNA, 1046 bp, Cannabis sativa
ttcattttgggctgtacaaatgttgattgggccggcccacagtattgttgtaatattttaccatttttagaatattcctgtttttttcccttatttattcccactagtaatgtttggcagttattttttttaaagagagaaaattgaaatattcattaatagacaaatttgacaaaatttattgcatgaacatatagctcatagagcgaaattaatttaaaaaaactccaaaaacaagctcaactaagatggaatttgtaaaaaaacatgtacaatattttataaaaaaataatttgtgatatatttgcattaattttttgtattgtgcttcaaatgcacaattataaaactttatataaaatttaatatttaataaatgctctattaaataaaaaaaataataataactttattattaattttattatatgaaataataaaaataaatgaaaaaaaattaatgtaataactaaatttaatagtaaaatattaaatttggatcaacatttgctaagtgacaaaaattgacacattattgaaacaaatattttacaaggggctatattttggcaataaatcaccattttgtatttctattggtgatgttctaaggatctataaaccaccagtaacaattatcaaaccagtatgtagtaaactaaatgtccaaattaaatgaacatctaataaagtctacctactaatgacttcgaccgatcttccaataaatattaaaaaataacaactccattaatcaaataataaatatgaaaataacaagttcagtaatactccattagtaatttatagatattcttttagaaaatttgaattatttcaaaaatattatcgttaatgtttcaaaaattaataactagcttgaaaaataggttaaagaaaataccaatttttgccataagcccaaataaaaaaaaaaacaagctagtccatttaacaaaaagtggtaagttgaaaaatgcctcttttattaatcaattaaccaaagggaacttttatttgtaccccataaaattataaatacacc

SEQ ID NO: 131873 - DNA, 539 bp, Cannabis sativa
taaatgcagcatccatgtgattcaattactctcacaagctagcacatgggtggttgttttagcaatgtccctttttggggtactattgactaataaggtagtttttcttgtgatcaaattcgccataaatgagaatattaatatccaaaaaattattatcactactatataatatattggttcatgataataaggaaaaatgatagaaaattgatgtacaataaaaaactaaataggaggggaccatatatagatgattgtatatataatatagcttagtctgtgttttgaagatgagtttttatatataatcatcatggcattactatttttgcatgatcactagacactactattgccatttgacaactttatttgaaaactaaaagatgcacgaaaataaaagtggccgaaatttaacttagtgtgatgagcatgcattatttgagtgtgttcaaatctgtagggtaaattccgtatgaattaatttctgattactttctgttataattgtaatagaaactggatagtgtatcctt

SEQ ID NO: 131874 - DNA, 646 bp, Cannabis sativa
tgccgcaaatttcccaaaaatatatatataaaatcaagaggaaattgcactcactataggattttaaaatttatttacttaatatgatatttttaggtttgaccaatttatatggcattttttgtttttaggtatttttatggtatttgatatgtcatttttatgtaaattaggtttttaaagcccatatttaatgtttttatttgtttttaggcagttttatttattattggtgctggaaaggtcgccagagtttgcttttggtgtcagaaaagtcaccaaaatagttgtcggtgtaatgccctaacaataggaatgtcacgaactgtgattaacatatgctaatgtcgctaaaccagaattactagagctaagagcaaaaattaaactttaaaccaaatacatggtaaaatcataacttgtaattatcaaactttacaaacatccaaaagattacatttttgtttctggatcctgtaaaaacttttcaaaatattaaaaattattcgtacacgccaacctaagcggcaaaagtggagattacaacatttactcctgtagatgttgaataccaaaagtggtacgttttacatttatcaactcagaagtgcacgaatctttattgtagtatggagattgtgaagaa

SEQ ID NO: 131875 - DNA, 1615 bp, Cannabis sativa
  modified_base (1105)..(1119): a, c, t, g, unknown or other
aataatctcaacaccttgatatcccgatcaagtatagtatgtagtattatctctataataggatctgataggttgtattcaatacatcctttctccaccattaatatccacagtcacaaaatcattgatattgtgaaattcctctctatatgtttactcctctagggttactggattctttactttttggcaactacttctgtgttagctaggatgtaacactagtagttgatttataattggtacaatgccaaaaaacgtattgaactttccataggctaaataagtatcattcttgtaactttaacattcagtctcactagaagagttagagacatcatttaggtttttatacttctccaaaatcactgctccacccccaaagtaatcaccatctcatccgtagactttctagcattaacgcaagtctagaaacatgatttggtgtagtgtaagagtattaaaataccacccttatcgactaacatatagttcatattcttgatcttaagatttacttgattgttccaatgttgcttctcctggattactctgatacctactcattactcctactcaaaagcaggtgtctggtctaatgcattgcaaagcatacatgagatctctcactgttgatcctaaggaattcttttcttggcctttatcttttttgaaatagttaaaactgttccttagataaataaaatctatctctaggagccaaaagacttcgtatagatagccattagaaaaatgcttccaacatcttacaaaagtattttgcttgcaccagagtaagtaatcactaggcataccacaagccataggtatagataattttaaacctataatacttggatcggcatatttcgttaagcccataaaatagagttattatcaaaaatttccttacttgtccttgtaatagaaaacttttggttactccatatgaatagttttaaccatagttctcttggctttgcttcatagttccttattctgactatccattacttgtttaaactaacaatggacttttatcacaagtggcttccaagtcatatagcgtgagttccttgacaccctcccactacgacaaggtacnnnnnnnnnnnnnnnaagaacattaatggtattgtcctcgtcagttgtgtcaagttaacagactctgtgagaccatcttatatagaataagatgatacaatgttttggaatcaagaaaaatatatctcctctactttgctactttattttcagactttgtcatattcttagaaaagtagtatttgttgaaaaaaaacattttcttatcttaatgaccataggatggtccacccctcatcactttagaatagctatcaaacatgcaaactttagttaacaattctagcttttcttaatgtcacgattatgacatccatgaatctagtaattgtttacactaagtatacaaccattctatcattctaaaattttcctatcactagggtattccctggaagggctcaggcagatgctaataactaagcatcgaccttttactttcatcaatatgcaatacaaatttctagggaggtaattttggatacaatttgaagttcaacttaatgatctt

SEQ ID NO: 131876 - DNA, 868 bp, Cannabis sativa
ttggaaaaaattaaagatgcgcatttaactgacccggaacagttgaatatctaaaaagaggttttaactggtcaagctaaacattatacagtgtcaaataacagaatattgttgtataagacaagagtttgtgttctaggtgtgtggaacataaaaatgagattctcgaggaacctcacagcagtccatattaactgcgtcctgacagtaccaagatgtcaaagatctaagaccctactattggtggtgtagatttgagaaatatgtggtggaatttgtatcccgatgcttaacttgtcagtagatcaaggctgaacatcaaagacagataggattattgcagtcactgacacttccttagtggaagtgagaggatagcaccatgaattttgtggttgggttacctagaaaaacaagaatgtatgattctatttgggttatggtagatcaatttacaaagtttacacattttctattggtgaaaacaacctttacagtggaccagtacacaaaattttacgtgaaagagatagtgaggttacacgagacaccaagtccattatatcggataaggattcgaagttcacctcgaaattctggcagagtcttcaatatgctatgggtaccaaactaaattttagtacatctttccatccttagattgatggacagtccaaaaggacagttcagatcctggaagacatgttacgagcctgtgtgttggattttaaaggctccgaagcgagtacctgccactgatagagttttcatacaacaatagttatttgagtactatagggatggttccctacgagatgttttatggcaggaagtgtagatctcctattcactgggacgaaacggggga

SEQ ID NO: 131877 - DNA, 539 bp, Cannabis sativa
ttttcaaaaatatttttttttgtcgaacatattatattttatatttttgctcacatactcggatcctagactcggaaccaaacccgaacccgatccagatgggtttgatcatgtcatggtatggtgttaaaatattgatttttttttagtaaaaaaaagatttaaaaatagttttaaaaaaacttataccaaacaccattaaatttttaaaatgacaaaaaattattttttattctcactttgaaaatacatttttaaaaaaactaaaaactgaaaatagaaccaaacagactctaagtctccaaaccaacattaaaaaaaaaaatccaatggccaactagaaataaacaagaaatcaaacgaggattatcattcaagtgtgaaaaaaattaggtttaggactagtttggcacaagtgtgctgtggaaaaagcagctgtagttgtgctgtgagaaaaaacagatgtagctgtgctgtgagaaaaagttactgagtgtttggtaaatatatttttaaaatagctgtaagttgaaaaagtt

SEQ ID NO: 131878 - DNA, 2170 bp, Cannabis sativa
  modified_base (26)..(37): a, c, t, g, unknown or other
ttaatttcattgttttagaaattcannnnnnnnnnnnaatgaaacatacttgttagtaagaaatgttgatttttctaaacatacttattaggatgtacatacttggatcagattggaaggggtagaagcttgtttagacattaaggtaagatcttgaaactttattcttgaattacttacgttttcagtaagaaaggttgatttttctttaaggatttagagctgtatgttttgattgaatttagggtttgttttaggtgttgatatttaggttaattaggttctattaacctaaatttgtagttgtttagtttcgactaaattaaatgaagattaaaagggttttaattcacttgaatatgtaattttgatttaatggttgaattgctgtaaattggtgcttgaaatatgttatatttgtgatagtacactgttctggaaagtttgattaggtatggaggaggtttaggttgaaattgaggaagaaagcacaaggtcttttagtttgccagaaccggtcgaccggttggttctactgcactagaaccggtcgatcggttgccctgcagggggaattctcaggttttcttcaggtttcgttttggcttggggtgatgctttgtatttgttttaggttgtttaagtgttgtaaaacctattttggagttattacaagttaggttcttgtttgttttcagattagggttttattccggagttttggtttaaggtatttattgagtttttgttgtcgtgacataggaccgggattgcccagctttgtgtccactcatgtcggcctacgcactttagctctagactaaggtaaaaaaaaagtgttatgcatcacttagatttaagtgattaacaattgtgtggttgtagtctcgattatgatcgagaacttatataatgtgtgctatgcctcgattatgaccgacggttggaaacagtcattagcgttatgagtaattactcctgaaattgcggataggtttattattatcgttttctttatcgagcaacaatagtgacatatacaactcgtggttgacgagtggtaagggtactttatgaactaccaagattgtgtgtttaccatattgtgtaaatgtttaagcatgttaatatgagattgaataaaatgaatgttatatttattattgatttattcacttttcttgctaagtctctgtgactcacgggtgctaaatggtgcgggtaaagggaaggctaaggttgagcagccatgagtttgaagtcacagcagcaatgtacatatcagtcgtagtgccataacccagtgacagggtgttccatttagattatattttgaaatataaaccaatgttgtaaaagcactgttgatctgttttataaatattttgaaaataggggaacctgtaattaatagtacttatcttttataaaaagaaattttatgtgtttgttttaaattgccaaattttaattaaccacactttttggtataattatataaattagtaaaagagaacttataaaagtacacacttggcgtccctgttggacagggcgctacaacatggtataagagcaacaaaggtttaaatatcctgaagactggtttgatatgtacattggttgcgaagattcgtttgactcatggttcagtatgttttaattattagattatttgttaattacctaattgtacgtctatttgaaataagctagttgttagaaaagtgtgaaaagtttgagatgtttggaaatacttattagtattgtcatttcttagaatgttaccacaggtgtatatgcacctaaggcggtctggtagaggtaaccgcgagcttgatgggctcgaggttagaggtgagggtgagaatccaccaccaccgaattgggaagacttatataccgcgttgcaggacaccatccaacaacaaggtgagcaaattcgagagttgagggagcagggagctcaacctgctccaaatcccaatcctgatcctccggcacctctggtagtgccacaggaagttaagaatcgcttggagccgttgtatgagcggttcaggaagcagaacccgtcagtgttcgagggtggagttgatccactcaaagcggagcaatggatgagtatgataacatccattttcgattttatgcgagttgaagataatga

SEQ ID NO: 131879 - DNA, 558 bp, Cannabis sativa
tgacttcgatggtatacaaaagcttctctctcctttgtaggaaaaattgtagcaaaagtctttataaagttcatttggtttttaatctcaaaaaatagcgacaatagtctctaagcttgagattcttataagtttgttgatcctctttttaataaatttgttaatttcttcctaaaataacgcgtgttgatatcaacttgcaacataagtctttaaaaagttcattttgatataaataagtcctcaatctcaaaaaattgcgacaacatcccaaaactcaagattcatgtgttaattttttattggtccaagttataatttcaattaaaattaatttaaaataaataaataattttaaaaactatttaattaacttttttttttttatcttttctattttttttttatctttattcttctacttctaattcactctcaactcaacattctcaactctggtatgctctattaaaactctccaatttgtattagtaagaggggttactctaaaaaaaatttaagtaatgtttgaaccagagaagctaagataaaaaaaaa

SEQ ID NO: 131880 - DNA, 1307 bp, Cannabis sativa
tgtgagtagatctaagatcttggaaaaataatttccaacatggacatcaagtcgtgattcgaggtagaactgtcaatcaacattagtgacctaaaattgaagatacccttgattagggtcacatcggtttgtcattcgacgcctaggacatgcgtcatccatccagacaagactccaggttgagtgaagtctacgtgcgaccaggaaggtcccgcgcagacttgggagtaaatgttatccagtcttttgcacattgacgtggcgatagaattagatgacacatgtcccatacttctaatacctgggcaaaggaaggtacccctaacagcctgtacaagattcgtcagcatctacaattgtctgttgcccgagcagggttgtaaagaagacatccgaccaggtagaagcgtgtatgcgctgagcaacttacaagagataaaaacttcaaaataatctcgttgcgtccagacacaaaggcgatccctacaatcgtgggattgagtcagaaaaatatgacaacatgttcttgcttcctattctatatattgtaattataaaataattgtaatttcctattttatgcattgtaagcaaaaagaaaaccatccctaatgcattaagtctctataaatagtgacttagcctcacaatgaaagggatcgagagaattgctgcagaaatatactctatagagaaaatagtgatctaagagagttactcagagatcagttgtaagagctttcaagaggaaaaacactttgttccttctcttaagttaatacaatacaaggggagtaggctatcactacactcacggggtcgaacctctttaaaatctggtgttcactttacctttattgtttttgttttcttttaattatattattcaatcgttttattatttgactcattgtcgtcgactaaaagtgaggtcaacaaagattgagtgtagaattatctctaattagaggtcattcttactattttttttattaattaagattacgtgtgtaataattttaaattataaagagttttgttaaaactgtttcaataactaagtgaaaaaaaaattactaaaagatcttcagtacgggtgtgcataaatcggtccaatccaatgagaaccgatcgatcaaattacaaccgaccgccaaacaatggatatctaatcgtgatctgatcggattggatgttatacgtaaaatctagaaattattacatagaaaatataaattgatactttatttacaaaaatacctccataaggtaaagacaacatttataccttttatgtaattttaatt

SEQ ID NO: 131881 - DNA, 522 bp, Cannabis sativa
atgataccgactatattcggaggaactcgccatcttggagattatgagagaaaaaagagtgagagaaccattatctagatgatattttgatttgatgccatctttcccaatagtttgcgttattttcttaagtttgctccgtaaatataatataataggaaatatcaacaagaggtgaatcttcatgtacggaagatatggacaaaagaacgcaaatagcgatacatatgaagtatgtaatattaatcgtacttaaagccaattttagaatcattgacccaatagatggctaataaaaattgatcgaagaataactaattaagtggtaaagccgtcgaggttaagtttatataatggagtcaaaataaagccaaaattttttacttagcgtcgtcagacaatacctgtaagagacagaataagatatatagagataatatatatgtacgtacacataaaataagtaataaaagtacccaaaaacaaattatgtctccaattttatgtggaatagttaattta

SEQ ID NO: 131882 - DNA, 628 bp, Cannabis sativa
  modified_base (602)..(602): a, c, t, g, unknown or other
tttttttacatttttgttataagtgtgtgagtgtgtaatcattgggtggttagaatattcttctagggatttgtgatgaacaactataataatgtcattggctccttaccctctttcactgagttgtatatttttttttttgaaggcaaagaaacttttattagccaataaatttagctaccaaataaggtagcagatcagttgggacatccccaaaactaaaattacgatcaggatgtgagatggaagctcttgcaagattatgagctaccatattagatgaccgcttaacaaaataaattgagacatttttcaactcttgaagtaaacacttacagtctgaaataacaataccaaataacaatgagttggatattaattttcctataaataaagtatttctgactcatagttgaaatgagttgacaattattaaaacctacaagtcataatttctaatttggtatcagaactttaaagctaccctaaacggcgatttaagcaaattctgatgatcacaaaaacaatactcttgttgtaagcacaaactgtaaagactcagtttgaccgaattaaaagaagaaaaatatatatatatatanaataaataaataataataatataata

SEQ ID NO: 131883 - DNA, 958 bp, Cannabis sativa
  modified_base (926)..(932): a, c, t, g, unknown or other
ttgggaattgaaatattgaattgtgtttttctttatatttacttgtttttttggaatatttttatatatgaaaaaaatttacgtccaccctccaattaaattctgggtcggccattgggtgaggtggatatattatgtggcaaaatattgagatgctatatcattaaaaaaaaatgtcattccagaaatttgcatggatactatattgtcgcattgatgtaatttatttttttaataaaaaattgaagttaaaaagttattgtagctaaaaattatgatatatattaaataataatgtgtaagatcataattatagtatatttaaagagtgttatacgttgaagtgtttttagaagtatgtgtgttaaaaatgatataaaaaaaaataaaataaaatattatattatatttttaaatgatagcatccttaaataatgctatcattccatatgctcttaaataacattcagcattttagtactgaaaatgataatcacgttttcttatacacatgcattcataacattttctttctccatctatataattaatttataggggcggctaaattatatagggattggtgacaatactaagcaaaattgtacttggacatattgcacacatcatccatttctcgtattaataaaaattatcatccatcaagacatcaagtcacctatgtaatattattttatatatcataatgtttgataaaatgaaaataaaataaataatcaaagtgtgacaattaattatttgagtttggataagaattcaaatatttatttgatgtgtaaatctatttacaaatttgtaatttataaaattcacacgctatatatatatgttatcaaaagaatttagacaacaccaaaattcatatatatatttagggatatgattttgtcccgtgatgtactttnnnnnnntgtattccgtggtacattagatgggt

SEQ ID NO: 131884 - DNA, 1329 bp, Cannabis sativa
ttttcacctaaaaactcgagagtagtctcctataaatttgacacgtggatctaattctcaaaggatggatgaacggttaaataatgactctccaagagttgaccttgcttgaaccagactcacgagatgatgcggccctaacagagtctagttgcatactatgtcttgcgtagtgtagtataagcaggaccgagaggatttatataagtcacacgtatatcaaaatatatgcggggactaaatattcttctcctacgactagataaaaatcgcttttttacataacgattagtccgaatgataaaaagtgttcgacgactcgataaggactcacatgtcttatgtggtcaacacagatctctaacaaagcgactaagatagaatggatacatcctagtagtaggctcgttagccttttttcgaatatagaacgcacctaaagccagcaagcttgtgtgagaatatgaacaggcagctcgcactctataggctgcatacgttgctgcacttattgttagaatggattaaacagtctttcatttattcttttacgtttattccgatttaatgtgttatttattgtaaaatagttctataatcgattagctatgtaaatttgaaagcacaattgttttgtatacttactttactttacatgctttaatttttacctttatttacatattttttaagatacactcacttttatagatgatgtctcaattatactcctcaggttaatataaattatgtactagttttaagtaaaagattaggttatattaggcaattcactcataaaagtggatgatgaaatataatataatggtatttttaattaatggaaacaaaaaaaaaatattccttaacttatctctaattaaattatatttgggcggattaccaatttaatcaaattccctactcttgcttctagatggaagtgtatcaaccataggatttaaaaaaaaatatatattttttccattaatttaatggttcaaataaaacatattaattttttttgaaaaaaaaaatgaaattttgatgatatatttaaaaaaaaaaatagaatataaaactttcaagtaaaataaatatattaaaattttagtgattgttttccttttactggagggcaagctcatggtgaggaaagtgtgggataacagggaagtctagtggaaaagtttgaacccaaaacataactcttgacagtagcggcatatgtttttaattagggtaaatactattttgaattatgtgttttgcaaaaattattaattagatcatctgttctgttaaatgataaaataaaccttgtatttt

SEQ ID NO: 131885 - DNA, 1286 bp, Cannabis sativa
tcaaaaaatatttaattcgcacaagtacggatttttaatccaacgtattctacgcaagtgcggattttaaattcttcaatccaattcattccgtgcaagtgcgaatatatatttttgaaaatgagcgtccattaattagtaatattagacctcatgatcattacaaaataagtagctgaatagaagaaacattcaagctaccatattgtctatgggtaaaagcccatttagccacgttatgagcggtaaaattataagttcttggaatacaagtaaaaatgcagccatcaaaacatctagagagttccaaataataagaagtgtagttctcaatctcccaacacgaagacaaatgactgaaagcattaatcactattctcaagtcgttctccacgatgatgaattgttacccttgagctttgtcacttcaagagctaaacaacatgcagccgtctcgccacaacaagcatccacaaaatctaatctggacgtattggtcgaaatcaccttaccagaattatttttagcaaccaccgtaatgcaagaacttttcactcccgctttaatatcatacttaagttttagccaatcctcctgaggaggaggctaccactctaactttctaccgcaatgcaagtgtgaatattcacactttacgaattagattgaattcgatggtataaattagattacatgggatacttgaacaacgtccctaccttttaatggaaaaaaaaagttataaggccgactctagcatcaattactattgtactacattttgaagttgtaagactttccaacctacctcacccttttcattttcaatatgtgataaaagtactagaggatttaagaaaaagtgagcatttttttgtcggcttctagtgtaaatgtcattctcactattcacaaaatagtaaatttggtttcatcaatcaaatttgtgattaaatacgctccataatatggtcccccctcatctcatttactttcctatcaattatgtttttgtatttttaataccataatattttttggttggtagctataataacttgctctcagttttgggttggcagctaattaaacaaaattaatttgttcccacattagattaaatactttgttaggatctctctcattcagtgctatttggaataggagattttcattatgttgcttcttcatgtttgttgcaaatttgtttattatattgtaattttaataggagaattattttatatgtgaattttagctgtaatttattagatttttctattagt

SEQ ID NO: 131886 - DNA, 501 bp, Cannabis sativa
aaaattattttcttaaattttataagatacttaattatattaatagtagtatgaaacaaaaaaattgtaagcaactactgtaatatattttagaatttctcttatttaattaaaaaaataataagtcgagcaaaagcaatggtaaaggtaacgtacataccacaattattataatatagctaattagtataaattttttacatttcttaatataataaaaccccgaataaagtatgagtttttgtaaatacttaataaatgctttagacaataaattgattattttaaaataattttaaaattgagtaagcatgtccttaattaggacccaaaacttgtgaaaatatgttgttctcacgtgcgagtacagatgtaacttcacaccgaactcataaccattggattttgacacgtgttcgatcctgatcaaggcatcctcacaattttttattatttcaacattaacaatactctactatatataattacaaatagctaata

SEQ ID NO: 131887 - DNA, 650 bp, Cannabis sativa
  modified_base (197)..(204): a, c, t, g, unknown or other
  modified_base (618)..(624): a, c, t, g, unknown or other
tttattaattatttaatttgtcatatcagataattttaatataatatttcaaataaaaaagataaagttaacttttaatttaaaataagtgaaatatcaaaagatctgatcttataattaaataatatataaatattaacgaaattaacaaatttttgaatctaaccataatttaaaaaataaagtaatcaattttnnnnnnnnacctcaaaatatcaaaattaataacaattgaaaaataaatattattaatttaaaaaatgatatttaagttcaaatatattaaaaaataatattttattttaatttgggatttggaaatagcaaaaatcttaaattgggaaatatcccacaaaaatcagatttttttggggaaggcaacagctaggctgcacgtgcagccccaggaggctgcaaatcagccttccgcgcgtggacgatgaggaggacgccgagaaaccttggtcagctgcaaggggacgcacgtgggtgttgtctgaaggaggggctgcacgtcgagttcagacaggggatgtccgaacacgtgcccgcgcgtagcacccttccttgacctagttccaacccgaaacttccaaaattcataactttctcaatttnnnnnnnaatcgagttccgtaaaaaacaaaatt

SEQ ID NO: 131888 - DNA, 1227 bp, Cannabis sativa
tgcacctttttggtgtgattttgagagtgactctgagacagttatcaagacgctgaagggagccttttccagttgggatattggtaactatgtgcatcaatgtaaatatctttctaatcttttgttaagttgtacttttttcgtttattttaagattttataattttgcgggttataatatggttaagtgggttttgcctaaaatattactggcatggttaagttttcttctacgtcagtcaatctcttatataatgactctgaggtctaattcttgttttcttgcttttaatttaaaggcttatttttcaaaaaacagtaatattttatatttcacactttttatgttcgtgagacatgaaattttaaagatattaataaataattataggaagatgacatgtaatctgttaaaatttactttatatttgtaaatctgatttataaaacttgattaattatttattgaatagtttttcttttcactccctttcattaaaattggttataattagaataaaggtgataacatgttccgtcatttaacattctgaaaaataaataaggggacttatgaagttcctcacctctaattaaggtgtgtgacacttctaataagacaatctaaaatcacctcttacaaccggtttaattaccaaatagtaaaaattattgtgtcaaaaaaatattttttcacttttatttacaaaataaacttttattctatgggatattaatgtaaatatagatttttggctatccatagtgaagtatgatcttttaagataatggaagaatgtatttatgatatttttaaacaaaaattatctagaatgacgtcgcaaaaatttacaaagttcaataataataattgtgttataaaaaaaaaattagtgacttcataaagacaaaaatacaagtaaaatgaattaaaatatgctatcacacattaattacatttacaaaaataaatattaatatttcataataatacatatatataattttacagggtaacactctcttaccgtatcgtatcgaaatggtatagtacgaatcataattacacaacattaataaaatacaccgaataataaattaactattactttaatatctcaattgggtcataataaaaaataaaaaattaattatttagttgtgttaaattaaaaatatatatatatatttatatggaagaggtttcaatggttacatttttattgt

SEQ ID NO: 131889 - DNA, 796 bp, Cannabis sativa
atatgacatttttaaaccgacggaataagttttttgtgacagttttaaaatgccatgaaacatttagcgtcattttttaactgacgcttaaaataaaatagaaagtaattatttagcttcggtttataaatgtcgaaaattatgttttgcgtcatttggaaaacgacgctaataaaaactatttgcgactacggtatatacgtaaattctttaagtgtcacttaaaaacagacatgaatagtaaattttgtagtagtggtcaggtggatgcattcttatctgattgtacctcaaataggaatccataaaacttatgatttcatgcccggctgttgcatctatgagctgaataattcttggaagtagaaaataatcttttagtcacgccttattaaggttggtgaagtcaatacatactcaccatttattgtttggcttggatactagtacaatattagccacccagagcgggtagaaagcttcaataatgaatctgtttatgcggagtctttctacctcttcttttattgcttctacatgttctttgtccaaccatcttcttttctgttggacgggatgaaagtttgtatcgagcaacaaaccttttccaattttgaatgtccaggtcggtacagtaggatcaatctctacttctcctagttcttccactagcccgacatttatatttgtttttccatgtaatgtcccgatttcacaggacgtcacacttgctagtccgtttaaaaccatttaagataaagacagtaaaagacttctttaataaaaataactaagc

SEQ ID NO: 131890 - DNA, 616 bp, Cannabis sativa
aaaattatatttgacccttagacaagattatcatattctaatcttaaaaatataaataatgaacaacacatcatttttttcgttaacatattatatatgtatagactatagtacgtatatttatataaatagattataagatatatacattggtggagttttagggattagatattttaattaattaattaaataatatttataaatctaataaaaaataaaaaaaaaacgaatgaaataaggaggaaatagatacgagtatttaagctgattttagagcgaccctcctatacctctccaactcattatatacgtcccactattcaaccaattttctgtagatgctgctcgctgagattttatcaaacacttggcaaaacaatgattcattccacatctcttagaagtggtcaacccccttagctattaatattgtaaataatccgaaagtgagaaattgttattattaatgtataaagtaatttacggtaaaacttcctcaactattaatttacttgtaaaaactatctaatcttatattttggtgggaaaatcctccaaagtactgtttcgtttacatttttaaggtgacgttcagcctcgttaaatcctaatt

SEQ ID NO: 131891 - DNA, 1117 bp, Cannabis sativa
  modified_base (1087)..(1090): a, c, t, g, unknown or other
tgctatatttcatatactatatatattagtctaacagttggtatcagagcggttttaatttctaccttgattttgtttgagtttcattcatatatatatatatgtatacgggttcatatatatttattttttcgtcttcgtgtatatatattatttgatatctatattcatattatacatatacattttttcatacgtatatatctatatacattctatcgttcatatatattgtatatatttatttacgtttatatatatatatattgtataagttcattcatgttcatatacatatacattgtatatattcattcatcagtataataatttttttttaatatatatgtatatatatttacatatatattgtatgttatatatataaacacaaagttcggtttgattgttttatttttttttcgttttttatttttcggtgtttatttcgaattttatatatattattatattcgtatagtattatagatcgatctaagcatgtgaacatcctttgaaaaacttaaagatggaaaaaaatttcagtcaaaactttttcgaacctgattaactttgtgatattaaagttcatatttttttgtatttttgtgcataaaatctatgtggatctctttattattcgatttagaacatttcagatttgaaaacacgtaattttatcgtcagaattgtcttttccgactgggtttgggtcgggtccgtcggacccacgtgtagaaaaacgggtcaaaatgacccaggttggctgaagaagacgacccaaacgacatgtcgttttttagtttttttggctgcagtcgtttgctcaaacgacatgtcgtttttcccttgtagaaaacgacgtgtcatttttgaggatttgtggctgctgtcgtttgctcaaacgacatgtcgtttttcatcttgtgatcagccctttagtttgaaaaatgacgtgtcgttttgccttttgcaaaaaatgacatcacgtttaggcagtgtaatttcttttttaagaaaaaggaaaaatttcgaatttatttataaatttttatttatttggaatattaattattttcctattctnnnntaatttagtcaataaattgcatttagt

SEQ ID NO: 131892 - DNA, 679 bp, Cannabis sativa
tagtgaaagaaaactgtacactttaggaaaagaaaatccatttcttctggcagcggtgtagtatttgagcagatagtcggggaagatcatcttgaggagttggataaggatgaagacccacatgtcgaagaaattaatgatttcagttcaaaagatgacaattcgaaagaagaagaaaaaaatgaagatattttatgtcatatcaaggagctttggcaagaggatgaaagacttaaaagtggctcagagcctcgtgagcaagctgctgggcctgcaagagtggaattggccgaaccagaagagagagagactttgttgttctctgaaatggatctagttaaatccatggcagaaatgggcatgaatctaatactaaatgagaatgaagagaaacaaaagattcaatgtctcaaaagtggaaggaagagcaatggagaactcaaaaatttgacttttaatataaattatgagaaaggtcagaaaaaagaggagcttccaaaaagatcaatatgagagtcctaacttggaatgatagaggaagtggagacaagatgaagagaaaggcaatcaaggctacaatcagtaaggtgaatttggatttggtggtgttacaagaagtgaagaaggcatccgttgacagaaagttcattggtagtatttggagatctcgttttaaagc

SEQ ID NO: 131893 - DNA, 603 bp, Cannabis sativa
tttttttaaaaaaaaaaagggtaagatggggagttcatgtaatcaatggactaaatttgtacaaattaagggagagtataaattttgatatggggtatattattaagggcaaaaagttaaattccctttggaaatttgacatgcatatatcttattaaatatcaaatatacctgtaactttttatgttaaaaaaaaaatatatatatatacctgtaacaatttatgcttaaaaattatttatggtcttatagtatagtatgccacattaaaatacatagaaatctaatgctctaaaattagttaaattcaaaaataccctccttataccttccctcttactcttggccctctctcactctctctctaactctcactaaactcaaccaataaccacgaccacaaaaccataccgaacaagacccaaaccaaacccacgaccatcgcaccacctccagcgaaacccactccgaagataaaatgtaggacaacaccgaagaggatatcgcgaaactacaaagagaaatcgtgaaacccgaagtcccaaaatctatgagttctcaactcgcttgttttctgcaattttttttctgatttttgacgat

SEQ ID NO: 131894 - DNA, 768 bp, Cannabis sativa
aaaaatatatatattttatatatacatttaaataatctttatatataatacacagaaatatattacacttcaaaaatatacacagataaaaaatatatatatacacatcaaaaatacatatacacataaatagaaaatcatatatatacaaattaataatcatatactatatatataataaataaatctgtacaccattaaataatctatatatatttattcacagagttttgtatataccaatacttaattatataaacagatctatatatacacattatatatataaatttaaaaccaaaaaataatatatttccgtaaaaattttcaactaatatataaaatcaaaaatatatatataaaaaaaaaacttacatcaaatggtccgtattcagaggtggttgtggtgcattgttgtagtcccgcgtggtgcgtcgtggtggtcggggatgaggctgaagggtcggttgggggaagaggaggaataagggtctgagtttgaagagaaaaaggggaaaatggggaagacggtctgatggggtgtatataaaggcattagcgatagactattaatgtcggagagttcgccgctaattgttattaattgtttttttttattttttttatttttttattattattagcgatggggtccgcagctaataccccaccgctaataatattcgaacccaatgggcaggacttttctcgcccaattataagcggtggaccccgccgctaataaaatttttaaaaaaatatttaatt

SEQ ID NO: 131895 - DNA, 782 bp, Cannabis sativa
aatcgcccaaagcataatgtacttcgatcttgctacggatatgtggcaagatcttgctgaaaaggtttaatgaggctgatggtcctagaatctttcaattgcaaacacaattgacccgtttgcatcaaggtgatcagtttgtcacctcctacttcactaaattgaaatccctatgggatgaattaaaggaatttcaacccaacactacatgcacctgtggggctatgaaggcttttcttgaacattataaccaaaaccaggtcctccaatttctcactggtttaaacgagtcatatgcctcggttcgggctcaaatccttctcaatgagcctatccccaacctttctcgtgttttttctatgatcgtttaagaagaacgccaaaggactttaggcaactctaatgcccctccttttgcatcatcagttaagccctcaacctccattaatcccccaaaaaccaagaaacctagaccctcatgttctaactgtggaaaaccaggtcattaagtcgaaaaatgttacttccttcatggttttccacctggttatggggataaaaagaagcaagaaaagggtaagaccactgccaatcaagctactgccagttttaacacaaatgatgcatcaaacaactcagtttcagttgatctttccacccaatgtcagcaactgatccccctactcagtcaacaactacaccagcaggctcctagaacagaccctactgttcctgcagcagcttcaaacatggctgggaaccattcctttaatttttctgat

SEQ ID NO: 131896 - DNA, 598 bp, Cannabis sativa
taaggtagataacatataagatagaggttacaatctcaccaagagtatttttttttttaatttttaagtttatttttgtctcatattttatagaaaagaaaaaaaaaattatatcctctattactttaaatcttaggtttattacgagctattagtataattcaatatcgagttttacatattttaatttaatcaataatatatatatagaaaatgaggcaaaaagtagagtaaacctatttattggtgttatattacttacgttgcatgatgatgcaagcatggtgatgcaataggtttaattatgataaaactaccaatctgtcccattaaattatttgtatagattccttattattcaattgtctaatgccaccacacaaaaatatttggtagacattaaaagaatagggttcacatcacacctcactttatttacaataattaaccatatatcttttcattatttcaaaaagagcattggtaggagacactagtagtgtctaacactttctcgacatattgcattgcgattggttagtgatactccctaaaagctattatattaaattaaatgggacccgatacttagttggac

SEQ ID NO: 131897 - DNA, 792 bp, Cannabis sativa
attcacccaaaaatgaaacatcaggtgttcttaaaaaatgaaagatgagtacgtctattcactacatctttaaactaaaataagagtattgctattgggcaccagtggtgcctagcacccttaagacttgtcgccttatgattggctagtgatactctctaaaagttattatattaaattatatgaaatccgatactaagttacaccaatagcgatattgactcgtaagaggatgtttgacaccactagtgccttttagcatttctcctaaaataatgatataatctccgtcttatttaatgccacgaacaactatgaaactttgttgaagaattaaaccaaaaacagcacatcaaaagaaaaattgtgtcaagcatgataaagctaattctgttactcattagtttgctatttgtaattgtctctgacatgttagttattttctgttttttttttgtttgttctgttctttgctatcagttgtaaaactcttctctataaatacaatatcagctcataagctctgcatcttttgcaagcttagttttctcattgcttgtattgataagatcattcatggtatcagattgccattgacgaaagtctctaatggatcctaccttcaccgaaaacccacctcgcccctttggtcagaaccaagggcaacaacaacaacaacaacatccaaatgcttctctttcacacaactggaatccctttcaaaactccttaaactcatctctcactgttaagttggatcgatccaactttcttgcttggaaatcccaagtt

SEQ ID NO: 131898 - DNA, 605 bp, Cannabis sativa
tatttagatacacataataataatctcacctaataactaataatattttttctttaatttttaattgtatcacttttaaaaaacatagaaaaaaactagcataaaatttagtatacgtgactcgcacgtaatttttgctagtctatatatataggagaagtatgaaatggtggtataaagactgctcagaaatgtgcaagcagactattaggttcatcgtccccattataaaattgcccagtcgaacacactcactactacaaaaacaccctttagagggggtttttaaggcctttcagcgtcggttttagcgaaatttgctaccgacgctgatttgagtgacgctatagggttgaaaacaactgatgctaaatggtaccctatagcgtcggttgctatatagcaactgacgccatagggtacatatggcgtcagtttatagtgaataaccgacgccatagaccccataaccgatgccaaatacccctaacaaccaacgcccaatttgtaataattatttttttcatttaatttaatttaatataatttatttaaataatatatttattaatttatatattatatctaatttaaatttaaattaa

SEQ ID NO: 131899 - DNA, 2694 bp, Cannabis sativa
  modified_base (50)..(67): a, c, t, g, unknown or other
ttcatatcgttttagaagttcatacttaggatgttaaacaacatacttgnnnnnnnnnnnnnnnnnntggtaaaatatttccaacaaaaccctcctgatatatatacaaaaaaaaaactttctccatggctgacaacggagaaaatgctaatactcctcatgaagaaaccactcactgtcctcgaaaagagacaatgggctcctggaggcctcctaactcacgatctacacggaccactcgttccaggaggacccaacctgagggtggcccaagtacacggaccacacgttcaaggaggacccataatccaggaacggggtatgaagaacctaaatgaacactggtggtgcccatcctaggccaactagtgaggatggtgcctacaatcctacaaggtacgtgccactcgtcaagttggaaaattgccaactcagacgtcacttggacgaggcaaaccaacggaacgctgagttggaacgtgagacagtcgcggtcaaggcgacacaggagaataatacacaaaatcaacgtgatcctggagtgagaagaccacgaggcagaccttgcggctcacggaccaagagtttggagacagctcaggagaaccctccaaacgcttaggatgaacaacctagggaaactgagggtccccctgaaaatgaacaaccaaatgatcagctagagccttttcacagaaatgagaatagaaggcaaccagaaaccaaggaacaagaaatccctagtggaaacgagggaaatcctgggacacaatggtcagcaacgaggcatcgcaaacgtccttctcaaaccaacagggaaggggcacgtacaaaccccaacagggggcacacaacaaaccatactcaagggagaaggacggaacgtgaagaggcaagtgtcacctcagggtgtacaagaacccatagttgatcaatgcgatgaggagaaagtactcatggtaataatgatcgagaaagcacagacacaagtaaaagttactcaaggagaaggtccatgagcaggacgagatacgtgagtaggacaaagtccgtgagtaggacgaggtctgctagtaattataacaaattgggtctgtgagaacacttgaaccagaaaaaacctgatcttcgccaacaactcggtctaaagcaagaggatccaatctaattgcgaatagatgagttggaggataatttcaggaggtatcaagtcggggagcaaggaaaataattttgatatgacttagatgaggacctcgagccattccatccaaacatcatgaatactccttttccctagggattcaaaacccccacgtctcgttatacgatgggaccactcatctggtctcgcatttaaataatttcaatactataatgtgagctagcaatgttacaaacaatctacgttgtattttgtttcctacttcactagttggagcagtaagtagctggttcaatatatttactcattattccatcatttcctgggaacaattgtctaaggactttctaggctgcaagggataggcgacccgaagcgtcctcactcaccaacataaagcaatagtctggcgagatgcttaaggcatacttaagttgttttagctcagctactgcgagattaagaaatatagatgatagtacccagcttactacccttcaggcagggatcactactgatctctccaatactagaggcaaactatgggacgacctacaaggttgtctagtaaaaaccatcatcgagttcaatgaaagggcttaggtgtttgttcgaaaggaagaagctcgaaaagagatgaacttgttaaaacctagctcaggaagcaaacccaacactgtttcaacaagtattgtctcgactgaagctgataacccaggggcctctggttcaaagaggaaagacggctctaaggggtcagctcaagaccaaaagaaacaaaagaagcacgacaagtacgtgccgatttacaccgtttacaccaagcttaatgaaactcgagaaatcatctatctcgcacatgagcacaaggttgcatttagtaaacctgaggccatgaggcacgcgatgcatagagatccaactagatactgcaagtatcacaaagacatcaggcatacgacagacgagtgtcatcagttgaaggatgagatagagtgtctcatcgcacgaggccacttcaagcaataagtgaaaagatagggcaatggacataaccagcccaatccgcccaacaacccaggcaaccaaagattacaacctcctcctgttaaagaagaggatatcacggttatctcgggagaacacatattgcaggagagagcaataatgccctaaagaggtacgtgaaggaagtgaaaaacaagcagtcggcctttgatccagaaccttccaagaaagtaaggactgaagaacctcctattatattgtagaggaagataaaaaagacgtgagatactttaacatctacccattggtaatcaccatccaactcgctaacaagaggataaaaagggtgctagtggacaattgaagtttagtgaacatcctttacagggaaacactgaagaagatggggcttgaaaaatctaaattaagatcttgcatggtaaacctttgcaggtttactagtgacagtgtcgccagtcaaggaataatcgagctcccattaactttaggcgaggcacctt

SEQ ID NO: 131900 - DNA, 559 bp, Cannabis sativa
cacttctactctgctggcccctatagccttagccaatctcaaccctgctattaaggcttcatactcagcctcgttgttggaggccgagaacgtgaaccgtagggcagcctgaagtcgtaacccgtcaagtgagatcattgttattccagccccagacccatttttattggacgttatgtcaacatatactttccatgtgggcatatcttgagttggcatactggcactggcctccgtcttgttgcattctacaataaagtctactaatgcatggcctttaatcgagatgcgtgggatgtactgtatgtcaaattggcttaactccatggcccacttgaggagcctccctgaggccttgggcttctgtaaaacttgtcaaagcgggtgatttgtaaataccttgatggagtgagcctggaagaaaggtctgagcttcctggatgcaatcaagagacagaaagctagtttttttgatcaggggataccaaatttaagctcctatcatgcgtttgctgatgtaatatactgggtgttgaactttttcttcctcccagaccag

SEQ ID NO: 131901 - DNA, 633 bp, Cannabis sativa
tgtaattatgaaacttttgaaaatgtaaaattgaaaaataaaacttgtataaaagtttaaataacccagcattgacaaaaaagtaaaaaaatgacaaaaaatgacaccaagcgtaaaaatctcttttctaaaaagttataggatggatcgagagagtgccacacaatttttaaatataaatttatcatgtataacatgtacaacaatggcagtaatgataataaaaaaaaaactattaccctaaaaaaggaaattggcaaaagtaaatgagtcatacttgttatataaatgtaacttatttatattcattctataataatgacttgctccttcgtacgtagtaaaatgtataattggatgagttctttaaaccacttggaatgggaataggttttattattagggttacgattgaggaattttattgtatttattttaaataataacagactaagaataaatattaaaagtaaattttaattactttctttaatattaccaaaattaagtaactaattttagtatcaaatatcaattcaaatattaatgaatttgttttatttttattttattattttattatatgtaaataatattttattattttattaaatataaataaaaagtcaccca

SEQ ID NO: 131902 - DNA, 651 bp, Cannabis sativa
actggatgagcaatctcgaaacctgagaagctttggccatctcacgatatttaaggcagttggggccaaaatagcaacttccacgtcttctgctactcgctcgcatattgttactatggaatagtaagatgccttacaaagatatgtgtaggaggtacaacaggaaactcagtattcgatacttgaagtgattccaatattagtttgaatatctctatcggattatgcttggtttcaactttcctgctatggatccactttagccattccccactcctcttggcgctagatcgtcatcacatcgttctcagactcgaaacagacaacgatgacatttcccatttttaggatcatagatattttataattaacttttaaaattgactttttttccaaatttcttttaatattttactttagcacttttatttagttactaacttcactacaattcaaacatatttttatagtagttttattacaacaaaaatagttttttctgatatttttaaacagtcgtttaaagtatttctgtcggtttctataatcgtcgcctatacaaccgtcacaaaatggagaaaataggcaatggttaaaaactgtcgctaatgtggacttcccgacggtttagaatgtaaaaaaaaaaaaaaa

SEQ ID NO: 131903 - DNA, 764 bp, Cannabis sativa
tcatgctttgaacctttacatgttttattttagtctctaacaaagctctaaaactaattttattcaacatacaaacaacaagaacaaccttttgcttttctttcttattcatgcctctaacagtccaccctattttattatttacttccatcaagaatttgtgtggaattaggggccattacctcttcatcaatcgcggcctgtaacgcagcatagccattgttggaattagtttctctcccatcctcctttgcctctttgaaatctgtttgccttattgctttcctcttaggagtgatccactcgcttccatcatcatcatgatcttttccccccatccttgtcatttttcccacatcaggagcctcttgattaattgtcacacttttaggtttttcatctgtcactacagcagcttcccctgtgtctcgaacaaccttttcttgcaccttctttgcccctttatcagcagctggtttcttcttccaaacaaatttcttatccttgttacagttcgccacaatatgccctaaattatcacatgctgaacacttcaatggcagccattcatactctaccccttgttccaccaattgtttcttttcattgatgtaagagattgtttttggagggtcattcgaaatctctatatcaacaaggacacgggaaaatttgatcatagatctttcttgagttaccttatctttcattataggtttgccaatggtgctaactaaagcactcaaattcttttttccccaata

SEQ ID NO: 131904 - DNA, 584 bp, Cannabis sativa
cctgccgtacaacggattccaatccgtgttttgcatatatgggcacaaaatcggctgcctaagtaattatttgttttataatgtatccatgtaaatgtttatagtcataatttagtggtttcacatttattttcataaaaaggaggtcctaagttcgaatctcgcgtccccaatgtaaaaaaaatgtatctatgtaaattttcaaaaaaaaaaaaaaaaaccctaactaattaatttgtagtagtgatgtaaatatgggctgagcttatcaacacagcacgagcacgacttgatacaaaaaataaatcctaactagtcaatttgtagtagtgatgtactacacatattttggtgtagagtgattcagagattgttatcaagaacttaaaagggatgactctatttggggattgagaactatgtgcgtcattgcaagctcctctctacttttatgactaattgtaatttttcttgtattgctaaaaactataactacgcggcccataatgtagccaaatgggcgtttgccaataatgttacgggtatggtagagatatctactatacctgttaatatattttgta

SEQ ID NO: 131905 - DNA, 672 bp, Cannabis sativa
tctctctctctctctctctattgagtgtggtattttctctcatctcagattacagtttctcatgagttgagtaaacactatagcaaaaaaaattgttcatcatactaaatatataagcctactcttatacttagtgttgagactgatctgaaaaatgtggtgtgaactcttcaacaagtccattacttctttgggtttgatgatcgaatttatatacaaaaagaaacaaggatcccctaataggcatcaagaggtaaaattatttttcatgtatttatatttaatttatgctaattgttttgagatcttggagtttatggtttatataaaactcaacataattttattaatcataattctaatttatgctttcacggcgattctgatatgaaccctaaaaaccaacgagccacgatcccataggctgcaactgtgagtcatgagtctcaaactcacgtacgtgctagggccatgcaaggccatgcatgatagccaaagacgaaggaagctaggagttgtttaggtccctttgtttatcaagtagccaccatagggacagccgtcccgtcccgtggctcaagctgttggattttgtgccctaaataaaacccatttcaatataagtagatttactaattaataaagatcagaaatcattctatgttgcatggt

SEQ ID NO: 131906 - DNA, 760 bp, Cannabis sativa
tcatgaaaaaaattccaataaaaaactatctcagatactaaaacaaaagaaaagtataataacgaaccactttcaaaagtatattgtaaaagtatcccaaaaaatatatatacataacatacttgacaaagctaaaagttgttgttagtcctaataaacaaagagacaaatagaaagagaaagaccattttcttttccttatgaaaagccatattttttctattttttttcctcttcgtactttaacgtattttatattattctaacattgttggctttgaaatgtgtgtaatgggtatggtaataagatcataataagaggcttatatattgttattgtttaaattattctaaacaactagaataattattaaccattttaaggtgttcatgcccattgtgttgtaagtgattagttgtctttcatattattaatcaaatagaaatgttatgttactttttgtgatgtttataacattttaaagtatgcatggtaaatacactaatacaaactcttaatattatttaaaataataaataaatgtggagatattaattatcactaattgtgaagcaaatatctttctcaaattattactattattatagatagactattgcacctaaatatgtttaatttgtgtatttaattaaaataaaatatttttttagggtaaatattattttggattttgtaccaatcagatcttttattttgttaaatgataaaatagagtctgtattttttaaaattgtacaa

SEQ ID NO: 131907 - DNA, 649 bp, Cannabis sativa
agaaacaacatcaaaatcagcaattaaagtcatacaatcataaaaaatatggacataaggagaaaccatatgtttaggcttttgcaaattactaatgacttttaaacaatccgactcaactacaacacttgaaaaaaaaatgcatactataatgaaaatcaatagaaataaacaattggaataaactagtagccaaatccaaccccccaacaaacttcgatcccaaacgttgcccctgaacaaaagctcccaccaccaaattaaaaactaccaccccaagttgcacccatctctgaccgttaaccattagaggccatttgaatgcctccaagacccctttctcatatttgcaatccaatccccacgaaaagaccttgacaagaaccagatccatagatccgagaaagatgaagttaggcacccaaccgagcattgaaaaacaacgaataaaacctgacctaaaccacctccataagccacccccaagaactcagacgattcccgactagagccacacccaaaaccagaagatgccaacaagtaggggtgagcaaaaaaatccaagaaaccgaccaaaccgagtaaaccgaccgtctgaacaccgaaaaaaccaaaaaccgaaaaaactgccttcggttaaaactgcctt

SEQ ID NO: 131908 - DNA, 1981 bp, Cannabis sativa
gttgaagactcgagagaagggtattccaaagtagctttttatactcgatgacttcgcgaatgtttttgttaatgatattctgatttcttccaactgaaaggaggtatttgagagttatttttgaatggagttgtaatgttttgggatcctaagcttcatgctaaatacaggaaatgcaaattttgccgaccctaagtaggtttcttagagcatgagatgaatatagatagaatcttgataaattcggcaatgattaaagcagtttagagttgactttcacccaagtctacaactggattagaggttttcgagaattaacaagatgctacggaatatttgttgagggatgtttacactcttagtggaattaagtcaaaagaattgaacagaggttaactattgtaccagtgttaacattgtgggtcagtgaggaaaaatttgtgatttagtgtgacacctctaaacaaggattagattatattttgatacagtccaagagagttattgcctatgcttctaaacgattaaagaagtgtgagtaatagtattccagttatgatattgaattgatatcagtggcttccgcctaaaaagtttggctcttttacctgtttagaaaaagtgggaagtgtacacgaatcataagagcctcaaatactttatcatttggaaagatttaattaggagacagcgacgatggttagagctgattgaaaattataacgattctctaccactctggaaagtaaattaatagtgaatactttaaactgaagaggtctaggacaagtttgtaaaatgaaaaaatttcaccaaaggttggtggaaatgtaaccagaacagggattgagttcgtggttggagaacttgttaatattacattgtagtttaatctattggaaagaattaaagtggcccagcaaagtgactctaaactttagaagtacaaggaaaggcttggaactagaatgacaaaggactttttgatttcatttgaaggacttttacgatataaaggcaaggttgctatattagtcagataaggatgctgaatagtaggttctaaatgagtttcatattacatcatactctttatactcggaagtagccatagacttcttggttggattaccaagaacagtagggctctgtgattctgtctgggtaattaaggatagatatataaggtcagtatagtttctttttcagagcggaatatgttttgtgacggattagtgtgctaatctatttatcaagggaatagttcaaccttgtgatgctccaaaagtaatatcccgaattgagatttaaagtttgcatctaagtgctgagagagtctatgataagcatgtgtgatagattttgagagttcctgaaataagcatcattttctgaatgaattttcatataataacagttattagaatactgttaatgtggcactgatgcagtttaaagattcaagtttgtatattgcttataatggatggaagagctatgctgatccaaagtgtagaaatattaaattccaagttaggaattttatcttcttcatgtggttccaatgaggggaattcagaaattgggaagaaaggaaagtcaagtcctaggttaatcggtccgtttgagtttctaaaaagggtgggtcgggtagcttattagcttgtcatactctctactttatctggagtttccaacatgtacttcaatgttttcagaagtatggggtagaaacgatccatatacggagttacgagaatattgaatttcaaatagacttgtcataggagtaacaatcgatacagattttttgaccagaaaagagaaagtgttgtggaataaagactatattggtagttataatgctgtgaaagaacaacaagattgaaaggcaatttgggagttaaaatcgtagttgcgggagctctatcccgagttgtttgaataaatttcgaggatgaaatttctataaggaggggat

SEQ ID NO: 131909 - DNA, 568 bp, Cannabis sativa
agcgatataggttgtctctaaagtccccagttttaaaaaaacggtttctttaggggcgacaataatttgtcacccttaataactttactattagaggcaacattttgtcgcctcaaaattatcgcccctaaaaattagatttgttgtagtaaaaattaatatcatatgtatgctcgtatagtcttcaatactattatttatttactaataaataaataaatatggaaaaaaatattaaaagaaaggagcaaataaataggacaaaaaatgtagaaaagatttaaaaaaaaatagtttaaaggagaaaatttagtaaaaaaaaaaatgagagagatttattaataaaaaggaaaaaaaaaatatgaggcctaaaaatggtaaaaatattaataattggtacaaacaaaacaaaatacacaactccaaacacaacagaaaaaaaactataaattactaagaaccttatttagtttgagaaaatataaagagcatactatattaaaaccttacctaaacggtgcacaacaagtaaaaaaataataaatattatatttttatttattatttt

SEQ ID NO: 131910 - DNA, 1295 bp, Cannabis sativa
atgatatttacattgatattctatgaagtctcagattttgtatggcaaatttgatgtataacttcaataccagaaactgtaatctttgtagatgtacctcaggtgtgtgaatatactcatttgataccactcatgagaaaaatcagaagtaaggcatgttattattaatctatggatgttaagagcatctccaatggtaatattttggagaatacttgatgaggtggaaaacttaagtgtcaaaatatagagatgtcataccattggagataaaagaattgatgccacacattgacattgatgttatgtttttttttatatacaataaaaaattaaaggtacaaaaaaattatatatataataatgtgtgagatcataattattgtatttttaaaaggtattatactattagagtgtttttagaaataaaggtgccatgtagaagaaaagtaaaataaaataatatatatttggataatacgtagatatcttcaaagaattctaccattgaagatgctctaataaattgatctttctaaaaaaaaaacatgtatatttaaactaaatgtatttctgcagccagatgtaccacaaccatcagatttctacctagaaattacattatccaatgttatttaatatatggatctctaaatttattaattaattaagtaaatgtcttcttttaaaaaaaagtttaataaaatggtaaaaataataaaaaagttaaaaagaatcataaaaatacttttattacaccaattttttttttttttttaaaaaaaattatataataataagattaagttatataaatttgcttttttaaaaattatataaatttgttagtattcacattaatatgtgaaattatattaaaagggttgtgatgcaaaattttactaaattttaaaattgagtaaatgtctttttttttcttcggtaaaatggctaaatataataaattatatagatttttgaaattttgtcaaatctaatctctcttggaagatcatcgacattcttaatcatctcatgtcagtattttccccacatcagttttgtgtcttcattactctgacttggtgcatttggactggatgtaacaaggaaaaatatggtaccccaattaggaatgctcccgcaattttgagttaggcacttcaatattataatagttggtttaaggttcaaaaatcacataagtatacagctaagttttctctcccccacgtgtttttctttgggttacacctccagctggttcgttaaagttaaatgtggatgctgctatt

SEQ ID NO: 131911 - DNA, 673 bp, Cannabis sativa
ctgattgggctaccgatcccgatgatcgacgctcaacatctggttttgctatcttttttggctgcaacattgttgcttggcaatgtaaaaagcaacacaccgtatccaggagcagcactgaagctgagtttcgtagcctcgcccaaactgtgacagaaattagctggcttcattctctctttacagagttgcacatacatctgcctcggcctcccatcatatggtgtgataatctcagcaccgtgttgcttactgccaatccagttcttcatgcttgcaccaagcacatcgaactggatctctactttgttcgagaaaagattatgcagcatttggttcaagtcaagcatgtccctgcaattgaccaaatagctgatggcctcaccaaaccaatctctagccaattgttctcctctttcaggtacaaacttacaattggtgacccatccaattctaagtttgagggggcgtattaggacagtctgtcctttctgttatttcggttagttgattaggattggtttctgttatttgtctgtaacagattgtaacagattggttatattgtttgttaagcttttgttcatctgattcagtgtataaatatctcttgtaacaaactgcttaatcaatgtaataagaggcttcttttctctcctctttctttcttctc

SEQ ID NO: 131912 - DNA, 1008 bp, Cannabis sativa
tctctctctctctctcttccctttcttctctcactcaccaaataaatcttctccttcttcttcattcatgcgacgccaactgaaggccagagttcaagccatctctagatttctcgctcataagatctctcttctccttcttcttcatttgtgcgacgcccactgaaaactatagctcaggccatcactgaaatttctcgctaacaagatctctcttcctctttttcttcgctcgtgcgacgctcactaaagacctgaagctcaagccatcaccggagttaatggttcatatctctctcagagaggagagaagtgaacaaagttgagttcgaagctctgaatcgctatttctctcgctctctccatcatatctctctctctcgcatctctatgatcatcatagttctgttttttttttcacgtggttagatcttgggttatattttgtatattttttaaatctttaatatgtcattgatttttttggtcagatttgcttaatgagatgaatatttttgcttaaaatattatactgcaagattgaatgatgtgctgtcattttttttattttggtattgtttaaatcaaatcatgagcaaaatattctttatttttattattattggaatgttatttgatttcatgaagatataataaaaaaaaaactcaacaacctaatgttaaacaaaaaaaaagttaataattataattttaatataaataatatataaattatgtaatattagattttaaaaaaaaaacaagtttatagcattttaaattttataattttagaatttactaaaacctatttttaataattatttttttattttttgaaaataacccttttagtgtttgcttaaaatagacacttatacttattagtctcgattttaaactaatattaaaagaaaaaatatatatgtatattttaagtgtccgttttaaaacgacacaaaaactcatttgtctgagtttacactactacaaaattgggctttagag

SEQ ID NO: 131913 - DNA, 762 bp, Cannabis sativa
aatttaaataattattattttttttaatgttaatttgaattgtattttatataggtatttatttttgaaaaataattttacttatgaattttgctattaatttttcatattaatagttaactataataaaattaatgacttaagtacttttactatcaatttattaatttaaatatatagttctactataattatctttattaattttttcaaagataatttttattaatcaaaccgagccaattatatacatccacatgaagattctttttcaaaatagaaacttacaactcttatatttttaagaataatgttatctatactagacaacttttttccttatacaagatttaagtatactttttagttctctttaatgctactatctatacaatccatttatacacttttcttatttacacccaaagttctgtttagccaaatgccattaattcaacatgctaacatattttaatgaacacaatatattttttatgacacattttaatttacatatatatattttcatctttaaattaaattatatgtgttttttaaacatattttttttttcaataactaaaaaaaaattaaaattaacttaaagctaaaaaaaaataagttatacatacacacgcaacctctttcgcatttttttgatttcgcatgtaaaaaaacaaaatactgtaatttttatttgaatttaatttttttttttaaagatgtttgactttaatcttattgtaaaaaaaaaaaaaaaaa

SEQ ID NO: 131914 - DNA, 500 bp, Cannabis sativa
agagagagagagagagaaggcttgagagaatgttaattctagggttttctattctcttttcaaataaatgagtaaatacctactttttaactaaaatactccaattaatggctgaaaacaataaaggacaaaagagtctaatcacttactctttttttttttaaaataaaaatcaaagatttaaaaataaaataaaataaaagtttataggggcattttggtcaagaaataaaccgactaaatccaacactatcaaatctaacgatgatgctccaaaaattataagatgctttaacacccaaaacatgactctctaaaggcccaacgtcgctttccacagcttccagacacaaacacagaagttgaataatttacataaaatagcataataaacatatgtgaacttaaatatacttccacaatatgcattttataaatattaattaaatctcatgcataaaccctaattatttaataacccaaaatattaatcttaggcg

SEQ ID NO: 131915 - DNA, 688 bp, Cannabis sativa
attgtaattttaaaaatgtgcaaatttattctgccgacacttatgcattgctgatgacttaaagcttttcgcactacattttttttttttttttaagctttccgcactaggcttctactagttagaagtacctcaaactattacttatattgctattattatataatttatattattatatagagcattgatattaggcattggtactacttagtattttttgacatgtcgcattgtgattgattatcgatacttattaaaatttattatattaaattatataggacccgatatttagttaaaccaatagcgatattgacacatagaaaggtacattttaacatttctctattatatgtatttagaaatgtatagtagactctttaaaatattattttggtaaattctttatttattttgtttttcagaaaagttttttagtttttttttatgattgtgtacgttgtagctatttaggattatttgtatattttttaaaaatttcgaataatttataataggtttaaatagttatttattgtgcttaaactaaaaaaaaaaatagttgtgcgtgcaacaaaatgtgtaaattttattttcagaattgtaaactacttaaaatttttttaaaatttacaagttgttctaaataactataacaaatacgatcatgaaaaaaaaagattaa

SEQ ID NO: 131916 - DNA, 793 bp, Cannabis sativa
tatgtggaataaaaatatttttaagtttggcgaccttggaggctcgatcgggagccaaaaatatcataacaggtttaattgataaaattgatgagaatatagtgataagtggatagtgtaggtattggaataattagtagtatgtggaatttgatttagcgccccaaaaataaagattttttaatggctaagaaataataagataattattaataataaattttttattaatattatattattattataactattataactattattatattattattattattataatattattttttataaaacttatcagtacgataagtttatatatattaaatttttaaaacacaacatacagaatgaactcttttctattgtatgaacgaaacccttacctttccttgtctattttattattattattttcaacccacaacctagcgattcaagcttttgtagtagtaggatagaaaattattgaaaaaggagagcttaaggtaagctttatttttgttttaagttagaaacgattggttttgtataagggtttcaggaattagaatagttatgaaggttttgaccttataggattattattgggtagtcatgggactaattctgatattttcttgctgaaatcgaggttatttttggttagagattgagtttggaaccttttaaaacttaatttcgaacactagtggcatttgccaattaagggctcgattttagtttctattacgtaagttgttaggctatttttagccttagtttcgggtcacattttatagtt

SEQ ID NO: 131917 - DNA, 683 bp, Cannabis sativa
  modified_base (613)..(614): a, c, t, g, unknown or other
gggccagtcatcagtccatgaagttgctagagtgatgtactcgtgtataagagtcattcattatgtgggtgtaagagcccaatagaggcttgaagcggaacgttacaacactatatttaatttgtcatttagagagttttaaatatgagtatattacttaaatgatagattaaatttgttgaatatgattaaaagttaatataacaaataagttaattctcaatatttatactttaatttctatccagtaatgttgattcttaaataataataataataataataataataatataagtacttggtgtgtttacttacacgtaattagaataattaagaatcgaattggcatgaattagattcactctcatttggattaatgaatcggaataaaaaaaattaagttttttacctgcaataattgtaatcgaaataagcaattcaccctcaatcggatcaatgaatcaaatcaaaaaaatatttacttaagttgtgtaacgtccccgcttcaagcctctattaggtctttacacccacaaaatgaatggttgcttcacgactgactctacagaccaacacaagtgttttcagcatgctttgtcctcactcgcanncttcctgggaaaacttcccagaaggtcacccatactgaaattactccaggtcaagtacacttaactgtg

SEQ ID NO: 131918 - DNA, 946 bp, Cannabis sativa
cttgagaagttggataatggtattgaaccagatttggaatataggcctacaatgaaaggtgccccactcccgatttcgaattatgatctctatagaactgacttttccaagggcaatgcttggccattacttacccgattggcaaaaacctcacttatttcggccataccaaacttaaaaaatcgtgaaagtcctcatccaacacacttacttatgggtgaatcttcacaatcaaggattgttccctctgccatttcaactggtgttaacagatctgtgcagtcgggttttgatattgctacatcgactggtgttcgtattcctgcagttatcaccactactatgtctactggtgttgccatgaatattaacttcacaccagcaactttggtccctaacacggttgcacctactgcccaacaaactcgcaatgtgctgcaattttctgcagcaatgtcccaggcgcaatcaaagccaatctccaacgataatgtggttgacttaacacgggtttttactcctctggctgctatggacgtgtcatcaaatttttttgcagcatatcctccaccaaacacttctgtccaggcctcctctacattcagtcagttgagtactccaataccaactcagctttacaacaacccaaactcgattatcactgcttctgctgaaccacaaatgggaaaggaaaatctatctccaaatagacttacgaagagaacttctgagagcttaagtctgaggcaaactcttaagagatgcaggggtaaccaagcactattcatttcctctttgtcaggggataatgaatcacactttgatgtttccattgatgacatggattctactggtgacaatgacaattctacggagtctgaatctcagctccgcaagcagccatgaaaatctcaagttggaactctcgtggtttggggaacccgag

SEQ ID NO: 131919 - DNA, 1097 bp, Cannabis sativa
tagtataaattaaaatttaatatagtattatataaaaatatgatacataatccaactcaatataatacaatataatacaatacgacctaatacgacgctccaaacgagcccttagagacttgaaaaatagatggaagaaaatgaacatacaaatctatttataaatattttaaattttagattagttatagatattttgggttttacttttcttgtgactagtttaattttttttattataaaaacaaatttaaacgtaaaacactattaatataataaataataatttagaattttttttttaagtatatttggtactcctaaatttagaggcttgccacgtaattttttataaggaagaatattttatttggttagaaaaaataaaaaaaaaatgtagaaaataaatagagaagtttgaatgattttagattaattcaatgattcaaatttggttttgaatttaaagatttaggttatgaaatatgtgtgatgatcaatgatcatccaatcttaaataattaaataatagggatatttggggcataaatatcataaatttttggttttatagacttaaatatcacatgtttattttcgacggattaaataccttaagttatatttccgttacttccgtcactacttttctattaaatcctattaaacatagagtatttgcggcataaatacttgttttaaatttcatacacttatataccacatcttttttcttctggcagattaaatacttaacgttacatttacattaccttcatcactacaagtctcttaaatcctattataaggaattttttcaatattatacctaaaatttattttatttacgaaaattccttcaacaaatttatttgcacaaatacgaagaaacaaggaaatatataactataaatagtattttttatatctctaaaaaaatagaatttttttatatttttattaattaaataaatattatttaattatttttttaactttatgattatttaataactttttttattgaataatacttagcaaaaaatatattttttatattttatttacagtttaacaaattttaaaattatttaata

SEQ ID NO: 131920 - DNA, 733 bp, Cannabis sativa
  modified_base (679)..(684): a, c, t, g, unknown or other
ttgcatagaaattggtaataggaagacaatcatattaggccataatcaatagatacaattgaaatcgaagccctaacatttattcactgttaattttctttatttgcttcctacttttgctatttttcttattttaattttctctcttaattttatttagccaaatagaagtaagaatttaattttaaagtacttaactacaatcctcgtgggatcgacctcactctttgtgagtctattacttgttaacgatacgtatacttgcgtgttgaaaataccacaacaaaagttcttaaatatatctatcaattttaataatttaagagtttttagtggcctaaaaaattcagagacatgtcaaagttcgaggacaaaaattctaattatatatgatggtgataattcacgtaaaagccacctttattatatagttgctaggcaatattgatgttttataaattcctttataggcctaagtatagttacattaggacataaaattacaagcttgcctgaaggccaaaaccaatacaaactctcaaattgtttttcagttacaacaaactaacataaatggattacaagaaggagaaggaaatacaactcaacaactaaactccctaactaccgcaactacttctacataggggtgttcatccaatccaatccgcactttttnnnnnnaacaacatccaatccgcactaagtgcggatttcatattttggatccaat

SEQ ID NO: 131921 - DNA, 2533 bp, Cannabis sativa
ctgagtctgattcaggcgaggttcatactcaagaggtctctcactaacatctcagctttcctcaaggagagtgagtacacgtgtcattttcataggtgtccggtcttgattttctaggtgagaaaatctcacttaacaagtataattcaaatgtttaaaactatccaagggtagtttgatcatttcaaaccccgaaaaattctcgacacttccaatgcctaacaatgatgccccactattaataaaattttataccatacaaaacttgactctctaatggcccaacatcgcttttcactgctatcaaacacaatcacagataacgagaaattcacatatagcataattaatagatgttaaaattaattaaatctccacaattatgcaaatcataattaataattaaatctcatagttaaaccctaattatttaataatccaatatattaaacttaggcggtctttacactcatattcctcctgggtgacagtgggttgcccagacggacctaccttggtacttgccctctttgcccccgtcctaagtctaagcaattaccccatccctctcaagtagcgtgaccggtcacccagcacctgtgccataaaaggcatgtctatagaaaattgggtggggtctacatgtaatgtcgcgcgacattggttagcactggttgagttttacgaatctcaactattttagcctagaaaaaatttcaacaaactgttagagttgaatagaaattaaaatgtcgaaggagtttattaaagctataaaactacttacatgcacttattgtgtgtgttcatcacaccatttgttgtccttacactataactttacaaaagtgtccacaacactgagaagttctcctgtctgggaatcaacctatttttatacaatataaaaaattagaaaaattttattcaaaaaatatgaatttttagacaaattaatatgttgaaaatatcatacctcgctcacgatgtggccagctatggtcttagacccccatcaaccttgaatcttcatctgtccttagttttcacattttgtttagctcttgcctgtaatttaaagtaaatttattgttagcaaaatgtgccaaaaattgtaagttaatggatactcaattttataatttttaatttatacttactattttgggactttccagtatgcgataacctctatccacacctctggtgtcaccatatatggacgtgattttctagtctttttcacctctccatatttcagaatattctccttccatgccttttttgtatctgctctctagtcacgtagcccttttgacattaatttaacaacataattctcgaacataggatcgttagttgaaaactaaaacttgttctgacaaaaaataaacattgaagtcatattttttttttattttcttatataatattttttgtttgatctattgcaataaaaatttgaatgttactgctattatgtcctgaatagtatgaatgatcgtatcctcaacatcctcgaactcaaacttgttcaaataaatggtattgcgaacaagaaacttgatataattgttaaacttgttgccatagtcgtctattggggcatgggtcctcatatgaaatctaaatttcaattttgacccagagactgcgtggccagttcttgtggatattttcccccttgtactttcccctaactccctttttcttattggtgcttgcacatgcatcagccattctacacatacaagctacgaataattaattaatcaacctctattaacaaaagaaacatgtatttgatttaattaacggtgggtttaaatattacaatacttaaaagtatacaagtcatcataattattatcatcatcatcattaacaattacattattttcaatatcactatcactagtgtcttcatcatcactataaacaatgaaaccatctaaatcttgacggttaggctactcacggtccctgctgatcactttaattgggtcaacatcatcatagacatatttgacattgtccagttgtgaaagttgaacgaccaacaagattctcaaagagtttctttcttgtatagtcgtggtctcattatcatcctcatctggtaaatcccaaacattgcaggggattgacaagcttccagtcaactctattctttaggtcgagaatgtaatatatcaaatttttctttagatgcaagtatgaattgttcattttggtaccattcacgggcgacgcagacactagtaaaaaaactatcactttctgtcttgttaccgtttgtgtcccaccacttgcacctaaaactaataacactgcaatccttcaagtaagttaactcgtacacatgtttgagtacgccataaaattttttaccaccttttctaggaaccaaaataccactatttttggtgttatgatttgttgggattttatgccctaaataaaacccatttcaaatacaatctgatttgttatcaataaaagattataagtcatttatgtttacatatagttt

SEQ ID NO: 131922 - DNA, 966 bp, Cannabis sativa
tcgagaagttgttcctgcaattttcgggaaggatgattcaggatctagatcaacaaaaactttgtcatttttaattgggacttcttcactaccagaagagaaaaatcatattctacaaaaaaatttttgtcagatgaaaaggatttagttttggaatcgaattcctcggaaaatacttccaagggatcttcttcttcatcattatgaggaggccaaaagaggattaagcttgagctttttagcagcaagaataggttaatcatgacaccttttggttcgagcttcttgttaaaagctttctagaaacaggtccgagatgaaggacctttttgagttgatgttgtagaagcaacacccgatgcaacaggtggtgactgagtaccatgagaaggggaggcctcagtataaggagaagaagactttgaaccatacgtagaagtcttgggaaatttggtgttccttgtaaatttttgagagggtttttggtgctctcttgctggaagtaggagttgaatatgatactttctttggttcacgccgaggaggctatgaatcaactagtatcgaagtagttgcagcagcaagaggcgattgtgaaggaacaagtgaggcatttgaaggagcaatctcagatccagtcatcttccttgggtgcctaagttctttgtattagccatggatttctgaaagagaaaattcaaacaaagagagaggataacaagaagaagagggatcgggtagaaggagagagaatgagagaataaatgaaacatgaattggtataaataaagatatgaaggaagagaaaaaatgaaaccaatttgaaaaattttaaaagcaaactaaaaaaactgcctttttcaatttgatcccgcaactggatgctatcacaccatactgaaggtagcccttttctatggtagtgcatcctcatcatagttgctaattacaatattccagcttact

SEQ ID NO: 131923 - DNA, 952 bp, Cannabis sativa
tttactttataaaaaatggaaaaaatatttctatttctttttcttttccttttcataaaataaattttgcactaattttttttcttctttttttttttttgcttcgtattttcttttaaaaaaaattcgtatttttttgtttttttttttacatcttaagttgttttcaaatttctctttaatcaaatatgtgtatatatatacatgttaattcaattagtttttttttttccctactcatgaaaagaatatttttttacttaaaaaaataaaataaaagtaaatcgatttaacatatactattgcctagacataattatattattatttctttgtcttttattgttttttaatatatatatgtaataaatatgaaataaaataatttaaagaatgatacaatataaaaataaaaactaatgtaaaatttgttgaaaaaagagttagtattttttatttttaataacataaaatattacatatttattataaaaaaaattaaaagaaagatgcagaatagtaaatattatctagtaaaaaatatatgagaaattaataaaatagtcaaaaaaaagaatgaacaagtgaatgagataacaaattttaattattaatgaaaagtaaaaagagtataattgtaactatatttaaacatactttaaaaagttacatatgtcactcaattaaaaagaaagtgtaaaagagagtgcaaaaaagaatttccctaacacaactcaagtttgaaaggcaaaatttttatttaacccttttcaaaaattattttattgaattatgtgcggtataatatgaagaaaaatacaagatacaagtattattaagcaattttggggctcgtttggtttgctgtataagggttttattgtattaaataataaataacactatgtttgaattaagcaatgtattgtattaattattacgaccaaatttt

SEQ ID NO: 131924 - DNA, 799 bp, Cannabis sativa
ttgaggatggggtgttcatgtgctagaaagccaacaagtttaaacctcgtctccccttccttcccgatcctgaggccgttttggctcagttttgggaaaagaacaagaaactggagctatcctggccgagcgcaagggctcccgtcttcctccacgagctgattgattaaacctctcttcttttcattttatgattcgcttattcccctaccccgtttaaagacaatattatttttatatttattatttgtattttaggtaaggggagactattatagcctgaccacaggccttttgttatttacattttggacaacttatattataagtttatatttattttactttctttatgtctggcctatttctgcacatattttatgccttagtaccccctaagtggcgtaaaaaagaactttttggatcacttagcttaaatttatgtgggataatcacatatattttgtctggcacagggtaacttacaaaataaagaagaatttaaatactgaactcctaactattgatagtacttgcagagatggttagcattccaggctctaggtactatgtatccgttcattctcttgagtttataagtcccgaagtctatttcatcatcaatttcgtacgagccttcccaatttggcccaagtacccccactcctggctcttgggaggccgggaagacccttcttcggactagattgccaatggcaaatttcttattttttactttggaattaaagtattttgccactttcttttggtatgctgccatgcgtatttgagattcctc

SEQ ID NO: 131925 - DNA, 765 bp, Cannabis sativa
aggctaaaagagccatggattggattatttttagctcgaaatttttgtttgtaggtttttagccaaggattgggtttaggttttgtttgtggtttaggattttgatttgtttgtgatattggatttagggtggtggtttagatattgtttttgtgattgtggctatgatgattttttattttttttttatttttgattttaaaattcaagcaattaatgtttgtaacggtggtggtagttatggtggtacctggagatctgattttgggtagaagaaagaagaaaagagaagaatgaggaagaggaatgagtattggcgatgcttatagagaataagagaaaaagaaaaagaaaagaaaaaataataaaaacgaatttgtttttaatttttttgtaatttattttgccgtcaaaaaattagtttatgtggttaaatgttataaaatctaaagttgagatagttttaccgctaatatctcatataaaaaacatagtttaaaatctaataatccaacctacgtaataaaacttattcaatatgcattgattttttttttagtgtttaggaatatgagaattaatattttaaatctaagatttatctctttgatctcatgtatgtagatgcacaataagaataaaatcaattaatatatattttaaataaaatatattaaatatataaaattataattaggggaaattttaatgggtcaacaagaggctgatggtgttagaaacataagaaaggcccaataaacaaat

SEQ ID NO: 131926 - DNA, 500 bp, Cannabis sativa
aaaatcataccaaatgattgcctcattaaaaattttctcacgtgttcctttttattagaccaatagtcattcaaaccccaataacaaaactcttgctaccgcttgatatgtttgctaccaaatattattgttggaccgttgctatagcaactgaatataacttttccaccgcaaacttagttctttgcccaatttgaaatttcttcacttgcacaaccttcttcacttgaccttctacacaggaaaaaaaaacaatttcttaaattcaccatgacatttatttaaactaattatatatattttttctttttttttcttctttttctttcttgaggtgcctttatggaaaaaaaaattctcttgtttttcttttcattttctttttggcaaccccgaattataagtttcaaacatccttcaaggagatagaagtcttttctcgattgacctcttctccccaataatgtttcaatcgttgtccattgaccttgaattctctt

SEQ ID NO: 131927 - DNA, 680 bp, Cannabis sativa
ctccaattggtgacagtggtctcctgttaaggtttcaaatgtcgaatgaagttttggggtcctaggacctccaaaatattattcaccatcgaaaaaaagttaaaacacaccctaagggatccgagaacatgcatggtcgagcactgccattacgtcatggcagtgctcgcaattggcacaagataacataaactgtcttcagtaaaacgggcagaactctcttaatttttatccaaatgacctagtttaacttgcattggaaatatatttttaacacggatctaagtttctcttatagtaatagtcaaattctgaagttatcgagtccaaaattggcttacaagccagactagtacattttactactcgggaattgagtagtgtagttaagtgaggagtgttgacacaacccatgtagcattatatgtgaagactgacatcccgaaacacatgttttcagcactcatcactattatcatgaagtccaagccgagaggtgacatcctttgtcaccccatttcaaattggtgaatctccaattgaaaataactattttctcaatgtttgtgggattttagcctataaacaaggagattttcatagatatttattttcttgtaattttttattcattaaaaaagatgatatacgggatttgttagtgagacaccccgacatgt

SEQ ID NO: 131928 - DNA, 2047 bp, Cannabis sativa
  modified_base (1979)..(1994): a, c, t, g, unknown or other
gacttcaggatctttaggatggaagttcagactttattaactaaaatccaactaactatctttaagtatttctgtagcatgaagacatggaaaaacctattttaaggctcgagagctaaaattacacgaacttgcaacacaaaagccaacttagcacctagggtttcacctggtgcgcaagttgacatattcaactaggatttcagttttggggaccgtctaagtgcaaagaggtcaaaacatatattgagacatcaactagatataccacggacatatttgaggcatcaaaattagaatcagagcaagttcatttttgagcatctggagcctcgagcacctagtgccccagttgacaatctatcaatttgggcaccttccaagtatcagatcggtgatccaacttttgcatcttctttgtcttcatcaaaaacaagaaaaaggtcctttcaaacaagaaacaacacttattgggtgcaaaaaaatggggcccaccgcccaggttgatacattaggttggccctgcgccttgacatttttcaacctatgccattttaaatggagtttctcaagaacacttctgaccatcttttttcgtttttaaaaattattgagattcaactatattcgagaaccaaacaaaatttttgaaggagcgaaattgggacccagcacctagattaacacatggagctaggcccagcgcctaggttgacatattgtctacctgggttgtttccgatcaagttcaccgaacagtgttcatgaaattttttctttcatcataaataatgaagattcaagcaaactcgaggaaaaaatacaaactcgagcccctagaaaaggggcccagcgcccaggttgacaatcaacctaggacactgccttcaattactcaaatgtcaaatttgatatgaccattgaatctagaatggtcaaaaatgaggtaggagacctcatactcaaatttagaagccttggaagtatcaaagacaagatctcgagagctcgacagtaagtacctagtgtccaggttaacaaaaggcttggtgcgttgggttctgcttattggattcttatgttgttttaaccgtctatctagtttttcacaataacaaagatctatgaagtcagagaagtcaaattcacaactttgcatttcttatttttggctcactcgaaaatgaagagttttgagtctctcatttccacaagacaagaacatctccaagaattgatgaccagcttcgacagaacacggaatctgactaagtgatgccaaaatatcacttaggcatcttaaagtgtaccccttggatatctttacacttacacatcatccaggttgacctcgtatgtcaacctggacactgggatgccaacttgggcattgggtcatgtattgccttcagtaaaaaaatcataactcactcaattttaatccaactgatgcagttaaacttcattgagggttaaaatagtaattttagtctatactcattgtagaatgtctataaaggatcatgattaatttgattgaaataataaataatttattgcatatctatattatgtatatagagtattttataaaataagaagtgtaattctgagtctagaataaaatagagataaacttttatttgttaattatgacaatttgtaagtctatttaataaatatatttaaactatattttatttgataattattcataattattaaatttaaattagtttgatattataaatcttaatttttatataataattatttaatcgaccaacatttataattatagagattactttatatatcattttttaacttttttttttaatttactatttgggttgctccggtagtttttatgtgggttgctatgtaaattttggttacaatttaagtttctctgttagttgctaaatgagttttatatgtgcatttttgtaaaaatcaatatatcaatatatatatannnnnnnnnnnnnnnntatatataaaggaaagcattaaggagtataggtggcaatctatatgatctttt

SEQ ID NO: 131929 - DNA, 736 bp, Cannabis sativa
  modified_base (678)..(683): a, c, t, g, unknown or other
aaacaaaggaatagaatgaaaattattttctttccattctattccattttattacctccgaccaaatgccatatgtgtttttttatgctctaatttatatacacgtggaagttataattctatttttaacataataatgctcattgtaatttgaaaatggtcttgaacattttgaaaatatcgttaagtaacattttttttaaatcacaaaagtgaaagtaatttttgtgttttgattttaaaaataaaaatgtgtttcgttttttttttcttttgttttatttaagtgaagacttagaaactgaggtgagagaaagtgagtcgaggttcgacatcaggtccagggttgggtcaggggcttgtggttcgggcttgcgttggagttggggtctaggtttaggttcagatcgaggttggggtctggggttcgagtcgagagctgagagtaagggcctgctgactaggctgtggtttgggttcggggtaggggtaggggtagggatcgcaacgtaacgacttcaaaattataattcaaaattccatttcgaccacacaattttccatctagactgttttagatattgtttataatactaactatctaaattttaaatgatgtgcaagatgtatgctctaaaccatccaaaacaaagatataggtgccgtttggtaacactnnnnnnttttaattttttaatcacaaaatggaagtaaaatttttgtttttaaaaaacaa

SEQ ID NO: 131930 - DNA, 1259 bp, Cannabis sativa
attcccattccattgcaaaactcagagaagatagaatttttgaattcttgcccatgatcactccttagcctaaatacttttccaactttggagtctttctcagtttgtagtctcaatattagagcaggaagaatccaaaggtctcagatttctctctaaggaactcaacccaggtaaaccgagaatagccatccaccaagaccgttacatatctctttccactgagactttcatttttcattggccccatcaagtccacatgcattagttccaacatacgttagaagtctgttgataagagggtgagatgccctatgttgtttcccaagctgacatggtccacaaattctatccttggataccttcattttaggaattccccttactgcttgaagcttcatcgatctttataggtctctataattcaagtgccccagcctgtagtgccacaagtcaggtttatctaggaaagtccgattgcacaagatggtattgcatactgcataacactgatctacaatttggtttcctgttaagacaacacacccattagatgaaactaagcactgtgttttagaaaaacttacagagaagttgttgacacacagttgaccaatgctgatgaggttggctttgagcccttttacatacaggacatctattaactgagccactccattcaggtttacatcaacaatctgccctttctttccatcaccaaatgtcacggccccctccttttcctctttgtaattaactagaaattttttatttccaatcatgtggcgagaacatccactgtcaaaataccactgcccctcaacaaaggcagagagagacaacttagccaccaatccaacatttggacttgggttagattttattttgcattctcaatgaggtttgcgcccttgaggtttgttttgttgaggaaaactattcgatcgattaatcattgctttcaagtagttctgcagtttatagcacttggggcgaatgtgccctttcttgttgcaaaaatgacatgttggaatgaattttcattttgtggtagatttcctacatcaatccttcttccttcaaactttagtttagtgggtccagatggaacttgtctcttctcagagggatctgattcgctaattgtggttgggatgtttggtaacccatcttccttttgtcagatcaacagtttaggagagtgaattctcaacagacagatcattgccctgtttatacaacatcttataacctaagga

SEQ ID NO: 131931 - DNA, 654 bp, Cannabis sativa
agttacttaatttttttagcgacggtccccgaaaaaaatcgtttttaggaccgtcgcgaattctgatatttgtagtagtgtaaacataactaacaaataacagaatgcaaaaaattattgtaccaaactaattttcttttaatagctcccctcaaactaagtatcatgttgagaaacaacacttaatttgcttaaaataggtacttgatgttcagctgggacatgttgcattcgaatatctctttgttgatgactttgtccctaacaaaatagaggatttatctctatatgttttgtccgagcatgaggtgtaatgtgatgggtagcacctaaatatggataccaactagtatatgttacaacttcaagagaggcatatgcatttggcagcaagattggcacttgcaaggaaattttggaaagtttaaaggatttgccaaacctaaaaaaacacttatgaaccgtatgcccaagcttgtgacaaagctgacattgagtcttttgtccccaagctgaatattcgctacgaacttgagcatttcctcctctattggcatgtgcttgtcctcttcctgcattcttgagttttttagctgagttttgaatttcccaatgttggctcgattcaaagctgtgtagtactcactaagagtt

SEQ ID NO: 131932 - DNA, 636 bp, Cannabis sativa
tataatatatttttagtatatacatatatttgtgattataatagaatcttaacaactcgtaacacttaaaatttatcctaatattttaagttaatattaaaatctaagtgtgtaaatagatatccaattacaaaactgcttcaatccaattagtaattaaattggattggatttgattttaaggtttaataattagattagattggatgatgatttttcgaatccacttactaattagattagatcagatggagaaaaaaatattggattggatcggatgatcactcctaaccttatattgaattgtatctttcttttaaatgtaatatatgtgacacttggagagatagaattgaaggagaagataagaattttatctacattttgtaatatatatgacacttggagagagaattggagaaggagattacaattttatatatctacaccgaattgagaacttgacgcaagtacagtcgcttaaccactcatttttttttgtttctttctcttaataaggataaataatcttggaaaattctacaatttatccccttaaaatagatatattgatgcacccctatttattttagcatccgaaataattttttcgtcaaattttttcttatagtcatg

SEQ ID NO: 131933 - DNA, 532 bp, Cannabis sativa
tctgggtattttgggtacaatacacataaaaagaggtatgtttcaaataaatataaaattagaggcaaatttggttaattgattaataaaagaggcatttttcaacttaccccaaatatttatttatttccaatttatgttcacaactcaaacactttggcccaacagctcacaactgagcacaactcaaaggatccggcccaattaaagacaaacactcatgaagcccaaatatgaaaggtaaataaaaggcccctctcttcttaaaccaaaacccagatctgatcatacacgcctagctagggtttcatttttattcgtttaattgatttcagtgatcttatttcatgcttattatatcgaaattgaaatataaatttacattataccaaccattttctttatttcaaaattaaattaggatatatattaattaagtgtctatttaatattattataaagaaactatcatgcccaagggccttggagcttcgaaaaattgaacgaagcatcaaaggagaacaagaattca

SEQ ID NO: 131934 - DNA, 925 bp, Cannabis sativa
ttttttttttttttggaaatcagctattgtttgttatgtgttaggagttaaccttccattagaagtgcttgaaggttttgctagaagaattcggaaggaaaaagttgatagggtagggctaatttcgtatggaattttcatcataagattcacttctgttgaagagaggaatgctgtcttgaatgggggctatactttcttcaataagaggccggtcattatgaaagcctggaatcctgatactaattttcgaaaggaggatataaggaaggtgcctatttggattcagcaagagaatttggaattgaagtactggggtcagaatacactttttaaactggttgggcagattggtgaaccgattctggttgatgaaataactaagcagaggcagaagttaactttcccaagggtccttcttgaagtgctcatgaatcaagaactgccagaatcaatagagtttgaggatgaatatggaggaatggaaaaagtgggaattaagtatgagtggaagcatacaatttgtaacaactgtaagggtttgggacacaaaactgtggactgcaggaagacacaaggaacccagaaatagcagcagtgggttgtcaaagagcaaagagagaattcaaagggagaaaaaccagcatcaactgatggatttcagttagtcagtaaaggctggaaattaaaagagaaagtattggaaggaggcactagcactaggaattcctttactgttctgcaagaagaaacttcaacagaggaggtacaagaattacaaggtgtagatcgagataagaaaggaggagggggagagcctcctctttcaaatggatagaatactatcttggaatgttcgaggagccaacaaccaacaaaaacaaagtttgatcaagcaattgattcatactcaaaatgttggtct

SEQ ID NO: 131935 - DNA, 1248 bp, Cannabis sativa
ggggggggggggagttcggacgcacctgagaaggctaagactagatctgagcaagtcaagggcagatctgaacaagttagggcccctgccccaactctggcgttgtgcacggagactaggagagggaaagacatgcttaaccactatgtgactcggtcgctcccggaagtgaacgaacagttgacaagggcagacaatgagttgtccttggagctagtcttgggaggagttttaaacaaaatttctcgagtaagttccctctatcacttttctttcattattctctggataattcagattttaatacattctccgtacagactggtgtgaagatggcttatgcatatttttgggccaagttggccactgtcaagaaccttgccacttctaacacaatgcgaaaggaagtggacttggccaagaaagacgctgaagatgcacgaacctaactcgaggtcgtgacgacggaacttggagaggcaaacaagaaactccttgctactgagactagggtcgccaagttgactaaggagttgcaggatatgccatcgaccgcacagcttgaggcagataatgtttctttgcctcaggaaatcgctagtctctaagacaagagagagagtctctagactctttttcgcaggttggaggatgaggtcaaggacaagaagaccagggaggaggaactcgaagcagaggttaagagccaaaaatccgaggtggagaagctcaggaagaaagcggatgccttagagacaactggtctcgagatttttatgacttctagaaggccaatcccaaagcagattttgaataccttggcgcttcctaggacatgtttctcgactactgcatggctcaggcaacaaatgagaaccttaaggtgaccacttctacttctcctaccgaacagaatgttgaggctctttctgcccagaccgatgatcctgcggcccctttagaccaagttgatccttaccaagagcctgagactcctgctgtttaattgccttctctttaccatcatttttttttgtatatgtctgtttggccagtaggccttcttttgagacaaagtgaccagccaagcggtctttaaacttggaatatttttcattttttgaacaactggctgaccaagcagcctttagtcccgagtttaaatgctttgttatccttaatgaattttgttcattgtttatgatcgttgtgcaactgtgttcattttgttcttttttgtgcttgtta

SEQ ID NO: 131936 - DNA, 1535 bp, Cannabis sativa
tgatcatgcaactaggctttgtgtttttcctcccatagtgcctaattatgtcttgacaagtcataatattatgccctataaaccttcccctaataaagcctccttggttcatagagactaaattagggagaatgtttttgattctagagcacaaaagcttggttgcaattttataaataacattgtaacaagcaattggcctaaaatctttgatagtgttagggcatttcattttaggcactaatgtcaaaacagtagcatttatctcttttaagagtttacctgtttccaaaaaggatgtcacagcctcaaaaaaatcctctcctactaactcccagttgtcctggaaaaaaaaacttgagaagccatcaggactaggtgctttgtttccaggtatatcaaataaggcatgttttacctcctctttggtgaacttattcatcaacatatcaacttgttgaggggataggaaaggacatcttttcacaatcttatctagtattgtcttcctatcattcatctgaaagcccaaaagttctttgtaatactccacaaatgcagaggaaacaagattgggttctgtaactcttatgccatcttgttgttctatggagaacacttgattttgccttaatctttgcttaatgcttgcatgaaaaagagttgtattagaattaccattctgaattcagctagctttagccttttgttgcaagaaggaagtgtaatctttctgcacttgtatcagcttagctctagcattcaattcctcatctatcactgtggcatttaggggcatctgctgcaaacaaatttgagttgcttcttattcctcctgggcctttactactgtagagtgcatgttacaaaaaccagctctgtttatctctttgagtataggtttgagtgccttcagcttgcacactacctgatacatcttagaaccatttatatgcttcttccaaacttcattaaccttcttctcatagtcagaatgactttcccacattctaaaatacttgaaaggcttctttccacttgtccatcttggatacaaagaaagtatgccaggggaatgattaaataagccttcattcagaaagtcttcggcattttgatatgatcaagccaggcttgattagccatgaccctatcaatttttgaaaagattatgtctttaccctgctgcttgtttgaccaagtgaaaaaattctcagtagctttcacatcctccagttggtagctatttacacaattagcaaagtctgagtcaggatgaaatttgaccttgtgaccaactctctcttccttggttagaatatcattaaaatcatctatcaaaagctaattatctttagtagccaactctcttaaatccaaagctactataggtgtgatctattatagagacttttaaatggttttaaaaagtgtaaaaatttggaaaaaaaaaaatacgattttgagtttcaattggtttatctttatatattaaaagtgcctatctaacgacaattcttggtttaacagaatat

SEQ ID NO: 131937 - DNA, 1194 bp, Cannabis sativa
ataaaaaaactcaaaattgtgtttcctcagcattgttattaagcactaatggtgcttaattagcacgcaccatttatgtttcacaaataataagcattttttaaataattagcattttgattgcataataatagttaaattaaaataaataaaaaaattaatatctaattacactaatagtaactataataaaaattacactaatagttagacatctcgtgatattactaactactggcattacaaaaaatttgactttgcactggtaaaagtctaatagttgtgttagcggcgaaactttttatcgacacatttcatcatcagcgaagattatcgataatatttggtcagtgaaactacttttactaacgcaataaaccagtgtgatattggttctagtgtaatgtcactatggtactctttaacatttcacttattataattatttaattaataatcttacaattgaaagtaattaatttgatgacttatgcaagttgtccggttcttgttgttcaatttttagggtaattgaactcattgagttacttcatcaaaattaatttcattaatcatgcttatacttagtgatggaagcaagaagaaagtttcatccctctttttctttttattaactttcaaaagtaattctttacataaagttgatcatcatcatcatgatcatagtgggcaactattatttatttatttatttttataattataataataataataaaaagctaacataactttaggtaatcttcatgcacaccttaaaaaacaaaaaaaaaaaaaaactccttaagcaacaattagataaatataaatttatgagtatatttctaaaatgtattgtaaacattgttcaataattatcaaacacattttatgcaaaaacaaaacatatacatattcatgtgatatcatttgtcatgtacatattacaataaacatatatatagaaatttagaatgtctttgtataattatataaatatactattataagctatattacaaaatgcatttgtgagaaaaataaacctttttttaaacattaattagaatagtcattatataaatttctttatttgaatccaaattgggaacttacaaaaatattggaatttgggttaatttttataaaaatactgtcacacgaaaatctttacaaaaatactgtgtttttata

SEQ ID NO: 131938 - DNA, 618 bp, Cannabis sativa
cttaatttcttttttcatcttttgggcccctgaatgttaacttttgcctccgcccctggcaagaacaattggtgttgtactaggtgtatagtcacaaattgctcaggttgatgagtattaagaaaaccagaacaacaagggaattctgactcattgaaggtaacatgtcttaagatatatatacgcctttgaggactgaggcatttatatcccttgtgaacctcactgtacctgaggttcacacactttagagtatgatactaaaacttgtgactctgatagggatgaatgcatggaaaacatgacacatcgaacacttttaagaacttgtaattagggactcgagaaaacaaaatttcaaaaggtgatttgccaagcaaaactggtgtaggtaggaaatttatcaagtaaacagccatttggtaagcatcagaccagtacttaagtggcatactggcccgagctaacaatgtgagccctgttttgacaatatgtctatacttatgctcggctcttccattttattctgagatttgaggacagctatgatggaaaaatatacactagggctgagcattggtcggtttggtcggttttttccctcataaaaatccaact

SEQ ID NO: 131939 - DNA, 854 bp, Cannabis sativa
aaaggaggtcgggccgacctggcccaattatttcgggtcgggcctgacctgctaagatgaagaacgtggccgaatcgagctgggtctgccctagctccggccgattgacattcctattaaagataaaaaagatatatattgtggttgcatacaatgtatttaaattacatcatattatatgagccaagaagataaaccttgactagaactttagaatattgaggctatgctgtcgaagcttcagtcaaggctttcttagttgttagatccaatccaatagttggctgtgttgtgagagtcagcaattagtttaattatttagtagcttttatggtggtctggtggttaggctgttgtgttaggaagttggattctttctaaagattatgtcacaccaacaaacaacaattcagtacttaatttttactttctaaatttatcactagagccagatctcactgttttaggttattaattaatcataataataaagtaaaagcaatcttaggaagaaaaaaaatcataaagaaaaagagaaagattgattgaacttatttcagatcctatatttcacatatgttatgttggatgtattcacaattagaacaactctggaccactgtagattgattttagaccattttagattttagcacaatgttacacgtataggtatatttaattatatcacactaaaaaaaagaaaattaattttttaatcacaacataaattttttgttataataaaaagttgacttttaattataataaaaagtcaattgtaactaaaacatacaagttgtcattaatttagtttaaattgtgactaaaaacacatttagttacaataaatt

SEQ ID NO: 131940 - DNA, 806 bp, Cannabis sativa
cctagtccatttaattaataaaaacttaaatgggcttcctatatccatctaagcccaaaattaaatatataggctcacacaagtcaaataatttttcatcttatttttttcatcttacaatataatctttgtactttttaatttccatattatatatattaaaaaaaaatactcctactcctaatccctaactacttataaacttattataaattctaaaaaaatcataattcgtactctaaagtttaaaaaacaaagtccatacatattacctagttcaatgtccaaacaaaacaaaatccataccatagtctatactagattagggcaaaattagtaatcgagtttcaagttttgagttatcaaaatttttaaacttaaacctggctcggtatcgaaccgggttacaccagaattcaactctattttttaaactcatcttttttggggtttttagattttaggccgggtgtggatttaacgcgtgggtgagttttcgagtgtaaatgtgacacctcatttaaaactacacaaagtctgccaaattagttaaccaattgagtacaataataaattattcagaataaataaatcaatatatatagggtaaatagtggcataagtacttaaaattttatatttgtaagcggcataaacccaatgtttatttttagcagcataagtacccaatgtttgcacaactgtaatttttttataattttgtcagtacagactctgatattgtcttaaacaaggcacatataaggcctaaattttttattattgggtgtagatagaaatatata

SEQ ID NO: 131941 - DNA, 635 bp, Cannabis sativa
  modified_base (136)..(138): a, c, t, g, unknown or other
gtgggtagatcaaaaacatttattgaatcaataatcagggccggctctatgcataggcgggttagatatatgcctagagcctactcattttgggaactcatgtaaaaaaatacttttaaaaaatatacatattttnnnaataattttttaaaataccatttatttttatagtaacaggcaaaaaaaaaaaaaaattacctatggcctatatttcaatttagggtcgaggctatcaaaaatggttcatacctcttgaagatttaatctcaaaatttaaatgaaaaatgtttactaattgtaattgtaaagtttttaatctaaaattaaatacttaatcttcattaatatgagcataaaatttgttgttaatcgcaagttgtgtctagttatttttaacgaaatattcagaatatatttttcaattgcttgtagcgtgtacgtaagtctaattatcttttttttttccttgaagagatagtggggcgccagatgacgaacttttttttttcttcattttttttaagaaattacactcactatgggattttaaaagttgttattatacatacaacacttctaagtttgaccaatttatatggtatttttttgtgtttaggtctttttatggtatttga

SEQ ID NO: 131942 - DNA, 1273 bp, Cannabis sativa
tggtaaaataattccaacacaatgaatttcagtataacacatcttgaaagaaccctaaggatcaatatttctaacagaaatagaccgctctgatacaaaatgtaaacccaaatttttgtctaacttatctttttcatattcgtattgattttattgatttatgcttgaatgtgaaaaataaatcaaagattcaacactagaaatttacaaacattacctgccctagaaactcattctaggccccgaaccaggataataactttcactatattcaaagatgtatcttacaaataccaactataaacactattgtaaacaatacactcatttacaaaatacagtgaatctatacccaaaccaaccaagacccttgattggagacacaagatccccttgtgcgaatgatgagttctcttcaacacttttcttcaatctgaactcccttcagatctggtgatgaagatgatactgaaatcccttcagtttgaacccaacatcatcaagctctcatctgcatctttggattaataccaccaagctcaagattcggacctgccatggaatataaagacaaaataagaagaaaaaaacgtaatccctaatgtccgataaaaaaaaaagtttgtcaacataataccaaaaaattgtatttataccctgctaaaccatgaattccgaaataggcgttgttaccatctgaataattaaaagtcaaaatatctttacaggcataaagtaacactaacaatataaactccagacaaaacacctcaaataccagacgtaagtggacataatttgtcactcataaaatactagttcttacactctcttttaacaaaaaaaaaaaaaaagagtaaaaaataattaagtttagttcaaatatatgacaaatattcttatggaaattcaatgtaaccacgtttagttcaaatatatataacaaaagttattgtgaaaattgaatgtaaccactattataaagtcaccccatatggatattctatatataaaattattgcaaaaatcttaatactctctcatcattcagtgcacttttgttataatgttcatactaagggagccttctagtttttattagaaattttcacacaaaaaatacaaaataccaattttattacatatatacaacaacacaggtcacatcaacattttcaccttctctcttaattttattacacatataccacttgcacatcaaatccatgcacctatcaacatcaatcaactctcaatcacttccttttttttt

SEQ ID NO: 131943 - DNA, 762 bp, Cannabis sativa
aaaatcttaaaaattataaaaatatttaaaatttcacacaatcgtatttttataatttttttgttgtttttatgtatttttgaaataattcaaaaattagattcttattaaaaatatatgatatattttttaaaattacaaaaaaaaaatatacatttttaaaagagaaaaaaagggcttcttgaatgaataggtccaaggcatgagcctaatccatcttagtccgaaactgactttaatgagtggttagagcttacagaaaaataatcattataagcttcgaccactcatctactcatttagtgagaaataattcagaatatccacatttttgtttggaataaaatataaataagatgttcatgatcaaattcaaaatcttgtatcacaataaattaagcaaagtcaaaaaaaccttttgtagtagtactacatctttttagttgtatgattggaacttgtatatattattacatgccaaaagtgtgtgaatgtgtcccaattgttactctaacaagaagagtatatgtaaaacccaaatctatcatgataggtatggtttttttggcaggtttacaaaaatatgattttttttttaaaaaaaaaaattatttatggaaaaacaaaattagaaaattatggaaaaaatagtttagagtaacaagatattttataatgttttttttctcatatttattaacattctttttaaatttttcccataaaatatttttttttaggaattaccccatatactatttt

SEQ ID NO: 131944 - DNA, 713 bp, Cannabis sativa
ctaattactttctttccatatttaggaagatatgatcttcgaatgagatccacgggagttggttcctgatattgtgggatttagtaataaatgaataggagactggacgttcagatgctcgctaaatacttctcctggatgctctgtctaatttcttttggacacataccatctagatggatatcttgcgtggacaagtcttcgacttatcatgcgaaatggcaaactttccttctgggcccgatttaatatcttatttgggccttcttgtgggcctaaaataattaaattgtactcattattagaattccacgtgtctctatccagaaacacagataaaatttatccccaagcttccaaaactttattgcttgcgaggttgcgctcttccttgaggatggataggtgcaggttaaaggtaggacctttaggaattccatactaatcttgttttgtggttgacaaagctctccatattttgaaataaaataacacgcgacattttgtcatcagtttgtggggataactttcacaaatgggcgcgtgtggtgaggcttgcttgaatggcagtttgttacatcagcgcgggtcttgagaagaatgccatcattcgatttttttttattcaaaacattacatattccctcattgatatcgtttctaatgtattcagcgtcgtcttcctcaaggttacgatcaatttccataacttg

SEQ ID NO: 131945 - DNA, 1128 bp, Cannabis sativa
agtagcagtagtagcagtagcagtagcagtagcagtaggagtagcagtagcagtagcagtagtagtagtagtagtagcagtagtaggagtagcatagcagtagcatagcagtagcagtagcagtagcagtaggagtagcagtagcagtagcagtagcagcagcaatggtagcagtagcagtagcagtagcagtagtaggagtaagagtaggagtaggagtagtagtagtagtagtagtagtagtagtaggagtagcagtagcagtagtagtagcagtaggagtagcaagagcagtagcagtagtagtagcagtagcagtaaatgacaagaagattgtttacgtggttttgaagttaactcttcatagtccacgagtccatcttatccatggattaataaattgtatagagtatgcaataaattgtttttcaaaatgaatgatagatataattctctttctttctcaaattggtcgtcccttattccttggattctttcccaatttataggagtctaagacaatagttattttcttggaatcttatcacctgtaaccatccgtgaaatgtggacaatcctcacgtctcatatttacacacatggggtaatttcaagtaacttctcataacctcaatttttaactttatctaaaggcagagttatgctaactatgattcattattctcgcaatgtaacaatcctcctctagataatttatcataaatatcactatctaagtatacatcaagtaatacttcttgtgttcttctattaatattgagtaaggcatacacgagacgcttatcacagtatttcagatttcatgacttaacttagtaatgctgcctaagggttagccttactaaaatacatcacttcctcttatttttaacaagagataaaccttgaacaatagtacagattaataccttccttagaggatgaaaactaagtcatcacgagactagtctatactccttcggcgttgaccaataatggagatcgtaggttacattgacatgtactccttctctcactctctattttaggatttgaaatttcgtattttcatatttccagttttattatttaattaaatgtttaataaaatgcagaataatgaaactg

SEQ ID NO: 131946 - DNA, 643 bp, Cannabis sativa
cgatcttgaaaggaccaataaagtatggcctaatctactaaagagactcatcaaatttgaaattagattgctatgttgatgtagattatgcatcaaatatggacaatatatgatctactatagcttatgtgttcatggttaacaagagttacatctgctggaaatctcaacagcaacaagtagaggcacttttaacaagagaatcagagttcatggccatcactgaagcttttaaagaagaaatttggctgcagggaattctataagaactacaactacttaagaataaaagaactgtatattcaaatagtctttcatcaattcacttgtgtaagaatcctgtttaccatgagaagagtaaacacattaacattaaattatattagattcgagaaaagatagagttggagaaggtacatacaagcgataatcctgtagacatgggaacaaaggttctcactttcagtaagctgatgcattgtctcagcttactgaaagtgattataaatagttaagactgctacaagtataacagttaagactgttacaagtacagttgtaactgattgcactatgtttagttgtaaagctatgattataaatagctcatttttcacttcattgagagagagagagagagaga

SEQ ID NO: 131947 - DNA, 801 bp, Cannabis sativa
aaataaaagtcattactaacattccttaaaataattagtaggggaagtatttcatttattttattccttatttaatcaagttttggataagtatgttttttttttattttttatttaatcaacttttatatttttttaaattttaatcaaataagtaaatgaatgtaagaaaatgactatttaatgttaattctcattatttaataataaatataccgttaaaagagacatcttccttttaaatagaggaccaacataacattgagagtctaaataatctcacaagaaaatacacaattcaattagtaaaccatttaacacaatgtaaaccaaacaatagttaaaaatcccagtaaatatttacaatcttcaaccactaaaccaaaacaaaaaaacattattatttctcaaaattaaccaaacatattatttatatatatatattatttatggagataagtaaaacactcacacatatagttatttatgaagttgaacactttgttatgaaaaaaatgattggaaaagatgaatagcgtgacaaagcagagcaaacgattgattccacattttggtgagattattgaaaacaataagttgtatttactgaaaaatagggtcgtctttaaagtaggggttaggatcgttgcccaaagtctctcaacctaagtggcttcctattagagttagtgggctagtcctcttattgctaatgtgtagaaataaattaccatatataagataagtggactactcctcccattgctaattggttttgagataaaacctcattcattttat

SEQ ID NO: 131948 - DNA, 1022 bp, Cannabis sativa
tagggcacaaaacccaacatactatacattacaagatcaaatttaggacctaaaccgttgaggagctacaaaactggatcttaatttgtcatatgtgatcaagcaatcatcagagcatcaacaatcgattgagcttttttgacatattcacagatcaagagattgttcttcatcagatgtgagaactatccttttaattgaagaagacgagctttgatttggcttgagaatcgttgttccaaagcacgccaaacagtcaacgatgtactaaagttggctactgatgcaagaactggttccatcattgataatcgaagccatgagaggaggagctggtctttctttttccactgagcatgttttggatttggtgctccagtgactagagtagcagggggggacacgtgtaagaacagaatttggtccaaatcatggccaatgactgtgggagcaacccgagacttccatgaaaggaagtttttgtgatcaagttttagggttagggaagctgttagagagttggagaatagattttgggtgtttgtgagctgagtaagagtagcagcgagaatcgtagcttgaggatctaaagtggaagaccccatggatgctagttaaaggacgatgataccatgtcgaaagagaagaaccaagaaaagctagacaacaaagaaggaagaagaaaatagagaatggaagagaagccttactcaacatagtagaccaatgcatttatttatataatgagactactacaatacaagaagatgaaaaccaataacaaaaaagcataacaagaataactaacaataatacaggctaactaactgctagttacactaagtgacatcactaaggaatttgttagcatcaacaaacgtattttttaaatctatggttatatacttataataatatgtaatacatttatccatgaaattaaatcttaggaaaattctacaatgcacacccttaaaatggatatattgatgcattcctatttgttttagcatccgaaataa

SEQ ID NO: 131949 - DNA, 591 bp, Cannabis sativa
  modified_base (40)..(51): a, c, t, g, unknown or other
atatgttccacgatatagatactctattaattatccattnnnnnnnnnnnnataatcaatgatcctctatagattcggatcctgatctcgagtccaggtctggttctcgtttgggtgtcgagtctcattctgggtcctaggtctaggtcagagtctaggttgggtcctgggtctcggtccctattctgttgcccaggtccctgtctcgattctaggtccatgtcgcagttccggtctggtactattttgggttcgggtctaggtcctagtcgtagttcgatttcagttccaattgcgattctgcgtttgggttcttgtgtagattggggttcaagtcctagtccgagcttaggtctgggtccatctccggatcccggtctaaataatatatatcattggatgaatggtttataaatagtttgcttataatgtcattctaatttctcttgagaaattgaatggtgcagatgattatattcctggcattctatcccgaaatgatataaatcctcaatcttagaaatgtcctacttatatatgcttactttaggaaaattaaacttagagttagattagtagtggcggtccaag

SEQ ID NO: 131950 - DNA, 598 bp, Cannabis sativa
ctaccaatttatgaactttgtattagtagtcctttggttgcattctctaccaatttatgaactttgtattccattaattggatgacccgcccactgatggaggtacatgaaacaacaagaaaatttagcttaggatcattaaatataaagtgtggtcttttaatataccatctaattaaaaataaaatatttatacttttaatatttttttctctcaaaaataatttcacatttcaaaaaaatctctctttaactctcactttttggcattgaactcctttccagaatcccctctgtcgaacccagaactccaatcattttttagtctaatatcacaaatacattgctacaatcatctcttaacatcactaaatacgcaaaacattgttaattatcactaaacttcatgtataactacagattcgatctattattacaaatatattgctaaatatcgcaaaaaattagaaaaaaaaaaaaaaaagagagagagataggttgagaactctagcaatgtgtgaggattttgaggtagttgagctcgtgaatttcggggctttggggtagagacatcgagacttagagagagagagagaga

SEQ ID NO: 131951 - DNA, 762 bp, Cannabis sativa
  modified_base (717)..(719): a, c, t, g, unknown or other
taatttagtagtaattagtccaattccctgtggttcgacctcacttgcgtgagctactacttgactgtgtatacttgcgtagtgatcataatttttataacacaacctgagcgttgggtcccagttttaccccttcaaaaattccatctggttcccaaaaatactttaatcgcaatattttttgaaaatgaagaagatgctcagaagttttctcaaaaaactccatttaaaatggcttaagttgacaaagtgtcaaactcggtgcagggctagccccaggtgtcaacctgggtgctgggcccttttattgtacccagaaagtattgtttcttatttgaaagcacctatttacccattctttatgaagatgaagaagatgaaaaattcgaatctctgatctgttacttcgaaggcccctaaattgacaaattgcaaccagggcgctgggtgctcggggccctaggtgcccaaaaatgaacttgctctgatgctgactctgatgccttaaatatgttcgtggtatgtataattgatgttccaatgcaatttttgatccttttcgactaagatggtcccagaaatcgaaacttagttggatatgtcattttgggcaccgagtggaaccctaggtgcccaaattggtttctgggacgtaggtgttgggaatattttaccaggatctagagttactaataagtatgttgaattaacatcctnnntatgaattctctaaaacaatgaattaaacacataagggtttaa

SEQ ID NO: 131952 - DNA, 672 bp, Cannabis sativa
gtcctttagtgagattttatttgattattaatttgattttatttagttgatattagatagataaacaccttgctttattatttcatttgattaaattaaaagaaaaacacaaaaaaatcatttctctctctcttcaaccctctctctctctctctcgagctccctagagccgctagggtttgagcttgttcttcagtagttcaaggaattcccaacaagctcttagtgtatccaagtcaaggtaaaattcctagcatctctttctctagtttttaaggctttaagttatgaattatgcatgaaattgagtattagggttctatagttgttgttggtgtttgttgtgataatctaaagttaaattatggtgtaatctgttgaattgaagtggttttaggagctgttgtggtgtttgaggaagctttgagtttaagaaatcaagctttgctctccaatggtgttttgtgtttctgagcatgttagggttgttttattgccttgtttaagttctttgggatatattgaacaagtttggaaggtttggttgagtttggggttgatttgagtgagtagtaaatttttgaaattttcctacactgaaccggtcgaccggttcagtgggaccagtaggaaccagaattccggttggtcctcaagaaaccccacagaact

SEQ ID NO: 131953 - DNA, 1027 bp, Cannabis sativa
tgtctgtgttcaagcttcccacttttttttgcaaattttttagaagagagatggccaacttttggtggggaaataaagagggagaaaggaaaattcattggaaaaattgaaaatctttgtgtaattcaaaattaaatggggatcttggtttctgatctattacctcattcaaccaagctatgcttgctaagaaagcatggtgtgtccaactaaaccctacatccttgattggtaccctactcaaatctaaatactttcctcattcaaccttccttgaagccaatttgggtcactcaccatcgtacgtttggagtagtcaccagtggggaaaagccttgctcaaaaaagggctacgctgaagaattagaaatggggaatgattaaactcaaacttgtcttcacaaagcgatcgttgtagtgtagtatgagcggtcgtgtccacaaagagatatcttaattaaaaagtgattagtgaaattttaagcagtataagtaaataagtcaatgggtttttgaaaaaaatattaatagtaaatttaaagcaaataaaattggtagaaaattataataacaaaaatgataagttttcaagaatcacctatatatttggctcatttatttgggtttgattcacacatataacacaattaaattattcacttcccaataatttaatcggaagataaaacttgaagaacatatattaaaaaaaatgtatttgagtaatataaaattctcacattaagattgtagaaaataatcttatgaaaaatctaagaatgacaatataccttttgtttggtaataatgcaataagagattaatcataaaattataatattaatatctttatgctattatattcacgtagaaaaagcatgactatttctatataatactaaatagataaatatactaatatagatataaagaaaaaatagaagaaaaatatactactcaaatgtataaactttaagcacttggtgaatcttgacacaaataaatattacctcacatataagatcat

SEQ ID NO: 131954 - DNA, 782 bp, Cannabis sativa
  modified_base (26)..(56): a, c, t, g, unknown or other
  modified_base (733)..(737): a, c, t, g, unknown or other
ccaaacccgaaggagagaaagagatnnnnnnnnnnnnnnnnnnnnnnnnnnnnnnnagaaaggaatcaagggctaaagatgttaaacggaaagactcattatattccgctgcaatcaatgtaaggttttgttaaacccttatgtgtttatttcattatttttgagaatgcatagttaggatgttaatcaacatacttattagtaaatctagatcctggtaaaatattctcaaaaactggcctcagagcattggtaatgatttactttcatgtaatatggatttaaaacgatgaatattgtatgtgtgttgatttgaatgtgttcatgttggtttatgtgttacttgatgatgttatgtaatttacgaaatttttccatgaaaataatttatttggattccttgtgaaaatttaagcaattttggtttttacggaactcgatttcgataaaaattgaaagagttatgaaagtttgaaaatcaaagttcaatggtgtccagattgggtgcttacgagcaccagcatctcgaacaagacaccaaatgcgcgcgtgacaggggacaaaaccctgtctgaagcccgtgtctcgcccacgtgatgctgcatgcacgccgagagagaggctgctggcgtcgaaatgtgcagcacatgggaccctgcaatgctccaactccgcgtgcatgatgggctgcttgcaacctattttggctgcacgtgcagccttgctggcagcnnnnncccttgtgcaatttttgtgggatttttccccaatttttttttttt

SEQ ID NO: 131955 - DNA, 604 bp, Cannabis sativa
acccatccacggaatacattccgtgaaatacatcacgggacaaaatcgtatccctataatttatatcttgatatataaaaagtatgagttgaaaattaaattatagtacatatgaaaaaggtggtattcatggcttataatgtatttgtccactatctactatatctatactttagttttaatataaaataaaaagtcaactttgctatctatcttatttgatttgttccatttttttttttaatttatacctttttttcttgataattctatttctttagtaaaaaaaaattatgacttgtaaactattcatttattttttattgaattacttgattcaatctttattcccctcttttcgatgaatgcattaatttatttattataaaaatttggtacaatatatttttaagtccgtcattgcatatgtttttagttacttggatagtaaatgtgtaatgttttagcaattttttatattttcgtaattattgaatatttaaatacatttagtaacctttggtatttttctccatcaaaaaattaagtttttaaatgctaaaaaaactaggctaattagcaatttttcccccgaactttgaca

SEQ ID NO: 131956 - DNA, 531 bp, Cannabis sativa
gtgatatgtgaccaatttaaagtcaatttttaaagctcatgaaaaaaaaaagttaaatcatatgtatatatgtatcctagtagctagcagcatgtaaataattatttgaaacttttaaaaaatgacatatatctctagacataaattatatatagagagatagaatttgaaatagttatgagtcaaacacattgttaatagcttggtatggtattagggcctgtatcacttgttgccaacacttgattgtgcttcattagtttgtattagtttgtaacttttttagattaattttattattttttatataagttttaggattagttttataattacatgtagactgaatagatgacaggaacagatagtgaagtggttattattgataatagtgaagaatctgttgtgcttgaaaaacatgaataaatttttattgaatttatggaagaagaagttttgaagggaaataggaatactaaaaagtaaatgcattcgtatcatgatctgaaaatacagaagtacattgtgatt

SEQ ID NO: 131957 - DNA, 632 bp, Cannabis sativa
ggaaattagttacaaatacagttgtaactaacttctggttcttggtcttgtagaggcaaagccacctaagatgagtctttattttctgttatttagtttgttgttgtatgctgatgtggatatgttgtaaatggactaattataagtgaaatttactcaacaacatcctgctcgaataaggagcagtagagacccttcgggttagcatatgagatacatctagaaaagcattccaagaggcatctcgaaaacctagtctaggatgatgtggcgaccctctgacactgaatcccatctaatcaagggattgtcccatttttcggaccctaagagtgcacacaccaccaaaaggaaacctctcttttgtctgatgactactattttgacactaagacgcacaggccatttgcatgtcaatatcgtgtggtcccttagcgtacgaatcaccttggccccacgggttgggtctcagtttatgggtccaaagtcaatatattttatgtattttcccgattagtgggtcatatacacatgcactctagcaaacagcgacgacctctcttgtcgtgtaacgcccttacttacgtaaaataagatgccataaataaactggcgttaagatactaatgttg

SEQ ID NO: 131958 - DNA, 1096 bp, Cannabis sativa
aatgttatagttgcttatgcatttcgagtaaaattaattcctaattacctatatttatcttacaaaatatgtgacccataaattttacaacccacgaattgggttgcatttcatatttataaattatgtaccgtttttctactgaactatcgtttgcccctaattgtcgttcgtttttatgttgtcgttttacagtaaagttatttattgaagaaaaaaaaaaactgtatcgttctcaaattttgtcgtttcccattttcacataaaaagttgtcgtttttaaaccaaaattgtcgttttacatcaaaattttcgggaaagagacgtgttatgaagttagaaaattttttattttataaattaaaaagaaaaaaaaaaaatcacctatttagggattctccgcatccacttaagtgaccataactgggagattttggggagatggaagggagaagcatcaccagccgcaccttcccttgttcacatcctacgagaaacaaaattacattcaccaactcatcatattcatagtttcgtcaaaaaagaaacatcatatagtatttattttcaccaacaaaaaaaaaatataatcatctattgaactccaaactcactttgtactgtctatattaaaagacactatacaaccaaaaatgttaatttatttctttaacaaacacaggattcaactcaaggaaaaagagaatgaaccacttacatgtactctaattctacattctaaagtaggaaaccgatcccaaaactacataataataatagacagcatttcagcaaaaaaaaaaataataataataatagacacagccaacagagaataccactttctgtcataggaagaactcctgcccgtacaatgccattacgactcaggcatcttgaacccaaatcttaacagttttatcaccttcgaggtcagcagaggcaattttgttctcaatagggtgacatgaaacagagatgacagtatcagtgtgaccttcaagtctctgaaccacattcttacgagcgacatcccatatgtaaacacatttatcctctgacccactcgcaatgtatttcccatttgtcacggaaa

SEQ ID NO: 131959 - DNA, 1431 bp, Cannabis sativa
accttaagagcaaagaagagaatgttattttctcaatgcataagggctgattgttgtaagctagacaaataattttggatattttctttcttggaaccatttgatatcttatttataagagaatatagatctaccattttcagctaactatttcttattctcatttctaagaggtgttgttgagagcttcaggtgctgaaaggctaggatgtcttctccctgttggtaagtatttctaatatttttttttgtttaacatgttattgtgttcttggcgttcttgatatttttgatatttttagaacaatgtattatccaaaagataattgtgtagtgtttgtatgttttgatttaaatttgtaacaaatagttgtatttttgtattaagttgtccatggtaggcatagtatgaccatagaaattttgtacacaagcaacaataatttttttataagcattgtgggtgtggtatgaccgtacaattttatatgagcttgatgcatagtgcgtccactaaaattttaatacatgcatgatgtgtagcgtggatttaatatttttgtatgatgcgtggtatgaccgttagatcttggtatatatcatagcattttttgttggttgagtttttatagataattaatatttgtctagtgtttgtgaccatactcttgttgagtggtgagatgggatcttgagaaagtgtgacttaaccattaatgattggggtcccttcttctacagaaggaggtgctcactcaatattggatagttatgaagatatccctaatgctcaaccattgcctcaagtcactttggttgacaatgatgatgagggggaggtttttgatgagagtgcatgtaagattgatgaagagccttgagcttttgagtatggaacaatggtaccagggccggccttgagggtaggcatgctaagcgtgcgcctcgagcccccgaacgctcaaggccccaaaactgtgaaagaaaatattaatatatagataaaatataaaataagaagaaaatataacaaaaattctttggtgttttggtaaaaggtcagactttaaagatcatggaatcaattcccaacctttacttttttaatttttttgaaaaaatatttaatgtgtagttatgagggattgaacattggagctcttaagagtttttaaaaactttaccattacactaagcactaaaactatcattttcataatagttaaactatatatataggggccccaaaatttaatttttccttaagccccatataccttaagactggtcctgaatggtacatgattatgagggtgacaagaatgagtatgtcgggcggtcccttcactttttgtgggacaacccgaggtccattatgactaagggcaatatcctgcgcatatgacatcaatatgagattcattcttctat

SEQ ID NO: 131960 - DNA, 559 bp, Cannabis sativa
tctcgttttaaaatagaagtcattccacaaaactagtgaaaaagtgactccaatattttaaaatgcaactaaaaaaaatttaatgaaaattaatttctttccatcatattttattgtcaccaaaccaactacaggcacccattggtgttataaataggaatacttgtaatgaatattcttatttaatgatatttgtagtaggtaaaaaattcatgttttctagagcagctctaagaagactgcatatatgttaaatactgtgcatgtgccgtccaatgaagctacatttctggcagcattttgtggttttatctacagtgtacggcatatataccgtgcactgtagtcactgcataatttttcttttatacattatggtggcggggtcctagtggtgataatggtggctggtgtaatggtggtgctgtggtggttgtggcccaattggtgtcgtggttgtggctgtagtcaactcaaggaagaagaagaaaatcgatcagagaaaaaaagaaaagggaagaaaaaaagaggaaaggaaaaaaatatatttttaattatt

SEQ ID NO: 131961 - DNA, 1213 bp, Cannabis sativa
  modified_base (1120)..(1121): a, c, t, g, unknown or other
caaaaattggtttgcattagggagatcaattgtcaccattgttttttttttttttttcttggaatggaatatctatggttgacctcaaatttggcaaaccgacagcggagtcgtatttatgattgagatcaccacatgtacacaattagaacaagtaaataaaaatgacatattacttttatagagtttgacccccttagttagcaggtaatgatctactcctatatgagataataccactctgattacaagtgatgtgagttctagagtggctctccatgtattacaatagcaagaatgtgaggccgtacttctcaagtggatgagatgagggagacttagtctctactacaccactaatgtcgtgtagaagagagggggaactagggttttgagtgcctgaactcaagagcttaggaatgagaacttaagagctttaaggattagcctagtgctctgtatataggagagatcgtacatatataagatattaggatgatatcccctaaaatgaggagatatcaccaatttgttacacattaaataaataagaaaataactcatcaattagccctaaagaatatgtaaataattaaagttaaacccctctttttagctgggtcgtttgaggccaattcatagctgaaaatgttgtccaggttgaaagctacagaggcacaaaaagtgcctgccaaaggagaagctagccgacatacactttgttggaggctagctgacctatattggcactagtgctgactaggggtggtccgcatgaacccttcttgttggctagtttcttgtctctttgtcctgcttaagtatttagactcttcgtgaactaggttgttgtgcatggttacttcgtcttcttattgacaagctatatagtccatgtggcatcaatctgtctatatggacatgctgttgggttttgtgccttaaaaaaacccgtttcaatataatcaaatttactaattaataaagatcagaattgcattttatgttgcttggttcacataatttatttcatgattatgtttaatgtataaattctattaattccagaacatatgtatatttgttcatgattatagtgtcgtcagcacagtgaaatatnntcatgattatatgttcaaaagttgaattcccatgatttatcagttcactgaattagactggtatcataatcagcgataaggtatacttacac

SEQ ID NO: 131962 - DNA, 547 bp, Cannabis sativa
ccgatctagtgcagagatacattaatagtcatatttcaacttaataatgtaaaattagatcaacaaagataagagcaaaacaataaaataaaaacgtaccttttaaactccaaacttgtagagagagatagattgagttgacccaaatgaaagtgtgtcaaattctttcccataccaaattaagaagatgaaactccaaatcaaagttagagtgtaaaagaggcatgggtttaaatgtgtatgaagatgaaagtggaaaaagaaaaggggctcttctgtggtggagagaataggtttagcatgggtttattaaatgtctttgttctctgtatttgaacccttcatacttcatatcatctttgttattatataatatagattttcgaattatgttagttgtgggcttttaatttatatgaatcattttttatttatttatttattttccccttttccactaatattttataatgaaacataacaattttcttttttctatcatgatgatgatagggtgtgtgtgaccctccaaaaaaaaaaaaaaaaa

SEQ ID NO: 131963 - DNA, 1450 bp, Cannabis sativa
  modified_base (1384)..(1416): a, c, t, g, unknown or other
aaaaaaccaaatttaaaaacaaaattttcaatatataaatacttatataacaattaaaatatgaagaaaaacttatctaatgatcttcactgatcctccaataatttttaatgtcttccaaaatttatacacttaaaaaatatataacacacaaaaacataacacaacaaaaatatactaatgagaaaatgtgagaacataatataactcttctttacatacaaaataaaataaaataaaatatggtgaaaaatatagttttgaaaaaaaaaaattgttaagaaataatattataagaaaaataaaacagttcaaaatataactcaatagatatgatatcaaaattaacattatgagaattaaaatgagtaaaatattaatacaataattcttatactactgaaataatagaattttataagaagtcattacaaaaataatgtatataaataatattttattttggaaaaaaaataaatttaaaaaatttgacgaaaataaaaataaaaaaaataattatattacgcttatttaaaataaaatcatataaaaatattgggtagttctacaatagacactttaatattggtcacatcaatgcactcttaaaattttgaatagtgattggttataatattgagaaacgtgctattttagtggattgttacacattgaatatttattcatttatttttttttaaattatttgtttatttatttacaaaatacatatgaatatatgaatatagaggtcttcgtttatcccgatctcgattttaaaaagtttcaattgattctaagtcggaagatcgaaatctcgccacaccatttttcggtgttcatctcgtcgtcggaatctcacaagaaattcccaatgaacgataaagtaaatttctggactaccataatctcaaggagatttcagagatggggaaaagaaaatgcaatttttcaaattctagtctactagatctaaggattcagacaaggaatcaatggaggattctctcaagttcctcgttcttgcgcttttaatctcttcttgtgccatccacgttacttctgatggaaagggaatctccagctggactgggattgagggagagggagtggccggtggtgccggagttgaaggagaaggagagagggaactgtgcactttgagttacgtggccaatcaaatataatagtttagaagttctataggtgcaccccaatttcactaagttttgatcccctagagttagccctaccacaaaaatccttcatttaatacctgtcactaatcgtacttcttaatatcgaacagagtaatgtacctctaaaagaggtgtctattaaagaatttttcaaaaatatttatttaagtaataataataataannnnnnnnnnnnnnnnnnnnnnnnnnnnnnnnntaataataataataatagaaagcagttacaaaat

SEQ ID NO: 131964 - DNA, 827 bp, Cannabis sativa
gtaagagctctagaaaagaaatcactgcattctttattcttaagataatacaaatcaaggggagtaggctattaccgaactgctcgggcctgaatctcttaaaaaactctgtctctttatttatttcattttattacatctatattacactacttgtcgcttacaatcaagaataaaatctcaaaagtaaattactttaaaagtaggaatcaagaaagtactgtacaaaacaatctgaacactacactgtaattcaagaataaatatgccaacatagataacgtcagctctaatataagtgtctactttaagctttgactccctctcacttggctttctgagatcccttagccctcgactgtgcttgcttcttttataatttttttttcttatatcctttgttgggcttaagttgagaaacatagtgagaagatgcattaacatcttgctttctttagctacacactaagaaattaggttactgacactttatattttattataagtgttattttattaggttaataatatttacaacaaaaattgttattttttggtagaagttacacttatactctttgtaaaataaattcgttaattatttaattatttttcaaaaatatatttaacaagtaaaaaaaaaaacaataacccaacatggttttagtaactggataaatgctatatttattgggattcatagaagaaaaatattaaaaaaacataattatttttttctctattattaaaattttattatttccttgtagttaatatttccttcattatacaattttagagcgaaaaacaaacacacattataatta

SEQ ID NO: 131965 - DNA, 714 bp, Cannabis sativa
  modified_base (666)..(671): a, c, t, g, unknown or other
tcatgatttagaattggccgcagttgtttttgcactgaaaattttgtttttttttaatgatacggcgaccaccgagatctacactctttccctacacgacgctcttccgatctttagtatcaaatcaagtaaaattctgggctttattattagccaacaaaggatagaagccaatcttgaaaagatacaagccccattagacatgtcatccccaaagaagcttaagaatgtgcaaagtctgactgggaaagtggcaactttgagttgtttcatttctaggttaaaagataaatgcgtcccattcttcaacattttgagaaaaagtcaaaaattcaaatggatcgatgagtgttgttatcctgtttttttgctcattgacgtggcaatgggaccgagcgacacgtgtcttatatttttgatacctgggtagaggtaaatgtccctggcagcctgtacataatttgtcagtgtcgattacccgagtagagctgtagagaagacatctgacttggtagaagcttgttatgccgagcaacttataagagattaaaacttcagaatgatctcgttatgtccagacacgaagagaatccctacaatcgtgggattgagttagagaaatatggcaacttattctatgctggaatatcttttaccaggatctannnnnnctaacaagtatgtttttaacaacctaaatatgaatttctaaaa

SEQ ID NO: 131966 - DNA, 750 bp, Cannabis sativa
tttgttagtttaaattgctattttggttagcttggtttgagtgtggattttgatgttatttttgagttattcaagttgtttatggactatttaagtagttgttacacatcctagacaaagtttgagcttttgagctcaaacttttccctttaatggtatatttgattccaggaacctttacatgtttttgtcacttgaattatgtttattgtggcttgtttaggcattctggaagggttggaacgttttcgggtagaattgaattatttgtgaggttttttcagggttcttccagagaaccagttaactgatttgggctagccttgtagattcggttaaccgatttcccaggcagaaccctaagaactggtttttttcgaaaatttggtgtactagttttaccagtttttgaaccctagtttttcatgttttagccatacttagggtatttccatgttatctatggatagggaaacttctagttttgattttaagtccccaaaaggtgatttagcgtattacttatcaattttataatattgtgatttaggagcctataaactgtttagcagcagttccactcaggttgaccgacacacctgaacttaggatcgagataagattagtataatgatatgcatatgtgattacatgcttagtgtgcatatttatgattgcctgttagataacatattgaaatagcagtatcaatatacatagagttatattggataccgatgaatgtatgtt

SEQ ID NO: 131967 - DNA, 522 bp, Cannabis sativa
catcatgagtgattctaatcactttgtaaaaaaaaatagtatatttatattagtattaacgcatgcaatattaatattcttgttgtaaagggaaagtgtgaagtgcgaatgagtcattttattgactgatgatatgctaaattttaatattgttataccaaaactagttacacacgacaaaacttaattgtaaacaaaacgtatatataattgattaaatttgaaatttatttatttattttgataacaatatattaaaaattggaactttcaagaccacctccaatttgaaggacagattgtaactcaactacaaatttattaatagaatacgttatttatcaaccgaaatataataataaatcccttgattttgtcagaacaaaaaaataatcccttgcgattgattgcagatctgaaagacagatttaataacacaaattaaataagattgcacaagatcttatattgattgccttttaaattaaaagaaatatctgatctcaaaaaaaaaaaaaaaaa

SEQ ID NO: 131968 - DNA, 580 bp, Cannabis sativa
tgcctaaggggagatcaacagattgcccgacactgctacaacttggctttgtccaaagctaaaaaaaaaaaaatgcctgccaagagctctagttaagagtccagccaagggtaatgaagctcaacccaaagcgaggaggtagatttagatcctcactttggggattctgcagatagctttggactggtagaggaattagaataagtagagatcgatcccactctttcgaccaagaaattgaaaatcgaaaaaggtttagtgccagaaataaaatcaaaattgataaaatttctaagggcaaacctcgacatatttgcctagtcgcatgaagacatggtgggaattgatccatccgtaatttctcatgccctgaacatagatccaaacttccaacctatacaacagaaaaggaggttactggataaagagcgaacacaagctctgaaagacaaagtcaaaaagttgtgtgctaataacttcatcattgaaacatttgttacgaaaattatgatcactatgcaagtatacgcagtcaagtagtagctcacgcaagtgaggtcgaaccacagggaattgaact

SEQ ID NO: 131969 - DNA, 622 bp, Cannabis sativa
  modified_base (552)..(561): a, c, t, g, unknown or other
aataatttttatagagtatcgctagccaattgcaagtcgacacatttagaaggtgctaggcaccactggtgcccaatgaccatgaacaatgaacatctaaaatgtcaattttaaagctttggatttttaatttaattaattgtgggtgtgagttggaatttttttacagcctcacatgataataatgacaataaaaatgaataataatgcacgtacctaccctacaagaaaggaagatgcatgggctttttatatttggtttaattttgaacctttgattaatatgctttatgttgttgtttatgtataaaataatatcaagtgctatgctatcacttcactactacacactactctacttgagtgctacatttactcatgataaagaaaaataaatagtacctttgtgaggtttaagatcctattgatacaatttaatatctaatcattacggacggctataggtataggcgagctaagctcgcgcttaggacccattcattttaagaatctaaatcaaaaaattacatttttaaatatatatatatattnnnnnnnnnntttttaaaaatattatttatcttttagtaagagggttatgaatactaactaactaaatgct

SEQ ID NO: 131970 - DNA, 628 bp, Cannabis sativa
atcattctatttaagtcatctttaattgtgtagtcccatacgtacctacacagccttagaatcattacacttgaatttcctcaagcgatgtgagattttacagctctcgatcttttcgttgcagatcacgggactctaactgtgacaatcaccccctcttcatggggtctaacgtactcgtcgaccatactttcgactgatcaaagctctcatgataccatttgtaacgccttcatttatttaaataaaataccacatgcaaattatatatatatatatgtgttttttagctcagttgtgtatttaattttatcaaatttcatattcgtaatttataataattttgtaacagtactttgttatagttttctatttaccttgtatttatacaaaattgtaacatatatatgattatacatttataataagtgtagttataaatttgtaaaaactttagttacaaaagaaaatgtattgttatatatttgttagttttctttttagaaaaataaagactttatttatttgtaattataccccttcactatatatatatatacatatttgtaatgttgtttagattctgtatttttatttttttttctttcaaaattttaagcttttattt

SEQ ID NO: 131971 - DNA, 766 bp, Cannabis sativa
  modified_base (77)..(94): a, c, t, g, unknown or other
tcatgaaataaatcatgtgaacgatgcaacataaaatgttatttttgatctttattaataagcaaatctgattatannnnnnnnnnnnnnnnnnagggcacaaaacccaacaacctacgctccctaaacaagaaatcctcatggctataaaacttaccctcaccagatttttcacaagcaccataaatctccccaaaatcatggtcaagaggataaagtttcttaatgtgttcaaaaccaagtaacttagcatcaagagtagagattaaggaatacctgcgagaaagggcatcaacaaccacattctccttacctttttttttatagcgaatgacataaggaaatgtctctatgtactcaacccatcgtgcatgtctcctattgagcttgtgtttccccttcaaatagtgttgcaattaaggccaactccacctaggttttcgctaaagtatgcaagggctttcccaacctgcataagaactgtgtcaatacgtatactagatgcatcacattcaatttcaaatgtgttagaaaaattaggcaaagctagtaccggagcttgactaagcttgtgtttaagcagctgaaatgcttcctcttattttgcttgcgagtttaatgctcgtctggtgactagtgcaagcatgtcaccgtgctctagcccatactcttcatcttctatagaagcatcttctaatggtggcatgtcaacaagctcttcttcatcttcagaatctacctcgccattttcttgaatcaccataac

SEQ ID NO: 131972 - DNA, 1083 bp, Cannabis sativa
attcacccgggaaagaggaatttttaggggaagtgctgtcaaaaaatttcttaaattttcttgagtgttaagagtattgagtgaggaatgggaaccccaaaagatcaagagtgagtgaaagtgccttccaacccacctaggtcatcggggcgatccaatgttgatagggcgctgtttgtaagtgccgaagcacaagagtgctatttagaactgaaaaataggccattcattgaagataggggtatggaaattggtgatcttagaaacccaagggcatccctcctatatttgagccaataagagaacaagtggtcaggagggaatggatgaaatttgtgaatgttactgagagaaacaaccaaaccctagcattagaattttttgctaactggcccgagaggaaaaatgacatagtgaaagttaggggtgttgatgtgccagtttccactagagctatacatgccatctatgacttgcaaactttttcccgcgaagagcaacgtctaaagatgcttgacgaagaaaggaaattagactatgttgatatggctgaaactttgggttttcctagactacggtttcatgaatataatcgggaaccctatcagttgtatcgttgtgagttaaacccagtggccaaagcgtggttatactttgtgagtgttaggttgatacctaacaaacatttttttgatgctcaggttgataggctaagatatgtctatgctattatgaaagggtttaatatcaatgtgggagatattgttcgacatagcttcaccttaatggtcgaaggagcctgtgggggtggacttggtctcgctgatattatcactgatttgtgtgaggaatatggggtaccacaatactcctatgatactaaggttgcaccacaacgcatgattgacatgggaacgatgtttagatttaaagcacctcatccacatggtcaaccaccagctccaccgaatcctcctcctgaacgcgaagaagagcatgatgaagaagtaccacgatgtgttgctggccctcttgacccaaccatgcagtacacgcatgaccaactgaattatcttattcagc

SEQ ID NO: 131973 - DNA, 1935 bp, Cannabis sativa
actagcaaatcttttcctttttaactctgtttgtgccaactcatcagcatcttcttcttgattactataaacaatcacctccttatttttgttacgaaaatcaggggaagacaatcccatgaaattagcacggttggggttggcactggtatgggctggaccggttgcgttcacaccaggagagaagctgctgtcagctttgcccgatcggaggtaaggagattcagtgaaattttgatgccgccgagaagctgctttcatgtgaagactgtatggttttacgataagatgctcaggagtatcaaaaagtcgtgggcagaagcgttccgaatgccccatgagaccacaaataaagcagaacgttgggacgttttcatccgaaaaatggcgtagaaggagcacccatcacgtttcttaaaattcatacgtcttttcaagggtgaatcgagagaaatagtgacacggatccgcagaaattcacgccaaatgcctgtgaatttgttggggtcagattcgagaaacttaccaacgtaattaccagcatctttggccattttcatggtcgagaaaccggcctgaagatcatgaatctgaacccatagatcaagtgtgttgagcggcacagccctaggattgtcaccttcgttgagacgcttgattatgagttgttttcgatcgtaagtccacggactgcctttgataactcgttgaatatcgatctcatgatagaattgaaacaaaaaacaattttgatcaagttgtttagcgtacatacctctgtcgggtttccacaaatctgccataatgttatgaaagatacgaaaatcaaagatctttccagttaacagccgcccaacgagataccatggactgtcaatgtgctgatcatcgtcggcctctgtttcttcatagaaagtttcctctgcttcttcttcatcaagctggatatttctccatccttcttctatctcatttaatggtgtgctactggaggccatgggacagggacgtacagggagaaaatcagatcacatgagacaaacacaaacaatcacaagacactcacagaggagagacaagcaaacactctaaaaagagagacatactatatattattttaatgtataatttttaattttaaaagagtatataaagatcaattagtatgcatatgttataattgttttactgattggattcacatcatataacatgttttttgtgtttcatttctttttaattttatcgaaacaaaaaccataacacacctacatattatgtaactaaaataataataataaaaaaattacacctttataatataattattaacttattaattatattatttcaataaatacataaattatatttttatttctgagaaaataaatacataaattgttaataaattaacgatgtgagttatttttaagaaaaattattaggagctattaatatataataaatatattaattaaaaatacaataatttttttaaaattattttattgtgtggtgttaagaatgttatttgtataaatacttatgagaattatgatacatttgtgattttaattataatattattaagttattggagataataatgataagttttttttgtatatattatatattacagttacatggttatacattaatttattataattatatattgatcttagtatatgtatatattaaattaatacgatttctaaagtatatgattatgtaaattattatactatgataattaaaaagaaaaatatataagttgaaaaaaattataatataatgaatagaaagaaagaaaaaaaaaactttaaaagaggtcattttttacttctttattccttaactatatatcaccttaatttttaattgtctaaataaatatatagattgatgtataataataataataataat

SEQ ID NO: 131974 - DNA, 504 bp, Cannabis sativa
aatgatgggacaaagaggacattgtgtaatgtgatatgagaattgataatcacactgccaatgtttttgatttggacagaggtggcatctggtaatgtaacatgtttattgtgtaatgtgttagtaaaatttgaaaaacattgcacatgacagcaaacatggtgagtggcaccactgtgtaatatccaagaattgggtgaaagaggattgattttaccagtcaagttgttgattgcaggattttctgattttaccagtcaagttgttaattgcaggatttgttgatgtagatgcatcagcagagggctgtaattgttgactgagcatggaaatgagttgttgacactgagcttgtgtcaattgagaatcggtggaaggaagagaaacctgatgtgtttggggtcgagatgttgaacccgaatctggctttctggtgtgatttgatgaatcaggggcccttggcttgccatatccgggagggaatccatgtaaaaaataacattt

SEQ ID NO: 131975 - DNA, 633 bp, Cannabis sativa
tggaaataagtcaagccaagcatccgaaacaagcgcctgatcaagccgaacttctatccattcgggagtccctctaccccgttcccacgtaaaaggatacccaacgaactccaagtcctgcaaatggcagtcatcaacaacctgttggaatcccgacagaagccaatcggaataaggactaccaccccgtttgttatcatgactaagaacattgttgtggtcgcctataatacaccagggcaacgcaaattcagaagaccaatctctaagtaaatcccaagttttatgtcttagatgccgattaggttcaccatacatccccgtcaactgccatgagggagtatcagaaatagtgatttccaaatcaatatgcgactttgaaaatcccattaaactagcttcatctccaaatctccatagaaaagccaaactaccactatgaccttgcacatcaaccacaaataagcctttaaagcccaacaaaatacgaactttctccatgtaatctcttttagtaagagtctcacataaaattataaaactgggtctcttgtggattactaaatccttaaggaattgtaaagcctatgggttcccaagcccatggcaattccaactaagtaggctcataat

SEQ ID NO: 131976 - DNA, 755 bp, Cannabis sativa
ctaccactaccattcactaagaatttgaacacatcaaataaatgtgtacacctacattcacaccaacacaacctaacaataataccattttcattcgagatgaacagtgaggataccaaattctaaaaaagcactatgccaacaaaaaacaatttaaacatcaaataaaggtggaaatgagattgtacctcctccatcgtcgttgtccatcgtcctattgatttttgggtacctcccctgcagtcgacttgaagcaactgaatttaggtcacgattcaacaacgtgataaacagttgaatcgatttctggggttgaatgtttgggtttcgattaggctggagattagggattaacgattcggggggattaacgatttctagtgttgaatcgatttctggggttggagtttttggttttcgaatttttacttttttaccattttagttttttagtttcaggtaatttttatttgtaatttagttaaaaaattaaattgtttaaattttaatttggaaaaacattttattttttcaattttgaaaagaaataaataaaaacaaagcgattaaatattatgcgtacacgtgtaccgttaatcatactaacggatgtggtatgaacggacaaacacgaaagtccagcttaggtactattgccgctatttttggagcttgggactaatctacatcaacatgaactttttggggacttttgccgcaaatttccctatattatatatcaaaataattttatt

SEQ ID NO: 131977 - DNA, 906 bp, Cannabis sativa
cagagcatgcaacatctcctctaggaaatcccattctacagtgtcatatgccttttgtaaatccaacttgatcatgcaatttggcttagctgccttccttccataacttcgaattagatcctgacagatcatgatgttatgtgctatatatccaccttttatgaaccctccttgattaagcgaaactaattcagggaggatattctttaacctggaacagattaacttggtagatatcttatataacagattgcaacatgaaataggtctgaaatcactcaccagattaaggctcttgactttgggaatgagggtaatgactgttgaatttatttccttgagaaggtttcctgtttggagaaaagatctaacagcttcacatatctcaggcccaatcaactcccaattgtcttgaaagaaataacttccaaacccatcaggaccaggactcttagaaccagagatgtcaaatacatcttgcttaatttcttccctagaatactctgctagtaaattatcagcttgctccttagtcaccactggcccttctgaaatcactgtccgctttacttttttccttgtcagcaattttgatcccatgagctgcttataatactccaaaaaagtctcagttatctcctctggtttatcaattctatcaccactagcattaataatagagttgattctattttgagacctcctttcccttaggctagcatgatagaaggtcgtgttagagtccccatctttgatccaacatactttggatttttgctgcaagaaagagatatatgctttgtgaatctcttgatacttctctctagcttcttgttctgtctgttgcgcatccagatgttaggttttatgctctaaataaaactccatttcaatgtaatctatttt

SEQ ID NO: 131978 - DNA, 849 bp, Cannabis sativa
tctctctctctctctcattttcatctcttctccatcgagcagcacggccaggctagatgcagaccgttcttcggtcccacgttggtctgcactagaaaacctctaccccgaaattgtgaacctacatacattctctctcccaatctgtctctgtctttaaccatctctcctcggttgtgtatggtggtggccatgagtggcgtggtcatgggcgacatggttgtcaatggatttggatgtgtaggagaagcaagactttgttggaacattttttttagatcccactttgatttttgagtttgttgtatttctttctttttataatatatggtttgttgtttaaattttaaaatgtatattgttatttttggattttttttgggttgagaaattgttatttctagatttaataatgtaaaattttactgtttggatctcagatttggcttgagtaattcatggccagatctaaaagttttttttgtggtgtcagttctaaactgaaacatattgtgcaaaaatgaattgcacacccgtaagtcttagtctaaaactgacacaaatacccaaaagtctcagttaagaacagacaccaaagaatatactttttttcattatagaataggtgtcggttctatgaatcgacactataggtataagtgtcagtttaaaactgacaccgaaagtttattttgtagtagtttatggtaaagatagtataatttttttattaacgtattaatacaagtcaatattgttagagattttatacatcaatgaaagataaatcaagatacattataactctattataaaataatacaaggatgttgagttttgtgccctaaa

SEQ ID NO: 131979 - DNA, 746 bp, Cannabis sativa
taattatatataaaagtgtatgagaaaatgataataagtttttttgcacatattttgtaattaattaaaataatgtatacaaaattgtaaaatgccctattttatatttgtggaataaataaaagaactaatactaaaataaatgattattttatattcatggaatttggacaatattaattgggtgatattttatatatgatcagattttgatagtcattacccgatttgatttttcaaattaattgtcaaaatcttctgacaattaatgtgccgcaaatactgatgaagtatctcacttataaatatatagtctcggttcttgagctcttcactcattatgtgcaaacagcaaaattccatctaaagagagttgagagagtgaggaagcccgaattcccataccgaagctatcgctagaattaaagctcaaacatcaataactggacgtatatttccgtcctttcattgcatatacaattttcatatatttacagtttattccactttacataacgttcatatatattcattttcatatatatatatatatatatatataaatattatggtctaattaacagttaatatcaaaactgtttttttttatctttaccttgattatattttgagttttggtatatatttatagagaaatttgcggccaaacccctttatgtttatatttgtagacacttaacccccttatgttattttttggtggtaaaactatcttatgtttactt

SEQ ID NO: 131980 - DNA, 514 bp, Cannabis sativa
aaatttgaaaaagaaaaaaaagttaaaaaaacagtagatgagataatttcttttttttttaagaaactgaacatattatagtaacttacacatcagatgtatttttttttttctttttgtgtatttacttttaatcataattgttttttaatgggtcatagcatatttaaatatttaattggaagatattaacatcaaataaatagtatataaactgagaatatcttgtgagaattattaagtgatgtataatatatcaataattactcatcaacaaccaacaacaaaatacatttctcataggaatttaaactttaatttgataatatataatattttcaagttgatgttgaaatcttttagagtacttcttgtgcgtagagagttatgatctaagtacattatgttaaaaagttttcttgtaaaaaaaaaaacaacaacaacagctttgaagagaaaaaattcataatataaaaaaaaaaaaaatagtaagagataaatttgataggattat

SEQ ID NO: 131981 - DNA, 868 bp, Cannabis sativa
atccgactggatttgaatagcatttgaacgacaatgcttaagaacatttcgaagtgattttgaatctatttgtctcttaaactgtttattgggattgatattttcagatccatcttcagaaataagaatagctttgcctttagagttttgtggagatggcagaattgcagcagaaggattggtggacacaatggtgctataactcggaggcatcaaaggagatgtaacaggcgcaaatggtgagcgagtggatgacttaacagagagagaatttggtggataagtggcaatcattggtgtaatgggaagatatgaagggaatggaataactgagacatcattagtgggattaatgcatgaggcgggggatgtaaggaatggatggggaaatagatgatgttggaacatgcgaatgtgagggtgagtttgaggacgatgaagtttctctgttagtcatattaggtggcaaaggaagaggtctcttggacagattaggaatagcatatgcaaatgatttcttagcaagtctagtcattaatggtcatgctccacccttaaaatatctgttttataacggtcataatcagactcgggaagaggagaaccaatcatagcaggaccataggcaagggagggatcatttccattataaattttctttagaaacttatggcaagattcaaaaggatgtccaatgatgccacattcaaagcaaaactccggtaagcgttcataacgaaattgcagccaaaattcatcaagtgagtccttaagtttcaccattttccctctaagtaacggcttggagatgtcaagaatggcacgaaagcgcagaaaaggaccccagccttcattcaaggaggcttca

SEQ ID NO: 131982 - DNA, 859 bp, Cannabis sativa
  modified_base (49)..(49): a, c, t, g, unknown or other
tttagtttttccatatattgagttgtgttttgttaaacgatttgcaaanaagttgactcattgcttgacaagaactcttgtttctctacaagttatgtgcttcagttagatgtttgtttcgctaaagtatgttctattattttgaacgaaattcttaattaataaagcttttgagttttagtcaaaaattaaagaaggtcttatgtgttgtttaattttatgcgtctcttcttagacatggtgagaaaattagaggagtataaaggaaaaaattattgaggaaattacactacatacttcttttaacttaatgcttttaatttttatcctttattttaaaatttattatgtttacctcttttttcaatcattctattaattttacctctatcacttcatgatatttttcattcatctctaatcaaaattttatcccaattttcccactaacctatacatccatccacaaaaaatataaatctattatgtttaaaattatgtcttagttaagtgagtgtgtgaagataatttggatacaatactcataaaataaagtatatttgaattaaattatttggaagtaaatttaattaatgtataaaaaaattaagtattcttcaacttctgccaaaattatttaaactacaaaacccaaacgggatattacaacatatgaactccaccacacaccccctacccttacaattcaaatatttgttatgaaacaatattttaagggaagttttatttgaactccataaaattattaatacacctcattattaaaaaaaatataaacttaattttttttaaaaaaattacttttaatatttttttaaatttttttctcacattattt

SEQ ID NO: 131983 - DNA, 542 bp, Cannabis sativa
cctattacttatttattaatcgttattaatgctctatttatatcgtgcctccatcccaccaattttagtccatcatatagtcgagtcaataaaaattagtattatattattacaattccaaataataataataaagaaaaggtttgtgattgtggtggttcgtttaaagccatcttcatcagatatttgccacacaacactgaacctcattctgtttctcaaccatggcggccgccaccactaatgctccaacctcctccttcctcacaaagacctctactttctcatcctcctccacctcctcttcaaaacccactctcagattcatactcccattctcctcatctccccataaccccgctctcttccgccgcccactccatctcaccaacacctccctccctcgccgaaaccctccttctgccgtaacaactccaacccccaccaccatttcctccgaccccgacaccttcgtctcccgattcggtcccgacgagccacgaaaaggcgcagatgttctcgtcgaagccctcgagcgcgaa

SEQ ID NO: 131984 - DNA, 1132 bp, Cannabis sativa
  modified_base (1099)..(1107): a, c, t, g, unknown or other
atggaacatagcttgccctttccataaaaaagctatgcagatagcttctatggaattcaatattcttttaggcatgattatgatttggctccagtaggcttggatagaaatcagaactgaattgatgagagtagttctcccaacaaatgatagattccttgaactctaggttctgattcttgatgtcattttctcaaccagaatctcactctctttcctggaaatctttttagcacaaattgggatccccaagtatgtgaaaggcagttcatgtctcctgaatcctgaaagttgcaaaaacttgtccacacactcttgctgcatattgctacagtatatagcagttttagttgcatttgggtgtaaacccaaggttaatgagaagagttttaaagcttgcaacatgtatagcacactcttgaaatctccatgactgaatagtagtacatcatctgcaaaagccaggtgattcaatttgaggctcgaacatctgtcatgaaagtgaaagtcttccttctctgcaatcttccccattaatctagataagtattccatacccaacacaaacagaaggggagacatgggatccccttgtctaagtcccctcctagattcaaagaaaccatgtaaggtcccattgaacatgagagagaactttggagtagacacacagttcatgatgagctttatgaatttgctagggaagttgagcccaattagaacctcctccaggaactcccactcaacaatgtcataggccttatgaagatccagtttaatcatacaacttggcttatttgctttcctgcagtagtgtctcaccaaatcttggcaaatcatgatattatgtcctatgaatcttcctttaataaatccctcttgtgaatgggaaattatttcaggaagaatgttactgattctagagctcaaaagcttagttgcaattttataaataacgttacaacaagcaattggcctaaaatccttaacagagttaggatatttacatttaggaaccagagtaatgatcgtagaattaatctctttaagtatgttacctgattccaagaatgctaacactgttgggttttatgccctnnnnnnnnntccatttcaatgtaatccattttat

SEQ ID NO: 131985 - DNA, 1548 bp, Cannabis sativa
tctgtttctttattgatgttgaataaattagattacattgaaatagaattttatttagggcataaaacccaacacacacatgtcccacctcgtgatgaagtaccatccacacttagtgagtcaataattcattcccctgtcacttcaaaaataggatgaactttatccaaacctaaacgtctttcaaattacatttgcaataccactgctactccgtccactacctaccctattaaaaaatatttgtcttataatagtttaacaaaacactttcgtacatcaatcctcgctgcacactccatggctaaacccactagctacaaaatggcaactaaagacctaaaatggaaaaaagccatggacaacgaaacagatgctctcgaagccaatgacacttggattgttgtcactcttcttgacagacatcatgccattagttgcaaatgggtatacaaaattaaaaacaatgatgatggcactgttgaaagactcaaagctcgcttagtagctaaaggctacaaccaaaaagaaggtattgattactttcacacttttgctcccgtattaaagtttaatacattaaaattactgcttgctattacatccattaacaattggtctttgtacaaacttaatatcaatgacgcctttcttcgtggagatttacatgaaactgtcgacatgacactccctaagggatataaacctaaaaaagatattcctccaattattgtttgtaaactaaacaaaagtctccatggcttgaaacaagcctttagacaatggtttacaaaacttagcaattaccttttatccactagatttactcaatccttttcagatcccacattattcattaaaaatcacaaaggcatgtttcttgctcttttaatatatgtggatgacatagtggttacctcaaataatgacaatgctgttctttcgtttaagcatcaacttaattctgtgtttcaacttaaggatcttggccctttacgttttttttgggcttggaaatcggtcaattttgtgtcccaaagacctttccccttacaacttttaactgacacaggttattaattaggagcttctcctgcttttacaccaatggaacctaatattcgactctcatccgataatggggaaccaatagaaaatccaaaaatattttgcaacatcataggtaaactcatttacctaaccattactcgtcgtgatatttccgttgctgtaaacaaactaaatcaatttttatcaaacccaggagctccccatcttgatgcatctcatagaattttacgatatctcaaaggcacttctggccaagggcttttctttcaatctgcctcctccgttaaattgtctgcttctgctgaaactaacatgtctaattcagactttcatctaacgattttttcagatgctgattgggcctcatgcagtgacactcgaaggtccacttctggctactatgtcttccttggtgactccctctataacaccctaactagcataggcgtattacatgatttttaaacatactgtgca

SEQ ID NO: 131986 - DNA, 1358 bp, Cannabis sativa
  modified_base (50)..(52): a, c, t, g, unknown or other
ttttattattgtaaattaagatagaaatgttactaacatactttttgaannnataattgaaaatatttataaaccgcacgcgaagcgcagtttgtttcttagttactaataaaatatgagtcttggaattaagtgaaactaaaataaaaattttaggaataatataattctccttcatccacgattccctctctgtgttcttgggcgatttttcctttttctttgaatatattgtcattggccaaggagttattttcaccataattgtttgtgatttcaagtgaatcacatagcaaattttgtggagtgcgtagtgaagaaaccaaaacaaaagaaaagaagcatttatttctatgctttcaattacctctgtaagttttcattttgtttttaatcaaagttaccactgatagttattaatcattattgttattgaaattttaatttttttattaaacttctttatgaaaaaagttgttttaaatttatttttccaaacataaatctgtaattagcgtaagtaacagaatgattttcttcacaaagtcttcggcgtgatcgtcggttaagtcttttttttcgttcttccgaattacttagttcaataagactccgatcaatgcatgtgatgctagtgtttgagttaatctggtttgggattagtggtgatggttggatttttttagatccgggtattgtggtagggagttggtttcaaatctgagtgtagttggtgcggtgatggtggttgacggaggctatggtgatgtggtggttgctgttatcgtatggtaacattaacctttgcagttattttatttttaattattatttatttttaatttttaattttatatttttgttgcatattttttgcagttatttttaactaatcctctatagtttttcaaggaagttataaatatcaattactcttattttatttatttttttagcagttattttataatagtattatgatttattttttatgaattaattattgtaaattggtgtaattttgcatcagttatattttatttatcaattatttataattattatttatttttcaattggtaattcatatttaatattttcaactgcagtaatttggtggttggatagaggataaaatttattttcttgcctaagattttaatgtaaggttatataggatcccactatatatgattggtgtttatattttctagtattttttatatattgttgtattattttgtacggtaataatattatgttatgttaatgttcattagtttattatgtaaaattttattttttggagttgacaaaaatttaacgagtttgaacaagatctctcttcaagtattcga

SEQ ID NO: 131987 - DNA, 685 bp, Cannabis sativa
  modified_base (367)..(368): a, c, t, g, unknown or other
tcccaaagaaggcgctagaaggtgactgtaagggttcccaaagcaagccctaactcattccaaaaagaacatggtgactggatgttcctcgaaggatactgaccaacaagggtcacttcaactgttaagcctacttcctacacgggatctgtaactcgatcaagagctcatgccatgcgtacaattcctattcaaaaatcagtgaatccctttgttcaaaaagttcaggaagaggagtgttgcacatctgaacactctttagaagacactccctttatcgaacacagtaagggggtgtctgctgatctcattactcagttcgaagaactaaccattggcaatgataaaaatatgccagtgttagtanntgggacaattagtaatgaagagaagattcaagaactataaagataattggccgagagggatgaagaagtagcccgactctcaacacaattatctcatcaagctaatatgagacaaaaggagagtgaggttgggcaacattcctcgtcttcagcgccgccagtaggcagtataatactgccaccacttggtgtgcaaccaacactagccggtgtccaaccttagcaacacctgaaggcttttatcatggagagtattcgggaatatcaggctgcaacaatgcctattcttggatatcataagccatacccgacttact

SEQ ID NO: 131988 - DNA, 819 bp, Cannabis sativa
gggcaaaatggtcattttttctaattgtgacttcttgtcctttagtggactttagtagaatatgttattttgaattttatcccttaattaatttgatagacataagctttatcttattttagctaaaattagaaaaaaaatcaaagtaacccgttcatctctcttcactgtctctcgaaacccttggagaaccagtagcttggggtgttcttcatctcattttcgctggtttatagtttattctaggtaaatcctttgatggtaatagctttggcacctttctctttagttttcttatgtttataattgggtttctttatgaattatagatttagggttctgtgatagtaaatggtgtttgctgtagttttctgaagttaaattatggtgtattatgttgaatagaagtggttttaggagctgttgttgagtttgagcaagctttcagtttaagaactaaagcttggctctctaatggtgttttgtaattttgtgcatttttaggtgttttgttgccttgtttatgttctttgggatacattgaacacgtctggaaagtttgttttgatttgaggtcgatttgagtgagttatgaagttttgatcttttcctccactaaaccggtgaaccagtttagtgagacctataggaaccgaacttccggttggtccccaagaaatccgatagaactggaattccagatgggaaaccggtctattggttggggtagtttcgggaatcctagtttttctcgtttttgcaatatttagggtattgccatgttatttttcaatagaaaaacttttagtttcaagttta

SEQ ID NO: 131989 - DNA, 819 bp, Cannabis sativa
tacaggttaaaatttttggcacgacacaatcagtacaaactcagaaggcacaagtacaacccagcacgaaaatttacgagctccaaggtcaagagttttgaagtgtttttcttttctttttttttttttcaaatctaaaaaacattaaccgaaagtgttttgtgttaaaaaaactaagttcttattttgaagtcacaattttaacaaccaaaaacaatgtataaaaaagttttttcctcaactcaattaggacttgataaggtctcagtctaattcctgcctatagtacgagtaaaggagaaaacatgaagactatcattaaagtagtttaagctagaattactattatatcttcatattcttttttttttttgacaaaagaccaaatgtcctcaattttaattaaggaataaaataataataataaaaaatcatacaactattaatatatttaaattatactattttcagtagtaatatatcattttttttaattgatttttacttacaattacagttacatggtactaggtttctcttttcttttttttttttctgaatacgaaggtactaggtgaggacagcataaatcttaggtgacaaatggggaataaaaaatcaaatttaaaatgtataaaaaaaaaaattgatacaaaaattattaatgttagaaagatcattcaattcaattgaaatgacataaaagaaattgatacaaaaattattaatgttagaaaaatcattcaattcaattgaaataacattccaatactttaaaatgcaaccaaacaaaagaataaaatatatattatttatata

SEQ ID NO: 131990 - DNA, 1016 bp, Cannabis sativa
gagcttgaagacatggaagaattggcatactacactatcataatgtacttgtcaaacactgtaaaaaggaaggttcagaacatgaagacagtttgagaattgtggagaaaacttgaagaaatctacatgaaaccctctctaactaataagatcaatctgttagaatctttatatggttttaaaatgtcttctcatttatctctagatgataattgattaatggtgaaaattatacattcaataagcttaaagtttaatataaattaaaaataaattaatattttcatgagattaatggaatatatttttatgttgaaaatatttaatttaggtttaatttattatgaaattgaagaaaaaggagtaattatataaagagaaaatcagatttcagcctaggagaagcccactcgcgcgcgcccacattccttatcccgagccgtcgattgcagatccaagggtccaaacagggcgcgtgcccctcagctccagacagggcgggtgaggcgcctgtctcctcctgcccagcctgctagcgccagccgcgtgggagccgcctatcccctctctctccagcagctcctctccgccagctctccatgcgcgacacgtgttcctcatgctgcagattgtccccacgccagcttctctctccagcagccttcaagaaaatgccatttcaaaatacactataattttatattcctttacatttatttggctcattttttttattcctctcagctaataaattgcactttgtagatttgaccattttaccctcacctactttatttatgatagaaatttctaaaaaatattaaaataattaatttattaattattttaattcactcactttgactataaatagcgaagagatgagacctggcacacctcttacaacttcttctacatatatctctttagtgtaatttttagagtagagaaactatagcaaaatttctcttcacttttcttctcatatttctttatgagaatgattagtataatgg

SEQ ID NO: 131991 - DNA, 537 bp, Cannabis sativa
  modified_base (495)..(512): a, c, t, g, unknown or other
aggtccggccgaaggcctaaaatgtgcagatccgaggtggtgcccataaaaagatttgatgccttcgtctgccgaagaaaggtggccgaaacaaacacacacggtcttaaaacacatgctgccctgatatccgtccttagaagctcaaatctggccagccaactctctgggggcaaggccgactgccgatatccttaggctcagaccccccactgtgtcactacacacagacagagcagtgcaagaggtgctagggccaaacaaaggagttatgacctgatgtggttacgacgactaactctggaggggtcgtcagatgcaatgactttatccagctagaaactccagcgtcggtgcctacgcgagggtcggatttgtcttccaacaactacttcccctgccttttttccaagtggtaaagttcctcgaaaaatgatcatgtgatggcggccactgagaggagaccgtcagttccatctgttggaaatattttannnnnnnnnnnnnnnnnnaccaagtatgttttattaacatcct

SEQ ID NO: 131992 - DNA, 1022 bp, Cannabis sativa
  modified_base (27)..(39): a, c, t, g, unknown or other
atttaaaatttatgttgaaatagattnnnnnnnnnnnnntcccacttattacctaattaacccgtaatataattataaattttaattacataccattaggcttattgggggtattacaccatcttactccactcagaacattgtcctaccaaccgtacatgtacctaagaaggaagcatcttcatcacatcagcatgattcaatgaacaactctattgcactgtcttccatggttcattctatgaaaaccaagtctctcagtggcattcgaaaactcaaggcttacttggaaaccaaacaccccttcaaaaatctcttttgcctattgaaccaagatcaatcaaggttgctgtcaagagccctaaatgttttgcaactattacaattgagtttaatgctttaaaaaagcaaggtaccttgactcttgttccttatcatctttctctgcatattatagaaaataaatgggtgcaaagtgtaaagttgagtgcaaatagtacattagacaagttcaagtcaagattggttgccaatggttatctcccaaccctaagtatcgattatgagggcactttaagtcctattgtcaagcccactacagttcgagttgtcatcaatataatttttttcatctttatggcctgtgaaacaacttgatgtgacaaatgccatggaaatctttaagagactgtgtatatgtatcaacctcaagggtttgttgatcctgataaacccaaccatgtttgtcttcttcataaggccttgtatggattaaaacaagggattttttcgaaaatatatgtaaaatataaaataattacaaatataacttaacaattctcaattacaataatatcctgccatgtcattaaaattacctgaattctaaataatataccttaaatgaattctaggggcagtgagacaaccccgtctagagagaaggcaccgaccgaggcagttattgatctctccgaggagccaaccgtcgtagacccttctgccccaaaaatgactaagtc

SEQ ID NO: 131993 - DNA, 644 bp, Cannabis sativa
acgcctagtctagttagggtgttacatatggtcaacattttagagctttcattgagtgcgttgtttatcaatctgatcaatcatcatagctataacaaggagaactctagctacaacttttacttcattgaatattccttaagacccgatgactattgatcttaatgtttgtattccagcaatagttggagtttctacgaacccaatggatgtagccaatctagccaaccctgccaaccggacaggcccaacaaacttgactaacacaactggtctggttgaccctgctagcccgattgatcccaatgaacaacctttttcgcccacggtagctacgccattggcatcttgtacagagggttttgtcaatgtggagcatcccccatgcaccatgactgactcttttccccagtaatgtgttggggaaatagggccagagaattggcgaaccaacaattggtgagcctcatgtggacttgggagaagacattgaattagccagacttagagagttggttgtatgccatgtcagccaaactaaagaaccacgcactattggttgctattgttgggtttttatgcattaaataaaactcatttcaatataattagatttactcattaatatagatcagaaataacat

SEQ ID NO: 131994 - DNA, 982 bp, Cannabis sativa
caagtacaatgctccaccatttcatcaaaaccctaaaaatgctattcaaactcattcaagtatttattaaactttctcatgaaaactatattagcatcacaatatttgctatagaagctcagcatggcctaaaaaatacaacctttcaagtgacattttattttaaaatgtcacctaaatataaattgtagcaatttcaaatgtcactataatatttattatttatttatttaatttttaaaaaataatttagtaacattttgaaaatgtaaaaaatattactagtgacatttttctaaaacgctactaaaaattatttctaaaatgtattaatttttaattaagataacagaaaaaaaataattttctttatatataaatctattagctaatttcaaataatttttacttatatttctattctttatttaattatatttatatatatatatttaaaacaagaactctaaacatttaagtcattactatatcaaaaaaaatttctaaacataaaaggagaatgaatataattttatatgaatattcttaaactaaaataagtttgttacaatatataatcaatatataaagaccattttacttatattacagtgtgtttaagtcttgtcgttttgacatggtagtttgttgaaaagtaatctggtggtgcgttttgcgttttgcgttttgttgttttggtcacgattgtttcttcttcccagtatggctcacagacagaatcagactgaaaccatggaaagaatatttttggtttttcgataaatgatgatgatgatgagggattattatttgataatgtatcggacggtttatcgaagattgatgataggtggttgttagtgggtcgtttcttaacaaatcgatctatgcaaatttgtccactccgtacccttttttttacaacaagaaacttgatgtcaatgtgttttgacttcgtcgagctcctattgttgttggaata

SEQ ID NO: 131995 - DNA, 643 bp, Cannabis sativa
cttcaagagattgtttatatgactcaaccgatcatgggtttgaagatctatccaaacctcatcatgtgtgtcatttacataaagctatctatggtcttaacctagcccttaaaaaccactttggttgcctaggattttacaacttcaaggatagatccttctttgttcatctttggcactggtcacaatttggtcatcctacttgtctatgtagatgacatccttataactggtcctaacactaagcttataccaaatttgttgctgatttgaacaccttttttgaagtaaaagctcttggacaagtgcattattttgtaagtgttgagattcatagagattcaaaaggtatgttcttatctcaaagcaaatacatcactgattcgctagtcaaagtgcagttagagagtgtaaaaccatgttcttgtcctacaagggctgctcaattttctctatctgaagggattccttttgaagataaaaccctatatagaagtacattagatacactgcagtatttaactctcacaaggcccgatgttgccttcattataaataatctatctctgttcattcatgctcctactaatgtacattgggaagcttagggatggcaattatacccgcgggttcgggtacccgc

SEQ ID NO: 131996 - DNA, 1087 bp, Cannabis sativa
tttgctctaaacgaagccatgatagacccattcatcttgccaagaagctgaaatttcggctacttcaagttctgaagaaaaagaaccaatggaggtcccctctgatgattctaagaccaaatcagagtctatccattctgaaaaagagcttccaaaagatcactttggagtctcctctaacagtgaagaaactgaactcgaacccgagccacctttgaccaaatctgctccagtaccttctcgtgcatcttcaacagccaaagcttctactggtgccaaaggcaagcaacctatgtagagttcatctcctagtaatatctctccatctcaagctatcaattctagatttattaccgtgataattatcagcgtgattggaatctttatgctacccaaaagtttgaaagtgagaggaattatgattcgcatgctcatagggtgtgtggtattgttaagtttgttcaataccatcattgggaaaatactcttacttgttttgagggatatattgatggaattgtcaaagaattttatgctaacttgtctgatgattttcttgatgacaattctgaattctttcgtaaagtgtatgtaagtggacattggttttcatttactgaaaaagacatttccaaggctttgcaactgccagaagatgtgacaaatgctataatgtccatggatcgccatctaatactcactgaactcactggtgcacaggttgagtggaaatctgggcagagtcttcgtattactcatctcacttatgcacatacatcactcatgaggtttgcacttagaaaatgggttcccaattccaacgaaactgtggtgtctcaagatgtggcctcttttctctttcgtatcacctcaggagcatccatcaatttagcttcctatatcttcgatcacattgtgtcattttgaagaggtgaaaagcgatctcataagcttgtgtttcctaacttaatcaataaaattttgtcttctcaaaaagatgtggcctactctcatgaaacacttgagcctccccttactggcaccatattccaaccctcggagtattttgatggagcttttcccaagc

SEQ ID NO: 131997 - DNA, 1127 bp, Cannabis sativa
  modified_base (1061)..(1098): a, c, t, g, unknown or other
ggctaattatttattttaatttttgttatttcataatatgcctccacttttaaatgtaaatacttatgtactttctattttttaatatacacaaattatattttattttacttctttaattagccaacttaattatattttatttcaattattttttattatttattattttatttgacttctcataaatctcacgcgcgaagcactgagattatactagtcacaacataggaatgataatttataattagtcacaattttgttacttttattagccacatgttttgctgtaactaaaagtaaaaaaatttgtagtgaattggtattaagagttaggggtctagtggacagtgtgatatgtatttgacgcttgattttgtgattatttgtggtctctttacattgtttatacattttgataatcgtgatgagtagatattttattttaaaagctaactttgcaagaatatttattaaaccaagggtcctttgatattagttatttttctattaggctttataagctcatcccctattttttaagaacccagtttgatgctcgtagatgaggatgataccgttgaaaaagaaagtcattattagtttagtcttattttactttattaaacttccaatgaaactaattttgtattttaactgaaatggatggtctgaatgagttaaattagctaagtgtcagttagaaatgaggaatgatggatgctagatattattttagtattttattaacttattaaatttctctattcggtgactacataactttgggaatattatttttcttttatattaataagtgatcttgattttattattaatatttcttattaatataggagttaatctattatttttaaattagtcttttgtgatatatataaattcaaagatcatttataagtgttattttcatacaatagtcaaagtgtgatctttaactacctggatattacatatttatcactgcctaacacacacaaaatatatttatatatttaatagaaattaatgcatgttctatatctattctatataaaatnnnnnnnnnnnnnnnnnnnnnnnnnnnnnnnnnnnnnnttgggtgactttttttttaaataaaaaaa

SEQ ID NO: 131998 - DNA, 564 bp, Cannabis sativa
taattattggtatagttaaaaaaaatattttaaatttatgataaagaaatgaaattgaaatgtttttttaatataaaaatttagtgtagtgtaagtaaataagaaaaagaaaaaagtaagaaacacaaatattggaggaggcttacaacacgtggagtgggggttattttttttttttttaataaaaaaacttgttaggaagttaacagtgtatgacccattaaaaaaaaaaaacagtgtatgcgcctaggacaaataaaaaaaataacttcaacatattaaggtatgcctatcacaaatatactaagaatgtaccggtatttaaatggtgaacagtaaatttgtaaataatttaaaattaaggttgattcctgtaaataattcttatattatcttgtattttataatttatttattaaaagatttctccaatcagttcatatcatccatatttggtgtatatatacatattgtttcccaaactaattaaattcctaaaagttctcctaatcaacaaacatattatcctaaaattacaaaaaatatatattaagaaaatcatat

SEQ ID NO: 131999 - DNA, 848 bp, Cannabis sativa
actgggtctgcggtggtcattgagtctgtgggtccttgggtctgtggttatggtggtcgtggagagaaggaaccaatgttgtgggtggtggattgtgggtcgattgtgtgctcctcctccgtgtgcgtgtttacggagagcgagagagagaaggaggaaagagagagagagagagagagggttgttcaaatgagagaggtagaataaggttttaggaaaaaatgacatattgcaatgttgaatagtttaggtttacaaaaaaaatggtctaataaatgcataattaatcaaatttcccattatatatctggaatatccataagtacttagacattaagtgtcaagtcaatatccatttgtcattttttattaatatatttaaataaaaaataaaatttttatgacatgaaacattcaaggactgtatgtagccattgacttgatatttaatggtaagtatctatatataaaaatttcaaaaatataacttaaatattattactgtaaaaaaataaacttaagtatgtatttataattagaagttaaatttaaatatttataccgtaaattacttaataataaattaaatcctgtatattttaaaataatataaaataataacctaagctcaattttcaatatatatataaacaattcaaattatttataacatggggttattattaaatttgttctaacaaaagattattttagagtactactttttagaatttcaaaaataaagagtccaatttattattgaacaaaataaaaggttcaatcaataatttttgtaaaatataaaatttaaaatgatatttaccctatatttttatgtttcttactag

SEQ ID NO: 132000 - DNA, 1325 bp, Cannabis sativa
tgcctttactaatccaaattactaaagcggtcattacaacaatggttgcccctagtggcattatttcttgtaaagaattttccattgttggatggccaactttgctttttatgcatttatctttacttttaatgcctcgtatcttatatttgaattgaatatatctgttcattacattttatttcacaattttaaacatttatatttgattcaacttattgatactctaagaaatttttctgttatttctattttttcctttaatgtgtttaagtagttattagtctactatgtatgtgcgcaagcagttataatctatgtgtactttcgattcgcaagcagttttcatttgctttattttatacgagtagttttagtctgccttgttagacacgagtagtttataatctactaaacactgtactgagaagttttaatctaccgtatataacatcattatatattatattttttagagcaaatttaaaaatattttgaataattcacttcaagaactattttgtatattttttgattgctcatatgaagttaggtcttctattcatattttggcttaagtattatttttcaaggcattcttgtacctcgtttataatacatgccagaataatgtgagtcgtcgttaagtattcaacttcgcatgtagctttatgttgttttatgagttgatctcatttacaactgctacttttgactttttcctttctagaggaaaggtttttcaatttcttgactttatattgtctgtagacaattttaatcaattatcctttcctttgtggaaaaaatttaaaatgggtgggttgcattataatatgtatttctatataaattccagttattatacacatatatatatgcccctcaagtaattttaaagaatataatatttgtaattacttgaacaaactttaactgtattaataataaaatttacatattacagagataaatataggatttacattttaactttactggtataaggtcgtaaatgttcactattccaatggttctttattagcgagtcgttaagccgagctaatttataaacatcgattcccactactgcttaaataacatagggaccttcccagtttgggttaaacactctagtagatggatctcgtgtgtttgaaaatactcgtcttaacaccaaatctccaatattaaagagtcttttcttaactcttttgttaaagtatttcgtgattcgatgttgatacgctacattagttatttgcgactcattatgtctttcttcaagtaaatccaaggacaggttcagaagctcttggttttct

SEQ ID NO: 132001 - DNA, 1329 bp, Cannabis sativa
cctcaaacgaaaaggggtggaagccattttcagtttggatttgagatacagaaaacgatccttagacaaaggtttagtgagcatatcagctacttgatcacggctaggaacatatcgaactgaaagttgtttgtctaagatttgatcacgaacaaaatgtaagtctatctcaatgtgcttggagcgagcatgaaaaactggattggctgccaaagcagaagcactttgattatccacccatatgataggagaagcatgcaatgaaacttgcaactctgtaagcaatgacacaatccattttaattcggcagctgtattagccaaggcacgaaactcactctcagtgcttgatcgggccaccacattttgtttctttgctgaccaactaataagattgcctcccaaataaaccacataaccaccagtggactttcgatcatccacacagctagcccagtcagcatcggagtagctttcaagagtcattgttgctgctggttggagaaataagccgtcagaaatggtgcctttaagatatctcagcagtcttttgcaagcctcccaatgagccacggtgggagctttcaaaaattggcttaatttgttgatgacaaaggctacatcaggcctggttaacgtgagatactgaagcgcacctatggtgcttctatacaaagtaggttcatcaaacaactcactgtcatgtaatgacagtttagtggtggtactaatgggattagagcaggccttagctccttccatgtgtaaccgtaccagcaaatcagcaatgtactttgattgagaaagaaacattcccttagaatctctgaaaatctcgaccccaagaaaatagtgaacatgtccaagatttttgagagaaaattcagtgttgagatcactgattagctgcgagatgagttgctggtttggtcctgtgaccaagatatcatcaacgtagaccagaaaaatgatgagtgaggaacccgatccatgaacaaaaagagaagtgtcagacttagaagctttgaaacctttctgcaataagctggatctaagtgttgtcattaagctcgaggagcttgtttgaggccataaagagccttgtgtaggaggcagacatgatcgggtttttcttggtcaataaagccttgtggttgagtcatgaagacagtttcagttaacactccattaaggaatgcattactgacatcaagctgagttacagcccagttggaagtcacagccaaggagagaacagtacgaactgtaactggcttcacaacaggagagaaggtctcctcataatcaatccctggagcttgtagatac

SEQ ID NO: 132002 - DNA, 583 bp, Cannabis sativa
aaaatagattacattgaaatggagttttatttagggcatataacctaacaagttaggggtttaaagaataataccacattttttcttctcaactcaatttgaaagattaatggaacttttatctaaccgtgttttttttttcattttttaggtaagctaacatctctactctatcctcttaatatttatgatgattttcttgcaaaatttattggattatttccttaaaatacattttggaggagtgttttataattattataaagtgagtaattttgtttaacttgaagttttgacttaaagcataactatggcaaggagatgttgtgatatgcagctgtattggaggaactattttcataactacctcctaaggcattgatattttttaaatgtgtcagtaagtaccggtatggtcttatcaaattacttgtgaaaaatccagtttttgtgaaaaagcactttcacaatatcgacaagaagatgttgtcctctcatactggtttagttgtaccttgccctcaatctgggtacattatcatatggttctcggagacccttgctagcaccacaccccaatatc

SEQ ID NO: 132003 - DNA, 842 bp, Cannabis sativa
acaggactaaacatactaattatgcttaagtagattatgtatgtatatagctaataaaacatcaacaccatatatatattatatatatatagtagttttataatattctagaacatcaaccatggttatttccatccctggaacctactggcgaatgattcatagtacctggactaccaccacccgaatttccagaaccatagccagatccaccaccgtgagccccacccgaaccatagccagaaccggagccagaaccagagccagagccagaaccagaaccaaaaccaaagcctttaccgaacccgtttggggacctaccagagccagagccataaccccatccagctcccggactggacccccaaccccaactgtagtcccagttaggaccatgagccgaaccagtggccccagttggattcccgttgccacccccagatgggtctgaagacattttcctgttagtgccacctggtcctgaatgatatgctaaagcagttccagtagtaagcaagagaagaaaaagagtgaagaaatagagtgtattgggatacattgtctttttttttaaaaaaaatatatatatttggcttttgttattcgttcgttagagtgaagattattgtgtaatgatgtgtgtgatatgcaatggggttttatagtgggatggtaaatgggatttcatgtggatatgatcagtcagtcacccgtgaatgtgtgtgtgtgaatgtgaatgtgaatgtgatatgatactttagagcattgctattgggcaccagtggtgcctaagcaccttctaaatgtgtcgacttgcaattggctagcgatactctataaaa

SEQ ID NO: 132004 - DNA, 1258 bp, Cannabis sativa
tccaatgtcaatcatctaatgaaagagaataccttttgacttcaccaatggaagtcaccaaacaatcaaaatctatctttatatattttttctatgaaaattttgatactaaaatctctcaaaaatgatatttataatacttctaattaagttaacttttttttattttttattttttttggcaattattagtattttgtttcttgttttaaattccttttagagtttgaaaataggggccggtgcattatatatgtaattgctaattttttttttatttaatttttttttttaaaaattaactttctttatattgatatcacaaaattattaaaaaaataatataaaaaaattacttaaatattgatattaaatatggaagtgaaatatattattattacttttaataatagcttttaacatatataattgttctcaatcaatattattgagaaatttaaaaggtgtcattataacattttctaataacagtctcattgaataataacattaaatagcttaatttataaaatattttttttattattttaatttgtattaaagcgttgtgttcgtctcgtatcttatatatacttatcaacttatcatctaaaaaagtactgacactaacacaatctgtcacacaaaaatttaataaaatacaaacacaactcgtataaattttatgtcgtgttaaacccccaaaatttcgtgttgtgttggcgtgttgtaagctaaattaatatttttagagtcaatattttatgtagaattcataaatttattttagatataaggttgacacaaacacaatctataacatgaaaaattgataaaatataaataaaaataggattcacataatttttcatgtcatattgaacctataaattaaaatttattgtgtttttatgtaaaatatgcatgttataatctaaattgctacccttaataatgagtttcttgatattggaaagtgtatttaattgctattatattttattcaacataattctataatgactttgcttaattaaagtaataatataagaagtttttaaaaattattaattcaatatatataaaatattattaaatttaaattatgaattaattagtaaatttgtatttattagtgataggcttctaaaaaatgtctagataaataataaaattaaaaatacgtgaaattatatatatgaaaaagagaaaatgaatatctttatatattaaaagtgtctatctaacgacaattctt

SEQ ID NO: 132005 - DNA, 758 bp, Cannabis sativa
gtcctgggtccgggtctgagtcccgatctgggtctgggttcgggtccaagtttgggtctaggtcagggtcctgggtccgggtcgtagctctcagttcgggttcgggtcctgggtctcggtctgggtttgggttcgggtccaagtctgagttcgggtcgcgggtctgggtcaaggtcctgggttcgggtctgagtttgggtcttgggtcccggtcctagtttgggtttggattcgagttcgggtccgggtcccgggttcaggtcccagtcctaggtcccggtgcccgtcttgggtcctagtgccagtcggtcttgggtctcggtcccggtcctgggttccggcctcagtcttgggtcctggtcgcagtcttaggtccaggtctgggtcccggtcccgggtctcggtctcgggtctcggtcacagtcccgggtcccagtcccgagtcacagtccctgtcccgggtctcggtcccggtcctgttctcgggtcctgggttcggtcctggtcttgggtccagggtctgatcccgagtcttggtccgagttcggggccgggtctcgatcccggtcaagtccaggtccgggtcgcgggtcctaggtcacggttctaggtccgggtctaggtctcggtccaggtccgagttctcgggtcctgggtcccggtctgggtttaggttcgggttcaggtctgggtcctgtgtcaaggtccaggtttgggtcctggtcccagtctcgggtcttagtcccggtcctgttctt

SEQ ID NO: 132006 - DNA, 737 bp, Cannabis sativa
ctaacaagtggtaccagagccacctttgttgaattgattgaagatctgatgttttgtttatgaaatttgggaattttgaaattagggttttttatttattttgccgctgctcttgattttatcgcatatatatttttttatttaatatggacacgattggggattaagtatattatgcatatttacattgaatttgttgcggtagaatgcggttttctggcttcagcgtttgaaaagtccagccgaatttttgttttattcgaatgacatatatgtacattatgtttttccgttgttgcttcagttctggtggtatatagtgtactggttagtacattgattaaatatatattgtgaccatattttgtttcagagatgaggattctttttctttaaaacaaaaaaaaaaaagttttggaattgatcagttaatttttttttttttaatttctcgaagttgtcatatcagttatacagatatatatatatatttatatatatatatatatacagataacctattatgcctcttgcggttgaatgcaaccataggttcttatatatatgtttacaaaattttgtcttctatgctgtatatatatatttcgattgaatgtttttgtaagtatttctcgtttgttttttatttttttttattttggacttcagttattatatatataatatgtttcagtgtgtaatatatattacagtatagtttggtaaatatgtatttt

SEQ ID NO: 132007 - DNA, 681 bp, Cannabis sativa
  modified_base (46)..(63): a, c, t, g, unknown or other
cacaagtagttctttgttgtgaccaaaagtcacatttagtcacaannnnnnnnnnnnnnnnnnaaaaagttgtcactaaaagtagctgtttttttgtagtgtagctaacctttggcggcatctctagatgcactactgggtcagctcgataatttctttgagtactctaactcatggagacatatgagtcctcgtggtcctcatatgactgcttagtagtcctattcactagtagtagctcacttagcacttaagtgctaggggtggtggagagctgacaccaggttttgctcccttaataggacattctaaacttttaaccttctaccaagaacatatataatttttgctctgtagacatttgattataaacatataccaattctcaaagttcttcaaattttgattgcaacattgtatccctagacgttataaatggcgaataccaaattttatctcgaacaacattgaagatatttatgaaaatatcactgtcatacattctaggcatcagcatgccaccacacaccaacatgtgccattacttgaccacctcacggacaccactacttaacttgtattgtgccatcttggatgctgacaaattacacatagcactactttgagtagggttgttcatataaaccggaaaatcgcagtttaaatccggaccacgacaat

SEQ ID NO: 132008 - DNA, 752 bp, Cannabis sativa
tgggattagcgtgtctttgaagccttgcaatttaattaaagaaggtaatagattggcttccaccagacaaatggctttaaaggtatctttaaaaatgatattgatatagcatccattatctacgagaattttagaaatacttttattcgctatctgtgcttctatcaccaatggatcattgtaaggaaaatgcagatgcttggcaccgtcttctttgaaggtcattgagaaattaatcattcgaggactttgtacaggtgattgtaccaggtagcaagtctcatcctactccaattcattcaagtacatctattgtgcatttttggttcttttggaaatatttggtccactacaaatggttgccacgtgacaatctagcacaggctggtctgctccataaggatagggattttaaggattgagggctataataattctcactactggagcattttgtgcccctcaaagggcttgtgcatttagagcttgagcatggcttactccctggggaggattaacaactccatgttatcccagaatggaaacttttccatgtgcaaccccctaatcctgatagcacgctcaactggtgcctggtcactcagagggacattcttcccttttttactcagtttctcctactcggttcctccttcctggttaagctttgccttcttcgccttcttcacgggccttggcaacaaaatctgctgggaagagtttgtacttgacataattggcctcagtggcca

SEQ ID NO: 132009 - DNA, 1066 bp, Cannabis sativa
  modified_base (78)..(88): a, c, t, g, unknown or other
  modified_base (986)..(989): a, c, t, g, unknown or other
agtaggtataaataataaaaaaaaatatttataaatattaattgctaaaagagatcttgttaaatatttaattaattnnnnnnnnnnnatagttaattataattaattaatctagaaaaggaatgtttacctattaattacctgccattacaagttaaagaaaaatttaatcatgatggttacaataaaaatataattattgaatagtcactcctataaatatatagatatataaatagattaatattgattggtactttgaatattatctataactatataaaaaggagacaatgttgttttgggcctttttgtagtaaattacaaaaacattattaatcttctttattaattaccatgaaatttttatgacaaaaataataatagtttttataatatggcttttttatataaggagaacattatgacatatattagagctacatttttaacattatcatttttaatcatttttgagcaatattattttaactatgataataaaaaaatatcttaaattattcaaattttcacagtaatgaaaaatttataaaataagtttataaaatagcataaataatattaattattataaattaggataaataatatatacattatgaatttgtggttttttttttattttgggaaaactacctaaattatagtaaatactaccaacatactttcttaattatatattgctattttttaaatagttttttaatgcaaaaattaattgataacaattcgaaagttcatacaaaaaaatttatacataagttagtttgagttaattttagttaattaaataaaatatttgtaatgtaagtatatttttgaccataaattacatcaataaattatttttaagaaaaatataaaaagtgcaactgaacaatgcacatttataatttttctttttaaaattttgattaatttattatatcaaaaacattagttttttatatatctattctatatannnngtggctatataacagaattcttgatttatgagaaattattgggtgacttcttttttaaaataaaaaaaataacaaat

SEQ ID NO: 132010 - DNA, 857 bp, Cannabis sativa
atttagggcataaaactcaacaaataagaatccaacgatgttccagtaggcgagagtcaaggttattcttattttatcaacttcttcattatttcagtgttgtaaacactagtctaagttgtcatcgtagagatgagtcaactaaattttgtatccacacacttatctatcgagatttaacactattatattgtctaacagatgataatctattgaggatatcccgttaaaacaacaaatcaaattagaccaacaatgaagatttgaaattgatactacaataatgaataatagaaaatacaatgcatgttcaatatgaattaatgcacacaatttaaaaattattaaatatttagcaggtaataaagacatgtgaaataaaaaataatcacatcttaaataatttctaagattttaaactagatgacatacagtgtcccggtaggcgagactcaaagatatcataagttgaatagagtagttagcttatctaaaatggacaccattttagcaaccttttattcgatcaaataagaatccaacgttgtcccggtagacgagagtcaaggttattcttattttatgagcttctaccactgtttcatacttattaattttaagtagtcactgtagggattagtctaatagaagagaacatttacaaagcacttatctttcgagatctttacggtattaaatgttcactggatgatcatccaaaaggagaacgaagtctagggtctcgaggtcacattaaaatagtaactatgtaagaccaacaatggagatcgaatatccttaaaaactaaagctcattattttagaagaaattatattttcattttgatatctatttt

SEQ ID NO: 132011 - DNA, 717 bp, Cannabis sativa
cctgcactgtatgactaaagtatggggatttgagtttggaaaatcggctggggaggtgcttgaagtactttttgggccatctggcttgtgtcatggccatttcatcaaggtttgagttagtgtggatattcgcaagcatctgactcgagtgattaagagaaggctcatgcctgataagcctgtgatccaaatattgttgtgttacgagcgtctcccaaatctttattatttttgtagaatactcaaccatcctattaaagaatgcttgttgaagccaaaaaaaattgtagttgttaaagaccagttgaactatggagactagatatgtgtttcatacgttgaaaacataatgggtcaattgctaaaaagtctcgtggctgatataatggtggatcgtcagttgttgtgcatgatggtaggacgaggttggtaaagggtctttgtctaattttgtgggtagaactactgataggtcaaaagtggtggaggtggaggtggaggtggtggggccgacggtggttgatcacaagggtaaggcagtgcgttataaggaaccagttaaatggcacccaatttttggggcatttaatggtgatgacagtaattattttgctattttggaaaattttgaatcatgatttcattgtaataaggtgagtgatgatgattcatgtaaagaccgcatatgattaataccttgtattattaaataattaa

SEQ ID NO: 132012 - DNA, 681 bp, Cannabis sativa
atataatttatatatataaagggagttttacttttcttttatcgaaggttgtatattatagttgtaataaatatattttcagggtcggcattaggtaggttaggcccgcatttaggaccctcactttcagagtttaattcacaatttgattagtgagggtgatactctttttcaatatattttttttttatatatatttctaaaagtgaggaccctaaaatttaaaatgtccttattaggctcatatattctcatcccgtatgtatatcttgtgcgttttcaaaaaaaattgacctttttttttatatatttttgaaagtgagagtctcaaaatttaaatagccttagacttatatattctcaagaccgaccatgcatattttgtttgatttcaagaaattttgactatttatgatgcaaaaagaaaatttaaaatagtgtaatgcgcacctacaaaataaaataaggatgtttgcaactgaatatttgtattctacttcagtactctaaattattcaaaaaaaaaattaaaatcaaacaaaattcctaatatgactattataatgtacatcattatataaaaaaaattaatttataattttttttatgtaccataaataagaaatgatcctagcttgagcaaaattaatgcttttacccaaaaaaaaaaacaaaaaaaaa

SEQ ID NO: 132013 - DNA, 875 bp, Cannabis sativa
  modified_base (538)..(546): a, c, t, g, unknown or other
atttccttaattagaaaataatttccataaataaaaatattctaataatttttccttatcagaaggaagagttaataatggagcagtaatcaatcattgattcaactcttataaacttttttcacaccaaccagtccaagtaaatttcaaattttttcttatttattacgttgaaggtgtcgcaatcttcgagaatccgtcaacaaattgatggtaatagccagctaagcctaaaaaacttctaaccttagtatccgactttggtgttggccaatttcgaacataatcaatctttaggatattacagagaggggtatgaatgatggaatgatgaaatgatagataattactaatttatgatattattattatctttataattattttttaataatactatttgttgagagtatatttgtaatttacaataattgaaggggaagttatatttacactccaaaaatttataaatggactccattttaataatttttattttacataaaatatatattttttaattatattagtttttttnnnnnnnnnttttttcttccaaatcatattcttaaaaaatacttatatcaaacaaaataaattatattttaaatattataataaaaaaattaaaataaaaaattatgtgaaattttattagaaaaagattaaaaaattacaaaaataaaataagaataaatattaaaattaaaataaaataatataaacaattcattataaaggaataaataataatattaatcaaaacattcaagaaatcatgtctcgagttttaaaatagcacttaaccactacaacattcaacagcattagcggcggaccactctgccgctaatactgtcctttctggccgctaa

SEQ ID NO: 132014 - DNA, 675 bp, Cannabis sativa
caagttgctccctctggacctgactgctttgtcttagtccattctgttattcaataagtttgttgacggtcctgggaacactcgaataataagactccccctaaacactagcaaatggaaatgaacctgaaaaatcactaatagtgtgtgtagtagtagagccagaaataagcaccttagccaaggcatgaagaacccaccatgtgacaatttgagtgcaactcagtgagtgcatactcagaatcaacaaaggatattttgccaacaaccataaccatagaaaatacaaagatcataagaagactctaacaattttagagagttgaaaccaacctctagactttattcaagcacaaagatcaagaaaatgaattacaacatttggggacattaaagtttcttcaagaattgcaacggaacgaatcttgattctgcattcttgatcgattatcaagctttgaattgtgagaaaattataactaatggtacaaaatcaaatcaactaaactttaaaaaatcaaacaattagaaatgagaagattaacaaacacaagaagtaactagaggaaaaatagggatgaacaacaaccatatatattggttcaagtctgatagatcgatgtgatctatggctctactctagttctggaacaccaccaaatcctctttattgat

SEQ ID NO: 132015 - DNA, 674 bp, Cannabis sativa
gtaaaataatttccaacagtcttcgcagtcaatgtacatatcgaaccagtcttcaggtctttaaatctcagtcgctctgattacacgttgtaatgccctgtcccatagcaatgcaacgtttatgcttttacaaattagttttaacctaacttattaacttaagaatagtgcggtgggatttaaaacttttaattaaagataaaacacaacttttataaactataactatgtcaagtacagggatctcctgtataaaatttttacactcgtttttaaaattagtattacaacatagggttacaattcaaaatacaatcaaaagggtggatcctgtccattggtacccggggcactgcggttgatatgtacactgctggaaaacctctgactcatggttgatcctctttacccttccctttacctacacaacgaagcacctgtgagtcacagtgactcagcaagaaaagctattaaatcacacgcagtgtaaaatgcaagtaatcacaacatgacataataaacatactcatcattcatcacatattcaacatgcatatacaattaaacgtcaataagatgagacaatctcagtgcctcataaagtacccttaccactcgttaactacgagctacatatgtcactatcgttgccggtaaagcaaacgataagtaag

SEQ ID NO: 132016 - DNA, 967 bp, Cannabis sativa
  modified_base (40)..(45): a, c, t, g, unknown or other
atgtactaaatcataccccttgaactttcatccatgttannnnnnttttactaaaattagataaaattcattaaatctaacaatctaaatagtggaagcagggtcttacgatgtctcttttggcaaattttctcatcatgtctaggaccaattgatgattgtaaatatacatgctcaatttttttggtttactcaaagcagttgcatattgtggcaactctccaattttttcaagcatcaaatcaatacagtgtgcgacacatgaagtccaatagagatgctttcttttcttccatcaataatatacccgctctgtaggcactagcattatcaataaccacttgaacaacaagatgctctccaatttcgtcaataacgtcattcaacattttaaacaacttttctgcatttttactaaatgaggaggcatcaatatttttcaaaaacacagtgcccttaggattgttgatcaagataagtatgcttcgagttctaccgttagaccatccatcgaacattattgaaactctcgttgatggccatgtcttttttatatcctcaactatagtgtcagtagtctttatctcctccttcaatatccaagtcctaagctcatacatactaggaggtttcaatccctaccataatttccaatcgagcgacacatattgataaaggaaggactcttagccaaatgaaaaggcaaagcattctcaaagaaacacctcccaatgtccatgcaaacattataacacatttctttctcatttttgggagttatatggatttgttcagcggctgtcctatcatcacccataaacctatcagttggtcctcttacacctgcagcagacacgtgagcacaaatcttagtgtaataagatcccgactcaaccatctcttcgaatttcatttaagccacacgcttttctaatgttttttgtttcaagagctccacaaattcatt

SEQ ID NO: 132017 - DNA, 792 bp, Cannabis sativa
  modified_base (469)..(476): a, c, t, g, unknown or other
aaattgaatgactttctttgtttaatcttgtaaatgaaacttattgtatgtatacacattggtattgagatagagatattattgttcattttgaagcatgtatgtgtctctttgttggcttgtttcaaagtaaaaaaatttcaaagaatattggtgacaaagttatttgaattttatattttttaatatttaactacataaatttaatttttgacggcaaaatctattgaactcttattctattttgctttttacattttcgtctaaaaacttcaattaagtgtcaccgtaaactgcctatgtgtacaaaagtgtacacacgacatatttttagtaatccacgtaagaatttaaaaattaattaaactttttaaatataatttaagaatataattttttttttgttttttttctcaatcttttttattctttctcttttttcagaaaccttcttcttcttcttcttctnnnnnnnnttcttcttcttcttcttcttccattaccaccatcaaaatcccaaaaccctaagaagactgagaccacatgcgatcaaccttgccgccgaccttaggcgagacaccagacggtgggaccccaagataccagccccatcatcaaccccgagaccccaaactgcgagaaccctaagttcgacttcttcaagtgcgaaccatctcgatttgttggacacggatcttgggctggtgttttggtagaaactgttggaaattattttaccaggaccttagatctactcacaagtgtgttgattaacaccctaaatataaactt

SEQ ID NO: 132018 - DNA, 518 bp, Cannabis sativa
aataaaacaggtttaaaaaaattatagggtgtattcgggttacacccagttacccacggggcggggtaggttaaaaaatttcgacgcttgaaaacccagatcaaaccaaacccacctgaaaaacctattttttttaatatataccagaccccctctgcctttaaaaacaaaacaaaaaagtgatattgtaaaaaaaaccaccctgacccatcccaactcgcactcgatccacctgaacccgacacctgaaaagccggtcgctcacacaagcattttggcacctataaaacacaaatctaaaattcgaaaaaacccgatgtgtactgtagtccccgctttaagcctccattaggtccttacacccatggaataatggttcttatacacgagtacgtcactctggttgcttcgtggactgatgactgaccttacaaatcaacacgagtgttttcagtgtgctttgtcctcactcacacactttttgataaaactttccaagaggtcacccatcctaaaat

SEQ ID NO: 132019 - DNA, 718 bp, Cannabis sativa
  modified_base (667)..(669): a, c, t, g, unknown or other
tcgccatgggtacccgatgatgacccttctcaataagtagcagtctggactgtctccatccagctctcgaacagtactttcccacaggccaatgttctctccacaaaggttgcactgcccatgtacgagaattcagctcaagggttgtgcaagcgaaactcgtcagtaagtttggagaacaggttgatgtaatcttccttaatggcctacaagccatcaagagcctcttgcaacttcttcttctgattctcaagatcagtctgtaaccaaaagatgaaggcagcttggttaatgttctcaatgttcctagcactaagcatgatctccaatctagagaccattctctgcctctctgccagaagaacctccagctcaaaattggctttgtcttttgcaacaaggaaagcctccaagaccttcttacgctcttgaaaagcgtgttaagaccctttagacccatcacgagcagaactcaacttcaccaagtctaacaacaaagcatcacaacatcaatgtcaaacattataactctggtcggccagtcccctaattagactgttatggcttgccagacccttatataagtgtccaaacgccgaccagccacatgcaagaagtgttggattttgtaacctaaataatacacatttcaatataatcagatttnnnaattaataaagatcagaaattattctatgttacatggttcacatgattt

SEQ ID NO: 132020 - DNA, 699 bp, Cannabis sativa
gataaagaatgttcctgccagtggatggccaaatagtcccttctaaagtaccagccttagtaacgtgtggtagacaaaaccctagataggtaaagggcatgccctttatcccttatgcacctatatataccctggttctttcaaagagaagggtaagacttttcatcttccattaccctacaaaaattcctagcagtaattcccatgctgtaatacattgtaatcttataccatccaccctaagaggctaataatatgaactcatggactaagaatcattaacgccaaaacaacgtaaaacatgttgttcatattatttatcatttaacacttcctttaatctctcaaaatatttagttcccaaaaactcagtaaacaccaagttaggacatcaacttgcttttattaggcaatgtgatacatggatgcaaggttagggcgttgacttgcctcctattgtcaattatttactcgacgagaaacttccaaatgacaaaaatgaggcatgaaaactattgtattcagtgcctcgttacagaatgatcgaaggaaaactatttagaagagggtattcaatgccactacttaggtgtgttctccccgcataagcaaatgaaatcatcagagaaattcatgaaggcttctgtggggatcgtgcaggctggcaaagtatgtctaaaaagattattagacaaggat

SEQ ID NO: 132021 - DNA, 821 bp, Cannabis sativa
cctataccataaattaatattcaaaattaatatccaaatgcatgatcataaaatataggtttacactggtcaagaatctccactaaacacacaaacaaatgcatacaaaagatttatcaaattcttcatagtattacatattatacacttaaccatattgtacacaaaacattacatgaatcattgattcatacataacataagcttaatttaaaatactttacatgtcagagcaactttgaagtaacaagttcaagactcacaataacgacatgtttaatgaaaggtgaaagtaaatagctaaactcctacaagataccactacattaccttgagcagaaatcattgataagctccctgacctcaggcactaactccaagaaattcctaaagttaaggttgtctaactttgttctgtcagaaaagggaaaaaaaaatttaatcagagaaaacatcaactattacaaaataaactaaaaatgaacatttagaaaataaaagcttcagcatctgtagacctaggagaagaaaaattaaatgccttcaactctgtccggtcaaaactcgcgagtgcacaaagcccaccgtatattgcaacatcttgtggcgcaattacttcattgtagttatttcccaattcaggattcgtttccaagaactgcatagtgtcaacgggataattgaactgtgttattatatgcacctcccgttaagagagatctagccatagctgcgtttggttgagaattagatttgataattagggatatacgtttgttagttagagagatatgtgggatgattttttttaatataaattt

SEQ ID NO: 132022 - DNA, 591 bp, Cannabis sativa
tgattaaaaaaactatttaaaaaagttttgaaattgatttttttttttttattttcaaaaattagattattaattgaacatttgaaaagtggaaacagttttataaatacatgtattttagaaaatattttcactttatacttaaaaaataaaaaaattaattaagaaagtattattaaatacacccttaggattaaaaaagtaaaataaaaaaaaaatattacatggtggcactagaaatatgaaagcttattttgaatacgttacgaaatcttaaaattttataaacttactaaaaattctcaaatctcaataactataataaatattgctaatgtaaaaaaattaaaatatgttgtttatttggtggtagagattttattatattaattaaagaaaattaagataattacaaattttattgtagtataaaatacaaaggttaacaaagaaaataaataaatattacaacaatatttaaacactatatatagaaaaagtagaagagagccatataatattacatgtatatatgatataagagaagaataagaatatgcactattttgacatatttaatagccattttca

SEQ ID NO: 132023 - DNA, 575 bp, Cannabis sativa
atttgtactatttttgaaaatacatggtccattttgtcatttaacaaaacacagggtccaattggtaacttttgtaaaacagagggtctaaaatggtatttaacccttatagaattggttttgaaaaaaaaaacatcaattatagagcacatagaatttttttttcttaccatgttagcatacatgctccccctaaaagatgacttaatttcaaataaataaaagtaaaaacaaaatattttttttttcttgacaacaaattattcacatcatgttaataaaccggttctaccaagtcactttagctactgttatagtttaattgattttgtctcatgtgaggaatgtcaaacctcaaaatgaagtgactttttacataaggccctcctacctgatatgggaggaaacaatacataaagctgtaaacaaaatatggacaaagactttattaattaatgattaaatatgattttgaactgtgctttgtaaaaattactaattggaccttctattttgttaaatgataaaataaatcatatattttccaaatagtaaaaataagaccctgagcttaa

SEQ ID NO: 132024 - DNA, 524 bp, Cannabis sativa
ttttatgacacccacatagccaacggttttaggaaccgttgggaaatagtataaaagacagttataaaccgttgggaatagtcatttttgtagtagtgattgtatcacaaccttctcgttaatattattaatttgttgccttaattaattatacttatgctatgtaactgacccatatatttattactcataaaatgggtataacaatgtctaatacttctcgaattttttattgctacacttatccaataaaattaagtaattatcatcgtaagtgcatacttggttaggtcattttttcttctttttcattattattatcacttttctttggcaacaataatacatgaattagattgattattgttacaaccaaggccggccataagcataggcgggccaggcctgtgcttaaggcccacctaactcaggggccgaaaaaaatttgtccctttttaaaattacatatttttttttatcaattttaaaaaatagcacattttttttaataaaaagacccaatt

SEQ ID NO: 132025 - DNA, 670 bp, Cannabis sativa
cttgatttgaagcttggattgaagtttgagtgtaaagaaagtgtgttggaagcttgaggctcgattgtgcaatgaattgaggtagtttttatagttgataacttttgattctttgctgaaatattgtggaaaagcatgaattaagtgaaataaccttgtttatgcatgtataaaagagttggagttaatttggttgaagttgagtatgtttatgcttgaatcattgttgtggtgtttgattgagctatagatggaattttagggtttctttcttaccttaattcaattgtttgtggattagtgttgctggaaagtatttgggtaagttggattaagctcaagtttgagcttgaagtttgtgagtttaagcatgattttaatatattttgcaatctgaaatttctgggttaagtgtgagttttaatgcatgttgtatgtatttttataccctatctttgagcttgataagttgtgaacatgttttgagtgtttgcttgtgaattgggatgaaaagattgggtttggttgctgaattttcgtgtttgctgctggtttttctgggtttagaacccagataccgcgacatgctctgggtatgccacggcccgcccctgttgtgggaacctgggagttggccccaggtgctgcggccccttgtgggagtgccgcg

SEQ ID NO: 132026 - DNA, 1559 bp, Cannabis sativa
ataccttttatgtgtttaatatgtatcgttttagaaattcatgtttaggatgttaaaaacatacttgttagtaaatctaggtcctagtaaaatatattccaacagtattaaattaattatgattcacaataacccttaagattaatggttattgaaaatctataactaatcattaataatccacaagtcattgataaaattataataaatcatgttatttagtaattgcttacaattgctaaacaacatacatgctgaaccattcaccctttgagagagtttgttggttcatccttaagatgatttattagaataatagtatcaagattttctactgattacattttgtacaataagagttcaactataatattaatttgtaacacaaattaaaactgtggaatgaaaagaattaaaattgtggtacaatataccatgaatgaagaaatgaatatcctaaagagcagtaaggtctatctttagtaaagttgcctaatggggtggagaacattaattaatcatagattttttaccaataaatactcattaggcaacatggagacataaaaatataaaacaagattcatagctaagaagttcattttgaactaagagtcaataacaaaggagatttacattctcacttgtctaaaaaattctattgtagtaaccttggcatttgttgctcgtttcaattcattcatcaattatgaaataataaactagaggagaaggtatactaataaccaaaaagattttcctttaatagtggtgaacatatgcaagctataaagagtctaccagtagattaaaacaatttctcacaatcggtattttatcttctcatcttttcttttaattttgaaaagagtataaggtgaaataattcatatctcaaattattattttgacataaaaaaaatataaatgatatatataattttaattaatttgagagtagccacaaaatctctgattaattaaaattatgtattatttatctcatgttacttttaattttaagtgtaataaatttaactcaaaccagcattagtaaaatgatctggaatgacaatatataatttaagaacatccatttgcttctatttttagaagcctatgtatgcttaagagtcggaataagactttacattgcatttgtttcaggatcgttaagtagtattagaatactgaagttaagaccactttatttttcattcaaagtgacgaggtatctttaagatattaaatattatattcatacatatatttttgagatgagctggcattctagaaataaagttaaccaattagattccaacgtacttcactagctatgattgatttacgtaaatcaacatttgattacgtccttaagattgagtaagttgtattgtggagaacctacttaattattatttctactatagaattcagatttattcattattttaaggatacacctcgtatgatttattatagagtttcatagtaggcctagagttcagaattatattttaggccattaagaaaattttgcgaaaaattcagctacaata

SEQ ID NO: 132027 - DNA, 547 bp, Cannabis sativa
gttgaccatgatgaaagcttagccttgtccaatttttttcaagctcaagacacacttcttcaagagcttaaaaattttggaaatttggacctttatgagatcaaagccattggaggcgacattggagtcccaccttcctctgagattaatgaccgaactactccgttcaaaaaaagaaagtttgacggggcatctgcgtccctttgctctcgtccttggaagcttcttcgtccccatccctgggctattcgtgacttcccctgggacacggaggatcaagcaaatgccaattacactgtggaggatgagccatcagaggatatttccttatccaatagcgactttggttccgatatgtggaagactaaaggaaagaacgtgatctcatctaggccaatggaaggcacattcgtggtggaggagtctggatcttttgggtctgcccattctcatacccctgtggaggagatggtcatcactcctccacaggagccatgagaggcgttgcttggaactgtagagggttaaggcagacctctacagttcg

SEQ ID NO: 132028 - DNA, 608 bp, Cannabis sativa
gaaatcatgctaaaaaataacatagggtgtttaattaaactaaaaaattacacattgttaaaatatgctaatttttcaactggcttccaaaattacccctaacttttcaccttcccccctcctctctaacagtcttctctctccttccctccccattcgaacccactcttccattcgaaccagacccaatccgacgaccctctcgaccccaagctcactcgaccctctcgacccaatcgacccacgaacccagtggacgtcgacccacacgaacccattcgacccacacgaatccattcgacccacacgaacccattcgacccacacgaaccgaaacccacgagactatccatgaacccattcaaacactcgaacccgttcagcgtcgtcctcggcaccgtccacgaacccattcgaacactcgaaccaggtatgggcttcccctaattttttctttttgcattttatcctttgaatttagaatctctgatataactgaaatatgtagtgtattaaagttttgatttgtaagtttttgtgtttggagaataatctaggctagggagaattgttttttctggattttggtattttgtgcgattttgtgc

SEQ ID NO: 132029 - DNA, 1106 bp, Cannabis sativa
caaggctaaaggaaaacgcccagttatcgacgatgatgacgtcgatttcgctcctcccgttgctaaaggtggtcgtcttctagtgaagaagaagtcgaaggcgtctttgcctgaaaaataatttcaaccttgacagccagtaggaaaagaagaagtcaacttcaagacaactgtaatgcaatagttatatcagttgtgagccaactaacataaaaccaccaaacaattaataattccacatatttaatataaatgaatattacaacaatcatattttatctgttcaagtcgcatatttgataatttcaagccctgtttttataatactatgatattgtagtagcaaaattattattcaactaacgtgcaacttaattgcaactaaaaatgttaaatgtgaatgtgtatctgtaataagaaactatttgttagtattttttttttgttactgatcaataattacttataccttaatagtaatatgtggagaaataattgttagcaaaatatttatgcaactgtaataaaattgttatgaaatattcaaaatagtattttcacgtatgtaactctatctacatgtttcttcgtgatttattataaataaattcaccattagaaattaagaaaacaataaaaatacaccgggataaacattttactatagtattgatgaatttttttttggataatacttgagttggattgtttgggaactctagttcaactttttgagatctgcaattaatggatttgaaaattaaagttaggatattagttttatgcgaattatactggatttctgattgaattttagtttcatagtagtttttctacatttttttatgaattcaaaacaatatatcccttttttgattgatttcggttgtcttatcaagtgatgtcgaaaaaattaatgctgattcaatttctggttgggtttcattattcggttgtgttgagttgctgggtggttgatcgaaggttgcatcacacgaaagtttcaatcctaggaagcgtatggatcatggtttaaaggtgtgtgtaagaggtatttgtgtaatatttgttatttggattatatatttgtttatttggccaactga

SEQ ID NO: 132030 - DNA, 890 bp, Cannabis sativa
atatatattccctcattgtaatcaattcaatgaataataattccttttcttttctctgttttctcctccgtttcttccgcaatatggtatcagagcgggaaagaaagcctttccctgagcgatcttgattcccctgtctttttcttctccgattttcggtgtgagtgtcgtgcttcttcttctccgacgttgtacatcgtgattctattcctctcttcatgcttctccatgacgaatgaagatcaatcaaccactcaatctggttttgaaaatcaacctgcaagaactgatgaggctaatcaaagcaccattggagacagcagccaaagcacccaaaatatcatccagaaaaatccactcgaagatccctccaatccttactacctacaccatggtgataacccaggtaatatcctcgtttcccaacttttaactggtcaagataactatgtttcatggagtagggctatgcatctttctatttcagtcaagaataaattaggatttcttgatggatctattcccaagcctcctgctacagtttatgtcttgtacaatgcttggattagaaataacaacattgttatttcttggattttaactctgtttcaaaggaaatttcatccagcatcctgtaagatgagtctgctgccactatatgggcagatctcaaggttaggttccatcaaagaaatggaccacacatttacagtctaagaaaaggtttgatgaatcttaggaaagatgttcaatctattagcatgtattttaccaaattgaagacaattttggaagaactttccaattataagccatcttgcacatgtaatggatgcacatgtggtggagtcaagaagcttcaagagcaccaccacatggaatacataatg

SEQ ID NO: 132031 - DNA, 687 bp, Cannabis sativa
tttgctagtatataaatatatatatataaatataatgagtgaatgagtgagtttggtagattgtttattctaccacatttaatatttttaagtttacttaaattcatttaaattggatccaattataaatatatttaggtgtcgtttagttgaaggtaatgaaataaaatggaatagcaaataaacaatcttcttccatttattgttgcatatgaaagtattggaatgtcatgtcatttcaatagaataatctttctatttcacctttaaaatggaagaaaaaaccattacaatgatgaaaaaaaacttaataattttttttattaatatttttttatgcattttaaatttcattccattcttattctcattctcaatgttattcttatattttcattcctctcattcaaacaccacctaaatgttaaattattggatagcttagtatttatttgatcagatctgattcatctaacattttaaatttagtatatgttatattcaattgtatccatcccatctaaataaaaaaataaaatttttaatattaatatttatatatacatatatattttttttaggaattatctcatatattatatttttaaatttacagttttaattgcttcgatagttgttccgttaattgttatgtggatttctatgtagtttcataaaatgcaaaaa

SEQ ID NO: 132032 - DNA, 888 bp, Cannabis sativa
aaccccaccaaaagttagacatcaagaattctagttgattgcaaacagcggccggtaatttgaagcagctcatcgtgtatgtcagtattgctttcactactacttgaacctccttccccccgcagaaaaaatattttcattccatgtgtgcatgagacaccaaacttttaattttatgtcactgaacatttttttttatcttgtcttgaatatgttggaaggccaaggtatttttcatgacattcgcaaataggcatgtaaagttgcctacggaagaacacttgggctgttagagttgtgttaggtgagaatgacatgactgatttgtctagatttagcatctaacccgaggctcggtggtagatgtttaaagctctctttattgctaagcaagaactctcagtagcattacaaaagagaagattgtcatcggcgaaaaataggtgagagataggtgcaacacgtcgagtaagagagtaaccttgtagttgtcccaatacttcctcatgtttcaaaagtcgtgataaaccttcagagcaaatcggaaaaaggtatggcgatagtggacaaccttgtaggagaccccgagttggtgttaaagaacttgttgtttcgccattcaaaagaaaagtgaaatggttagttgtgacacatttcataataagagatatccattggtcagaaaaacccattttcctcataatagcctctatgaatctttattccactctgtcggatgcattactcatatcaagcttcaaagcagccacccccttccgccctgaggttcggttcttaatcccatgaattaatttaaaagcctcaaaaatattatctgttataagacaatttggtaagaaggcgctttgtgtttcagagatgacactt

SEQ ID NO: 132033 - DNA, 1275 bp, Cannabis sativa
cgagagaccgtttgttgttttttggacttccatgatacaagggagctgcctaggaatagacaatatcccgagactgagcgccttgtgtcttgacaagcaccccaatcagcgtcagaaaagaaggagatttggacgtttgagtgcgagagactagtctcggcatgagcagatatagtgggggttgtggtagatgaaaaaaataagccttgtcccggggtggtttttaagtattgtaggatgcgatgtgccgcatgaagatggggaacccgggggctggttagaaattgacttaagtgattgacagcaaaagagatgtcaggtcttgttatagtcaagtatatgagtttgcctataaggcttcgaaaaacagtgggatcaggtaagagattccctttggagttgcttaatttgagattggtctccatgggggtggaggcaggtttggtgcctatgtagcccgtatctttgagaagttggagggtgaatggtctttgggaaacggaaatcccatgtttggttcgaccaacttcaagaccaagaaagaacctaatggtgccaagatctttgagtttgaatttgtcatgaagataagtcttaaaatgagatatagcaagatcattgttgcttgcaacaataatatcatccacatatatgagaattgctaagaaaatgttggatgtgcgctttatgaagagagaattatcagatagtgattgagtgaaaccatctgagatgagggtttgacttagtttactaaaccattgccttgaggcttgtttgaggccataaatgcttttgtttagtttgcaaacggtgttgggaggtgctttgtatccggggggaattttcatatagacttcttcatggagatctccatgaagaaaggcattgttaatatcaagttggtggacattccagttgttcatggcagcaagggccaaaaaaatcttaagggtgttgaacttagccacgggggcgtaggtttgagaataatcgatgccatgtcgttgagtaaagcctttggcgactaggcgggctttgaaacgttcaacagctccattttcattgtatttgactttatacacccatttgcacccaatggccttttggccaggtggtaacttggtgatgatccaagtgttgttcttctctagagcatccgtttctttatccatggctagaagccaatggcggaactgagaagcttcagcataattttggggttcaatttcagagtaggctgctagaacggcagctctgaattggggatgtaat

SEQ ID NO: 132034 - DNA, 533 bp, Cannabis sativa
  modified_base (504)..(506): a, c, t, g, unknown or other
cccgaactttagattgggttagaaaatatataggataaaccgcccaaaccgacctacgtacagcctagtggagatgtgttggacgaggtgtggttaagggcacaggagggtcaacaataacaggtatatcagtatgatgtggtgatggcatagtattaaaaatagtggaaggaaatgagtgagagatttaagaatgtacttgagtgttggaggaagagccttgtccagggtaatgttgttcattaaagacaacatttcgagcaatgtaaatccttcctctatgactttcacatatatatcccttataatgagctgaataccccaaaaatagatactgttgtgatctatattccattttgtgttgattgtatggcctcaagtgaggaaaacagcctcaagcgagaagctctaggtcttaaaacttgaaaaattcatctcaaatcatttaagctctcccaaatgtccctgcatgaaattgctaaatattagtgttttataataatnnnagtagaatttgatatataaggttaatt

SEQ ID NO: 132035 - DNA, 646 bp, Cannabis sativa
tgggatgtggaggtgatatctaacttgtttaatgacagatttatctctaattttaggcattcctctctctcaacaaattgcacccgactgctagttttgaagcagagaagctgcttgtttttgttcagttaaaagcacctacaggcttattcagaatgaggagggttatgctcaaagtagtgacaatttttggaaaagcttctggcaaataaaagtacctcctaaggttcttcattttggttggagagccatcactgggttccttccaactaaaatacagttgcagacaaaacatgttaatgtgcctctgtcatgccctttctgcaactctgagagggagagcactgtcgatgtgttaatcgattgttattttgctagatcttgctagaatagatcagctattagcttcggttcaggtggtgtgaatgatttcaaaacctggtttgttactgttactgctgctagaaatagcagttcggctgctgaagtcttgatggttgcttagccgatttggaatgcaagaaatgacgtattgtggaagcagaagacaagttcggctgcgagtgtagttctttcagcaaggtcgaatcttaatcaatggttatgtgctcaacaaagaagaatggatcgtttacttgtttacaac

SEQ ID NO: 132036 - DNA, 702 bp, Cannabis sativa
  modified_base (330)..(352): a, c, t, g, unknown or other
tgggaccgggaaccggaaccggaatccggacccggaccccggacccggatcccagactcgaacccagactcggacccggaccccggacccgaaccccaaacttgaaccccagactcggacccagacccgagactcgggacccagacccgaacccgagacccaaacctggaccaagactgggacccggaccccggaccccgaaccccggacttggactcggaccccagacccggacccaaactcgggacccaggactcgagacccgggactcagacgtggactcggacccgtaattggtgttggggtgaaaatatattataactttacacnnnnnnnnnnnnnnnnnnnnnnncaaacatagtattgtattaaatattactaatacaatacaatataatacaatctaacacaatacatcgtactaaacaagcctaagtgtataaatatgttggaaaaatttataatagacctcattgaaagggtgttttttattaatgatcgtgtaccattttaaataagatttaaatatataattattatacttgtgactattttttttatatactcataataataaacaactgtttaaattttaacatcctcgttgttaagtcccaaatatgtaaagaagagaattatgggatttgaacccatgaccttagatattatgccatccacctcaaccaactaagctataaatat

SEQ ID NO: 132037 - DNA, 1072 bp, Cannabis sativa
  modified_base (1016)..(1021): a, c, t, g, unknown or other
ggtcctttgacttgggaaccccgattcgaagtggagcgctgtatagaattagatttgtgcttgtcaaaataaccgggagggaagccatggaaaacatagcatttctccttaaatgccctggtttctggcagtgggtgcaaaacgcgcgcatcttcttgttgcgagaaaaatttgagggctgggaggaagtggcagcaatgaggtttgggagaacgcggagttttcgttgatgctcatactaaatgatagtagagaacaccttcgataaatatgggaagggttcgctgattaacacttgatctcgaaccgcttgatatgattcgttgaggccagtaagaaaccgaaagaccttttcttggttttgaaatttggtgttatcggtggaagcttgacaagtgcaagggagatgaggtcgaagctcattgatctcgttccatatagcccgaagcttggtgaaataggcagtgatagattcgtctccttgtagtaaatctgtgagagattcttaaagttcaaaaagacgaggtccatttccttgactaaatctattagtaagctcagtccacatctcatgagcagtatcaggaaacattatactactcttaatatccaaagaaacacaatgaataatccaagacattaccatttggttacagcagatcaatgaatgaaacaatggattggacggatctggttgtggtaaggtgccatcgatgaagccagtcttatttttggcaccaagagtgatgtcaccgaattagttacactctagtcatggtagtaaacgagctatatgtcgtatccacagggagggaaaatatactcaaaaggacagttagtaattttacaagaataaaataagaaccttaaatgtgatgagattattgaaaaaaatgatttttgaaaattaaagaagtaattaaaatgagaagtaatcagaagatgattatggagacacaagcttcgtacatgctattatatttccctaataaaattgattctttaaactcaactannnnnntacaccattaattatagttggaaaatatgtataattaagctcactagaaaa

SEQ ID NO: 132038 - DNA, 801 bp, Cannabis sativa
aatgagttttatttagggcataaaacccaacagccagtcgctccaaattcccctgggtgatcgaacgagtgggcagccgaaggattctcccactaagagggaatcgcgtgagtaccgtactccaatcttgggggatttcatccaacctctccataattagtattccattattgaggaaccaagggttcttggttaatatccggtttaaatcttgagatgatttgaacgagaaaacccagaagcttgattctttgtcaatgaatttgatttcaacaccccaatccttatcagtaattccccatacacgacccagaatcgttttgaggagagaccgactcatcggacgattagagcacaaacaccccatagcacagagagaggctgctgccgaggctccattggcattaacctcccatccatcttcatccaggactgtgagattggtaggtctagcaagaagttcgtccatggagatatcaggttgatcttgcgttgcaggcttttccagcatttcaagcttttccagcattacttcaggaaggctcttctcgagagagagcattgtaaaaaataggttatcgatttttttggtgtattggaaaaataaatgaagatgaacaaattaggtataatatttaatattctataattattaataaaatttagattggattaattttgatttttactattttttgtctggtatataagaaatattaatttgaatgtagaagttgatgttatttattttggaaaatttaaaaaactatactttaaaaaccttaatattttattcttaaa

SEQ ID NO: 132039 - DNA, 766 bp, Cannabis sativa
gttcttctggttcatgtcctgatcgtctttcctgtaaggggtctgttcctacaggtttggaagctattttattagctgatttgcattaataaagttgcaatctttgtttcaaaaaaaaaaatactaggaaccaaatcactattaattaggcttggaattagggctttattttagaaattcagggatccaaaccccattaaaaagtaataatacaccaaatagaaactgataattggaaattaagtaagtacatgaataagccattaattattcccactactagaatttttctagagttgaagactatcatgattgttttaatgaaaaacaaccatacttaattttctttataaaaaataaatctaaataaacacgtcattgcattgggctctcctacgtagcgactcgaggaccatatattcattcttattacaagagtgcatcaaaatcaaaataagtcagatttcttgttttgcttgattttaagaagatcatagtaggttttaggtatttcccacttctattcatctacaaaatattttatttatttgtagaaattaaaaaatttattttatatactgtgattgctctttaatttatttgattggaattttaaaattataaatttaatttttcatttaacaaatttttacatgtatgtatattttttctaaaaataaaatcggtatccttcattaactaatcaaatcgttaaaagcaatagaacatactttagaggaacaatcctccaactgaaacacacgac

SEQ ID NO: 132040 - DNA, 1078 bp, Cannabis sativa
cccgagtgcgttcagacatctacggttgcttgttcaacaacaatctccccatgttttgtttcttatggaaacaaaactcggtgctaactccatcacgcacgtccgtcaatccttacattatgctaatggacttgaatctcctcgggtgggtcttagtggtggactcatgcttttgtggtgtgaagatgttgatgttaacttgctgcattttggtactactttttttgattgctatatggtgtttaaaggatgtctgagttttcatttcacaggtttttatggggctcccgatgctgctaatcggtctgcttcttggactctttttaaaagattaggtgatgttgctccacttcaaccttggcttgctattggtgacttcaatgaaattctctctaacaatgataaattgggtggtgctcttaggcgtgaatctcaaatggatgcattcagaacaactttggataaatgttctttgcatgaagttccttatacaggtcatcatttcacttggattaagaaccgtacatccttggacacaatcaaagagcgcttggactggtgttttataaataatcattgggagtcttttttccacttacctacggttgagcatttagactattatcactcggaccaccgtgcgattgttgcgtccttctcttttggtacagttgccgatcatcctggtaaaagcaagagtcgatttcattttgagaaactatggttggctgatcctgaaagtgctgatattatttctcaaagctggtttaattctctttcaactgacccgatttctgctgtgattaataatctgaacttgtgtgctcaaaatctgcaatcatggcatatcaacaagtacggaaagatgaagaaaaacatcaaaaacatgcaagctcaggtggatgatttgaacaatgcagcggtccgcaccagcactcagttgaaaaatttgcaatcggctgaaacgattttagaggaattgttggagcaagaagaagtgtattggcaacaacggtctagagtcgattggcttgcctccggtgatcgaaatacgaaattttttcatgcaaaagcatca

SEQ ID NO: 132041 - DNA, 913 bp, Cannabis sativa
tctcctctagccaagaagtctaaaggcggtgagactccatccaaggagaaggtgccagttgatgaggtcattgacctttctaaggagcgacccgttgtggaccttctagtttagaaggtctcgaaatccaagagttttagaggagggagctcggacgggtctgaacaagctaggaccccttcaacaaccgtagcactgagcatggaggcaaagaggggtaaagacatgttcaagtactatctgaaccaatcacttcctaaggtgagtgaccaactttccgggtgaacaatgagttatccttggagctggtcctagaaggggtcttgaaggaagctactcgggtaattatctcctcttttttatctcattctcttttatgtagcttggactttaacacgctttccatgtaggtcaatgtgaagatggcttatgcctattcccgaaccaaatcaactgttcccaagaacctcgccacaaccaacacattgcagagggaggtggatgtggccagaaagaaaattgagaacatgaggagccaactcagagaagtgaggaatgagcttgaggaggtgaacaagaagcttcttgctgctaacaccaagattgaggagctgaccaaacagttgcaagatatgccttcgaccgagcagttggaggctgataatgtttctttgtccaaggaggtcaataatcttaaagatggagggagagtctcggaactcttctttccaaacttgaggaggatgttaagaataaacagactagggaggaggagctcgagaaggaggtcaggaataagcagaccagggaggaggatctcaagaaggaggtggagaccctggagacagctgctcttgaattctatttaatcagatttacttattaataaagatcagaattaacatttaatgtt

SEQ ID NO: 132042 - DNA, 568 bp, Cannabis sativa
tattcagcttcgcatgtagcttatgagttatatctcatttacaatttttaattttcctttctcgtagaaaaggttcttcaatcaaaaactttaaaagtgtaaaaaaactctaaagtaatgggtttgcaatacatcatgtatttctagatagattcctgttaatcatacacatataccactcaagtaattttaaaggatgacactttctattacttgaaaaatgattcaactttattaataattgaagatcaaaatattacatctgaaatatgagttacatcatcactttacttgtagcagggtcgcaaatgttccacattccaatagttctttatgagcgagccattcacccgagctaatttgtaaacccagttcttactatcgctttgatcacatacggacccttccaatttgggttaaatactcttgcaaatgcatctcttgtatttgcaaatacttgccttagcaccaagtcacaaatgttgaagagcctcttctttactttcttattgaaatatcttgtcactcggtgttggtatgcatcgttagtaatttgtgactcaataaa

SEQ ID NO: 132043 - DNA, 617 bp, Cannabis sativa
gagttattcagtttggttagtgcaatttactcaggttggacaattagaaatatttttagcacctccacagtccactggtgatgttatcttatccttaagaaaaataattgggaaacattcaaattatacatactttatatatacacaatgatgtgtagttaacctcaaacttaaaattaaaaagtgatatgtcctacataaaaatataaatggcttgttaactcaaaaaattttcctagtgacgtgaacattaatgtttgagacgtgccatgaagaataacgccacagagttgagtagactcgagtcatataagttaatttgggaagggaccctagccctatgcctaagttgacgtcgggatctctgggatgaaagtttagacttcaataacatggatctaactcactatctttaagtattctaaaccatgaagatattgagcaacctaatccaaggcccaagagctgaaattatgcgactctgcaaccagaagccaacctgggcatctaggtttcacctggcgcccaagttgacatatccaactatggtttcagttttttaggaccgtcttagtgcaaaagggttgaaacttgcattgaaatatcaattagacata

SEQ ID NO: 132044 - DNA, 768 bp, Cannabis sativa
aggatgttaatgaaacatacatggtagtaaatatagatcatgttaaaatatttccaacatcaacaatattaaaactcattgtactaatattagagcatctttgaagatattggagacgcaagtgggccaattggctagttctttgaagaatcaaagtcaaagatcttttcctaatgatacggagaataacccaaaagaatgcaagatcattatgttgagaagcgagaaaaaacttgatgaaactaatgaagtggaagggaatgttgaagaaattccaaagaatgttgaagtggaagatactaagccaaaagcaacaaatggtctctagatcatctgctgaagtagaatatagagctatggcaaacacaacttgtgagcttgtatggattccctctctgctcaaggaattgaaagtggaacacaagggaccaacaatgatgtattgtgacaatcgtgcagcacaacacatagcttctaatcatgtgttttataagagaacaaagcatatagaaattgactgttatcttgttcgtgaaaaggttcagcaaggggtgattaaaactgctcatgtatcggcaaaggaataagttgcagatattctaactaaggctttatttccaacacagttcaaagctttaaaggacaagaatgaattgataagtctatacactccatcttaagggggagtattagacttaggcttagctttgtcatttggagtcttagttattagaatattttatatatggaagttattttctaattaag

SEQ ID NO: 132045 - DNA, 676 bp, Cannabis sativa
ccccaaccacgtaaaaatcttcatctcactttcttacagctctttattataatcgtattttaatagttgccgaaaatctcggtcaacagaggatatgtaaaagttaatacttaattacattaattattataaataaaatatatggtacctaatagctctacgtgtaaatataaatgatatattatacactctttgtagtgtgactttaaaaaataactaaaaacaacaagtggcatcaaaatcaaatgagtttaataatgtattctttgtcttttggcagaaattattcttgcattgtgggagttcacaagtggctagttctgtcttggacgtttggatgggattaggagctcgccaaagtgaaaattttatcacaatttgattctgatttagtaatggttctaataatcttcacatttttttccttcattttgagatttgtttatctctgattgtatagcaatattgtaacttttctagtattaatttataatgatgatgtatatgttagtatactaataatttatctctaatttgattatagtatttgtatggtgttatagaagaatttgtctatatctattttgattaacatgtaaattaattttagtttttattttaataaaatacatttttgtctatttctatggtgtaatttataaattttacatttagt

SEQ ID NO: 132046 - DNA, 531 bp, Cannabis sativa
atttaaaaaatataaataaaaatactagttcagatgggatacacatatatactgtataacttaactgctaaggtgaacctatcctttatttttatgatttttttttctcattttaatattttattttggcaaaataaaatattaaaaatcctacaagtagtgatcgaaatgcttagatagttattagttagttaaattattagactgagaccattttgtaaaaaaatgtaaagattaaaaacacagattaatgatttaaaaaataaacgtttcactaattatctattattttatgttttatttacacatgtattgtagacttgtagtagactaactaaggagtattattgggttggtgttgaagtatattgagtctaaggttttaaattttgaaacctttatatatattttaattattatcaacattacagttttattgttttagtgtaataataaaacttttaaaaactctttaagagttttaatctttcagactacacattaaatatttttttttcaaaaaaaaaaaaa

SEQ ID NO: 132047 - DNA, 1292 bp, Cannabis sativa
agagtgaactactataaattttgtttgtctctctttaatatttacttaattcattattcatctcgccaatctagcgagctagtgttggccatttttcagcgtcaatcctattgcgaaatttattactatgcaagtgcacatagtcgcaatttgtaataatcttgaaatatcaagtgtcctcccacaaggaccgattatcaattactaaataattaatttttgtttctatatgattaaataaaaatattggagatatgtgggtaaaacaaaacaatcaattaaaattaagagaaatatcaatgagaaaaatattgattattatgatctctaactagcctttcttttacttcttaaagaactacccaatttatcttcttcctactaaatattgacaaattgaattaagtagttcataatctagttaagacttacaaactcaatctatgtgacaacttcctatattcctatggcaaagtttaatcacaaagaaagcattaaataaactaactcataaaaatcatacaaataatctagatactttcgttctaaatcaatttccatccataacaatcaaagcatattcaaatcttactttttaaaattttgattcgaattcataaataacaattaacgatgattaatcaataattgcacaattaaatcatattgcatggaattgaaataatagaagaagatgaaattaaatatctactttaatccataaaagaaattcaagtggttcacaacacttaagcttttcaaaagctctcaaaatttatagccctagtcgcccatcattctccttcttcttctcttattttcgtgctcacatattgaggaaataacccacactattctatttggtatcttgagcacaatgtaagaccgtgaagcaactgttcatttcaagttttgaagattcaggttcagtacttgtttatactaagcgacagacaagaatcaaaggttagagtactgaataaaaggagtcaaatttatgttgtaacaacctttgtaagaaatctcaaactcaattatcttctatgttcattaaaatgcaagttgtaggaaatagttatttatgttaaatgtctttttacattaaaaataaaagatcctgcaaaattacttttcagcagcactgcggttacaactaatggagacgccactcttacatgtgttagtacgatttaacacccgaccaacacttctcccaccccatcatctcctacgtacataccacctgcaactaggggtgttcattggaccacatccaatgtttttaggcctat

SEQ ID NO: 132048 - DNA, 762 bp, Cannabis sativa
aagattctgaaattgaattaaaagaattgaacactaaattctcagatcattaacgcaaaatcaaacacagaacactcagatcaaatccatacataacgaaatcaaaaaaatcacttgactattaaacaaggcaaagcaaaaaagatgtcacctgagacttttagattggcgatggtggtcgtcgacaacgagagtggggactctgagtacggtagaacgataaagataatggggagaagaagaagaaggaagaagaagagtagaattagggctttttctgtaccattgtcaaatttgggatccgattcagaatattaatgggccgggtgtccatggcccaggcccagtctcttccttatctgtacctgaacttaacacattgaataaaaaacgacattataagtgataaacgacattaaataaacgaaacttttttttggatacaaaatgccattagaagctataagcgaaactttttttcagaaacaaattggaaaaaaacgacattggaagcaataaactacatcaattaaacgatttttctttgcagaaactacactgtcgtttttggatacaaaaactgcaaacgacattagaagtacccaacgactctgtcgtttgttggatataaaacgacattatacgataaaacgacattataagtgaagaaattcttttttgagaaatttactagtaactaaaaactttttttatttacaaatttagtgtgacacgcttttttttttcttttttacgttttgt

SEQ ID NO: 132049 - DNA, 1184 bp, Cannabis sativa
agtttttggccattttaccccttgactttattttgcttaaagtgtaagtaaaagggcaatttagtaatttgtcaagtgtgggatttggtggctgcctaggggagtgacacctagttatttatttttagcaagggtttaatttattaaaccttatttcatttagaggaaaaactaagaaaagccaaaaaaaaaatcaaataacaccctctatttcccttctctctgtttgaatcagcaagaaccagggggtttggtggcatttgaataagttttgagcaagtttagagttgtttggggaaacctggtgcaaaccagtagctagtttaccagaacgtgtaaaaccgattaatcaattttggcagattccccgaacaacttgttttctcaattcttgcccattttatatccttagttgggtgtttccctgtttcttaggttattgtagttcctatttagaataacaataccttaagttgtaggtttgggtttcccagattagggttttgacatgtgatttacccagttatgttatgtgattagggcatccatctagcatgagactttccgttcaagtcagccaactcacttgaattcagaaagaatgtaagaactgtgtataatatgtgatatgaatatgcgaatgtatgtatgtgttaatgtatatgcatgcttgttatgattgttacactaccaatacttgtacggaaatggtacagagtgcattggtatagtgtatattgtaaggagtacataacggtgataccagcacaagtacagaaatgtacagggtgtgtgtggtatatcacttagtggtactcagggtacgaaagaaaccctaccaacactcgtgcaatgaggtacgtagtgtatgtggtacagtggttgtaccctagtatggaacgttcttactaatttgtttaagtcttgtaaataggtctatgggcacctagatacaagtcggtattatatggtatattatatgcttttcctactgagtctgttgactcacagttctacttaaatgtgtaagtaaaggaaatgcgaaagttgagcaggagtgagcctgagttgtgatgggattgtacatgtcatggcagtgcgacctggagtgttcggtctcgggacatctggggtttccattttgtagttgctatgcgacctgacatttgtattttgtatatttt

SEQ ID NO: 132050 - DNA, 798 bp, Cannabis sativa
atccctgcttcaagcagagtcttttgcaaatcccacttcaggttgttaggctatttttagcctacgttttgggtcactttttatagttgtttttccttctttgttattctttttggaatagaattacgcttgttttctttggtttcaggtttcacacttgaaatatatcaattgatcaaatttcgaaaaacaacaatctatagaatagagaaaattttgtaagaaaataaagctgaaatttcaaaactaaatttgactatgttttgatcagattttggaaaaagtcaaaacacagaagctttagatctcttctttctttttctaacacatcttgaatcaactcatttggagtttgtatgtgaaatgtatgtatattttactgaaatatgctgaagctgtcaatttgctttagtattcgcgacccttttttcatggttgcgactaagaggccagacagagagcatggattttctaatttgcctatggtcccgactaagctttatgtagtcgtgactatgggctaaagacgagattttttggcagttttgtaatttcacaatttgaagatatgtgcattattttctatatgagggttgcgtgttttagaggcagaggaggtagaaattaaaccctagaactgaagaatgaggtaaaggaagcaattatggtgacctagagcaagatcaccaactagttctttcttccccttttttatgtctttatgttaatttctgtttcaatttttatggatgtgaacatgagctttttgaactgaattcccaatttaaggatatgatg

SEQ ID NO: 132051 - DNA, 561 bp, Cannabis sativa
aaaagataaaggaaaaccatcactaacctctgtaccgaatatccataccaacctcgcgtgccccagcgaagatgtcgacgacattgttatctatgtcgttttgggaggtgctggggagagacttagttatatgatggtggatcacttgagtgttgacgaaggtgatggtgaagcccttagatgctagcttgattgctagatggacggctgggataacgtggccttgtaggggaatgggaaaaacaacggcgtgtagagcttttggggttgtggtagtctccttcgcatccatggcagctctctcttaatatataaattcttataaacacatatatgtatatatacatagcatatagaatatcccaggcaactattgggagatcctggtaaactcctcaatgattgcgctaattattactttacttaatacaccaatataatgtcctcaacggggatagcctgctcaaacttcctctttgggttcaagtgtacaacacccctttcctcaagcgctcagaagaattggcggccctagtttcttcttctcttggccatatgttg

SEQ ID NO: 132052 - DNA, 1490 bp, Cannabis sativa
atttaggacacaaaacccaacaatgagctttctcgagaatctcatttttaagtttcgcactacctgaaacacaaactctagtcttatacaacagcatcccatttcttgacaccgtaaaatctttagcttaaccaactaaaacctcttctcgaatcttcaccatttctggttcagttaaccgaggggctttattgcaatgtcaaattataaagtttgcctataacaaattcaatacctgatctgaccatgtcatctgctagttgaggtgaaatattgatcatactagttacttgcctgggactctttctgcccagggcatcagccaccgtattaacctttccgggatggtaaaggatttcacagtcgtaatccttaacctactttaaccaacgtctctgcctcatattcaaatcttttttagtaaagaaatatttaaggctcttgtggtcggtataaatctcacacttttctctgtaaagataatgccgccaaatcttcaaagcaaaaaatactatggcaaattttaaatcatgagttgggtataactgttcatattcctttaactgacgggagacataagcgatgacccgatcggcttgcatcagtacacacctcagaccctgtctagatgcatcgtagcaactacaaacttttctttgtcagatggaagggctaataccggagttgtaatcaatctttgtttcaactcttggaagcttgcttcacactaatctatccataaaaactattgattcttcttagtgagttccgttaagggtgttgagatcttagaaaatccctcaacgaaccgacggtaataaccagccagacccaagaaacttctaaattttgtaactatctttagtctcgaccaatccctgatggattcaattccctatatccaccttgattccatctttactgataatatgtccgagaaaagacacctgagatagccaaaactcgcactttttgaacttggcatatcgtttatgttcccgtagttgttacagaaccatctgaagatgttgctcatgcttcgcttctaattgagagtacacaaggatgttgttaataaatactataacacatatattaaggaaatctctgaataccgtattcatcaaatccataaaagccgctagagcgttggatagtccaaaggacatgaccgaaaattcacagtgtccaacctaatatggaaagtagtttttggaatgtcctcctcttgaattctcaactgatgatagcccgatcggagatcaatcttaaagaagactatcttccctaaagctgattgaacaagtcgtcaatcataggtaaatgatacttgttcttaatagtcagtttgtttagttcctagtagtcaatacacatgcgtaatgatctgtcttccttcttaaaaaataggacaggagctccccagggtgacacactaggccgtgaaaaccctaggtcaagcaatgtaacgtccccgcttcaagcctcca

SEQ ID NO: 132053 - DNA, 627 bp, Cannabis sativa
aaatacagagtccattttgtcatttaacaaaacgtccaattggtaacttttacaaaacagagggtccaaaatagtatttactctaaaataagatataatttttgctttttcaactatcacttttgtacaattttgttctctcaatttgtctcatcaattgcaaaaattctcttcttgaattatgcaaattgttgtaaatatttttttccatatattcttttcttttattttataacaatttgcgtgagataggagttacaattataactatagtacaatgactttaaacactaaaatttaatttgttttaatgcacatatacagaagttatattaaattactaattatatatttattttttatcttgattcttgaattggattagattaatattatcttgttattatatcaataaattatttaaataaatgatcaaattattgctataaaagaattttcggagagataaatcttatttattttacaaaatcatattgtgacacatgtagagaatgtcagagatgtgaaagatcatttctcaaaaaattatcaaatcattcattttcatatccaacatctcttgatcaatgtgcctccttaaatttttataaattaaattttatatat

SEQ ID NO: 132054 - DNA, 809 bp, Cannabis sativa
cactctccacatatacttctagtttttgtagatttataagatctccttctaattcattgatgaattatatttcttcaattagaatggcattagtttgcacttcaatgtgttagatcatataaaaagttatggtggtctaatattataatttgattacagaaagaactttcaattatatacgtatattgatgacatatttaaataaatttgagcatatttgactaggtgaatggaaggtggcagtggcactgaacttttaattgtgaaactaactttttatttagtggagtgaaactagcatttttgttaagccattttcataattttgttgttatagcagtgacactgaactatcaatagttaatttaggaggttttttaaattgacttttgttccattcctactatacaaactgaattctccttaattgtaaagtttttcgttttctaattaaccttttattattaatatataggctaaaaaattaatcccatggtatatatttatgtggtgaaaaaaacattattctaatgattcagtagaggtgtaaatttaaaatcaaaataaatatagttataaatattaattttttttttaacatcacccgttaacttcttaaatggattataaatactttcgcatgaatagcgcaactttatcgaaaaataccatagatatattattaacaaaaaaaaaaatggactatcgaacccaggcagaataaaaagttcaaggagtttttacaaaaatactagattttgaataaaagtttacaattttactgtcacgcggaattttttacaaaaata

SEQ ID NO: 132055 - DNA, 920 bp, Cannabis sativa
cggtctcggcattcctgctgaaccgctcttccgatcttctctctctctctctctctctctctcttatacacgctcaaagggatttttacctctctttctcatacgcctccaagctttcatctctctctctcattagagatctacctaccgattcatactttgtaaccctaaagagagctatatcaaatctcacatatagtaatctgaatagtattacccataagtattaatacaacttaaaagagagtaggttattacccactaacaaagggagtcgaacctctataaacatctttgtgttattttactttctaaatctaattgtgtaacgcgtggcaaacattagtttaatacgaccccaatgtcagttggccactttttgaggtcaatagttttaatgcctaaatctaccaacaacgataattgcacaatcttaatttcactcaaaaatagaacatacaaatacgacatgtagcagtaaactcaaagaacacaatccaagggcaagaatttgaataaatacatacccaatagtgaaaatagagacgttaagctgatcttcgcttggttcgattaaggaagttgatcaaacctttcatgaagataagatgcgagggcaatcaataaatcgatttctatatcaaaatccacattcataatttcttctagcataaagctctcgatcacttgggtggatggtttggaaactctcgagccctaatcctcagtagaagttgaatgcaaagattgacgacacgttctagattgatgtaggttgcttgggtgtgagttcggttctaattctcaaagaatgcagagaaagcttgaagttctaagaagtcaaaaatttgaaattaggggaaaagtggtaattgaaagttgtgaagggtatttatacccaaagtggcaatccacgtgaa

SEQ ID NO: 132056 - DNA, 736 bp, Cannabis sativa
  modified_base (618)..(632): a, c, t, g, unknown or other
ggaggactcacccatctagcgccttaggcaccttgcctcctgttaggaactactgcagtaagctcctcggtgacgtagtctactccttcaactacgacttcgccctctgcagacactggctacccggcatcattatatcttccaaagtttagaggctcagcatcctcgtcctcttcggcttcggaagggttgcaaggacggatgtcgtccggctcatcaatctcccaaacctcaatgtccccttcgtgatctccctcctcctggacaggaagatcctattcggcactgggtagtgcggcgagttgggccatgtgaggatcagatacgttgactttccgcatcgttttctttgttcgagctgtcatcctacgcctggacgaatactggtgtgaattctgagcaaccgtaacagcaggaacaacaatggggataccaaagttccctgaacttggacagccaacaggaagggtgtcaacaacacctggcagaacaatgtatgtccagttggacggaagataacgtctccaacctttattcaattcccaaatgaagcggtcgtacccctctccagctatctactcggagtaatagtggtttgtgttggaattattttaccannnnnnnnnnnnnnnaccatgtatgttgtttaacatcttaatatgaatttctaagacatttaaaataaacacatataaagtttaagaaaccttacattgattgcagtggaatataatga

SEQ ID NO: 132057 - DNA, 583 bp, Cannabis sativa
attatggtaatattactttcttttttcttattaagggtcttgttaccccatataggaaaaagattttaaaaaatatatatatgcgtgtgttttatttggttattgatgttagtaatgtttcgatgagatatattataacgcaacataaaattgatcatattaatatatttatgtatgttaattttacctgaatatattattatttaataaaatattttttattaaattataatattattatatatatatttaaaattaaaacaaatttttaattatgagagacagttctactcaataagataatattagagcacaccaatgtaaccgcaataactaaaaaaaattctaaaaattaaaatctcaaaccttattttaaatattaaaaaaaaatacattacctaattaaataaaataaacatacacttactatacttaagatcacttaattaaacctaattaaaaagaaaacatataacattatatatataaacaaattttacttatcacatccataaatttaagtgtatattttatagatataaatatagggcaagactagtaggacctagcaaaagttccctac

SEQ ID NO: 132058 - DNA, 603 bp, Cannabis sativa
cctgacactattttacccttgcttatacattagagcccccaggaaccaaggctcagcaaaaaaaaaaaaaaaatcaaacccaaatagaaaaacatatcataattataaagacattacgttaataactctaattttaaggtgaacattcactataagtctatctgataactctctctttcttattagttggatgcttagtaataggggtggacaacattcaatctaatccgattgaaccgaaccgatccaatctaatctaattacaaaaaattagatatctaattacaattagaatggattagatgctaaaatttagattctaattggattggatcgattaaaggaatgttaatctcaaaatctaattaaaaaccgatctaatccaattacatttatatatgttaaaaaattatttatatttatttatataataaaaaatataattattaattatatatttattgatttttcttatgttaaatttgtaacaattggttattttgtgtattttttttatgatattttgttatattttattatttaaaaatattgttattttaattatttgaaacttttagttgcattacattgtaatgatggtat

SEQ ID NO: 132059 - DNA, 677 bp, Cannabis sativa
gtttccatcgaaaccctcctcctctctggccctgtaacttcctcctcaacaccaccaatgcacaatctgaaagaaacccagaaatggatctcgaaaactagagaaagagaaaggaatcaacccattttcatggtgatgattcttcaattttttggggatgaatattggtggggtttgttgaagacctggggacccaaaaaaaaatatagaggagaagaccgtttaacagttaatttttaattttttttttcgacacaatttaagagttaatttttttttaccattagaaaaaaaaaacagttaatttttaatcaccctaaattaaaacaattaacttttaagtaagatttttttttttttttggttcaaatctttaataaagattagactaattaggctttctctctaaatttttcaaggcattaaaaatttactctgaatttagagatggtagaatagggcattttcgtgtgtagggtcagggccccgacctaataaggcggccccgccctgtgaggattgctattgaggtctttgtctcgtcccatctcgcgattctattcgggttaggttacaagagattgagcttaaaataaagacttcggttgaatctagggaattatttcacaaatacacaaaaacaacaaaaatatgatttcacagaattttaaatattt

SEQ ID NO: 132060 - DNA, 1165 bp, Cannabis sativa
ttaagaaacaatagtcaatagtcttttttaatttctttttctttctttttctatgaaatattaaataatttatcattaaaaaaataattgattaaatccacactattgcagattggattggattggattggatttaaattattatgcggatcggattggatccaaaatataaaattcgcatttagtgcagactggatgttgtttgaccaaaaaaatgctgattggatcggatgaacacccctaagtcaggttatgattgagaaaattagatgcgggtcaaaaatgggtcgacgcgtctaacataaaatataaaagcatgtcaaataaaatatgatacgaatacgacacgttttgccacctatctagattctatattgtgtattgatcattgggcatgtacattataaaattattgttgtttcttctataaaacaaactaatttacatacctttatacttagccaatgtgtgatcctaacattacaccgttcctttggagccgtccacgacggctgtcggctacaatgccctactcgattcccatttggggtgcatggctcttacaccacttgatacaaccacttgggtagaactcactcccaaaagttagcctaaaagaaaacggtgcccaagtagttatatactactaaccaatctcatacttagccaatgtgagattctaatatattgttagagcattgttatggggtaccaaggtgcctagtacctctatgatatgacgtcttataattggttagcggttctctataatctttattaaattaaaataagtgagacacgttattaaattgcaccaatatcgatactatacctcataaaagtgctaggcaccataggtgcactttaccatttctcatgttgtcaaaagggaactcactcaaacaaatgacaagcacaaaggagaaggtaagtcatcaaagttcaaacacaaaggtaatgacaatgtataaaagagggtcccatcaatcacgtttaatgggatcgggttgagcttgtgacagtccttgggttggtttgttggctatcatgaggtattgcacctcccaaaaaagactatgtctgttatatatttgttatttaataaatatataatgaagattaaaatgtggcatattatatattagggtgcactcttaatgggtat

SEQ ID NO: 132061 - DNA, 747 bp, Cannabis sativa
tcatgatttagaattggccgcagttgtttttgcactgaaaattttgtttttttttaatgatacggcgaccaccgagatctacaaaaaataaaccaaaaaaattacagtaaaataaaaattatagatacaaactgaaaaccaaaataaactaaaacagaacatcacaaaaacaaattaatatttgaaaagttatactatcatttattgaaaaatcaaaaaacaatataaatccatagaaaaccctaacgcaaacaaaatcaacaaaataaaaaataaaacacacgcaaatacataagttgaaaaccgaaaaaaccaaaaaaaaaaaaagatccaaaaataaaaccgtaaaccataaatccatcaaaacaaatattaaatcaaaaaataaaccaaaaaaattacaataaaatagaaattatatacctgaatactatctggaactccaatctccaaatcgtcactatcatattcaacatcgtcttcttcaaccacctgcttcatctttttcaaaggacgatctgcagatttccccttcttagactcagcattattcctcttcctcttcgaagaaagatcagactctccactatcactaccctcaaacatttttcttttgctttgttcttcagattcatcgccttggacgacgcagatggataagtagacgatcgtgttttcaccattactaagcatttagagagaagaaatgaaataagaaaaataaaataaagaacacttatatttaga

SEQ ID NO: 132062 - DNA, 1049 bp, Cannabis sativa
ccctccaaatagtatccacaacaatcgaggcatataagaaaacatcatcaactcgaacccctctattgttgagatctcagataaacttgacccaatcccacactcgaataccagtgtcacacactggaaagatgccccaaggagaggagcgccaaaaatgaaaggccacatcacaggacaggaaaagatgttcaaaggattcctcccccaatccacataagggacaactagagtcctcaatttggaatcttcttccgatcaccgctctaacagggagggcactagaaaggatacaccaccacagaacattcacttcctttcactttgattttttttttctctgtgtaacactctactagataaggcatgccaccgaattttttaaaatactgtgttaactttatcaatcaacgtgtaatgaccacttaattttaatatgagaattagcaaataatgagagtttaatttagaatttagacttttaattgttattttgcaaatgtggagatatatttgaattctaggtgtactaattatgttatatgtgaaatttcgtgtttttcatattttatgtctggtaacagtagaatgtgacgtatggccaataaagttattttattttgatttagtgttttagaaatagcaggtgggtttagttagacatttataatatcgagaagattaaaagttttaagtttgaccaaaatacctttagatttcaaggttacttcataattaaacaatagctaaattggtaattttaccctaatttttgtttttaatggatagtagatttactagtaaaatccctaagattttatgctattctagtaagctaaattaatacattactatgccttaagcttatcatttactcaaataaataaagaatcagaaacttcatgctcttttctctctctttctatggtcggctacatcaaaagttaaggaatctagatttttcttttgccaattcataaggttttagctaggaaactcttagattttgttagattgaagctaaaggtaagctctctctctctctctct

SEQ ID NO: 132063 - DNA, 806 bp, Cannabis sativa
ttttagagcaattgtgttttgcaattgtcagtaggagattcgtcagtgctatacctcccctatttaaatatttgtttcaaaccatgtaattttattgcacattagtctttcagttgttcataaaattaatgtgctttttaatttgttatcatgtctgtaccgactacctttttgatcgctcttgaaattacacacatataataagcatgttacttatctcctgaaaaatatatttatctatatttaaatgtattatatctaaatgtaagtgtatctttttattgtgattgtagcgatatcaaataatatggaatttcattcagaagatatgttcaattacactacttcaaatggatccgtacatattcatgttgaatccgtacatattcatgttgaatccgtacatattcatgttatcatagctattattaaacttatggttatataatttattattttgggtaattcattttgtggacttaactcattgtcttggatcttgaaagttaagattcagattttaataataaagtgagatcaaagatcatttcaacaagaattgatgctacataaaatttatgctgacaaatttattggtaatagaattttgattttccatctacttggctctacttttgttttgtatactttttattgtgttagaaattttatgttgtttttttttttataacaaagaaattttatgttgttggtacatgtataataacagtgtttgattatgttaatctttttgaaatagatgattctatgtaaaatttcgtaaaaactgcaaaaaaaaaaaaaaa

SEQ ID NO: 132064 - DNA, 540 bp, Cannabis sativa
agtttagccataatttttcgagtaagaaaattaaatcgtaacaaacataaaagtatagatagtttggccgcaaattactcaaattaaaattataaaagtagattgatatgcataattaaaaaatgcgaaacagtatttttatcagtaaattgaacctaattgtaacaaacttgaagtcagtttttagtacaaagagatgcaaacatgtatataccaatctaatcataatacgtccaactctttggcactaaaaaatttacttttattcacaacaaatcttttgattaaaagtgaaaacttgtgactaattataaatcattccaaacttgttattaaagtgtccgtggctaaaactcttagtcacaaaaatcacaagttattgtaactaaatatatttttagtcacaatactcgttatgactatgtggtgaaaaacaccctcaatacttggccaaatcagtgccaattaacaacaagaacaacaccaacataacaagcaaacaagattaatacaaaacagaaaactaaaaccagaaatgaa

SEQ ID NO: 132065 - DNA, 1624 bp, Cannabis sativa
atcatgaatgcttagtagagtttatatatcttaaatatttatctatagtgacgtaggttctgagatatattgtactgcggccaggatggtaaaataatatgcatgttagatgagtttgaatatcttaaattacaagaacaaaaaaatacatcaattgtctgagccacggagaaatcaagatacatgccattggattcaccaaggtaatcaaagtttccttcaggattggccttccacaattcatagaaaacctcaagagcagctgtctctaggctctccacctccttctcgagctcctcctccatagtctgcttattcttgacaccctcccctagtttgaaagtctggagactctccctctcatctttaagatcattgacctccttggacaaagagacattatcagcctccagttgctcggtcgaaggaatctcttacagttctttggtcagctcctcaatcttggtgttggaggcaaggagctttttgttcacctccccaagctcattccttacttcctcgagcttactcctcacgtcttgagtttcttttctggccacatccacctccctctacagtgtgttggtggaggcaaggttcttggtagcatctgatttggctcgagaataagcataagtacacattgacttgcgcaaaaaaagtgttagagcccaagctatacaaaagagaataagacaaagaaagtgatatttacccgagtagcttccttcgagactcctcctaggactagctccaaagatagctcattgtttgccccggatagttggtcactcacctcaggaagtgatcgattcaagtaatactggagcatatccttacccctcttggcctccgtgctcagcgccacagttgttgaaggggtcttagcttgatcagacccgtccaagctccccactctcaaactctttgacttcaaaaccttttgaactggaaggtccacaacagattgctcctcagaaaggtcaatgacctcgtcaactggcgccttctctttagacggagtctcactgtctttagacttcttggcaggaggagacttgcctgagctgtctcccactctcttcttcaagggctggagcaccttctgagacattctacacaaataaaatgaagcagttagaagcagatataatatatgtgaaagcataatataagagaagtaagagcaagttaaaataccctgcacgcgggtaggggcattttcccaaacaagcacaaacgagacgtgatcgtcagaagagtcttcctcatgctccaacaggatgacctttccttttccctctacaggggcagatggcagaacaggcatatcaggttccctaatcctgatagcatgttctactggcccttggtcggtcggatgagccttcttcttctttttgctcggcctctcctgctccgaatattcttgagcatactgcttggctctgtttcaacttagcctcacgcttaagttgaatgagtagggtgatcgtgggccgattgtagggcagacacgggtgcttcagacagaagccatccgcgcgcgtatactcccttgtccgagcgcctggtgcaccgaatgcacccactcgacactattgaatcccgattttccaaaatt

SEQ ID NO: 132066 - DNA, 521 bp, Cannabis sativa
tcctaacacagtgaaaagcgcacataaaatcgatccaaaatataggctaaaaatagcctaacaatttgcacccccgaattctctctgttgttgaatggctctatgtgtggattcttcaatgcaaagagaggattaagacaaggtgacccgaagtctcccctcctatttgtgttaggaatggagtatttatctagaatctttaccaaggttggagactggctagggtttaaatttcatgacaggtgtgcatctctcagattgaatcatatgtgctttgctgatgacttgttagtcttctgtcatggagattacatatatgttttgctgctacttcaagggctgaaattattttcagcttcatctggcctacaaccaaatgagcagaaaacaacaatatattgtgcaagaatgcaagaatcagaagtcactagaatcattgaggcatctaattttacaaggagtacactaccatttagataccttggtatccctatatgctcaaagaagatatctagagcaga

SEQ ID NO: 132067 - DNA, 860 bp, Cannabis sativa
cattcatcatcttggtaagcttgactgtataaatcattgactgacccccaccactggctagggtcagttgttcatttttcagctaattgtggatcttgagtttctggagcatattcctcttccacaaaatttggatcttctactgattggttttttttcctcccaattggtgttttggatggtgtttctcttactctctttttggttaggggtggtctttgggacacactttgagatctggtttatggtggtgttttggatggtgtttcccttactcttttcctagtttggggtggtgttcgagatacacttctagatcaagtgcagggtggtgactgttttgaggtgttgtagaaggtgtttcagatttggtttgtggtgttttgaaacatccttcccctttcctggtttagagtgttgtttgagatctgttttggggtgatttgttgagatctggctggcctttgttttttcttgtttgggtggtgttttagatggagttttagacctggtttggggtgattggaatagttctgtctgtgaactttttttcttggtttggggtggtgttttggttgttatttgggacgtggttttgggtgatggacagggatttaactggccagttgttttcttcggctggggtggtgttttggatgttttttgaaaactggttttgggtgatggacatggatttaagtggcctattttttcttggtttggggtggtgttttggatgttctttgacacctggttttgggtgatgggccgggatttaattggctagttttgccttgtgtttgggatccggtttgtgctgatgttttgctactttgggctttctctggtttggatggtgt

SEQ ID NO: 132068 - DNA, 2069 bp, Cannabis sativa
  modified_base (1017)..(1022): a, c, t, g, unknown or other
catgctaaaatatagtgttcattttgtgaccacttacctccttatgtacttaaggttttaaaattcaatcgtaaaagattaatttttcacaaagctcaaattctcaataattgtgataccaggcttatcaaaaatatagaagacctcttaatctctattatttctcttcaatttaatttccttcttgaaattatttttaccaaaatttgacacaaaaatatgtcaaaattttcgtagatgcacatagccaaaattgatttagaattttaattcaataatcaaataaattaatcaataatgtctcaatacattttgattaaatttgtggctcacgcccacatttctaccataaagtgaaaattttagaataactttaatataaaacctctccatttttaatctcaacataaattatcatgaatcttttgagatgacatgataatctctcaaaatacaacttttgtatattttttttcctcttaattaaaatgacattcaaagtcatcagtttggaaaataccatttggtattttagttttcttaccaaaactaaaaaaccaaactcacaatactatactcacaaaataatgtgattatttttacccatcatttaaagattatctcctcattgagattagaccgaaattatacaaaagttgacaaaattctcatcaattttgttcactactttgattatttaaaattcaaaattacttctccaatcttttattttttttttacaatttttgaatccaccttgattcactttatttgagtcaaaaattactcttccaatttatggctcatttcacaagtttggatccacttttcatccatttgttctcgctatgaaaagacaattctcataaactctcatagttcacttttcttatctcagaaaatgaactaattattacttttagttctcaaagattgtaacttttcacaaattacaatttcttttctgaaaatcactattgaaaaaaaaattataaattctctttattcacaatatannnnnnaataatcttcacatcaatagtaataaatactgttatattactatcaatattattatcatatacattatataatttatatgtacaaaattaatatataattcccatgcatgaattataacactcaaatatataattctatgccaactaatataaagtatatgtaacatacataatattaattatataaatatatatgttatatatctcatatacatacaacatatataccccaatatacatgcataatatatattatatacacataatatatgttatatatacatgtctcatataaatacatagaaatagttaattccaaatatttaatctcactaatatatattatatcacatgctctacatatatataatgctctacatgtatatatcatatttttatagggacacgatttcgtcccgttagtttactttaggagatttattccatgatgtacgacagtcgttggatggagtgattatttgatctgagggctggggttgatgtaggggtatttagggtaaaaaaaaatggtaaccggttatgtttttgaaattaaaatttattaaatttgaaaaagttgaaactgacactagtcatatcaactgtcctccacacttctactttcttcttcactttctttcattttcgttttctattttctttttttattttatattttcgtttcagcttaggcaaaactctccttttctattttcgtttcagcttaggtaaaacttatattttctattttcttcacttcttttcgtgtaagtgtgtggtgtatatttctcgtcttctgccattgttgtggttattacaatcatgggtctcaacggtgggttgtacaagtaagtttctccagttctacttttcatacttttcgttcttcactgtgggtattcaaaaaaaaaatcgttttttttgcagggaatgttgtgttagtccattttcgtttacttaatagtgttattttttctcaggtgtcgacggtgagctcttcaaggtagttaccatttctgtgttgaggtatctctctctctctctctc

SEQ ID NO: 132069 - DNA, 968 bp, Cannabis sativa
ttgagatagctccgcgttggttgcatctcctgaagcgagaagcaccgaccccctttccctatataaggggtcacccatgacctgggagagggatccacaatttgaaacaattagaaaataaacacttctcattctttgtaatcaagagcttgttcttgacttttgcaactcagatttataaaactcaaggggagtaggctatgaccgacatccgtggccgaacctctttcaattccggtgtcttttatttacatttattgcaaatttcggtgttattaactgcatttattattgtgattttggtttaaatctcatttattacgacttcgcgttgcttggctaaaaatctagtcaacaaccctaaatatcgcaaaaaggagaaaaactaggtttcccaaaacttccccaaccagtagaccgatcacccaaccagaattccagttttgttgggtttcctagggaccaaccggaattccagttcctacagttgccactcaatcagtcgaccggttcagtgcaggaaaagatcaaaacttcataacacaaaaattgaccccaaatcaaactaaactttacagacctgttcaatatatcccaaagaacataaacaaggcaacaaaacatctcaacatgcccaaaatcacaaaacaccattggagagcaaagcttgagttcttaaactcaaagcttgctcaaactccacaacagctcctaaaaccacttcaattcaacataatacaccatagtttaacttcagaaaactacgggaaacaccacttactaccacagaaccctaaatcaacaattcattcaaaaacacaactataaacataagaaaactaaagagaaaggtcccaaagctattaccttaaaaggattcaccaagaattaactataaaccagcgcaaagaagatgaaaaacaccccaagttgttggttctccaagggttgagagagagagagagaga

SEQ ID NO: 132070 - DNA, 1016 bp, Cannabis sativa
tccgccacaagtgaggttatctatatataacgggggaggggtcagtcttctttttcaaaaattaggcttaagggtactgccatcttgtttttcatatagaaatgtaaactgtaaatggcattcttcccttatttttatccttttggtaaatgaactttatggaaaatatgacattgtgaatattgttacaaaatcatgtacttggtggtgctatgggtggtttacttacattgtgtgtttatatacatatatttctaaaattaactttacattgtatcttaaattatggaagttgcagcctaataaggtgtcaaaagataaatattaatggatatggctcttgcattaatctttcttgacgtctgtactgaaatcagtaacacgagctatggtctcgaaggaatatgaggacttcctgctttgtttcataatttttagcttgaaaaacacttttagcagtttttagtctgtttctatttgtttttgctcatgttctccatcagattgtatttttatttttcgttataagaatactttatcctcttttcctttaaattgtgtttttcattaattaatgttttgtgtcttataaaaaaaataggcaagtgtgaagacgtgataatacatatataatatatatatatatttatatttatcattatcaactaggaaccttggtaatccactctacaaatcacattccactatgctcaaatgagggaattaataatctgcctaagacataagttacagttgcctagttaccataattattcactagtcataattaatatagtgatctcttcttattttctccaatgatctgttcagtccatttaactgattcacactaatatagagctaccgataccaagttgatgtgaatctcaaaaccacgtgtacttcaaattattgtatttgcatgtcttcctggttatgcatattggtgcaattgaataatttcctgttaacctggaaactttctctggtgacttagacatcaatgtttgacacgt

SEQ ID NO: 132071 - DNA, 602 bp, Cannabis sativa
gccccattaggagcgggtccccgcagggcctcatctctatgggggaaatgtgtatctctaccggtgacactattagtcaaaatccacctagctacgttatgtatatttcaagtcaaaaaacctaaatacatctgagctaattacttgcatcatcaacaacttcatcgttagcaatttaacttaacgacaaattcattgttttttaatattaattttattcttttgaaaattgtttaaaataaaagatataatttaaattaaatatttaactttaaattgcatgctttatttttttttctcgtttttgcaaaccctttttgcattttgttaagataacttctttagcatttgatataaacattaaattaatgggctgcttgaaatgtgttaatgctagtaagggaataataatgtgaaacattaatttgtttgttttgagggtttagcattagaatgttaccccaagtaatataactactcaggaggataatgttgataacttaaaaaaaggtaggattgaagtattaccttctattatattaatttgaatagcatttttgaattaataaataaatttaaatactaataatattatcatttat

SEQ ID NO: 132072 - DNA, 1402 bp, Cannabis sativa
tttgtcatttaacaaaatagagaactcaatctataatttttgtaaaatatagcgtccaaaataatatttacgtttaatgatatatttcaataatagaatattccgttcaaagcttaaagaaaatatattttttctacctttttataatagagtagtagtatgtttaaagctgtcgttttattgtacgtagttcttgttttttttttgttggtaatttaattgttgtttttaacgatgatgatcatagttttcacagttttatatatgttgttttgggttagctccaatttttaaaatcaatttttggacttattaattagaggtccgatcttagatacaagcgggttaagtttgtacttagggctaaaaaaattattcttttaatattatatatctttttttactaattttaaaaattatgacaattattttctagatgagggctctagaaaattttcttttcctgtgaaatactatattttaaggctggtcctatataatgtagaaatttttgacatgaatgtagaaatttttataactttgtcattcttcaaagtttgttgtcgtttcatacgtgttttgatgggattatgagttgaatgttttttgtttttgtttttttaagaaaagagttaaatgttttttattgattatttattttgttttagagtataaaaaaatgagtaaatcttttgtgaaaaatataaatttgcttaaattagtatatcatcctaccattgataaactatcaatatactatcgataatatagtacatcgatataacaataggctgtaggagtgtacaccgatcgatttagttgggttatagtgtatttttaccgacctaatataaatatataattgcaaatatcaaattgtaacccatccaataataataaaaaaaaaaagtataacctgtccaataatttttcgtcggtttagtcaggttaagctgtttaaaccaatctttatcttttatcttatttttcattattgttaatttttggtgttcaaataattgattttaaaaaataaagatatagtataagcctttcaacaatcataatttataagggttatagtttaaattaatgttaaaaaataaatatgaattgaataaacattaaagtagtaaataaaatttttcaatgaatagaataaaaaaatatacacgtatttaaattttaaatttcaacttcaatatttaaatacaatcaaaatcatcaactataagttctaaatttcaaattaaacactataaaatacaaactttaaatgtaaaacagtttaactattaaatgtaattcatatattatattatattataaataactttagtaaaaaatatgtaaatcagtttattcgggttatttgggcgggttagaataatattcaatccgc

SEQ ID NO: 132073 - DNA, 770 bp, Cannabis sativa
ttgaagaattttgttttattgaattatgattacaaatatcatttttttttcgaattgtagtgaatgttaatttatattaattttaatactatagataatatattagtactggcatgctcacctatggggataaggtgacttgccaatgggactggtatgggtagacactctctgtatgacgggggactcatgtaatatcttattttatatttctaataatagtttataatttatattttttataaatttaagttatgttttgaataataattagtttattgaataataatggaagaataatattttaatttttatgcagtttaatatttttatatatatatttgaatttttattataatttttttttattaggacttctccgatgaagattaaaattagaggtagcacttcctactaatttcccaccctcccatcatgtgtgcatttctaatcagtacacttcaaatgtgtgtaaaacttatttactactcgtaactagtcacatgtatatgttagtactcaacctgttaaccaaactctattaacaatttaaaatgaatgtaaaacttactcatcaactactaataaaagacaatatatataaatgcatctgttatcttgtttgggaaaatacatctttattatcataattgaatatataccacatatacaattttcacaatggaagttacatttttcttaacgttttgcttatttttcaatattttacatttctcttcaccagtcatatcgagaagattacaaaaatc

SEQ ID NO: 132074 - DNA, 1351 bp, Cannabis sativa
aaccaaacacaggattactttcagcataatccaatcttgtccagtccagtccaatccagtctaatcctgcgtaccaaacgggcccttaggaattattttataccaataattttttaccgtcgtctattctacccagtattcgcgacgctcatataggcaacagttttatagactgtcaggaattctttacccaacggtgtaaaactgttggaattctaggttttttagtagtgaaaggagtatagactggccctgtgatggttttgttttcatccttctaaggaaggtatttatctatactattattcaagattgatctcttgactaagataggaaaaagtgatgtattttagtgtgataccaatcttaagacggcgttactaagttaagtcatgaaatttaaaataatgagtcacactcacaaagtgcaactaagcttccatgtgattagttgttagcttggcaaaatagcggtaccttatattttgaaaaaaaaaaatatgagatacttaagtttcaaaattatgcttattttttggacactagagttgaacctcgacaacttggtagttaccctagtggtctttcctgtcgtactcctaataaaacctgtcgaaacggggtctccaaccctggttcccacagaagtgtttttgtgaggaggaagacgaacactgatattgtcagttccaacatcagtaaggatctgaacattcagatcagtggccatagggtcataggtttcgataaaggcaacccttctcgtatgaaccattgttctcgaagtgaagatgatttagagatctttgaaacgcagatgttgagtagagagaaaaaaaatgatttaagtcctcaatgaaattaccaaaatattgaccttgtttttagttaatgacgcaaagtcaaatgaaatgacaattgcaagtgtttgaatataaaaataagaagaactataaacgacacacaaggattatagaggttcggcccctgaatcggcaatagcttactcctctttttattgtatttctttgagaaatagcaagatcacatgtacctggttaggtgagtttcttactatctctgaatattacaaataatttggcggcataatatctttcttgggaatataaaattcagtctctgaattgtgaatatgatctactatttatagggaaaggtgtagaatattcaaatccaattacaaaaaaaagcatttaatatttgaatgagtcaatcccacgaaattctctcatatcccctgattcttgaaatgcctaaattataattataggagtgttgattgacctatttatggggaaatcagttgaagagatgaatctggccatttccc

SEQ ID NO: 132075 - DNA, 631 bp, Cannabis sativa
attaaaggcttaagatgtacaattttgatccttaatcacacactcaggatctctatatgtatatacattaagtctagagaaaaaaagatgaatgaaaaatatttacctcttagggtattcttattattattttttttttttgcaagttgtatccaagaatagcgatgaaaaaactcacacctagatctttcacaccttctaccacacacaaggatcagtgtagtctgattagaatacactaaaaaaatgatgttcttattttttttctcaacactaaacaagaactctctgtggagaaaaaaataatgttatggttaacatttttaagtttataccaatattataattaaaacaaataaaataattataaatatttaactaaataagatatttttttatttaaatattaaataaataaataaatatatgtaaccgttatagataattattttcaatttaaatatttagtttaaactataaatttaataaccaattgaggaaatatttgaaccacttaaaaatatctctaacaatctggggagaatctctcaactactttgagaaaatatctcaaccactaaaatatctataactacttttcaaatttaaatttaaataaatatttatcttt

SEQ ID NO: 132076 - DNA, 521 bp, Cannabis sativa
aaccaacccatctcgatgatctttgagtctcagagcacgaaatccccaaccttgagatctctctcttgcagatctcattgcccgtatttggatgggttgtctccacaccttagggccaatcggagaccacgtcgaagttaggggctcttgagttggtagattagagtcaccgagagagagagatgttgaacaagatgaaaaagttgaaaaaaaaaggatacgagaaaggctaaaagagagatgagttagagaaaaaaaaattgtttttctttctaaattttgtaatttttaaaatattttttttaactgttttaagttaaataattttttaaataaaatttcagttttgaaataatttattatattttgtaaaataattgtatattatggactaatataaatgtgcgcaaaataaggatttctttatatattaaaagtgtttatctaacgacaattcttggtttaacgattatttttaagtgagcttttttctttttaataaaaacagacggaacattaac

SEQ ID NO: 132077 - DNA, 677 bp, Cannabis sativa
  modified_base (497)..(511): a, c, t, g, unknown or other
attcatcatattcatctcatttaaaatattttttttctcattttaatattataaattttaccatttagacatgaaacaagtagaaaataagtgtaattttgcacaaaatgaacataattaattaaaacaacttctaaagcactttataaaacgtacctaaactagtctatcattatttagttgttctaattaataaaattcatcaattcaactaaactactctaaattatgtgtaattaaattttaagttagaactcatataattaaagttattttaattgtattttaacaaatgcttctcaatcctataactttctctcaagaaaaatgagaagaaaagtcagtgaatgatataggtgagcaaaacacattagaacttttcctaaccaaaaaaggaaaaagagaaaagagctatattgccaaacaaatatacatctttaattaaaaagaaaagacttgagagagaataaaaaaatttatttttagtcacaacaaannnnnnnnnnnnnnntaaaaaaattgtgactaattataacgtattcttatgttgtaattaaaatgtccatagaaaaagatattagtcacaaattaatcacaatttgttgtgactaaatgtatttttagtcacatcttgttgtgactaaaagtaaattagtgacaacttgtatttaaatact

SEQ ID NO: 132078 - DNA, 978 bp, Cannabis sativa
tatctcttggtcagcagttagggagccttccttcatggaagcttaatttccctgcaaggttaatgcccttatcttcctgggatgcccaatgaattacttgggtggcctagtgacttcttgaccttctttgattaaactccacgtgtcatgcttacaaaaatgcggacaacatttacccctgaagcttccaggacataccatggttcgggagcttgttgtatctccttctgacataaattctgcacgtggtactttggacaggatctttaatgcactacatcatcagccgccaaactagagtaccattacccaaaaggcacgattacttctattcttttgtcaatggcttaaatgctaacttttgaattttgagcgcatggtgggcgcgtattctgtgggatgctcaaaactacagtgattggatttgtgcttccttctcattcactttgtgccttttacaatgcatgcaatgatgggagatgactgttgggaagggtgatatccctttaacttctcgttcatccaaccgttagacacctcttgggcgagcaagttgaatcatctacctattgtagaaggtgccttttctaggtaccccataaatacctttagtaactgatccacttttcactttcgttgcctgtcaagctagagctctttgagttttaaatcttctcctattgcggaagacttcatcactattacaatcagacacggtctcctccactgtggacgttgcaccaaaaccgtcaacccccagattctcttgtcagctggtaaattttcttctttgtttatttgttgtagaattttgaggggattgttaagattcctttgattttagaacattggtaccacatcgatggtcttcaaaggttttaggatcacgctgtgcgctgacctgtgttgttgttgtgtcgacttctggtagttgtaaagcccgcttagtcaatttggaaattagcagttatttatgtt

SEQ ID NO: 132079 - DNA, 632 bp, Cannabis sativa
caacaaatccaacaaaatctcaatccaccattagagagctaggtttgagttttcaaactcaatccttgccaaaaccttgatataatccacatagacaacttaaaacaatttaaactatcaccaacaagctccagaactacaattaaagtaacaattatacacacagcaccaaaaatcccaaaactcaagcttaaacctaacttacacttactagaataaaaaaaaaagatagctaggaatctttaccttaggttgaatcttctttttcaggtctacaaactctaattccagcagcaaaatttccttcttgctggttctttggggtgcacgacaaagagagaaagagagagatgccttctcttttaagcaaagcaaacaaaaatgaatttcttttcttcttcttttttttttaaaaaactaatccctcacaatcagctatagacaaattcaaataagacaaatatagtcttatccaaaagacctttttgccctcaactttatatcaaacattcaagtcacccaagggtagtttaggcatacacaagtcccgaccaattacaacacctctaaaacccaacgataacatcccgataaaatattctaaacataaacgcgactctctaaaagcccaa

SEQ ID NO: 132080 - DNA, 833 bp, Cannabis sativa
atctgaacgcaccatccaaatactcgaggatatgcttcgagggtgtgcactagacatcactgggttgtggagcaagtatttacccctaattgagttctcatacaaaaatagttatcaagccataatcaaaacggcaccatatgagatttttgtatggacgaaaaatgtaaatcaccacttcattaggataaagttggagaaatatgctatttaggtctagaaaaagtaagagaagcttcagaagcagttgaaaagatacgacaaaggatgctcaccgcccaaagtagacaggaaagttatgcagatctgaaaagacgggaggttgagttttccataggggacttagtgttcttgaagatatcacctatgacggggattatgcgtttcggaaaaaaggaaaacttaagcctaaaatttataggtccttacaagataatggacagagttggtcaggtagcttaccgtttggccctaccgccaacattagtagaaatgcataatgttttctacatttccatgttacaaaagtatgtatctgatccgacacatgtgcttaagtacgagaacttgaacttgcagcaggacatgagttatatggtacgccccgtgcgggtgatagaaaagggaacaaaggtcttacgaaataagactatacccttagtcaaaatcctgtagagtgatagttctgctagagaagcgacatgggggtgggagaaagaactacaaaatcaataccttgcgttattttcaagtaagtaaatttcgaggacaaaattcctttaaggagggtagattgtaataaccaaaatacttggttattattttctagtcta

SEQ ID NO: 132081 - DNA, 805 bp, Cannabis sativa
tgggtaaccttgtatttttcgacctctaagttagttgacgagttctcaccgtcaataatgaccctctaatattcttgtctactttagaagcacccatgtgtgacaatgttaagatcatatgggtagtccaccatacaaacgcctccgcccaaaagttagcatcttgtagtggaccgtaatgtcatgtgttcaatgtatttaccccaatagtgggtctatctttgcatagatgccctagcgggtcacgggtatgcgaggagccgagtctaagcttatatatatccctttaactcttcagggacaaaaagaaacacttctgaaaaatcttcttcactaagagaaacctagaagggaagatactatagtaaaaactaggattcttcaagttgtaaaacttcacttatattaatacattcaaagcgtgcaaaggaaaatatacattgactcgtagactagagatcttttgacacctgaataaagtaaaaatctccatctccgttatttaatcgctcatttaatttcttaaaatcttacttattctcgtttttaaaaatatcaataaaacagtgaggatttaaatataagaatttatactataaggattaaaatatgaaaatattggaggcactaattttcttttaagcattatatgggttttctaatgtttatgttttttttttaattattataaaacaatatgcatattgaaaaaccgagtttttgcaaatgtcaataatatatacaaaaatatacaattgtatacgcctgcagaagcagaatgtaattctgttactgcagaaaccag

SEQ ID NO: 132082 - DNA, 749 bp, Cannabis sativa
ggtataaatacttaaagttgaattttcggttgtagattaattttaagtttaatttttaatggtaataatatttaaattatatttttttattaataggacagtctttgattggtttaggtaattaattttaattttttatttaaaaattaaattaaatatatcaatagaaaaaatagtacatagataatgacttgatatttaaccgcagttaaaaattaaatataattatttatctacaactgaaatttaaatttagctacttatatcataaattatttatttatttattgatttttttataaatgtttgtacccacattgttcctattttcctattgaaagaaatgaaaaatgctaaaaggtatcactcattccttgcttattacaaaccatttctctcaattcatgaatcatgcatagtaaccagatattattctattagggagttcgtggattaatttggtcaaaaattttatttttttcaaaccaaatcagtaataattttttaaaattcaaaaccgaaccaaatcaacctactttagaacaaattagtttggttcaaaaccataatttgtaattcgtaattgtcctaatttttttactaaattcttttactttaaagcttattatatgtaaataaaactataaattcttaaaaacaatattaaatccttttagagtatatatataaaaattatgtggtttagtttattttgaaccgcaaacaagaattttaaaaccgtgatcaag

SEQ ID NO: 132083 - DNA, 1564 bp, Cannabis sativa
  modified_base (420)..(423): a, c, t, g, unknown or other
agggttttaccaccaaaatttaaggttggatggttaagtgcaaatgaaacgatagttgggagggtttagccgcaaattactcaaaaagaaaagataaaaaaaagaagcttaccttgattggtcactatggcgcaaagaggctgagagataagatagaaaagaaaaaaagaatacctaatatgcttgtttaataaaataaaataaaaaaggagagatatatatatatatatatatatattaataatattaagactctatcacactactttttcgataaaacccattaagtgataaaaagtggttaaaaaaaaaacaaatgcacttaatgcttaaaaatttgaccgaatcagataagagaagagaataagtccaaacaaatagacctttattatttattctaccaataaataataattgatnnnntctcattaatctcttattttacaaagattaaaaaaatattattttctctaaaataatatatttatctctttaatattatttaatgatattatatttacataattaatataatttttctaataaaactaaatagttaaatacttttaattatataattcataattttcataattaatcaaaataataatttcacaaattactattttgcctttaagaatttatttttcatagaaattaattcttactcaaaatacattcatcaaataaaaccttcccatgtacagtgttgtacagatgtgactcagggaccatagacctatattttaaaggtccaataaacttaagattactatcaatctcatcaatagaataatctggtttgttaattccattattactccactataaatatggaattgcactctttaataatatagaactatatttacaaaatttttacttgtagtctaataatataatcaatataagtagtttgtcctctaattattagttcataattagagttagtcaaaataacattttacccttctaattatctcttgattcctaatgtaccattaattcaatgtgaacagttaatctataacttattatagatttggattcaactgttagcacttttagaattaacattataagggaactaatattcgatcaattagggaagattggattctactattgtataacatgtttctagccactcatataattaagctcccaaaacacaaatagtaagaattatcttctctaagaaacattaatgagtgaatcaaataactcaataaacacaaacatgagttcatgtatactcaggattcaggctgatctactaatgatcatcattgtgatatgataaacatttttcatggtaaacgacaagttaatgaaagatatttattacatatcgatctagtcatgcataatctaatcatacacaatacctttactacatgtccatctacaaatgtgatatgaatcaaaatcacacacactagaagtatagtgtatagtaaaacatactttgtagctccatattaaagattctcaatactttaatacaataccaacttattttgttcattgtataatcttaattctcttgtacatccttacaaga

SEQ ID NO: 132084 - DNA, 527 bp, Cannabis sativa
  modified_base (460)..(474): a, c, t, g, unknown or other
cccctcattgagcataatgaaacatccccatcatgaaaactccccttgggaattgggctctacaggagggataaaaatagaacaacattaagatgtcccctagacctgatcaaaactgttaacactcaaatgggaagattccccctggagaccaacagagcgaactagagaagaagcaaatggaaaaaccaaaatggtgaaactcccactgaaatgaaaaaacaaaataacccttggcccatttagaaataacccaagcccatcaacataaacaaaaatcaagtacaacaatgctcttccagatcataacaaagacacacggtaaaaacaataacacaaataacaaaatctaaccatgcaagaatacacacaatccacaagatgagcaatttgacaagacaaatttacaaaaaatattagacaacaaacactaaagtattgggaatattttaccaggatnnnnnnnnnnnnnnnagtatgttgaattaacatcctaaagatgaatatctttaaaataatgaaataaa

SEQ ID NO: 132085 - DNA, 916 bp, Cannabis sativa
gtcagaaatgtcacgacaattaagttgtgttgtattgggtttataccggactagttgagaagtttaagttaactatttgacgagaatgaatagaaaagactaaattacccttaggttttatttaagttttaagttttaaagaggggcaaagtggtcattttggtggagtattagaatttttgtcctgagtgcttttaggctgaaattatgtttaaataaataagttttatttctttcttttattaatttttatcaaatagaataaatgagaaaataagaaaccaagaaaagtaaaaaaaaaaaaaaaacctctcattctctttcccttctctcgacaaccctagaaaacaagtcaaaaccaaaaatttaactccattcctagcagagattgattgtagtagcaaggtgaagaagctgaacaacttggaggtaagtattctttctagttcatagtattttaccatggtttggattaggtttgggatatgaactttgtgattttgggattgtagcgccaaattaagtttggattatgttattaggattgatttagaatttaattaagcttagattatatgatttgagtggatgttgtgttcaaattgaagaattgagcttagaacacaattttaaggttctatcatggtgatttttgtaattggatgaattattgtaaatgaatgctttgaacatgctgtattcatgttatagaactgttttgtgaagtttgggaacaattggttaggtttggagcaagttttgggactttaaagatctaaaattttcgagtttctggtgtggaccggaattccggatggtacatggctgcaccaaccggaattctggatggtcaattttcaagaatcgtcgattttcgtattttagccataagtttttactcgggtgtccgttttag

SEQ ID NO: 132086 - DNA, 524 bp, Cannabis sativa
cttaacatctccactctataattgaggctactatcatgtgtgagtgtgactcattactcttagtaagttagtgtagtctcatactctcatacgttttaaggattttctcttggttagcccgcttggcttggctaaattggatcctcacctatccacacaaaattaggttgctccttaggcccaaaaccaagtctcaatatattgcatcttatacacacttataaaaagtgttcctatatgacacacaaatatttcacatatcttgtaatcaaggtcggcccagagttaatttagactctaaaaaaataattttttaaactctttttataaaaataaatggtattttaaaaagtatgtatatttattaaaaaaaaaaattatttgggctcctgataagaatgggctctagacgcgggcctaactcgtcttaatctaagaggcaaacttacaaaaatactggaatttgggttaacatttacaaaaatactgtcacacgaaaatcttttcaaaaatactgtgttttt

SEQ ID NO: 132087 - DNA, 692 bp, Cannabis sativa
cctcggaccttcctcaaaaacttaaattgtgaaacctcctattgaacctatatcgagcctatatcaaatactattggactgactcaaaaaaaatgaagaaaaacccaaaaaattataaagttcgtcttcgttcgtggtttgtgttcgtggtctgcgttagtggtggtagtctctccgttcgcagttgaggaagggattgggcaaggtctcgatcaaattgaaatgaagccttctcgattggtcggatggtggcgatggtcgcagtcttggatcctttagtgggatttcagtgagaactagtgagagagaaaaaataagaggaaaataaagaaatgttataaagttttgaaataagagagtatattgaggtatacataaaaattagtccattctactaatattagataggttaaattttggttattaattttaaaatataatatgtatataaaattaaattttcctttatatagaggccgaaattttgatagacagcctacttttagtacaccaacaatactttaaagagacaccataaataaaattagggctgagcatcggtcggtttttttctatataaaattccaaaagtcagttttcgatttggattggtgcaattcaaaaactgaccgaccaatccagaacatatcttaaaaccgaccgttttgaacctcagtttggtcggtttaaac

SEQ ID NO: 132088 - DNA, 603 bp, Cannabis sativa
caacttcagccttccttcacggaagccgaaggttgcttcattaaaattcaacatgactctcgcatgcatgatgtttttagtgaaagaaagatcactcggggtatgacacatctcaaccctccttcccggaatggaaggatcgcttgaagtctgccttactctttgtggtgctttctccttttgatcttttcaagtgaagtctaagcatgaatttttatgcaacatcagccttctttcacagaagctgaaacttgcctcgtaaaatttcaatgtgactatcgcatgcacaatattttttgtgcaagaaagatcattgggggtatggcacatcttcaaccctccttgttggaatgaaaggactacttgaagtctatcttactccccgtggtgctttctccttttgatcttttatagcgaagtctaaacttgattctttttacaactttagctcatggatgccaaagcttaccacataaaaattcaacatgactcttgcatgcacgatgtattttgtagaagaaagatcactgggggtttgacacgtcttcaaccctcctcggaatggaaggatttcttgaagtctaccttactccccattgttct

SEQ ID NO: 132089 - DNA, 1106 bp, Cannabis sativa
  modified_base (790)..(793): a, c, t, g, unknown or other
  modified_base (821)..(822): a, c, t, g, unknown or other
acttcaagagtgatactccctttttacatccctccacacacactcactatgatcttggactctctctctaaactgaatctaaagtatcagtttttggagattagagatcagaactctcaactctgacctctttttggaatagaggaaccctatatatagttgctggtggatcccctttaagttggtattaatgccaactgttataaattgcagcagcttttttcagattcatctgatgagcaaatagatgaacatgctgacttgagaggttaagtgagtttaatcccaacaatgttcttaattatgaaagtagaataatatcatgagagagttattatcatgtaatgttatataaatgtatggagaagaaagttttattatatatatcatggtatattttctgaaatcgtatgatacagcaaaatataaaaatgtaaaatatttgaaagagtgatagtaattaattgtagaatactataatgatcactgtaagaaaatatatagtgcaacaaccaacactacaaaaaactactactacttttagttataattttttagtcacaatataattttttgtgactatacgtaacttttagttacaacaaaatgttacttgtgactaaaatatattatttagttacaagttgtcattaatttagttttagtgataacaagtactattgtgactaaaaatacatttagtcaaaataaattgtaatttttgtggctaatacttttaacacaaacttttcagtcacaatatattaatcatgatttataattagtcacnnnnttttcacttttaatcacaaattttattnngactaaaagtaagattttttgtatgaactaaggtttgttttggtactttgtataagtcttctatattgtattaaattagtacattattacactaattaattgtattaataattacaataattaattttaaaaagcctagcaactagcaggcctttagggtaagcaagttaggcacacatatcaggcagaatgctcaggattctgaaattgtaaaaaaaaaaggtaaatattattttggactctctgttttacaaaagttttcaattggaccctgtattttgtta

SEQ ID NO: 132090 - DNA, 653 bp, Cannabis sativa
gcaagcacgatggcgcacattggcgctcaggttgacattggcctgaggctcggtgttatgtccttcaaataatagtttcgctccagaaattggtcttattttgtccccaaaataatttatggatgttttcgcaactcaatatcatatgtgcatgtgtcatgcgtaagtccaccgacatccatgtgacactagtatcacccaggtgtcacctagtcgtcactagtgattcaccgggcatcactcgtgcatatcaagtaaaattgctaagagaacttccccaaggtcaaagaatgaactaaggatagctatcacatcattcaagcatctcaaaatatgattaaagtccaagaaaccaagttctaggcgcccaagttgacgtttatgtgaacctggttgcccaaaagtcagcctgatctctcagtcacttttcatcagtgcacattgcttagtaaaatgaccataaatatctctcaattttatccaaataacgcgattcaagtggacaattaaagctttttccaagatggatccaagtgtctcacacccccgccgcaattctgatgatttaggtatcaaaattaactcacgagatagtgttggatttctcagctaattttgtgcaaaattttctgttattttattgtaatttaatt

SEQ ID NO: 132091 - DNA, 1014 bp, Cannabis sativa
  modified_base (740)..(743): a, c, t, g, unknown or other
tttttttttctttttattattattgtttagattttgtcaatagaaatttgtaaaaatatgatttttattaaaaaattatttaataaaaaaaattaaaaaaaaatatgaaaaaattagcataaaatacttggttatctttcttatggtaactggttacccatctgattaccataagagtacctagttactcttacctaattttttcatatttttttaattttttttcaattttctataaaataatatttttgcacataaaaaccaataaaatttgtagttgaattaatcacacaaagtaaagtttatctaattactaacatatattgttatataaagtatatataaaagtgtactagttactaaatgttaataaaaaacaattcctctttctttgtcgaataactattggttcaagcatctattctttctaagtacaaatttgaaagagtggagattgatcttcaattcaagtacactacttatgtcttctctccttgttttactctctatctactcaccttttgattcttttcaaacttaaaataaaaaagtagaatgataacctttttcttcttcaaatgattattgttataatatgaaagaaataaagagaacaaataatgggactcatgagtataagtatacgtatatatattttttataatttttaatatttttatggttaaataattttggtgtcgtttggtaataatgttattttctaattttttaatcacaannnnaaagtaaaatttttgtttttgaaaagtaaaaatgcgttttgtaaccacttttgtttttctattttaaaaacaaaaaacaaaagtgtgttctgtaaagtttattttcatttttattttttgattttatttaagtcgggtctatgtctggggtcggatttgggttcggaataagaggccggattcatcgcaagggccgtggggggaggatttgggttcgggtctcgtcggagtctaaaatattgattaagaaaaaaaaattgtttaagaaaat

SEQ ID NO: 132092 - DNA, 565 bp, Cannabis sativa
attattgtaaaaaaaaaaaattgtcacattccattcctatgtctcaaccaaacaaagtgatcttcatattcctaggcagcatcataatattagtacacataaccaaacacagtaatgctggtttataattcccttcatcactctcccaacaatgttaaacctattcccatgaaatgaaacttacatactaaacggctccttaagagttgattagagctgtcatattatatggtttgaatgctgtatgtgtgtatatataattaatctacttatataatgtatgtacataatagaaaagtaacatgttactttattttctcattttttttaactcttttatgaatttctcccataaaattactatatgtattttaaaaaatatttttgtgcaaattgtatatatgtaattttgagtgcttttacaatgtacttccttacaaaaaaaaaaattaattaggatttttactaacaaatcatgtcctctaaacttttaaggtcgttaaaaataccccatgaactaggagtgttcattggatcacatccaatatatttgggcccaaccgat

SEQ ID NO: 132093 - DNA, 670 bp, Cannabis sativa
taccaaactgctcggggccgaacctctttaaaaactctgtgttctttatttatcttttcatattatatctaaattatatcacttatcgcttacaattaagactcattgtcgttggataaaaggaggtcaataatatccacgtgtcattttcttattagtatatttaaatgaatttttaaataaaaataaaaatttaatgaacttgaccaatcaatgactgtcatgtgactgataatttcacatgtcagatatctacgaaaattctaaaaatatataacttaagtattattaccgtataaatttaagcttaagtattatttttaaccaaagattaaactttaatatttatgtcacaaagtactatatttcttaactaaagacatcattttttttttctacctgaatgaatttttctattttcgactcttagcaaaattatatcctagctatttttttttttttcagaataacattgtagattataagtataacacactctcacatgttttttaaaaaaattaataatttatgatattgaaaataaaatttaaaataaataatttcaagcataataacaactaactaactattttaatcatgattttcgtactttaaattaattattcagagtttttttttaataaaaatcataagatctattaattaataa

SEQ ID NO: 132094 - DNA, 607 bp, Cannabis sativa
tagggaaagaggtcctattaaaataataataaaatattcaaaaaaatacatttaggctattcttgaccgttgatgatgatctatgaaattgactccagaggtcgatcgtcaatttccagaacttgagtcgcattcgtgggacccactttgggtagttgtagcttaaatttgttactctcttgagggcaaaatttggagttggtaactttagaattgagattggcgtgtgaaacatgacttgatagaggattgaaataccttcaaaactcaagttaaaacgcatcaattagatcaatattgattgagtcatgaccgttttactaaaagttgttctgggacgaacgcccaggttgacatccagcgcccacgttgacatccagcgcccacgttaatatatgacgttaacctagatgctaggtgagtgggaaaacatgctagtggatgtatcttttgatttataagtgataacatcattaacctagtttttgtgttttagtgaagttgttcaccagttcttggagatattgctattttgcaaaatcaggagactcagaactgcctgatttgcaagagagtcactttgccgaaaaagtgaaaatatgaagtt

SEQ ID NO: 132095 - DNA, 543 bp, Cannabis sativa
cttttgtagtttccattgctgaaaagattggattcgagttttggagggaacaaaagtttgttctgtgtattgaatttgatgatgatgagattggtgggttagttatgttgatggagatttgtatttatataaaggggatgagcctgccacgctggcaatccgcgaggtttcatttggagaaattcaactagagagattgtggggttgaagaaagaagaagatggatggtacgtgcgaccttaaactgtctgccacgctggcaatccgtgagaattcatttggacgaatgggattaaaggtatgtgattgtggggtttaaacggaggggatggaaaggaaagtcctatacaataaatatagaaaaaacttgagagaagagacttaaaatttcattttactaaaataattttggaaaattctataatgcacccccttaaaataaatacattgatgcactattatttgttttagcacccgaaataattttttagtcaaattttttctcatgatcatgtacgttatatcctgcaaaattttaagaaa

SEQ ID NO: 132096 - DNA, 794 bp, Cannabis sativa
atatcgaggtagtggacattggacaaaaggtatgttgctttttggtgctgtacgcctttcccaagtctgacatagggaacaaacccctaattctgtgagattcgatgttagaagggtgtcacgtagaatagcacccagacacctccccaactactcttccaagatacccccgagggtatccgagtgcgtctctttgaatatccatctccctagacgagagttatccttttgggaccaaggaggtccgacaatgtcgagctgaagtcacaattgaattcatagccataacccaattccacttatgagtaaacccacaactttgtttgggcttgatgaatgggctcatgagctggtgttagaccttaaaagtagggaaaattacataatatgctgacttttccccatttattacaaaaatactggtaggcagtattttttacttttttactgtgtatttttatagattttatatggtaatatactgtcttttattataacatattttttgtcatgttttgggaagtgacaaaacgtttgatgttgatataaaagctttttaaataaaaagtttgatgttgatatatatatatataaacttacatgttttttctctaatttatgtatatatataattttgatttgattgatgttgtcaccttgtgacaagtttttttatttatttatttttacttaaaattgatgatgataaagatgaaacccaaaacatacatgttctctctccatgttcatcctattttctattctctctctccatgttcatcttcttcttcttc

SEQ ID NO: 132097 - DNA, 1689 bp, Cannabis sativa
gccgttatagagaccaatcttgacagacacacgcgggcccgccgagattggtgtgccgagtttgcctatttttcttgtagtgcgtggatataaaagggggtacatgaccactacaatgtggtgtagtgtaggaaattagtaataatttataccgtggctctcacttatttaatgctttgtttttattttttattttttttttgaaaaagtttgtgttttttttaaatgcacctctgacctaggtctctctcgtctccatggtgaggaagaagaaaccaggtcgcaggccgggcttcaaggttgcgaagggttcaccggtgattccagatctggagaaagagagctccgcgtgctcgcatgaagatggacagtcgatgatttttgttcctaagaagctcacgacagagaacatggatgatgaagattcattgatttctgcgagaaagagctgggccgaagaagtggatctacaatcggcggctacgtcccactggcagcatttctcacgaggtaaagttttaaactctgatgctaaattgacttattcataaccagtgattaaagagggtagaaagatagctcatatagatatggaggaggtgaaaatggaagaagagagttggaaattagctgtaatttgtatggttttgggtgctaatgttcctgcagtgttgtttgagggatttattcgtagaatttgggggcatttaggaatagttcagattgctagaatggcaaaagggctcactatggttaagttcaatgatgaagcaacacgaaacgaggttcttgagaatggaatgattcaatttgataggaaaccggtcattgttagaccatggacagcggacttgaatgttgttaggattgggaaatcggttcctctttggattaggttgcctaatcttggtcttcaatattggggaaaaaaaactttgagtgctctcattagcactgtggggaagccgataatggtagataagcacaccaaggaaagaacaagagttcaatttgctcgagtccctgttgaaatggacataatggagaacccggaacgctcattttggtttgttaatgaatatgggcagcttttagattaagtaaaagaatatgaattgctctcggttaagtgtaagtattgttgtgggtttggccatataatggctgaatgtaggaaggttgagaagcctaaagaggaggaaaaaaagcaagaaaataaggtggaaaaggaggggaatgatgatggtactcttgctgtaattgagcagcctcctgcggctactgctagcaaggatgtggctgaggctactgcccctatgattgaggcggatgctatagcagttttaaaagaaaaaacagtcaatggccaaggggaaaaaactgctgtcaaaacagctagtggggattggattgctccaaagaactttgtttctaagggctctggttcgacaagaagggatagtgacaagggtgagaaagtgcttaggaattcctttgaggtattaacagggggacagcatgaagaagtagtgggagagaatgacttcagcttgtgttgttaatggatttttgcaatattagttgttgcaatgtttggggtttgaataaaaaggagaagcaagataaagttgctgaagtttggagagttaataaagttggcattggagccctagttgagaccaagattaa

SEQ ID NO: 132098 - DNA, 809 bp, Cannabis sativa
atcgacaaagattttttaaaaactctactagcataaaatacatcgtttaaataaagcttatttttacttttgtcggcaaaatttcaacaatattttttctcccaatagtttgtttcacgcggcaaacttcccaccaaactcacctcagcttcatattcaagtagtttccactattagttcctttgcttgttctagtttccactataagttcctttgctttcactaatttccactgagaaccagaatcaaataagcatttcttctaatcttctcattatcatcatccaacaatcaatacaaatctccaaaactccttgttcaatggcttctagacatgttgcttcatcaacataaggagtttaatgttaggagtgcgtattgaatacccctggtgctcccattcttcaaaagtctaaccaaaatctcacacatttttgcatttaccgagtagacctagaacttctatagagctataagttcagaatcggcaatcctcatcaaaatcggaacgaccttaattttcacagctcgccttcaattatcaggaaataaattaccaagacaaactaaatggaaaataacttgccatatttatcgtacaagaaaaaaaaatagaatgaagcagttctgattttgtctagtaagaaattacaatcaaatcaattttaccataagaaatgatcaagttatatgtgtatggcaagatttggttgttgttgaagtatgtaaaagtctattaataataaatattctagaatccaaatcaattcattattcaacaaatcaagcaataattcagataactaact

SEQ ID NO: 132099 - DNA, 2302 bp, Cannabis sativa
  modified_base (2108)..(2109): a, c, t, g, unknown or other
gatgccctgagcataaagggtccctgggcaagtaactattgattaagatttcacctcaactagcagatgatatggtcagatcaggtattgagtttgttgtaggcaaacttcataatttgacattacaatttgatttgttagacagaattgctctattaactgatgcagaactggtaaagattggagaagaggttttagctggtcgagctaaagattttacggtgtcaggtaacaggatgatattatacaaaactagagtttgtgttctaggtagtgcagaacttagaaaagaaattctcgaggaagctcataccactccatatgcactgcatcctggcactaccaagatgtatcaagatttaaaacccttctactggtggtgcgggatgaagaaagatgtggtagaatttgtatcttggtgtttaacttgtcagcaaattaaggctgaacatcagaagcatgtagggttattgcagccactgacacttcctgagtcgaagtggggggatgtaaccatgaatttcgtggttgggttacctagaaccacaggaatgtacgattctatttgggttgtggtaaatcgatttacaaaatctgcacattttctactggtgaaacaacttttacagtggatcggtatgcagagttatacgtgaaagaaatagtaagattacatggagctttaaagcccattatatcggattgagatctgtagttcacctcaaaattttggtagagtctccaacgggccacgggtaccaaactaaagtttagtacgattttccattctcagattgatggacagtctgaaaggacaatccagatattaaaagatatgttacatgcctgtgtgttggattttgaaggctcctggagcaagtatctatcactgatagagttctcatacaataatagttatcagagtattatagggatggctccctatgagatgttgtatggaaggaagtgcagatctctaattcactgggatgaaactggagaaaggaagtacttgggtcctgaatcggtataatggaccaacaaggctatagaaaagatcaaagccagaatacttgcctctcagagtaggcaaaagagttatgcagatccaaaacacgggaatgtaggtggcaagtatgctttaaggggtgggtgtggacaaagtggtctttttgccataatgggttatttgtctttagtgacttttagtatgttattattctgaattttggtgagtattatggaataagtatagtatttatcaatattaaaaattataaaaaaaaaaaagaaaaaaaacaaaatttctttctcatcaattctctctcattcgaaccacctagaactagcaagggattaggcaattttcaacttgatttagagtattttagctagttcttggtgaatccaattgaaggtaaaactcttagcacttttctctttgatttcttatgctcatagttgagttcatgcatgtttttctaaggttaggtatatgtgttattgattgatgtttgaatttgtattctgaagttaaattaaagttaattaagttagattgagttgagtttgtggctagttgtgaggtttgttcaaggtttgagcttaagagctcaaactttgctctcacatggtggattttgattctggatgtattggttggttttattgcttggtttcagtttattatggtgtaaataggtgttctggaagtttttgagaagtgtgggatcgatttgagatgtttgtgatgttttgtgtgtatcttgcacggcaccggtcgaccggttcagtgggatctataggaactggaatttcggttggtccctagggtacccctttgaaccggtctaccagttggggaatcggtctaccgaatgggcatttttggtaaccttagtttttcccatttttgtgatatttagggtattgccatgttatccatcaatagggaaacttttagtttctattttaagtccccgaaaagtgatttagcgtgtctctcattagtttttcgaataatgtgatttaggggcctgtaaatcgtcgagcagcagttttactcaggttagtcggtacacctgaattcggaaacgaggtaagattannataatgatatgcatatgtgtttacgtgtttcacacacatgtttattaagcctgttaaattacattaataacaatatcagtatatgtagagttatattagatgccgatagatgtatgttgggctcaaatactgatcgatgttatcacattggtacgactagagtatgactagcgtactgagtataggctaatat

SEQ ID NO: 132100 - DNA, 550 bp, Cannabis sativa
ttcccaccaacaacttgaatttctataacaaccacctttgatcctcaagtttaaaggtttgcttccataagttgaattagtgcaatcctctccactaatgtagtctacacccaagatttaaaggactttattaggcttgtaatgtgaggcttaggttagagtaggataaaagttaatatttctatgtctagtaacctaaccccctcaatttatcaaggacctttctttctctttaaagctttcacccaaaatgcacttttaacccacaatgaatgatttgattcaactttaattctcttgctattgttactttccaataaacacatatacagagcgagagttaacacaaattagctttgaaaaaaggttgtacactccaaggaactctctctcattgataatatattgtttcttctaacctgatagatatagtatatgcgtgtatatatatatttatagcaagataattatgtatatagtcttatgagctcattcccacacacctaaaacttaaatctcatcattttccccaatgtggctatataaataa

SEQ ID NO: 132101 - DNA, 735 bp, Cannabis sativa
cttattgattagggttaaaatattttttgttgatagatttaaggtctaatatgattagatttagggttagaacatgtggatctaggttctgtgatgaatttgggcgagaaattgatttttcaggctggcccgatgcatctcgatgcaagtccaatgcatcgggatatctgggttattttgagcttgaagatgaaggcccgatgtgggcccaataggggcccgatgcatggcctgatggtttgacttttaaaaaaagtcaaacctagtctgatgggcccgatgctcactttaatttttttcaaattttttttcctatttataatttaggattggcccgatgggcccgatgtagggctcgatggtgcccgatgcccacttaatttttttttaaaaaaaaattctgtttataattggagtggtccgatgggcccgataggggcccgatattgggtccggtggtctgacttgttggaatatttgacttggcctgatgggttcccgatacataattaatatttttatattatttttttctgttataattttggggtgggcgtgatgtgtggtccgatgggcccgatgtgtggtccgatgcctatttgaattttttaagtttttcattttttttgaaattttttaatatgtatttattaattttgtgtcataattttttttttataaattttgtaacatgtatttatttgttttttttttttttacagtcttccaaagttc

SEQ ID NO: 132102 - DNA, 789 bp, Cannabis sativa
ttatttatgccctaaaacaaaagaacaccaaaatgaaaaataaacattgcaaaattaaaagacatataaaaatcttacgtcgtagtagaattgggggaaggccggagattctgtccggcaaagaattgaatgcaggcagaaattgattatacaaagaagactgcaaaagaatatgaaagtaaaggagagaatggaagaaggggaatgcgtagggaaataaaataatactacagagattttgggtattaatgggtcaggcccattatcagcccatttcttctaagttcaaaaagtagagaacattgtgtgggtgaagtgcccaatttagcgataaattgagaatacttttttttatcccttaattaaaaatacccttatattatattttattaaaatctatctatttttatgagtgtgttgcttaatatacctttacctttcatttaagtatagcacatattttgcattaatctaaggggtataatagagatatcatctataaaagtgagtatacctcaaagaatatgaaaatgaaagtaaaaaataaaataaataaaataaagtaggtatacaatgtaatttctaacccaacttaggcgtcggtattcttcactggtgagcaggtgcacttaattttcttgttcattaaaatacattcttttaagagataattatctattttcagagataattacataaggcacctttttttgtaaaaaaaaattacatttttacgtttaatgaattttttttacatttttatggttttccgtaaaaataatacaaaaa

SEQ ID NO: 132103 - DNA, 1183 bp, Cannabis sativa
tttgtaaaaattattaatttgactatatttttttgttaattataaaaataaattatgtattttttaaaatagtacaaataagattttgagcttatttttgatattttttaatataatcaactaataaaaaataatttcacgtcaaaaaaaaattaaaagacaataatttctaagataaacagatacaaatatatttagattgagttattttatcatttaataaaataaaaaaaattagttaataatttttataaaatacggatctcaaataatatttaccataaatataatcaagtctatctcttacggcttaattcgtttttatcgtgtgtttgaatataaaagaatggatcctaaaattattatttactgatatgagataaatttaaaagttactggttttctttcctttcaaaattaatcaattgctgatcaaatgtttttttgttttttaaaaagctaatttaagaacaaaaagaaaggctgaatgccacagtgacttaatctgagtatttttttttttcaacaaaaaaaaaaaaaaagaaagaaatgctgaatgccaaacagtgatttaatccaagtattttttttcaacaaaaaaaaaaaggaaatgaataaaataatttgtatcacatcaaaggtcaaaaatgcgtaaatcaagtaaaagtgtaatgatgacaatgtccgtaagaacatccctttttcgacagaaaagagtattggcatttacatactcttctttcttttcttttttttttaagaaaaagcctttataaattaaaaaagagttagagtttgtagtcattacagaatataacatttggaatagtagaaatattcacgatactgataatattattagagcatctacatacatttaatttagtgatatactattattaaatttagcgtaaaataatatttccactccagttacaatatcaaaaattacactaaaaaaaatatttcttattattatattaattatttaataaaataaaaaaaattaatatcatattaattaacaaaaattaccacaattgatatattcaactaatataatttaaataattgtcatattatattaactataatatatatgactatataaaaaaataaagtaaaaaagtttgtcgggtaccgaaacaaatagaaataaatttgtacatcacttttaaaaatg

SEQ ID NO: 132104 - DNA, 698 bp, Cannabis sativa
tttttgaacttggaattctagttgcctttactcgaattgttttgacccttatttttcttctttgaagcctttcctctgacccataatccatcactagcaccttcttgttgttctgattttctcttcaattcctttgatgttaatgcattctgaacttcctctaatgtcaatgaatccttaccatacatcatagtatacacaaaatgctcataactctctctgaaaagagaattcaatactatgattacttgatcttcatccttaactgcgatcccaatgtttaccagtgtcactttattgaaatcatcaaaatgatcttcaacactctttcttgttgtcatatttataacttttgtttcaaaaataacttgttaaccaatgactttgtcaaaatcttctttagacacctctctaagaactcaatatgcaggctcaatatgcaggctcaatattatccgctttgggcctaagccctcatagatttattttggaaaacttacaaaaatactgaaatttgagttaatttatacaaaaatactatcacacgaaaatcttttcaaaaatactgtattcttataaaacacaaaacaggacaacttaaaacaatagtagaacaataaaaaaaaacaccagtagaacaacaataaaaacttaacataatatactgcagtataaaacttataaaaaaacacagtaaa

SEQ ID NO: 132105 - DNA, 715 bp, Cannabis sativa
aattaacaaataaaccctaaatctctttttattctcaaattttcctttgcttaatggacctcataaacaagacaaaatcttatttagaatcctaattgattaattaaaaccaattaattgagtcttcagtatgatctcaagtagtgtgaggacctgagcctatataatcaaactctcaatatgtagttctagattttactgagtaaattctctatcttatcaattcatcctaacttcactatagattcataattgcactcttgattatacataacgctctattcaccaagaatagttacgctataaattatccattgtttcaatctaaacaatcaaatatcttctatagatagtttacactgaataagaactaaattatcgttgtacccttctatgtattttatccttaaaatacttggctgcttataaataatatttcaaaaaactaatataattactgaaatgaggcctccaccttttaaactcgtttagccaagctctaagaaaactatcgttttacttttatgtatttatagaagatatagattctaaatctatgattagcgcttccactcaattgtactaacgtgttcccaagatgtaagtattgagtcaatcctaatggtcagctgtaacgaataagtcaaagaacatataaaatacacttaatttagaacctaatcatcttaagattgagatcattgatctaagatca

SEQ ID NO: 132106 - DNA, 740 bp, Cannabis sativa
ttgatttgttacctgatttggtaactgaattcaatggttaataaaatgatgattttccattcaaaaaaaaacctattctgattgaattatccaattatcctttgttaggttattcctaaatttattaaaaatataacatacaatagatgttctattttgcataaatttttagagcaatgaaggtatagcaattctattcattgttttaaacttattttattagtttttttcagttttaaattattttttgtatcaatagtgctatcccaaattttgttcacttgatgtggcatgtccacgtgatcaaaagcagaagacacgtggagaacaggtcatcgctaacttcccatggtactgtcgtgcaccttccaacctaccaggttagtgcatacagtcttccaacttgccaggttagtgcatacagcattaaactaccaggactagtaccgagcaggtttccagacctggaatgcatatgttgcacaacacatacaagccagcaagaatccatgtacctaccagcaaggtcttggccagacttgtagccagccggctaggagggacaacttccatgcattgagcagctttcaacaaggttagtcagccaaagctataagaatgcacaaacacttgtgtttttctcacaagccctccagcttagcttcaacatacctacgactttagatcagttatgttaacgcagattttcgttacctatatgggttttatgccctaaataa

SEQ ID NO: 132107 - DNA, 991 bp, Cannabis sativa
atgagtctttaataagcgatgagatcaatgaaaacaccaaaatattgaccttgcttttagccaacgataatgagtctttaataagcgatgagaataattaaataataaaaagcaaagagcataaagtaaaggaaataccaaatttatagaggttcgaacctttatagtcggtaatagcctacttccctttttattgtattgacttgtgagaaagaatgaactattctctctcgaaagctcttacagagatctcttagcagtttactcttagacaaagatttcactcttgagtgtttttctctcagaataattttgtgtccttgaataatgagatgaaaccactatttataggaattacttacatgaaaatggtttcccttaatctataatagataaatgaagaaactagcttatttccataattataataaaaaaattaggaaatctaggctcattgtttgtattctttgaagatacgaatcaatcccaccattgtagggattgtatcctgacatgcaagcttggaaaaagcgatgtacatctttaaaattgctaactcacacccttggtcggtgcatgcgagttacccacgtgatcaagttggtcggatgtctacctgtgtctatgttcggacatcctaccatctatgtttgactttgagcatcataacaatttgcatgacctgctaggagtaaaatcatctatccaaattatgagatatgatacacgtgtcatctagactgatgccacgtcatagtgtagaaattaagataacattaatgttattgataatataagtaataaatttggttcttgtgtgagttattgattgttaaagttatattgattattgaattagtgtcatggttcatggagcattagttgcatttgaaaataaagtcatttcacatttttcatacttatttatttatttgtagtgaaaataaagtaaaatttgcaataatatttatttattattttattttttaaa

SEQ ID NO: 132108 - DNA, 2050 bp, Cannabis sativa
  modified_base (512)..(515): a, c, t, g, unknown or other
aagggggcctgccgaccatccttggcaagccctatggctagcatgcactctgcaggtccatggtgggccagctttttacctagcaagtttttggtgcgcaactttcatccgtggacaacaagtcaagaaacaatttgggtcttaacaacccacaaatatagagagaaaatattagtaacttctatatttttgagggacaattttgtcatttaaatttactaaattattatgtaaataatagttttatttacctatatctaaggaatatgaaggatacaagctctactatatgaagagtattagtcaaaccctaaaaccctaaggcttaagctttaagtctgataactcatctcatctcatctctctctcacacgcatagtctgtctctatcaattgagatttgccaattttggttctcacattgtaatcttaagagagccactttagatcccattactatagtgatataaggggtattatttcttggattaatacaactaaaaggagagtannnnattacccgctaactaagggggtcgtgcctctataaaatcttgtgtctatttatttctcttattgtgtaacacatgacaagcaacagtgttaaatttgactttgttgtcagttggccaaatctgaggtcaacataaagtatactagtatcagatatattagatatacatcgggctagatcgatattgacagtgaaaaagatatcataaatttactataatatcttttctaattgaatgtcacttagttgatcttatatcaattgatgttaatcttaagatggttatgttctggcttaaatattttatatatgtccattgatttgttcattaaagctgatcaaatgaatcggtcaaatacttacatttttggaatatgatagtacaattgagtgggagctgtaatcatagatatataatctatagcttctataactattatgaagtgaagcaatttaggttctggcttaaatatttcatatatgttcattgacttgtttattaaagctgaccaaatggatcgatcatatacttacatctttggagcatggtagtacaattgagtgggagcgctaatcatagatatgtaatatatagcttccataactatttagaagtgaaacgataatttccttagagatttggttaacagacctaaatggaagagcttttgttacattaattatattagtttactaatatattattgatcagaagctaattgtgttttaaggataaaatacattgaagggtagaatggtaaatttatccatactcaatgtaaatcatctatatagaatattggattatttggattgaaataatggataatttatagcataagtattctttgtgaatagagcattctatgtaattaggagtgcaattctaaatctatagtggagttaggagaaattagtaagatagagaatttacttggtaatttctaaaaactacttattggaagcttggttatatacgcccatggtccctgcactaactgggataatattattttggtttctcaattaattgatttattaaatcaattaggattttcaaataaagactatgtcttctttgtgaattttaccaagaatgggcacaattgagaagaaaagagaattcaaggtttatttattaattaagagaccttggaatgtctaattaataaatgtgattaaatagtaattttatttgataattaattataactatcaaatagataaaattagtatttaaataactagagtagaaaaataacattattaaagaaatataagtttgtttcattaaggaagaaaaataatgaaaaaaatccaactcatgggctttcttataggggttctgccatgaggtttgttttaattcatcgaatctttcaaattagcctatttagctctaaccctaaacctaaagaatccctatgaataaaacattaagggttttgagtcagatcatgactctagactctctcttgtctgacaaactaaactagaagaaaacctattattttctatcattaattttgaatttct

SEQ ID NO: 132109 - DNA, 551 bp, Cannabis sativa
gtaataattagccttaggttaagacgggttagcctgtgtctagggtccatctaattttagtaaatactttttttttttaaaaaaaatatacctatttttagtaatttttaaaaatatcacatattttttaataaatgacctaataattttattttcctaaagccaactcaatcttaaagtgggccttgattatgagacacttttgaatgaatattacttactaaacaaatttatatataaatattaattttaaaaatattaaattattagattttgatacaataacgaatgataaaagagaagtttgaatttttatgcttttttttttagaaaattgagttttcatacttaattaactatttaattaaaaaaaatatctcattttacattatatcaaaaatatatttatatacaaaatatttaagtcaaattttttttttttgccaaaaatcatttttttttcttaagttctttttcagccgataaaccaatcttaacagatataatgtaaatataagatatttttataattagatagaaaaattaaatat

SEQ ID NO: 132110 - DNA, 3172 bp, Cannabis sativa
ctggtaaaataatttctaacatggctaaaccctaaatatcacccaggagatacgaaccctaattgctaaaccaaacaaagcactgtgatgtaagacaagccgtaactcaaataaaaataaaaggagaatgagacacttactgtgcgaagtcgaaaagtcgaacgctgaagatttttgcaaatgaagacgtggtggtcggcaggataaattttttgaacaccgggatttgtaaagaagatctgaataaattcttaggaagaatgtcaaagataaggatggcatgcacaagtttagaaagctcaagtttttggagaagatgaaaatggtagaaaatttgattctcaccattttataccctgtatttttcgaccatcagatcacaatattgaagatctaatggatgagaatagaagggaagtggaaaagatagcccattcatgctattgatgtgtatcgaaactataaaactgccaaaatcaaggacgtgcattttttcaaaagaaattatgacaaaaataccctctataatcattaaaaagcactttttattaaaaaaaaactttttaagaggcaattgttatacccaaaattcggctatcactttagagggggacacgtgtcaaatttgaaagaatacgaatcaacaaatataacgatggttatatttgaaaatgtaataacttattaaatgcgaaagtgacagagtatatttacaacttactgactatgaaggcttaggcgagataaagaattgcaaactgttgccttgtgcattagtgagaaactatacaactttagatgtataaggcgaggcgtcaacctcgctacgcattagaagacgagatacattgaccgataagatacttagcgtataatacactgtataaaactaagtataataatcagttaaacccatacaactaatagtgaggcgcccatctcgctataggaaggcacgctcgtggtaccttcactaatcagctccagacatcttttagtgagattcatagctccgttaagtcagttgtcttagatagaagttgacattcaaatgatgttggctgttgaagttcaccttgtcacctagaactgcaattgtcagatggagcgttatgacttcaatatcataaatcacaaggctcacattatcaacctcagaaaggtgtgggaaaagctctagtttgctaccaggattgttgttgttatattcccagcgagatgtcccaaaacgatacgatttgtaacatatttaatacacatttatattgaccaagtaaaagtggaccaatcacagttgtgtgatttttagatatcaaccgcacatattttacgtggaatgtgattgaatcccatgattttaggggatacttgttgtaaaatatcaatcaatatggtaattaactgccctcctatgtaattaacggccccatgatgtaattataaatagaggccagtcagactaaaaaagaggcaaaaaattcataagagaaaagatgctagagatgtatcataaatctaataagattgactcatggactatgcagaattttaactgcaaaaccacgtaaaaaccttcatgttcttactgttttttctttactatttctattttctgtgcaagtctatcaccatttaggctcaaatgtagttaacgaaaatctgctttaacagtaggcatgatcattttgcttgggaacaaagttcttttgaattgaccatttcgtcgttgaaaggtaagcttgatagttgggttgaaaatgtgagaaaggcgaagagtttgagaaagaggtcgagtatattttatactttgatcggttgtcctcatttattccaagtttagttttatgagtgttgaaaatatatgaatggtaagtactgccaaaaggaaatttctagtattccaaggattatttagtggacttgtagcagccaaccaactttcaaaattttgaagactacgatttttaatgtttccaaagacaaggtacttttttttttattattattcttagttgtttaatattgttagtaaaaatcatattgacaatttcactattatgtttttccagttgcaactatctaatatgaaacccacttctgctgagtttaaattcttaaaaaagagcagtttcaagtttgacactgattgcactttttttttttacaagagtgagcctattcaggaacaaccttctgaggttgagagtgacatatccatcaaacttaatagtttttctagaaaagtggatagtctagagcttaagattgatttgctgcacactttccagtagaagatttcatctaatttgattgagttgaaagagtttgttgctgcccaatttgtttcttttgctgcccaaatggctacaatgcagacacaattctcatctgtgttggttgattctgttgctaaggtatgatagttttttatgattgtttttaagttttgttttagttgcttatgtatgcttttgtttacaaatttttaacaggacaaaggtagtgactcttctaatgacgatggtggaagtaataatgaagaagatattaattcagagggtaatgaagaagcagatgataatgaagaagagcaagatgctgaagatgaagatttggatgatggtagtggtgatgaagaggaggagggtagtgatggagagcaaacagatgaggatgataatgaagattttgagtccaaaggaaaatatgagaagggaagtgatgataaatgcgatgatagtgagaagaaggtagatcattagacaatgtaactaggttttagttactttgtatgttatattttattttaattccatttagtttatggattagtttttttatggttttttatattttggagtctttttatgtattaagttgctactattattcaaactctttttatgtacttcttatatttttagaatgattatattttgattatggttattatatttaaccatgttgtatgtttcttttttttttactgtttgtttttcttgttggttagtttgtttagaattattcttaagtttctttttatcttccaaaaaaattacatttttttattcttatttttgtatttttttatcatcaagaattttattgatgtcaatgaaggagttactcaaattgttgttgaggctactgttcagtcgggtgtgaaagcagt

SEQ ID NO: 132111 - DNA, 518 bp, Cannabis sativa
tgtgtgtcaaaataaaataagaggaaattaattaagctagggtttgatgaattaattaatttcctgttaatacatttacacaccaccactatcactaccttggtagttgtgtgtatgtgtttttaattatgtgtctacagtctacttctttattaattaagtttgtatttcatttacttaattactacacctttgggtgtacatcttattacaatatttattgttattagaggtggaggattctgctgctaataatcccacagtccgccggtaaaagttaatagcgacaaagtttattgataacaatccgctggtaatacttagtcactaaaaatgagtattagcagcggactgacactcccaccactaatactagtgtcagacacataaactggtattattagtatagttgcagacatagacggacctactcttatcaatgtgggggctatagcccccacgaacaaaaatattgccttttaaaaaattaaatgtattttttttaatttgataattat

SEQ ID NO: 132112 - DNA, 618 bp, Cannabis sativa
atagttgaaattatgctctttggataataaacttatatacatataatcatatagcttcagtgatcataataagtatatggcgattaactatgtttgagtgtttgattaactctgctatttggagtctcttgattttgagtcagcttataacacacctccttctcttcaacaacaatcagactgcctcttgtaactggaaagagtgagacatatataaaaatagtactaatatttgagtgctaataattaacacaactcaaaacttttctcacttcttgtaaacaatgaaaccaattgtttgataaatctagaattaaacaatgctctgcgttttaaaaaaagaaaagaaaagcagtgctcaccacttaattatagagctacttaatatatataataaataaatatagcatttatttattatctttttatattgatattttttattgattaagtggtaatatatataaatatagcattatgatgtttgattacctatgaaaaaaaattacaattttgaatttagaaatacaatttgttattttaaaatatgtagaataatgtggttatttttcataagtaaagaaaacaataaaatttacatagattctgtaagtattt

SEQ ID NO: 132113 - DNA, 1277 bp, Cannabis sativa
taattatatagaaaaattaaacataaatactcgaaattttctaattttactcatttatcggtaatatctattaaaagtgcacacatataatatatatgagtcggcctcctcttctcacccaccttattcaatttcaatggttccgtggcgtggtctttcatcattatttaattatttcctttaacaataattctcttaaacattttacactattaaattaagttgtattttatatagtacttgttaataatagttttgtttacataaatttttacttttactaataattaagttatttgtaaaaaaaaaatataagataagtttaagttttgatttgtttttattatttgaatgactattatttaaatatttttattaataaaaaatattttttaaagtatttcaatattattagaaaaaaaaattgtaagtaaattaagaattgtgcaaattattttaactttaaaaataacttttcaaaagtctttttaaaaaaaattacaaatcttaacttcttcaaaaatgatattttatttttttatccacacacttagaaggatttttttaattctaacagttaaaaaagaacttatagaaactaaatcaaatgaggtcattatctcttaagatataaattttaaaatagcataatcattccatcacattttattcaattttatcacaaattaagtgaagtgttgaatagtaattgataaattaaagtaaattaaatattcttgaccatttttacgttaatgaataatataataaaagatttttttaataataatttatgtttttaattttttaatcattaaagtaaaaaatgtgataagtatttaatttatatatatttatcaactactatttactttgtcactcgttttacaataaaattaaatagaatataataaaatgatcatattacagtaaaagttatgttataatttttttccaaataacatattagcaacctaaaaaaaatataattattatacacaacaaattagttccctaacatgtgtttggaagtaactacgtaaattattagatagtgtaattatcaggtgatatttataagtttagtaattacattatattttaaaatataaaatatatttaaatatgagataataattacaatatgatgaatttctaatatcaaacacatagtaaatacacaagaaaataatattttttcaataattaataattgaaatcaaatttttttaataattacaacgctaattaggattttcgccccttgaactttgaca

SEQ ID NO: 132114 - DNA, 790 bp, Cannabis sativa
caccagcagtgaaatcacctggctccaactccttcttaaagacttccacatacctcaagatacacctgcctttatttactgtgacaatcaatccgccatccatattgccaacaatcccacttttcacgaacgcactaaacatattgaattggatttccatttcattcgcgacaaaatcaaacaatccaccattcgacttatacatgtcagcagcaacttacaacttgcagatgcattcaccaaacctctgtcctcgactacactcaacactcatgtacacaagatggctgtatacgatatctacaatccatcttgaggagggggtatcaagatttgtctcctaattgttactggtttggttgttagaccattatgttagttagtgacctctattagttagacagttagttcctatttttatgttctttctgttagagttaagttgcaactctagtgtgttcagttaactctagttagcttagtctatgttggtatgtatatatatatctggtgtactctgtaattcttattcaattcattcagcaataatacaaatgttttctcttttctcattccgcaacagggtgctaagcacaaaaaattcctttcagcaattttcgtaaaatatatcatatccaatacttgtggacaggcattaaaaacttaacttcttaccactactacaaaaatcacctttagagacagtttttaaggtctttcagcgtcggttttggcaaaatttgctaccgacgctgataagggcgacgctgtaggattgaaaacaaccgac

SEQ ID NO: 132115 - DNA, 2482 bp, Cannabis sativa
tgaaccatgcatcattaaatgttatttctgatatatattaataagtaaatctgattatattgaaacgagttttatttagggcataaaacccaacaagcacttccatgttgtatgttgggactttgacttatatctcaaaattgaaattcttgttaagaaaagtaaagttatttgaagcagaactatagtattgagcaagatacttgatgaaacaataaggtggaggaaaccacctgggaatgagaatccaactcgaggtctcaatgtctgaagttattcagattagatttcgaggataaaatccttttaatagggaaataattgtaatgaccacatagttaaatcatgggattagcagataattaagaggtttaattattattatgtgattttgtgcctcttagtataaattagagcttattgtcagaaaaaggcattaggaaaatattttctcaaatacgaagatatatttgaatgctagatgtattatatatgccatatgtgattttttttatacattttcatatttttctgcctagacaaccagaattctgattggttcagggctgtaccaactggaatttcggttggactgtatcgagtaaggccaattttagtattttggttataacttttcactcgggtgtctattttaaacgttctatataccgttttaaagcttatgatgagctctacgatatggtatataaattagagccaaattatgtattttattttagggtgtctccatcacatagtttagtagaaaaaccctatgttctttttagacattagaaaagtgtgctacagtaaacacttatcagttgtacgtatgttgtgatttaggggcctataaatcgtcgagcagcagtttccactcagagttaccgacatacttgcattcaaaatcaaggtgagattagtataatgattgcataaatgtatacatgtttagcatacatgttagttgccgttagaataacatatcagggtatcagtgaggtgtacatagagttgcactgagataccaatatatatatgttcgaaaaattaatagccatcagattagcatatcagagttttagtgaagtgtacatagagttgcacaaagatgccaacggatatatgttaggctattagatagtatgaattaaatgcttccatatcagtacgactagagtactgagtataggttggattcgcagttagtcatattttgtcgagaacattcctgacctagttagcagattgtaattaggtgtatgggcgcttggttacgatttgaatatatgtttatgtttatgattattagggctgagcataaaatctagaaaattgaaaagaaaaaaaaaaccgttcaaatcaacctaccgaacatcgttggaactgaaacagatggaaccgaaaactaaaaaaatactaacggttaaaccgccattgaacggtcaattttttttttggtaatgaaccgaccgaaaaaactgaaactgactgttatacatatatatattaatttattaagtttttttttagctttatgtattgtagttactaataatatataataatatattattatttaattaatattaaagttaaaataataagagaattagtttttgaacaattaatttgtatgtttgtagttataaaatgtagaatattgtgtttatagaataaaagatcatatttttttaaaaaaaaattcagtttgggcggtttaaaccgaccaatccgaggttcaaaactagtcggttttaatataagttctggatcggtcggtcggtttttggattgcaccaatctagaccgaaaactgaattctggatttttatatagaaaaaaaaccgaccaaaccgaccgatgctcagccctaatgattatacttttcttactgagtctgtcgactcacagctattacgtgtatgtgcaggtatgaactaggaccgaaccattaagagtctaaagctaaggatgaagattgtacatatcaagacggttagacctggagcgttcagggtcttcgggacaatgttggctcacttttgttggtcgctagacaacgacttttgaaatataaacagtttataaacttttgtaactttttaaatgagattccgaattatgtaatttattatgttttaaatattaaagtgaagttatttaattaagttttaattatttacgtttttattaaacattttgattcgcaaagacgtgcacagtatttaaaaagcactgtaatacgtataatctagtagggtgttacatacaaaaaagttatttaccaaaaaaatagaattaaaaaacccacaaaaagataaaaacgatttgtcaattttcattcttgatgatgttatatatatatatatatatatataaatactaatataattgaagatcacatattattattattattattattatggtaaatattattttaaattatgtgttcgtaaaagttactaattaaattttt

SEQ ID NO: 132116 - DNA, 905 bp, Cannabis sativa
tattacaccttataaaagtgttaaggatcataaatgttctttagcatttctcttattacatgacgacttattacaacttgtaatatgatattaattattaagttactggtaatatgtattaattttttattattatcatttacatattttaaaaataatatttttgaataataattgccgaaaaaataagacaattaaaacacttggttaatttaaagatttgaaaacttgtatattgaaaatggtagattatatcaaacaagtcaaaacttatatcataaaataacataaaaattatatcattttataaaataaaaacttatattataggtacggacattcaaatctcaatactcacattaaatgtggttattaaactcatgatattttagtgaatgaacacttagttacaaattaagtatgtttgctatattcatgattacactttttttattaatttattcgactcacacataattatgttgttacatgtagataaaggtaaaatcaagactgaacaacagcgagtgaccttggtgaagattgtacatatccagtaatttaagccttgagagttacgatatttgggacgtcatgagttatgtcattagacgatacatttatatatattatgttataaatattttgtaagtaaattttgagatccttaattatatttattttataaaaaaagtttatatttagtaaaattttaattattatgaaaattttatcaaatacactttttatgttaaaaccttttaattatcaaaaaaattaacttgtaggtattgtgtgggtttccaaatctaattaaaagatcttaattaaatttgaggaaattagatggtatacccaaggtagtccatctcatttttacttctttcttaaaactcattaattta

SEQ ID NO: 132117 - DNA, 872 bp, Cannabis sativa
acttaacacctaaaaatggatggaaagggctaattgctaacggaacttgggtttaggaggttttaccaccaaaattttagaattgggagttagttataaaaacttggccacttaaagaagttatgccgcaaataactcttagtattaacgtgaatgcctgctaataattataaatggcagcgagtattaacaatagggtctgccactaattattattttttaatatttaacaattttatcatttcagggtattaaattaatcaaattgttaaaaaataatatttcaaataaataactaattaattaattttaaaacaactaatactaatattaattcaaataaattaatacaaatattctcttcaaaaatatttatgattcaaacaaaccaatacaaatatttcctttatatttaatctttacataatttaattaacctacataaactaattactaaataaaataggaaaatttacaactcatgactaaagtgtaaagtattttacatttttatttgtgctcggtattttttttcttttgtacagttcattattttcatcattaccttttaacttttcattaattacatttttacgatttggacttacatcaaaaattttgtctatctctctctccccactttttgttttcttgttcattttttatgtacattctttctctcaatacaattactctctacaagccggtcatatcaactttttcttctcctttttttttttaaaaaaaaaatcactttatatagttaatatataccaatttcacatagagtgtgtacaacctatagttgtaactagttctagttcatcttccccttttcctatttttttttttttcaaaaaggctaagaaaaa

SEQ ID NO: 132118 - DNA, 1183 bp, Cannabis sativa
cgcttccagtttgaagtatcaaacaatgaagtcaaacatgaagctatgctagttggactacccttatcgaaggaagtgggagtcgagaacattgaagtccatagtgaatcttaactggtggtgaacaaaatttccagagaataccaaacaaggggagagaggatggctgcctatttagcccgtacctagtagttgctctagttctttaaaagatacatcatcaagtaggtcctcaagaacaaaatttattcgcagacatattagaaaaattgaccaaaaacccgacgacaaaaatttttgggctagtcttagctgacaatatatccacactaagcttccatatatccaaaaggtgcatgcaatagactataccatatcctagatgggacctatcctcaaatatctgactatcggggaagttcccatgatgaaggttccatctaatgtgagcagtgccaacaatacacgaaggtcctgcttgctgccccaacagaagtaattgatgaccattccttgagcttttgatgtatggagaattaatttggtagggtcccttccaaccgaaaaggtggagtaaagtatgctatcttggtctttaattattacacaatgaggtagaggtagaactaatgagcattataacctccaaaaaggcactggactttgtgattaaaaacatcatatgccaatatgactgcccatacaagatcgtttctgacaacgagaagtaatttgatagcgtccacttcactaacttttgtgagagacatgagatcatcaaaagcttcttggtagttgcaagaccccaagataatgaaaaacacgccaatagtcctcaaaatatcaaaacaccgagcacaatgatcgtggcataaaggaaatgagaatggaatgtctatctagggatgtttcctaaactagattaacccgaacaactacaattctacaccacccaattgtagatgaagactgttggaatttattttactagaatctagatttactaacatatatattgattataaaattataatctaacatcctaattaagaatttcctaaaataatgaaataaacacataaaagataagtaatccttacaatgatggcagcggaataatatgactcattttattcaggtctttagcccttgattcctgtatgtagcagagcattatcaagat

SEQ ID NO: 132119 - DNA, 1132 bp, Cannabis sativa
cagaagctaattttcaccattagatcatcatcaatggtggaaagaaaacttatgctttattttttatttttttcctatttttgtgggcttcgtttacctataaaaggagagctgtcttagctcatttttcacattctaaaaaagaccacaaggttagagcttctctctctagactctctctctctagagtttggagtttctgatacttagtcttttgctataattacaatcttgtgagaaataaaaactttaagtagacatagccccattactatcgcgatattgcaggtgaaccacaataaattggctatgcctttctaaattacttaactacttttcttattctcaccaatttagcgtgcgggtgtggcttagaagtctagtccatatttttgagtcaagaattaattttatggtttaagttataatatcggtatatcctaaatctttatatacataatttaggaaacgtaaataaccattataattattcactcagagagagaattgttcttgctcatgtattgaaataaaccaagaacacattttttagttttatcctaattagcccacactaatccttgtgtgtggtggaagatttggtagattaaagtgtgagtttgtcattgctgatctaggataaaatatacaaaatgattcaacgatacccaaatgcgcttcaagatgtaaatgattccttccatctctttatttcaaatttaatatatgtacttatgaagatcctcgggtgtggtacaatgataatctcataaatgcttccactgcaactttatttagttccataaaaccaatagttatacacaattaattttggagatcttaagtgatgggctaccaaaaacaatattcaccttattgatatagggggtgcccatgaatccatttaagctctcttcaaatatgtatacccatactatacagactcaaaattatcatacttgaccttccccagacaatgtggaattgcagaattttgatctttccccttgcaaatcacgggactctgactatcacaatgacccccctttaaggctccaacatccttgttgacggcacgtctagctgggtcaaggctttgatactatttcataacgtccccgcttcaagcctc

SEQ ID NO: 132120 - DNA, 634 bp, Cannabis sativa
  modified_base (43)..(46): a, c, t, g, unknown or other
acgtggacagtccaccgtgacactaaactgtgatttttggacnnnngtgtgtagagcaaaacggaactaggatttaggtagtctaaccgccaaaaatttggtttttgtggttaagtgttataaaccgtaaaattcaggtggtttagccgccaatatcctatattaaatttgtagttttttaaaaacttttaaatagttagaatattgataataaaattcttgatattttagtatatgtttaaaattttttaaatttatatttaatattgtaaccataataaatattgttataatttttttttgtttttctgttaaaaaaaataataagtctatatatgtttttgaagtgaagactgagaaaaatattgtaataagaaattgtaattctataataatttgtttcaaccaatctatgttttaataaataatcacattgtgagattacatattattattctaattattttaggaaaatttacaccctttactaacttttttatttttctttcaaatatactgtgacacggcaaagttaacttttctaccgtttttattttttttgtttattttggcagtatagtgccttggtcttggttcaatttgtatatataaaaagtttacaagaattgattga

SEQ ID NO: 132121 - DNA, 993 bp, Cannabis sativa
ataacgttgcatgcttacatggacaaaataagtgccacatggcagtacaactcaccaataggaaggctaagttagcacctgaacaaacagagatcccaacacccaaacgggcatcaagcgacagactagctcccactcaggagctggccgaccagccttgggactataccatggccagccagcttggcctccacaggggcctggccgaccaagaggtgcactacatgctttcctggacacttttacacatgaacaacaacttatgggctgcgaattgagccttaaaatcccaacaggatggttgaataatatctaaaatcatgggcattttggtcttttgtaaatatttaacaaactatgcaagtattaagggatttgaattgtaaacctagggttttaggcctcctatataaatgccttaaccttaggctagaaacctaagttgcctctaagcctaaaccctaagtgtttggtaaacctgcttctaaactctaagtgtttgataaactctctctctctctcttcctcacttcctctctcttacacgcctaccctagcacatctcaatacttgagttttgccagtattgattcataccttgtaatcctaagggtgctatagtagatcccacctatagtgatttggatcgtatttctctcggtataaatacaactaaaaggggagtgggtcattacccgctatcacaagggggtcgaacctctataacaaatctttttgtttattgatttttattcatttgtgcaaacacgtggcaagcatcagatctatacgatcccgctgtcggttgatcactttttgaggtcaacaagagccatcttattccttatataggatttctcttgggttagatttaaattatgtggaattaaaaaagacaaaaaaagggctaaaaatacacttaagtggtcggccatacaataggccccactagttacaattttggcattttatttaacaatttatcttttcttt

SEQ ID NO: 132122 - DNA, 530 bp, Cannabis sativa
aacggagtcaaaaaattaattaaaaatttactaagaaatcaaaaattaaattctaataaaatattagaaaaaagaaatatctaaaaatgactctgggaagtgctgcacacgaggagttagatagtgggcgtcactggaagatggtttcttctacctccgggtgggtctggaacgggtacgagtaacctggttgcaggcagtcgagtcgaagaggtttcccagccaaaaaattcaacaaaacggacgagaaaaggagggattttgtttggaattcaatatctaatcaatttatagagaattttgggtataaacaactaaaacattataaatcgaattgaaatccattcaaaaatttaagaacaaaaagaaatacgactgcgatatgtatctcaaccagtttgaaaaataaatcatggagaaacattgtaaattagtcaggaatgagatttgtacaattaattttagtcaataatcaatagaatcaaaaaatccaaaattaatttcataatataattatataaaccctaaaa

SEQ ID NO: 132123 - DNA, 929 bp, Cannabis sativa
  modified_base (860)..(863): a, c, t, g, unknown or other
ttctgcgctattttaattagtaatctcgattaggggattagggtttcataagcattttggatagcgtgcctaattatttagggcgttacaccatgactgggtctggtcctcagtattatgctggagagacagggccaataattggcaagccagccattggcgaccccatgtagacttgcgataagatctcgagttatccagacttggagaggtcatctgtcaagtcagccaaactaaagaaccatgcattgttggctgcgatgtattcgcacaacagagacgcaaaattctgagatggatggatgaccaagagaacatcctccaatctcaccaggcagagctagaccatcgtaatagagaatctagcaacctgataaggcagttcaatgaaagaactgccggaagaggtcagaatctcatcaaagatcctctccaagggagactagtcgatagattggggatggtctactgacaaactgtccaaccaggtttctctagaacaaggaaagaccttcccttgctcgaaggaagaaaaatcttgccacaaagatctggtggcaagagtaataattatattgtaaataaaaatataaattaatcttaaattacaatttttttaaataatagtttggctaatagtgtttataattttaaatggtcattacatgtatcgtgccattagatcagtcaattggcatgatattatttgtggtatccgttgacatttttaggcacgaccaaaagggcacaacaagacgtgcctacaaattcatgggcattaaaaattaaatttgttaacactaatttaatcgttccaataacatttttgtcttgtagtgatatctttatatattaaaagnnnntatctaacggcatttcttggtttaacagaatatacttaaaagtaaaagaatattctgttaaattta

SEQ ID NO: 132124 - DNA, 1589 bp, Cannabis sativa
catgaaccacagatccatttatgatatttttctctctcaatacaaaattctcaaccatttaacttaaaagtactcccaacatatgtagtagtataattcccattgctaaaaaagtacatcatacaaatacaaatacaaatcatcagaatgatcactaaaaatcaaaaaattcccattgctaaaaaatatgatggaaaaaataagctagaactagataactcaaacgtatttggaagaagaatatccaaattgagtgacacatatttgaaccaagaatccgagtcaccataattcttcataatccaaatttcaattgaatcttcatatgtattatcagtgagaaaacaaagacacccagaaaacttagttagcttcctaaaataacatccttgtctaatttgatgagcatttataagcttaaatttctccttaattatatcaaaagtaactatccctatacataactggaaaattttagttctatttgcaaagcataccatccaattaatgtactcattgaaaacaacagagcaatccacatcagaaataagagtttctatatcagaagtaggtattataaattttgaaaatatgttaggcattactattttcctctacgaattgcttctcaaactataaatccaaacttgttttccctttctaaacacattactagaacgatcatcataaccaaccccagttaaagatgtgcactgtaccacttttaaatcagtggtcaagtgattatagccaagtccaactacagtagtgtagtagtataatcaagtaccctaggagtagaagagggaaatcgtttaaactcgttaatggtggggttccataaataaatctcatcacctgtacaacgagaaaaccctaatacgccattatcactgcccataagtgacatatttgttggaccctcttcaaaaaagggtaatttgtgtgaagaaatctcagtaaaagtgtgaggatcacaaatggataaagatggagaatttacagtgttgtcctagagtaaaactaggcgaggtagaggtggatgatggtggaagtgaagatcgataaaataaggagtccgtagaagagagagccaagctttagagacgcactcgttccgtttgagagatttttcatcgagtcttgaaagaatctccacaagaatatcactaaaatgtaaacccaattcagagtaaaatactaaaatctcatttcagagatgaaaccttaaatctcattaaaccaaaaatctttgagagagagagtgtgtgagtgagtgagagcgatatacataaaggaagagcttatctgaacggaagccattgaagatggtagagcttgaaatcgtagaggacggaaagctagagagaagctagaaaaggggaaaaagtgtttttaaaattttttaaaatcgtttaaaatttgtttttaaaattcacataaatttgattttaaatttaaaaaacaaaaaacaaaaatttttaccgaacgtacgctttattttaaattgctgaatttttgattaaaaaaagaaactacttttaaaattattaccgaacaaccccataattaacctaatataattattt

SEQ ID NO: 132125 - DNA, 944 bp, Cannabis sativa
aaaaataatggaacgaaaatggaaagttattattagatatttattgtgtatataatgtgtgtggatttgttaatcgagcggcggtggtggcgcgtggtcaaatatataatttgaatcactaatcaattcaagggtttaattaatttatatgctaattaattaagaatatcaatacgaaaacttcatcttttgcacgttaattggccggtatttgaatactaatgattgaattatacaaatcaagcacattcattacaccacactgttgacactgttttattatataattttagggttcatttgctgttatattctattatatattaaattatatttcatataatatttatatataagtattgacttttatgttcatattaatgtataatatttagtataaattgaaatttaataaatatgatatataacctaatataatataatcactacaagaaaaaacatttacgataacattaaaagaataaatattcatattcatatctattatatcttcttctttttcagccatgaaattaatttttcctcggttcaaaatatttttgaaataaaagacaaatttttaagttcataaaaaggaaagaaggatatgatatttgataagaaattatagtttatgagttgtgacgttagtagtgtcagttttaagtacataggggtgaagtataacgatgatgatgttttctctcatgtgaaagtgttgaaagtccaacttgactgtacttgtctttactttcaagtggcgctctaagtccccttcttttactcattgggtaggtagggcttttgagattctttgactctggttactagtggtgcatgcataataataggagacaaccatggacaaactagtggttttgcgaacgtggagaatatggttttagaagaggaaatgagggttggtaatgaatctaaccaccctc

SEQ ID NO: 132126 - DNA, 1398 bp, Cannabis sativa
  modified_base (35)..(42): a, c, t, g, unknown or other
cactaatcaataatttaaagaatcaatttaagaannnnnnnncataaattgatcatatttataagataaatatggactcatccatatgaattaggtctttatagtaaattacatgttaataaagacggcgccttcattcatatcggtctttgtcatatataatctctattatacaacaccttcactttgatgtcatgctacatccgtaattcgaaccaagtttacttacaaccgaagaacgggaatcaacgaaccgtactagcaaccgttgattaaagattcacaaactttaatatgttgctgactattttattcatacctaaggaatcttagttctctatacaactacaagtcacatcctcatatatgaataagaaattttctaatatttaatataaattattcaataataatattaataacttaacatccatgcatatatcaaatgtttaactctttatttaataatcagaaattgtctttacaagcttttcagggcataaactctaccaatctccaacttgccctaaaagtaaattgggcatctcccttagtctcatcttagttatatgacccataaaagagtttgttggtagcgtctatgtgaatggatctgccagattatgtttcgatgcgatcttcaagaccgtcacatcacctctctctactatattctttagtagatggtacttcctctcaatgtgcttgcctctcttgtggctccttagttccttggagttggctcccgctccattattgtcactgtagagcactagtagtttttctacatctggaactacttccaatgctgtgtataatttctttaactaaaccgcttccttagctgtttcaaaagctgctatatattcgacttccatggttgaatttgcaatactagtttgtttaatgcttctccagactatagctcatccaccaagagtaattactgaccagatgtcaattttcaactatctttgtctgattgaaaataagaatcagtgtatctagtaaaatttaactctccactgaaatatacaagcacgagatctcttattttctgaagatacttgagaatgtgctttacaacaatccattattccaaacttggattagattgataacgactaacaatccctacatcgtagcatatgtcaggccttgtacacaacattgcatacatcaagctcctaactagggctgaacatcgggcgggtttaccgggctttgggttcgcggatttcgggttcaaaaaaatgaaaccgaacccggacccgaatagggcacgagttggcaggttcgcgggttcgcaaatttcgggttcgcgggtttgggttggccgggttgaccgggttggcgggttgacccagtcaactctttaaaaaaaataattttctattc

SEQ ID NO: 132127 - DNA, 631 bp, Cannabis sativa
aaataaaataaaaacaaaaacaatgaagagcttatggtgtttttttagttttttttttcagcataaataattatttattaatgtatttagttttgttcaatttaaattttttttaatgaatagttgtactattttttttttcaataagtgaggatggggacgagtcagcatttcctgccaatttttctccctgtatgcatcctaccaataataggactcccctcgatttcttattctctaacgattttagattttttcttagcatgagccttcctttgtttgggtatgcgctcaacaaaattgtcatctgacttctttattcctttccattttttgaagacagattttaacctatttctaaagctttagagcatataattagagcttctttcacggagagagatggagaagaggaagagcgagttatagctatttcttacatatataaaaagagtgaatacatatactattgatccaaaacgttaaccaaaacggtgcgtttttattacgttccaacagtagtttggtatagagtgatccttgcatgtgatgtgggagggtaactttcatttttcattttttatttttaaagtgctatttttgtccatttttcacattccaagctaaggta

SEQ ID NO: 132128 - DNA, 705 bp, Cannabis sativa
aaactacatgtaaacataaataatgtataatcttctattgataacaaatcagattacattgaaatagagtttatttagggcataaatacccaacaattccttatgtccatattcctgatcagaagagaaagaagctagatgagaaaggagaaaaatgtatttttcttggtgttagtgcactactacaaaaatgaccttttgcttcagtttttaagtgacatataaagaatttgcgtcggtttgtgtaagcgacgctataatcgtagacgtaaatagttttatttttttgcttcacttagtaacacacgctaaaagatttttgctttagtttattaacgaagcaaatagtaaagcactaatgcaaattagttttttacttcggttatgaaccgaagcaaaagaataaaaaaaataataaaaaaaaaacataaactttcagaccaccacaacccttcagactgccacaacaacccaacaaaaacaacaactataataaataccgcaaccacaacaacccaatgtgccaccgaaagcacatcgaaccaccaccactacctgcaaaaaaaaatcagagagagggagagaacttgaacgagaaagagagaaactggcgttggagctaggcgcgcaaaatggggactgagaaaaaaaataatgaatctcacctttgaaaactccattttctcgagagagagagagagagag

SEQ ID NO: 132129 - DNA, 1854 bp, Cannabis sativa
attgatcactttgttttgttttttttttttttctatttaacgattctttcaattttttttttttttttgaataaaaaggagatcccactattttttttttataaagtcaatctcaatttgtaaaaaataaaaataaaataatattaaaaaattatgacatatttcccaactcatttatttaatcctattcattttttattattgactaattaaaattaaaaaaaaaaatacttttataagttagagtaaaaatagtgttttcacctaaaaaaatattctaaatatatatttaaggaataaaaaattaaaatttaataaatgtgtgatattttctcttcttaaaaaaaacttgtgattttataaaaaaaaaaaaaagtgatattttcttttctcaatgttttcatacagttaagttaatatcattaggaaatttaaattattatgcatttaacagactaatattggtccactaaattaaagttattcaacatttgtagaataggttaattttaaattaaaattctattttactcatctcattccaaaaagtgtttttctctctttctcccctctctctctttctcacgaactctctcgaacccaccaccaccacgacacttctcgaccgaatccactgagcaccactaaactaaacccacatgaggaggaacccaccacccactgagcaccactggaccgaacccaccacccactcgacccaccaagaagaggagcacaataacagtcaagataagaattccccttatggtatttttgaatgattttcttattgattggggaataaatgttgtttattgatagatttaggattaaatatgtgcgttttagattagttttagggttagatattgtatctgtaatttttgggagagaaaatgcatttttaggcaggcccaatgcaggcccgatgtatcatgatgcaaagttgattctggggttgaagacaaaggctcaatataaggctcgatgggcccgatggtcagtctaattgtctggccaacttccaaaagttttaacttggcctgatatatggtacaacggtacctgattattatttagaattttagtttttttgttatggcctgatgtgggtccgatagagtacgatatttaggcccgatgtgttttctccttcataatttttaggtttggttctgataggcccgacgtagggcccaattgggggcccaatggtaatttgaattttaatattttattgtggccggatattggcctgatgtagggtacgatgtttggtctgatgttcattctctttcataatttttagtgagggttcaataggcctgacataggggtcgatagtgtgcctgattgccatattgaatgtattttttttgttagggcccgataggtccgatacatggaccgattgtagtccgatgcttatgcaccaattttctcactgccttttttgtacttttttgcagtcttctaaagttccatgccttttacttccaatgtcagaccattacactagtcgtgtgacttggcaagacggtagttagtattacccaaaagtaaaaaccaaatttatggaaatgcagttgttggaaaagcgtaaaggaggaatcccctttcaagtaatttttttgagagagagccattagcgttttcgggtgcacttatttatcaattgttcatgcataagatcaaatcagataaggatgacgaagtgtatttttacattgcaagaaagagatgatgatttggccaagttgagtttgttgaattttgtgccctaaataaaacttattttaatataatcagatatactaattaataaagataaaaaattattttatgttgtatggt

SEQ ID NO: 132130 - DNA, 536 bp, Cannabis sativa
ataaaaatgcaaaaaaaaaaaaattactttgaaatgtataaattaaaaaaaatctcttttttaattattattagattattgtagagaaactagttacatattctaaaatttaattatatttggaatacattctatcattatttatatgttatcgttgtacaatatatatatttttttaaatagaatgaataaaaaaaatagaatcctaagaaaataggatggtacctcaaataaatacatgtatatagatatatttgaattcgacttttagttttttacaaataaattttgaaaaattatgtataatttttaaaaatgatatcttttttagttttataatatttcttaaaatttctcaatttaatatttccatgcataaaataataaaaataaaataatttttcattactaaattattcattttgacatgaaaaataatctatcaactctatatataaactcgatatatatatatatatatcactagcaaaaagttacgtgcgaggcacgtatactaaattttatgttagtttttt

SEQ ID NO: 132131 - DNA, 772 bp, Cannabis sativa
tagatttgcagaagaggtagagttatgttttcgggcacagttagaattttgactgttgccttttataaattatgtcttctctcaagatttaatcttttcagctgccattttaactgttttgcttggttacactgattacagccagctgaggttttctaccacagtaactgtagtctctttattgattatatgctcttttttaatagtgtatattgttcatttgatctattattttttgttaattaaatgaggtaataccactttggtggaacactttttggctgtacaatgaccatttggtggtggctagcaccacaatgaagatttcagttataaaaatgatcagtggttttctattatcattattaaagtaaaataggtaagatatgatattgaattgcactaatattgatatgatactttaataagtatttgtctaacaaatatgtctagtttttttaaacgtaaaggtagagaaagggtggttagatgaaaaggaaaatggtgtgttaataatagtgtagaaaaaggaagaagaagaagaacatggtgttgaaatttgaagaggcagataattgaaagggaaagaagtaaagatgtagtatgactactctgcaactgcaaacatggctttttggggcagagtttgagagattattatataaacaccattgctatttattattattattattattataatatgaagaaattaatgaaaaaaacaatacaatgcaaaaatatatatatatatactgtataattataatat

SEQ ID NO: 132132 - DNA, 954 bp, Cannabis sativa
  modified_base (573)..(576): a, c, t, g, unknown or other
atatatatatatttttttggtgaaaagggtgatgcgattgcaccagattcattgaaacaaaaacacaatacaacacaacaactaaccaaaggctagtgataaagtctaattaagaaacagaaaaagcaaaagacaacttaaaacaaaagctacagcaaacagggaaatgaaacacacggcctaaaacaatgaccaaaactcaaccagaaaactacaacaatagcacagtctatcccggatcagggacccattcagtatcatccataaacactccttcatccatggtgctcactgcaagttccccaacagagccatggtatcgagcccatttagcagagttgtgtgccaagaagtttacccctgctgatcttcttaaccttccaatttccaagattgcgaacagctgcatagaacctttccacaacaccattcagcagttgatgatcctctccttgcagggcgttgaaatgcgttaccaccaacgaattgtcacagaaaaatatgacattattgaagttgcgtcgcaccccgaattcagcagcactcactattgtcaaggcctctgctaatgtnnnntttgttacattgagatgaatcgagtagacggcctgaattcggttactcgaatccctgaacactgctgctccgtaggattgatccgcatcaatggatacatccgtatgacacgctacccatcccgtaggaggagttacacatatctcagcaatcttcggaagaggttggctagcggatgagtgatcctggaatttgcgcctcacaatgccgataacctcattaataggggtactattggttccgtgaattaccttgttacgattgtgccatatcacctcgattatgcatatggccccaattaggaaagtatcaaattccaggttgttgggaaggtttcttgagcaattgaaccattgaagccaccccatccaatcatgg

SEQ ID NO: 132133 - DNA, 883 bp, Cannabis sativa
  modified_base (843)..(857): a, c, t, g, unknown or other
ttataatattcaacatgagtgccatcacacttaactctacgtgctaactgctgtcttacctgttgtctcgaatatgtagagattctaaatccttgggtgctcctaacaaagtgccggtaatcctagtcaccatttatggattcacaaaatagggttaatccctaaatccacatccacataattataaaataggcattcaaattcagataaacatatagagcttggaacgagctatccaacgatactcggaacactcaaatcggagtccagatcacaaagttatgaatattcgaataatgcgttcgaaactgtccagaaacgaaaggcgggccacgacactccccacatggggtcgcgacacctgtgttgaaaaccaaggatttcaacagaggcaggctacggtgcccagtgagtggggccgcggcgcctggtttccatacctaggaaacctcattttcagcaacacgaaaacatattcaaccataccaaatttcaactaaaacatgcatataactcaaaacaaacatcacagattaaaaccaccacaacaagaggttaataagacattaaacaagctctttcaacatctaaatatgaattttaagggcatactaacaataaaccataataagctccaacttgagctaagaatcaacaatcacattcccaaaagcttgaataacaagattccatttacaagctaacatttcagattaaaaacactgaaaccatacccatgttaagtagctttaaaccctctttaattcaacctaatcaacaaacacataatcaaagacaaatcccacaattttgcaagcttaaactgttggaaatattttaccnnnnnnnnnnnnnnntaccatgtatgtttcattaacatcct

SEQ ID NO: 132134 - DNA, 1091 bp, Cannabis sativa
ttttaaaaacaaaaaaaaaaaagattactttcaatatttttttaaacaattttcttttcttaatcaatattttggactctcaccagatggagacccaaatctgccgcccactgccttggcgctgacctgacctctaatccgaatccgaatccgactccagacctacacccgaattaaagaaaatcaaaaattgaaaatgaaaatgaactttagagaacacacttttgttttgtttttaaaattgaaaaacaaaaatggttatagaacacattttttttttcaaaaacaaaatctttgaaaacaaaggtgacgtttggtaacactttcgtttttaaatttttttaatcacaaaaataaaagtaaaattttcgtttttaaaattaattttttaaaaataataatgtgttctagaaccactttttttttttttaattttaaaaccaaaaaacaaaagtgtgttttgtaaatttcattttatttttatatgtggcttttatttaagtcgggtctggagctagggcagggattcaagtctgggtctaagttagggtttgggtcgggatccgagttggagttccatggtctaggttggagtaggagtccaaaatattgatcaaaaatattgtttaaaatatttgaaagtgattttttttgttttcaaaattttgattgttagttaaaaaatcaaaaagtaaaaacagttttatagagcatgattttagaaaatattttcatttttctaattttaaaaataaaaaattgattaaaaaatattaccaaacacacccaaaaattttacttttattttttgattaaaaaattagaaaataaaagtgttaccaaacgacaccttagtaattaattgtttttatttttttgttgttgttacgcgttctttcctagctagtcgctctattgtgaggtttagtgagagataaagagagagagatgagatttttcagtcagagagagaatgtgtaaatgttgtcggagagagatagaaaatagattagcactactacaaaaagtataattcacgtcggtttttaagtgtcacttaaagaatttacgtcggttttataaaccgacgt

SEQ ID NO: 132135 - DNA, 657 bp, Cannabis sativa
  modified_base (508)..(508): a, c, t, g, unknown or other
gcgtcaagtcttggaatatgaagcaatctcagatacccccacgtgccatgatcacaaaaaatttgagaggggctgcaagcttccggaccgcattgcatcttgaaagcttagggctaaatattatctcgtttcatgcacgacctgacacgtggatttcaatggaaaaggctcgattaatgctttatgatttagagtcccttaaagatgctcagtcactgaaaggtctccccccgtcgagaatcatccaggttaaagagatatgcaaaagcctatttgcctcagcacttgcttccgtagagcggtataagaaatgtccctcccagacccagaagggtctcgtagggagacttgttttgaggggcacctcaaatatgcactaggaaagcctaaagcgaacgtcaaccctcatgggtgcttgcagatgttgacttttctcatacgccatgtaaagaccgcttagtttaattgggaaattagcagataattaaggtttaattatgaaaattanttatagatatttaaataattatttctgttgttatatttgaatttcgaatgcattttttatgtcatatagtgaaatttcataattttacattttcagtgcccggcaacatggaacggtgtatggttcagtaaaatcacaatttagtattt

SEQ ID NO: 132136 - DNA, 1238 bp, Cannabis sativa
  modified_base (40)..(52): a, c, t, g, unknown or other
  modified_base (1185)..(1211): a, c, t, g, unknown or other
agttttttaattttctttttctagtgtaactctatttagnnnnnnnnnnnnnattagaatataatttacttggtccaaagtgtattcttgaatagaggttctactgtatatcaaaaattgtttacaacgttgttcaaaacaaaaaaaaaaaattatttacaacgaggtagaaaattggttgtttgaactataattgttactttcaaaattgcaaatcatactgcaccgtgtagtttggtgaaaattcaaatcacaaccgcactgtaaaaaatttaaagttgtaatttttgtgcagtgtgagagtttaatgaatacccatattaaataatacgatgcacattgtattaaagtatagagtaatttacataaatatctaaatttatcttattccggttgtaaataaatacttaagcttaatttttagcagtaataatacctaagttataattttaaaatttctgtaggtacttggctgttaattcttaaataaattgtcacgtgacaatccttgattggtccaggtcgttaaatttttatttttaaattgtaactgtaagttaaacttatgtatttatgccgtagattactctaaaatataaggttatgatgattaatacaatacaaaattatatccaagcatagtgttatttgttattgaatataatacgacccttttacagtctaccaaacaagcccttaaaatatcaattatggcaatgctacataataatttgtaaataatttgcatcaatagatctccaatggagatgcaaatgtaatatagctcactttgtcaaaattttactccaatggtgtgtcaaattgtgatataaatatgtcacataacaaaaaatgatccaaatttaaatcactacataccgtgatacaaaatttgtgtcacaataaatattatatttttatgtttaccattatatcattttaatattttattattaattttaattaacaaactcctttacattaaatgacttgtattattattaaattttatatttatctttgcattattagtattattttatatattttttaataaattattaagtagacattaaatcgcatattaaattttacatcaagatttataattatgcattagagcacaatagtaaaagttaatgtaaaatattacacaattactttttgggctcgtttggaacgccnnnnnnnnnnnnnnnnnnnnnnnnnnnattatattgaattgtattttatgcaat

SEQ ID NO: 132137 - DNA, 1261 bp, Cannabis sativa
tttctttaattttttttttttacaacaatttctctggtttttttatttataattttttgtacaatttttttgttggtgaattagttttattattattaatagactattattatttagcatcttaagatactaattactatataaatatatgacacttaataattgattagcaatttttcatgttatcataccacactatatgttcttgtttaatatatttttttttaataattatttaattatattaataaaattaaaatatatgattataacacacaaattttgacgggggctaccataagcctagtacctatatgaaaacagatcgaacaaaacgttttgttttttgttttttatttttttgtttttatttgttaatgattatttgttatcataaattatttttgggagtttttcaataatatacgtaaatcgtaaaaaaaattatataattcttctcaactattttaatcaatctcataccgtaataaaaattaatatcatctctttttttgtcattttcttaagcccgtgcttatcatttttttccccttcactttttttattgcatttgcatggtaattttttgtttgtttttcttttctttattatttattagtgcatatccaatgctatttttttttacttaacatataaaatatttaacttttcaacatttttcaacaaaaatatgggtattgtggccaagcaacaacaatgctgtctttttttattattattatctcttaaatattaaataaattattttaaattgtataaaaaatagttagtgggctaaacagatagagctacatgttgcctgcattggagatgaccttataattttaattgaaaaattttaactttatcattaactgttttgactcaaaattagtaactattgaacttatttttaagtgattattttaatatgtggtaaatatatattttttttttcacggttacaaaataaaatacttggaatcaaaagtaactttttaattttttttacatcatttaaattatttttttaagaaaacaattaattatggaggacttgttctacttccatttttactaatgtatgttattataacttttgctctatatcttgatgattgaggatttgaattgggcttaattagaataattagaataatgacaaccgacacatcaaattacaatcgattgccaaacattagatgtccaattgtgatcagatcgtattgaatgttacttttaaatatccaattggatcgga

SEQ ID NO: 132138 - DNA, 2014 bp, Cannabis sativa
atcataaatattgattctaatacttaacataagaattctattagtttattttaagtaaatagcaaaatacataacataaaaaattatataaatgatactaatatactacaaaaatacacaaacacataatataaaaaatataaaatattaataaaaggatagataatatacaaagtcttagattaatgtaaatgtgtatttatttaacttttcaatttaatttttatttatgcttattatatataatttatatttactaatataatatatatatatatgaaaattaagctataacacaatattataaagctgaaaaattaagaccctatggcgtcagctttttcacaataacagatgccataggggccctatagcgtcagttttttcataataaccgacgccatagggttcttatggcgtcggttgttatttaccttacagcgtcacttggaacagcatcggtaacgaatttcgtcaaaatcgacgctaaaagcccttaaaaactgcttctaaagcccaattttatagtagtgcgaaactaccactggaacaccggaacaatcggaaaacaaccattatttctggtgagattgagaaaaaatagtgaaattgacgacaaataaataattacggcaaaataactgtaaaacaacactaaaacaaatcaaacaaaaaagaaaggaaaaagggattcaaaaaactaacaatattatgcacaacctcaataccagatgcaatagcagctatatttgcaaccccaatcttagaaaattagaataaaaaaactactaaaacaacacaaaaataaatgtaaaacaataagcagatataaccacattgaaaaacataaaagaaccacacgcctcaaaactttttttctagtgagctcgtcaaatgtatttataggagaaccagaataaaagaaaatcacaaaataatgataaagaaggaagaagaaatgtattttataccctccatcttccacatccacggatagaaccaccacagcaccacgagaacacccagaaaacaatcattaattttagcgagatggagctagaacagtgaaatcgacgtcaaaaaaaataaattatgaaaaacaactgtaaaacaatactaaagcaaataaaaaaacaaaagaataaaaaatatgattaaaaaaaactaactattttctgcacagtctcaatactagatgcaatataggctatatttgcaagctcaattctggaaaattagaataaaaaaccacactaactcttatcttttctaacaacatgactaaaaacttcaaaaactaaataaaaaaattaaaagaagatgaagaagaagaactaaataagcaaaaaaaaaaaaaacttatagattaatggagaaagatagagataacttgaggaagtaaggagttaaaagaagaagaagatgatgatgaacaggaagagagaataatgaggaagtgagattaaagtgaaatgaaagggtattaatatttagggtatcaaatttttcatcatcaatttttattaaagaaaaattaaaaaaaattgtcaaagtcaaatcaaaaatttatattatctctaaaataaaatgcaattttagttaaaagaaaataaaaaagaaaagaaaaaaaaaagatgtcactaatgtgacaatacaaagtcacatcatgcatttattacacttaaaataataaaacttgtttaatagatgctcaactcaagacactacaggacgcttacaataataattaaaaaaagtataaaagaaaacattaccgtgtcacagtaaaaaaaaaaagaaaatgggaacaaacagtttggggtataaatcttcttttttcttgggaaatcactccatatattattttttaacttttttttctgtttgaatggtttgggttgctccggtggtttctatataggttgctctacgaattttgatagcgatttaggttattctgttagttgctataggagtttctgtgtgtaattctttaaaaatgcaaaaaaaaaaa

SEQ ID NO: 132139 - DNA, 624 bp, Cannabis sativa
ggtgaggaatttagaatcatcctttaagaactctgaataacctagcaaggttaagattacattagaagatattgaagatgaagttcaattttgaaaatcttctatagtttgctatgttcttgggtctaatcccccattatcaattattgaaggatttattaggaggatttggaaagataaggtggatagagtaggattgttgtcctatggtgttttcttggtaagatttgatacagttgcaactagagatgatattctgaatggtggatatgtgttctttaataacagaccggtagtgatgacatcttgggatctggatgtcaatttcaagaaagaagatattaggtcagtccctatttggattcaattaccagatctagaactgaagtattggggtgagagatctttattcaaaatagtagggcaatcgggtactcctttacaggtggacaatatgacaaaggagagaaataagttgagctatccaagggtcctcatagaagtttcaatacagcaagatcttccaaatcaagtgtcatttgaggatgaacatggatataatgtttttgctgaaattaaatatgagtggaagcctctacaatgtaaccattgcaaaggcttggg

SEQ ID NO: 132140 - DNA, 539 bp, Cannabis sativa
cggcccatgggaaaatggcttgtagtgtcgcggccttatgggaaaaattgcaaaggaaatgcttagaagacacgggctgcaacactacagttgtagtgtcgcggcctgcctaccagaatttcgaaaaatagatgttttctattttttagctagataaaggggtcttcttcaacaatttttggcaagaaattagagagcagaagcgacatagaagactttttaacaatatttttttgacgagttcttttcttctactttcttcttatgttcttatttaatctagaattttatttagggtattaagggagattatttgacatcttattattattttaatataatttaattcttcctttaactttttatgtgcatctatttcattagttcttaattttgtttaattgtctatcaattaattttttataatttcgatacaaaatctaagaagtgagtgttgattatgctatagttcaatagacatagatttcgatataggaaaaagagtacttatatgatttgtgtagcatttaggattttta

SEQ ID NO: 132141 - DNA, 735 bp, Cannabis sativa
aattttaaatttctagctcaataagtacatgacaattgaattctatcactgacaattaactaaagatcttctaaaataaaaattgagtaatatcacctgcatactatagagaaaatataagttatactacaataacaataacagtggtgatgcaacattcagagtcagctctagacataggtgggctaagcccgtgcttagggcttatactttttaggggcccaaaataaaatttaaaagaccccattaaacttctatttaagtaaaattaaatgtattataaacaataaatatttacaatttaattggttgggatatatgacattttacacaatgatgtgggtttgaatctcgcgacactcttttattttaatatttttcccaaaatttaaatggcctcaatcaatatattcttaaggtcgatcctcccaccactaatattaaaaacaaaagcaaacataataaaaaatcaaaggaaatacattttgttatgtatttcatacttattttgattaataagtacttataatgattaataatcgttggatcaacacagccaatgaactaaatacatctccccttaattaccaaacaaaatcagctcacattattaataatttgacaattattaattattaatgatattagctcaaatagttggttggaatttcatagatgagtatttataaaatgtaggaatataacactacatgcacttgaattaattgaattata

SEQ ID NO: 132142 - DNA, 608 bp, Cannabis sativa
gtctttgcccgcataagaaggaagaccaagatatttttcatgaagagaacaaataggcataccaaggacatgatgaaaccggtctttaactgcagaagttgtgctgggcgagaatgacatcaccgttttttcagtattaagaagttgtcctgaagcgcgatggtaataatcaagagctctattaacagcttgacaagaatcctcagttgcttgacaaaacagcaaactatcatctgcaaacagaaggtgagaaacagctggagcacccctagctatagacaaaaccttcaagtttcctaacctttcttcatgctttaaaagagctgagagtccttctgagcaaataagaaataaatatggtcataacggatcaccttggcgaagaccacgctttggaacaaccaatcctctgatagagccatttagattaaaagaaagtttcgcagaggacacacacttcagaaccaaagtcacccaattaacatgaaagcccatcttgatcatgatttccttgaggaaagaccattcaacacggtcaaaagctttactcatatcaagttttaaagctgcataacccattctacctctttttttgttcttaagacaat

SEQ ID NO: 132143 - DNA, 814 bp, Cannabis sativa
caacaatagtggtgggtttaccgggtcaccacaaaaaatcagtgttgtctgtccatctcaaccgggtcaccacgtagcatgtttgaataattcacaataagtttttgtactataaaaataaatgacttataataatgctaaggagcgacagtgacaccatatattattgataccgaacaaaaataactaaaactaaaactgaaaacgtatattaaaagaaagactaggtaacttgtcgtcttttaacatgtattatacccctgtttgttcatttgtcaaaatcttgatacttttagatttggatcaggggaaaaaaatataatgatcgataaaagtaaaaaggtgaatgagttttggttacgtacgttgagtgctaatcttctgtgaatgttataatgctcaactgcaagagctaatatgaaactgccgagaacaagggcgataacatcatccatgtaagagtgtgccacgtcatcagaggagcagattccaaatagagggaaaaggaagagtggcgccattgaggtgattggcatgggaacagcctcggtcatccaccaaacgaagatccacgccagcacagccagcatgtttcggctactagtggggccatctagcttcacgcatagacatatcaccgcgcacaataaaggccccaaaaggatgaacacgtttttgggtgttagaatggattggagactgaattggaagctttcagctgggcgttggatcggatggtcagtaatcactggcagaagtgggtttttggggtcatcatgatcaacggtgactggggtacttgccattttttact

SEQ ID NO: 132144 - DNA, 1285 bp, Cannabis sativa
  modified_base (1143)..(1145): a, c, t, g, unknown or other
atatttaatcaatcttttttattgtccttgtattatttttacaattgaattgtatatatcttgatttattttcaattgtaataaaatatctaacaatcaaaagcttatttcttttcaatagaagaagtgataaatcaagattttaagaatacaaggagattttgtatgaaacacattcaaaagtgagcatggtggtgtatattatatgcatgtgatgaactattttatatgatactaatatataggatatatatatgatatatacatgtgtgagttatatatatgtggcatatatgtaattatgtatttatatcatataatatatataatgatatataatatgatatttgtatttatatcatgttattatatgtatatatgtgagatatataatatatagcatgtatatatgagtaatatatagagcatttgatataatatatattaatgaaattaaatatgtagaaataattatttgtatgtatttatatgagacatgcatatataatatatattttgtgtatataatatatgtcatgcatgtatattaaaatttttatatatgttatatatgtgtgagatatgtaacatatatatttgtgaatttaatattgatattatgtgtatgttacacatatgagatgttattttgtaacatatatattatattaatgtatgagttatatagtatgataaataatgttgatagtaatataatattgtttattgctattgatgtggagattattatcatctatattgtgaataaagtgaatatttggaattccttttccaatattgattttgaaaaaagaaattgtgacttatgagaagttacattctttgagaattaaaatgatagttattttattttatgagataagaaaagtgaactatgagagttacacttatgagaattgtgttgtcataacaagaataaatggatcaagagtggatctaaacttgagaaatgagtcataaattggatgagcaattttagactcaaataaagtgaatcaatgttgatttaaaaataaaattatgaaaagataacaaaattggagaagcaattttgaatcttaaataatcaaaagtgtgaacaaaatcaatgagaattttgttaattttggtataattttgggnnnaatgaggagataatcttaaaattataggtaaaaataataacatttgttaacgcagattttcgttaaccaaatttgagcctcacgaatatgattcaacacagaaaaactataaaaatatgaacaccgaatttttacgtggt

SEQ ID NO: 132145 - DNA, 683 bp, Cannabis sativa
ggtgcaggaggctacatgcagccttgccgcgcacgcacaagccccattcagacaggatttgcccataacgaccgagaaaactcggacagggcatgtcctaaagtgtgtgacacttgagtgactctcgggtgtgcgcggacgtatgaggggtgcttcctttcctaattttttttttaatttttaaaaaatcataactatcaaaatttagttttgtaaaaaaaatgaattgcttaattttttccatactatccaaataaaataattttagaacgtgaaaccaattattttacgttaaaatttcttaaacaccaatcaatcattaataaacgcataaatcaacatgaatcatatccaaatcacacatacatcatttttaatccatacttcttgaaagtaaatcacaattacatcgttggattatattttaccagtagatttagtaacaagtatgtttattaacatcttaaatatgaatttctaaaataatgaaatttaaacacatataaagtttgagtgaccttacattgattgcagggaaatataatgattcttcccactcagatctctaacctttgttcctttctgttgtaggttagtatcaagatctgagcccgattctcctttagttgtttggattcttcacagtcttacacactataattgagtactagacttgctatggg

SEQ ID NO: 132146 - DNA, 739 bp, Cannabis sativa
tgataacaaatcagattagattgtaatggattttatttagggcataaaatcctaacatagagccagcagaagatttcatggtggcagtaatgaaaacccaccacagactccaccagactaagagcaaaagtttgcaaaaatgcaagccaagatccagcaacaagatgaggatattcagaggttgaggcagtagagacctcatgttgtacgtccacctcaggtaccagttgctccaggtccaatgtttccatgcagaagaatttgttgctgataattgaatggagccattatatgagaggttctggaagcagggacctccaatcttaaatcgacacattcaaaaaaatctagatctaagatatgtatttcaaatccaccatcatacaaccacgaaaataatactaacaaatttaatatctcaaattaattataactcaaatttacactagattattgtcaaccaaaatatttaaaagaatttgagtaaaaaaaatcaaaaaataaaatacaggaccaaaaagtcattacaaaaaattacagaaccaaaatacaaaatacaaaatctcaaaacaaaaaatacaaatctcagatattcacatgccatcactataaaactctgagccgcaaaagtcaacatccacctaaacaccgtcgagctgacgcgcttcaaacatcagcgaccacgcactcgtcgctcgctgacaaccctacagattaaagaagagagagagagagagag

SEQ ID NO: 132147 - DNA, 985 bp, Cannabis sativa
  modified_base (889)..(892): a, c, t, g, unknown or other
cgttataaactacttctcgcttctcgcttacgaaattagaattagactcactatctatcgttggctaaaagcgaggtcaacacttacaatagctataattggtaagaacatatattacatatttagaatacatagattgtgggatttagatagcttgccatatctatgtgatacgatcccagatttatagggacttctctttgtgcttcacgatgcaaattctagaattgctaagtgttgatttgctgcttggcttatccactgctcgactggaaagacactgtccgtgcaggtgtatgctatgccctgctcgatgcatctctctcgggcagatatggggaatcaggtccacgtgtcaccagcatgtgatgccacgtcatagtgcaaaaaataggataacagatatagctaataaaataattcactccattgcattctatttttttttatttattttataatcataataaattttttgaagcaataataataatttttatattgccataataattgtataaaaattcaaatttgaaaattcaaaatatcgtgatttgaatatttcctctctaaaatttattaagttttgaatattttgtgatttgtttttttttttaaatttaattagtttgtgaattcatattcgatatacttttaaatttgattgaaccataatatatttatttagtttgatttcatatactaaaggaaatcaatgcaaaaatctttctaaacttatctatgatttttcttattttttattttaattttatacatttattgtattattataattatttatgaactaaacattaattttctatttattattattaattacattttatgtaaaaaaaattgtagtatgtatttgttgcccctgattttnnnnaatatacgtggaccaaccggacaatgacacgtggatggaaagggtttagccttcgaataaaacagctaagtcttcttaaagcaaatgattacc

SEQ ID NO: 132148 - DNA, 1224 bp, Cannabis sativa
gattcaaggtgtgatggatctttcatggtggaacttcgtgaagcactttcaagaagaaaattcttagtgaaaggccaaggagtgaagtttgggagtggagaggtgaaccgagaaaaggcctctatctccttgaaggatgcttgatgtttgtaatttggggatgcaaaaagaaaaaaaaaaaagagagaaaaaaagaatgaaatgagaaaaaaaaattcaataaaggcaccccaagaaagaaaagcaagaaaaaaaagagaaaaaaaatagaagaaaaaaataaagaaaaaaatatatatatatattatataattagtaaataaatgtcatggtaaaattgcgaaattgtttcctttctctgtgcaagaaatcaagtgaaaaaggttgtagaagtgaagaaatttcaaattgagcaaagaaattaagtttggggtggaaaagttatgtccagttgctatagcaatggcttagcaacgttatttggcagcaaaaggagttttgatagtgggctaatcaaaggattcgggttttgaaaaaaaaagtactttgtctgattaagaggaatgtgttaatgatgcaatcattggggaagttatctttattcagaccaatcatttgatcttgtacttagtatttttcttttttgggatgattgtataaattaatctcaatataagtacatcgtgggtcaaatatatgtctactgggccccttatactaatcagagcccacttaagtgtaagcccaatcttcaaccctattcaacatcactttcattcatcattccaacacagccaccctagcctccatacgattccaagctcgaccagtaacccccacacgaaccactgcccagtcgacccaccacaaactcgagccacagaacccagccaccatgattcaccaaccaccatcatcgcttctccaactcaactccaatcaccccatcttcaacccacgcctcactcaactcagccgctccattcaactcgacacaacaactcaatctcacgagaaaacccagctgtctccttcctcactacttagttcaccatcaccatcttcatctcagccgcaccttcgaaacaccaattcacccaagcactcaaccttcaccattccccttcgcccaaatcacaccagcgaaaaaaaaaatcagcaccaaaatttcagaaccagtttaccaccagccattccatcatctctgttcaactcgtccagcaa

SEQ ID NO: 132149 - DNA, 1205 bp, Cannabis sativa
tggtgctatggctaaaacaagatcaaagaaccatggaaaatcgaaatctgctgctaaaatttcaagaaagaaagctggtaatggtaataccgatatcgatcttgctgatgctttggggcgaatcgatgaaatcgaacccctggaagtcacggatgaggaggaattgccaggggaggatcgactcaacgagggagaggattgacatgattttcgacctctgtctcccgatacttcactgagggtgattcaaaggcaggatgaggttaggaatgatgctcggaacgattttatccattttctcatggccaacaatcaatgtaacagtgaaatacggcaaggtaaggattcaattcctcctattctacgttctaaatctgtgatgaggaacctagaaacttcttttaaagatacggagcaggatgcttggaaagtgaaaatcactttagatgacattgaagaggagattttgttttggaaaccttcaattgtgtgctatgttcttggagtaaatccaccattgcacattcttgaaggttttgcaaaaaggatatggcaagaaaaggttgatcgggtaaaagctttgtctcatggaatttttattattcgatttacctctcttgaattcagagaccaggtcatgaatgggggctatgtgctctttaatcgaagacctgtaattttgaaaccttgggaccctaatactaatttcaagaaagaggatgtcaagtgtgtaccaatttgggtgcagcttgaagatcttgaactgaaatattggggccaaaggtctctctttaaaattgttgggcaaattggtaagcctcttatggaggatgctgttactaaagatcgagagaggctgagctatgctagagtactaattgaagtgcaaatggaccaacaactcccaaacatgatagaattcgaaaatgagcatggccttaatacttcagtgagtgttaaatatgaatggaggccgattacatgctctcactgctctggaattggtcactctgctggggaatgtaaaaaaactgctgctccttccaagcaacagtgggtggtgaagaatgataatcgaaaacataaccttcctgaggttgatgctgatggtttcaccaaaattgttacaggcccgagattggacagaattgaagaacaaaggatgcctactgcagtaagaatggggaacacttttcaggcactta

SEQ ID NO: 132150 - DNA, 1262 bp, Cannabis sativa
tattccactcacgagaccaatatttttacccgaagtcactgttgcttttgaaccatgtgaccttgagtttgacattatgtcttctaagcctcgaaaatcaaagaccgcacaggatcccaatgtcactttcgaggttgagctcatcaaatccaaggttaggtcgatcggggcctatgttggtggcatcttgaagtcctgtggcatcaagtagaggaaaggttgtgtcataaggtctgtggcccctggggaatttagttgttttcctccagaaagggcaatatgcgaggagtgcagtgggtctagcacgagtaattccttgggcatttgagcttggagcctcgaacacatcaaggttggggtaaacctttccccttagtgattatcttaaggagtactgtaactacctcggggtttccccatttcagctgaaccccatctcgtataggatccttgcgagcctgaaggtcctataccatattttaggatgggagtgccccactcctttggagatagcctgcttttactcagtcaaagcagtccctgcgaggaagcatgttgcaggaggcttctactatcttgggacttatactggtgatcgcaagatcatagttaggttgccaaacaatacaaagtttaaagaagacttcttttggacgacgggcctttctccagtaaatacaaccgcctttcgcattatacataagtttcctttctcggcaatttaaccttaaaacatattaatttgtatatttaaggtcgcttatcaaacttttgtctatttacaacgattactcagagaccagttcctactcctgagatagtcgagcgccacagaatcttgcttagtctcccatttgggctgcgagtagttgacttcttattaaatgagaagaatctgaagaacgttggctttcttgcctcgaacgaatttacttctgattacaaaatacccaagtatacttcgtggcaaaaggttctgatcctagacaaagaggaaagtgaggactccatggctcacacacactatctcgagagggctacccctcatgaagaaggagcatcccaaggtaactaatatggatggtcaaccacagtgcttagggccaaatgtaacaccttagtatcttttcgagatagtcgatataacttttacacttgaaatcccctccgcatagatctcataactcataggtttgatagttggtacccaaagtttcacgttcagactagctacactagttcttactatgggattgtcgagc

SEQ ID NO: 132151 - DNA, 594 bp, Cannabis sativa
tacttatgccactatttaccttttaatatataataaatagccaatttaggttaatgtgtgaatgagaaattgatgctttaaatgtggtcagctgctaataaatgaagatttggctaagaatattgtactcacagtaataatggtgaattttatgattgatatcaaaaattattgtgaaatttttgattgattattaattttgtaggatttttggcattaatttctttgtgttcacacttggtataccaccccatatgaagcctataaaaaaaggctttacctttcattcttatgacaccaaaaagagtcacttactgaaaagctctcttgtctttttcttcttttctttttcattcatctatattgttatgtttgtttgtttttcaattaattaataatatattgatatgtttatttattttcttcatattctacgtaaattattattctaataaattcgtaatacagagtgtcgtgttgtgcttaagtttatattatttgtacttaatcatgttgtgtcaatttcatctcgtgtcaaaaaacatataacctgtatttagagcacttaataaaaaaaaagagagaatataatat

SEQ ID NO: 132152 - DNA, 778 bp, Cannabis sativa
taatttgagcattgcaattactgtattccatagaaatgttttttatgtaccaccatgtccactgatgaaaaacaaatttccttcttcattttctacagaatttagtattgcttcataagctaatttttgtgaaggttttagaacagcaaacggtttttcatagagggttttcaattgttctgtgtcataatccagctctttattgaccagtctattaccggtttctctcatcaaagatgaattgggctggggcattccatttatgtctttcagactttttcccattttttgtatgatacattcaatttcgaacaatgtgtatgcttcaacttgttggtcatttagctggagatccctcatcctgaatatttttctttgtaatgcagtattgtcttctgacaatgtgatctagtttgatttctaaaggtttgtgacatcagaaacctgacaattaatgaggatttttacaaaaagatgccttaagccatttccagtggcccaaagtgcagcttcagtcaagcagtcgaaacattctttatcatcatctaataattcaagagcataacatgcagctttgaaagtagaatatgtgactccgttcactaatctgatatctttgtaagaagtgcatcctttcacaaaagttaacatcattctcatgtagaagtgttctcctgttgaagggtgtgcaaagtatattcttccaattgcaactccatgttttcttcttgtccatattttatctttcgaattccaaacccaaaatgtagggaaatca

SEQ ID NO: 132153 - DNA, 2215 bp, Cannabis sativa
gactcgagacgtcagtgtaatgacctgggagtaattcaagagtctgtttgaggaaaaattctataacattgttgtgaggacttcacacatggaggactttgtaaagctaactcaggggaagatgtctgtggccgaatacactctagagtttgatcgtctatccaactttgctggtgatctggtgcctacagatttcaccaggaaacaaaaatgcgtgagaggaatgaatgccataatcaatcgggacttgaaaattaccacttgacatgacactttgtacaagaaagtggtagagctagccttaattactgaggaggctgagcaacatgtaacaaaagagcagactgcaaaagatgccatcacggcatcgaaccctcctactagtggtaatatcagtaaggggaccgatagtggtaaccctaatcacaaatagaaggctgaagctttcgaaacatcagagggaaatagagagttttggggaaacagagggggctgtcagggccgcgaatcttcattctgagcttatcttgagtgtactaaatgcaagaaccaccatcagggtgaatgtcgggccaagacttgtttctagtgtggcatggtgggccactttatcagagattgttctcaggccaagaaagaggaacctaagaagaatactactcaaaacctgggacgaatttttaccatgacttaggttgaggctgatgctagtttgttagtagtgacaagtcagttgtctataaatggttgttcttatactgtattgtttgactcgcgagctactcattcttatgtgtcgagtagaataattgaaagttctcataaaccatgtgatacttatttttcggggtttggtaccctgctaccttcgggagaccttatagtatccactaggtggatttggtccttatccttctggattgactgttgttaattaaccgccaatctaacagaattgcaactgcctgattttgatataaccctggatatggattttttatctaagtatggggcaacgatcgactgcaagcggaagatggtggtgtttgagcccgatagtgctaacccagttgtgtttgtgggtaaagttcagggggcacgcataccaagaataacacttttaaaagctaaggacttgatgagcagaggttttctgggattcatagtcactatagtggataccagccaacatgtgacatctggacctgataatacaagattggtgtacgagttccttgacgtctttcaagaagatttactgggattgccacctacccgggagattgaatttgttattgagttggttccaagagcggacccagtatcaaaagcaccatatcgaatggctcgagcggaattaaaagaattaaagatacaactacaagagttactgaatctgggattcattagaccaagatgctcaccttggggtgctctggtattgtttgtgaagaagaaagatgggtctctcagaatgtgaattgattatggagagctgaacaagctcaccatcaagaacaagtatcctttacctcgaattgatgatctttttgatcaactgaaggggaaaactgtcttctccatgatcgatcttcgctcaggctatcatcagctgagaattcgagaagaagatatctcgaagactgcattttgtactcggtatggacattatgaatttcttgtgatgtcttttagactcaccaatgccccggcagcattcatagatcttatgaattgggtgctcaaggattacctggatagatgtgtgatcgtgtttatcgatgacatcttggtgtattttgaatcagaaaaggaacatgagttgcatctttgatctgtattgcaacggttacgagaccacaagctgtatgctaagttcaaaatgtgtgaattctagttatctcgtgtccctttcttggggcacatagtagatataggtaggaacatggtggatccaaccaagatcagatgttcgggattggccaacaccaaaatcagccactgaagttagaagctttttgggcttagctgggtattatcatcaatttgttgagggtttctcaaagattgttgtacccttaacggagctcacctgaaagaacttgacgtttgtttggacatatcggtgtgagaaaagttttctggagttaaaacagcgcttgattaccactccagtattaactcttccttcagataaggaaaagtttgttgttta

SEQ ID NO: 132154 - DNA, 975 bp, Cannabis sativa
gctagaccagagtagttgactacctatatataagaaaattgatgcaaatgggaaaggggagaagtatatttacagaactacagtgacttcaattctagaacatgaacatataagttttatatatacttaaaattaattaatttaaatttacctcaaaatattttttaaaacaattgaccaatttgtttgaaaagtgtattataattttttttaaaaaaattacataatttaaaaaacaattacaaaaatatttaaatacgattttttttatactttgaacttttttgtttataataatacacgtttagttaaattttttttttttttattttataatttatttatataattgtattacagttgtttatttataatatatttgtaacttgtttaattaaatagaaaaatgctaacacattataacgtattgttatggtgtatacgatggtttggaatattgatagttccattaattaggtatgaaataaaaataataaagtagactaattaataaactttgtacttactcttgagaacttatgtcatcacgatcagggttggttctatgttaatttgagtcttagataaaaataaaaattaaagcccaagtgaaaaaataaggttgttgaaattttaactctaaacctcttaattattaaactaattaaattactactgagttgcaatacatataagtattattatttattttatcattaactatattttaatttttttataaatggagaccccgagcagtgggggcctaaggcggccacctctagtatcgtctcatggccagccctgataatgatgtcgttgatttaatttctatatccaagcattgcttgcagaatttaataattagaggtggtgctttgtgaaaatgacaattagtgatattctaatagttatattaaattaaattatgtatttctcaatatttaattacactagattcaatatatatatata

SEQ ID NO: 132155 - DNA, 838 bp, Cannabis sativa
acttaagaaaataaattttaaaaaatatctctatctaattgtggagcgtcatagaaggtattgggtactaatgctaatagtaatgcttttaatttaattaggtgaagttttcaaagagtattgttattaggcatcgaatatattttgtaaataacgtttcacgattggttagtgatattttctaaaaattattttcttaaattatatgaaacatgatacttaattatatcaacaacaacatggattcaactttttactaattctcattttcaaatatttaaaattgattgttattattttatttacttgatctcatgtctgttttgagaagatcacactgtgaaatgagatgagtgtgggacccacatttcatcacatcctcctcttcctctactctcaattccaaccattaccacaccacccgtgatgttaattttcttcaattttatttttctttttctgatttaaaaaacataaaatagtagtagtactactactatatttaaattacattgaaaagagtaatttaatttaaaaaaataattaggattaggaagggaaggaagtccacgagtgcaactaaatttgtgataaattaacaataggatttaggaccccacacgcttttctatttttgtcatctacctattactattattctattactaatactaattaattattactttatcaactctcctttcaatatctactctatacatacatactaacatattttaagcataaataattttttagatgtaataaattatgctgctaaatttttaaaatttttaaaaattcttcaaacaattaaaattattaaattaaaaaaaaa

SEQ ID NO: 132156 - DNA, 808 bp, Cannabis sativa
aatgcttattagtacaatacacaaatttgaaaggaagatgccaacaaatcatcccagcttcaacaaccagattaacatgatgtccacccattacatcccaccagcacaacccaaactcactcactttcgctgtcaacaatgcagaatagtttcagctgccaaattgcacaagggacaatgatcaaccccaactagctcgccatacaaaattcatctgtgttgttcttagaaggtgattcaagatttcctgtattatatgaaacgaaatatgccataattagaattgtttgagctccattggatgttttaattgtaaactacttttgtttgagttttatttacctgttgttttcattctcttttacaaatgcagataacatgaagattctatctcattgattttctgcaacacattccaaaaatattattgtcaagtacttaatcattcatttacaatattaattgtttcaacagacacccactacaatcaactatacatacatacatacaaagatgtaaaatcacataccttaattagttgcaacggaagtacacaaattgaaacattctttcattttctagatcttcatcttccttctccctcatctccaatatgatctaatattcacatgtggaatatgagatatcttgtgccaatcctccccgacttccttctcgcatctctgctccagttttgggcactgcacaatagacaatttcttcaggttggtcagcctttgcatgctcataggaatacattccaaatcccaacaacccttaatccctaactctttaagagttgtaagat

SEQ ID NO: 132157 - DNA, 838 bp, Cannabis sativa
  modified_base (110)..(115): a, c, t, g, unknown or other
tttttaaaattttgatttctaattataaaattgaaaagtaaaagaagttttatagaacatgttttttaaaaatatttttacttttctacttttaaaaacagaaaactgannnnnnaagtgttaccaaacgtcaccataaaaaatgtaagcagtttagtcatagtatttttaaatcggattataattaaattttattttaataaaaaatagtactattttataaaatacaggatttattttttcatttaataaaataaaaagtcaaattagtaacttttgtaaaatataagatccaaaatagtatttatttatttatttatttatttattttgataaaaactagcagttttttatttcaaaacattctcattaaattgtgtgtacttataacaccggccgcctcttaaagaaggaacaaaacaagcctttaattaagaacccttcaactaaactttatttttatgtttttggctagcccagccggcgctgaactttgtttcccatatgcaaatacgtacataggattaactttattttaacaatgattcgaaaaaacagatacttaaaggcatttttaatggggtcaacaaaaatagttgcctcagtccacctaacatattgttattgtatataggtcatgtccattaaagttggccttataaaatgtcaggttttgcatgggcaccatatgtttgttgcttcataacaattaaggctgatgttattagctggctgtattttcaaacgttaattaattagctctcaactccggaaaaaaattaatgatgatatgaaatattatttatggatattgaaaggaaaatttgattttatatac
